United States Patent Application Publication US 2005/0228172 A9 - sequence listing, part 101

SEQ ID NO: 464701 - DNA, 595 bp, Homo sapiens
gcttttattacttcagaatttcctgaagacatcatatactcctcattaataataggagaaggagctttcaggtcctgaacactgtgcaaaaaagtgaaaaatttactaaaatgcagtgcagatttaaatgccatctagaaaataggtacttaagaaaaaaatagttgctgtcaatatagaaataaatacctaggctttgccctagttggtggggattatttatatttccttgcatctargaacatttttttttttaatatttcctagcaacattcctggaactaatgtatagacctctctgtatgccatgatatattataacctactcatcctctaaatattattatcacgacatgggcacactttagctcagaaaagttagttgtcatttgaattagaaaaggcactacattaaatcatagtctgcccttatatattcatcattttcaggttttatcactcagagaagtgaggaaaaaatggcatttatttgcttaccattttcaacagctcttccaaaagaagggaaagaaagataaaaagtggacggactataaaataaaaacagacacagtctcacagaattctgcagaga

SEQ ID NO: 464702 - DNA, 595 bp, Homo sapiens
gcttttattacttcagaatttcctgaagacatcatatactcctcattaataataggagaaggagctttcaggtcctgaacactgtgcaaaaaagtgaaaaatttactaaaatgcagtgcagatttaaatgccatctagaaaataggtacttaagaaaaaaatagttgctgtcaatatagaaataaatacctaggctttgccctagttggtggggattatttatatttccttgcatctaggaacatttttttttttaatatttcctagcaacattcctggaactaatgtatagacctctctgtatgccatgatatattataacctactcatcctctaaatattattatcacgacatgggcacactttagctcagaaaagttagttgtcatttgaattagaaaaggcactacattaaatcatagtctgcccttatatattcatyattttcaggttttatcactcagagaagtgaggaaaaaatggcatttatttgcttaccattttcaacagctcttccaaaagaagggaaagaaagataaaaagtggacggactataaaataaaaacagacacagtctcacagaattctgcagaga

SEQ ID NO: 464703 - DNA, 579 bp, Homo sapiens
tggggtcttgctatgttgcccaggcaagagtgcaatggctattcacaggtgtgattccactactgatcagcacaggagttttgaattactccgtttttaaactgagctagttcacccctccttaggcaaccttgtggtctyccattcccgggaagtcactatattggtgatgaacttaatgcagacacctgatcagcacacagcactgcagcccaggagcaagctcaagcgatcctcctgcctcagcctccccaagtagctgggactacaggcatgaaccaccatgtctgccttaataatctttttatatttaggcttaaacaggctcttagaatctagcctggtaacctaaccatatagtctcaatggtttgggcaaaggcattttgaattcctaccaagagatgaacttttgaaaaactctctttctggacacataaacaactggataatgttctccccttttctcacttagtcccattgaccttgcaaaatggctcttggtcctgtggcttctgtcctgggaatatggaagaaattacaattagacataccatttgctgaattacgcttgaaaccc

SEQ ID NO: 464704 - DNA, 652 bp, Homo sapiens
tgttccaacatcatatattgaatagtctattattttcctcactgatttgagatagcaactctatcataaatccctatatgtatttgaacctatttctaaatttttgattctgttgtactgatctgtcaaataacagaatatttaaaactgtgtaaatcactgagctatcagccaaaacagaaatatatcctaaaggacagagaaatttgggaaatgaaaataatactaaactgaagccttctacaggaatactcgcytttcacaatttcagtgtgaatctgaggagcggggccaggaaaaaggtcagaaggatggtcctgtgtgatctgaaggctgggcacaaacatccagatgatactcgtggctttgctatgttctccatgaagccttgcccgtccagccatagatatctggcccagggttgaggctctgacccaacagagagccaatcaaaaacctttccaggaatttctgaacttgagaccagaaagagaatcaggcagttcttggtggaggtaatcataaaatgtaaacctcggaactaccatgagccaggttttttctgcaagaaataggcagcagagaaagaataaaacaatacagagaaaacacgcagagatgcatggcactcactattcagcaatcaaacagg

SEQ ID NO: 464705 - DNA, 571 bp, Homo sapiens
ttctttgaataagccttattgtctctttagcaaaggtggtgtgtgcaaccttatgttctgttgcttgtctgaaaatgagacctcaggcatgacttcctggtatctcccaggaatgagcaggttttaggatgtggacccaatagaaactcttctgagagccagataccaattgaggttcttagagacctctatgagaaggccaacttgactgaactgagcctactggcttgactttgtagaaacttccttctatagcggaggctagctgactttccagcttgttctggggcagtgcctcctagatcaaggcttctccaactttaatgttagaatgtagattctcattcagaaagcctggggcatggtccaggagagggtctgcatttctcccagggcccctggtgatgctgaygctcctagtccaaggactgcattttgagttgcaaggtcctacactagtaattctcaagtgtctgctaccaggaccaacagcaacagcatcaactggtaacttgttagaaatggaaattcttaggctccaccccagatctcctgaatcagaacccctgga

SEQ ID NO: 464706 - DNA, 668 bp, Homo sapiens
ctttcctggcctcccttcaggttctttgtgcagacggaacatttatcttataaaaactttgaagcaagaatatgtctctttcttgccccctcctcctgttttaagtgctgtggaccaagataattttcccttttttgtcttccataatatactgtttcctggcctcaaaatgggaaccactgatttgatcagtggtttgaaaagtgacctggtttctttccagtggctgtaattacttctacatgtcccgtgttcagtgcaattcggtgacttcatagcgtttccagggaggatggcagctgtcagtcccatggccatcttaaagggttgttgtagagcgaactctgacagccctttgagatggtcacgggttgttgcttctgtgatattgtgctctcccttaccaggcctaagacctgtaggccccaggctcctgttagaaagatttgaatgtttaacayaagaggcttttctgttctgataaacagcttgcccctgccctgatccccttgatctttcttgttacacacaggactgaacaacccatggaaatcatggaaatcacagcaggcaataaacaacaataccatcttgtgttcatataatgtttgcacatactgtataacagttgtaccaccttacttcatacacaatctcatttgagaaca

SEQ ID NO: 464707 - DNA, 668 bp, Homo sapiens
ctttcctggcctcccttcaggttctttgtgcagacggaacatttatcttataaaaactttgaagcaagaatatgtctctttcttgccccctcctcctgttttaagtgctgtggaccaagataattttcccttttttgtcttccataatatactgtttcctggcctcaaaatgggaaccactgatttgatcagtggtttgaaaagtgacctggtttctttccagtggctgtaattacttctacatgtcccgtgttcagtgcaattcggtgacttcatagcgtttccagggaggatggcagctgtcagtcccatggccatcttaaagggttgttgtagagcgaactctgacagccctttgagatggtcacgggttgttgcttctgtgatattgtgctctcccttaccaggcctaagacctgtaggccccaggctcctgttagaaagatttgaatgtttaacataagaggcttttctgttctgawaaacagcttgcccctgccctgatccccttgatctttcttgttacacacaggactgaacaacccatggaaatcatggaaatcacagcaggcaataaacaacaataccatcttgtgttcatataatgtttgcacatactgtataacagttgtaccaccttacttcatacacaatctcatttgagaaca

SEQ ID NO: 464708 - DNA, 668 bp, Homo sapiens
ctttcctggcctcccttcaggttctttgtgcagacggaacatttatcttataaaaactttgaagcaagaatatgtctctttcttgccccctcctcctgttttaagtgctgtggaccaagataattttcccttttttgtcttccataatatactgtttcctggcctcaaaatgggaaccactgatttgatcagtggtttgaaaagtgacctggtttctttccagtggctgtaattacttctacatgtcccgtgttcagtgcaattcggtgacttcatagcgtttccagggaggatggcagctgtcagtcccatggccatcttaaagggttgttgtagagcgaactctgacagccctttgagatggtcacgggttgttgcttctgtgatattgtgctctcccttaccaggcctaagacctgtaggccccaggctcctgttagaaagatttgaatgtttaacataagaggcttttctgttctgataaacagcttgcccctgccctgatccccttgatctttcttgttacacacaggactgaacaacccatggaaatcatggaaatcacagcaggcaataaacaacaataccatcttgtgttcatrtaatgtttgcacatactgtataacagttgtaccaccttacttcatacacaatctcatttgagaaca

SEQ ID NO: 464709 - DNA, 512 bp, Homo sapiens
cctgcaaatgttctgatctgctgtagaggccctgactcctaggtgattaaatgtgaaagaatttcaaaaatcaggctgtgaaatgagtctttttagttaggagagaaggaaagccctattgggtaattctaaaccttaagaactgaaggagagtcyccaaatttcagcgccagcatcctatttaatgtagatctcctctgctgctttcttcagacataatcccaaatttccccctaaaagcaccgagttagttactaagtattttggtagccattgcctcccaaggggacaaggctcttctatgtcctcttggagctctctgaattgtcccttctaccctaagtcaccagagtcagaagaccctcgaaaatttttgaactaaaacacaaaacggaaaacaataagaacaaagggtattttctcctctttctttatttacttgttttaattggtatttatatttacctatgtgaaaccgtattgctctgaccttgtcacatggcatggattca

SEQ ID NO: 464710 - DNA, 634 bp, Homo sapiens
taaaagcccaatagatggcttttatataatgggatgtgtagtctcgaggatcactgggatagaaagatcrgtgaagacaggagacatccatgctcagtgaaacctaagcacattggtcagcgagaatgaaggacccctgaagccttgccctccaactcaccttccaactgagaaacagcagatatatttcataagacccagcccattcccccaagtcatctctaattctagctttctgtaggtacctgaacatgaattctacatgccttcagcttttaatgttttcccccaagactgctaatagattagttatgactatggcaaaaatctatacctcccagctaaattaacccctcattatgcaggtctctgagtacaaggtcaaaaacaggatcactaattccattgaaattaaaatgctaatcgagttacagttctgcagttagcatagaaagatagtagaaggctaaacaaccttccttaggctgtgagacaaccaaggaactctactatgtggatttccgctcatgtaaatgacagcttgctaattaaaagacccattctcctggccttccagatgctagtcttagaaaaagtcatgggggccgggtgcggtggctcacgcctgcaatcc

SEQ ID NO: 464711 - DNA, 634 bp, Homo sapiens
taaaagcccaatagatggcttttatataatgggatgtgtagtctcgaggatcactgggatagaaagatcggtgaagacaggagacatccatgctcagtgaaacctaagcacattggtcagcgagaatgaaggacccctgaagccttgccctccaactcaccttccaactgagaaacagcagatatatttcataagacccagcccattcccccaagtcatctctaattctagctttctgtaggtacctgaacatgaattctacatgccttcagcttttaatgttttcccccaagactgctaatagattagttatgactatggcaaaaatctatacctcccagctaaattaacccctcattatgcaggtctctgagtacaaggtcaaaaacaggatcactaattccattgaaattaaaatgctaatygagttacagttctgcagttagcatagaaagatagtagaaggctaaacaaccttccttaggctgtgagacaaccaaggaactctactatgtggatttccgctcatgtaaatgacagcttgctaattaaaagacccattctcctggccttccagatgctagtcttagaaaaagtcatgggggccgggtgcggtggctcacgcctgcaatcc

SEQ ID NO: 464712 - DNA, 630 bp, Homo sapiens
gatatgactgtgtgcccttgagcacgtttcatggcatggaaatgaagagaccactcccttcaaggcagtgagtcatagctccgttggggtccatgttgctcctaagaatcctttcaaagctgggcatggtggctcatgcctgtaatcccaacaatttgggagggtgaggcaagagatgtactcgagcccaggaatttaagaccagcttgggcatattagtgagwccccatttctccaagaactaaaaaattagccagacatggtggcacccccctgtagtcgtagctactcaagacactgagtgggaggattgcttgagcccaggaagttgaggctgcagtgagctatgattgtgccactgcactccagcctgggtagcagagcgagaccctggctaaaataaaataaaacaaaaaaaaacttacttgtgttgggtgccttttgtgctgtccactcaggtgacatccaccctggcctcctcttccttggcagtcctaaccatagcactcagcactttagcctgtaagggatgttagtggagtgtccacagctaaaccagaacctacttgggagtggagactgtgagctgtcccttttgtctctcatagctcctataattccagtgactgg

SEQ ID NO: 464713 - DNA, 582 bp, Homo sapiens
aacacttttgccacaacaaaatctttggctstcagtgtgctttgttgttttggttaaagtacttcataaagtatagcaatgcaagcatttgaatatgcacagaacccctctggagtcatccacagggaattggtagaggaggtggtctctgtgtaactgcccagcgggttcttcctgcctactgcacagacaaaaccaattcactgagaccacaggattgtaatgaagaaagagtttagtagacacgaggctggccatgccatgtgggagacagagttgttactcaagttgatctcccagaagattcagaggctaggatttttcaaggatagttcgttgggccagggagtctgcttctggatgagatcaagactggtgggcaggggcctgtgggtccgggtggagctattgccaaaatgcaaaaacctgaaaagacatctcaaaaggccagtcttaggttccacagtagagacgttacctgcaggggtaattggggaagttgcaaatcttgtgatcgccagaataatggtggtaatcatttacatctataccttagcagaattcaggttcttcacatcctcc

SEQ ID NO: 464714 - DNA, 628 bp, Homo sapiens
taggcaggcctgccttaaaaccctgtggcaatttattattacatattacctagttccttaaattgattcacactgcctgccttgcccaagtgacacattaaaggttattgaatgattcaatgaatgaatggtaatggtaatggaatgaataaatgaacgaatgaatgaatacctgaattataacagtgaaagtctggctggatcgggagtttacaaacttgagacactgggaagtgagaagagaataaacaactggatgggaaaaattagccctggcctaggagccagaattccagggttctagcccctctcaaacatttccttactgtgtcaacttgagtaagtcatttaatttctttaatgctcatttttcttgtgtaaattaaatgaaacataaaatatatatgtgtrtgtgaacgtgctttgtaaactgacatcaaattttatatcactatcatcattttatgtcactatcatcattcttcacatgactgtcaagaagtaagtggaaaattctacaatccaaataaaaggtaacccaagtaactcaactgtttaactaccttgattttattcaagctttgtagacatttacaaattaagtcaaaggtacaggcaattggtgttt

SEQ ID NO: 464715 - DNA, 628 bp, Homo sapiens
taggcaggcctgccttaaaaccctgtggcaatttattattacatattacctagttccttaaattgattcacactgcctgccttgcccaagtgacacattaaaggttattgaatgattcaatgaatgaatggtaatggtaatggaatgaataaatgaacgaatgaatgaatacctgaattataacagtgaaagtctggctggatcgggagtttacaaacttgagacactgggaagtgagaagagaataaacaactggatgggaaaaattagccctggcctaggagccagaattccagggttctagcccctctcaaacatttccttactgtgtcaacttgagtaagtcatttaatttctttaatgctcatttttcttgtgtaaattaaatgaaacataaaatatatatgtgtgtgtgaacgtgctttgtaaactgacatcaaattttatatcactatcatcattttatgtcactatcatcattcttcacatgactgtcragaagtaagtggaaaattctacaatccaaataaaaggtaacccaagtaactcaactgtttaactaccttgattttattcaagctttgtagacatttacaaattaagtcaaaggtacaggcaattggtgttt

SEQ ID NO: 464716 - DNA, 563 bp, Homo sapiens
ttatattgcttatttttgatattaagagttctcaggtaggttctctcaacttgcaaacaagctgtagtcattttttagccctagccatacttcatatttagccttatgaaattttatctttttagttttgacccatggttcccctctcttgtgatctctttttaatacttatctattatttaaaatataattgwgcctccaagagttttcctctgaaaatatagcaagatctttcatgtgtttattaagtgaactaataaaaatattggccaaatacaaagccattggaaatcctcctctagtctgagacatactttttgacacaatagcatcgtttacattcagtatcatttagggttaagttcagctgcatgtaacagaaaataaataaataaataagataagagtttagttctttctcacttaaagtaaacctgcaaaccagcagtacacagctagtatagcaactgtgacaggtactaaggacccaagggtttactttctttcggcttcataacatgatcttaagaccacccaatgggttaagatagctgctggagctc

SEQ ID NO: 464717 - DNA, 519 bp, Homo sapiens
tcaatctctctgaaaatttaggggccaggatttttcaaaggtagtttgggctaaggggtggggatgkctaggcaatgggtgcttgctctgattgtttgggggtgcaatcacaggggtgtgggaaatggtcctcctatgcactcagtcattctggtggggccacaggagtggttagtgggtccaggtggagccaacgattgtcagacctgcaaaaaacctgaaaagatatcttaaagggccaatcttaggttctacaatagtgatgttatctgcaggagtaatatgggaagttgcatagcctgtgacctccagaataatggctggcattcattcatgtctacaccttagcagaattcaggctcctctatcctcctacactggtggtctctcattagctttacaaaggcagttgaatttgggggaagggctattatcatttaaactgtaaactaaatgtcccccaaagttagtttggtctaagcccaggaataactaagggcagcttgaaggcaaaaggca

SEQ ID NO: 464718 - DNA, 611 bp, Homo sapiens
accttgtgcccgttagattttatttcccttttcccgcatccctccagccctaagcaaccacaagtctactttccatctctatgtatggatttgcctattctgaacatttaatataaattaaatcatccaatatgtggccttgtgtgccgaacttttttcatttagcatgtttaaggctcacattgtgcaacatgtatatctgtactcgttcctttttatagtcgcatattctactgtatggacataccacattgtatttatctgtttttcggttgatggacatttgtggtgttctcacttttgggctattatgaataatatgctaccataaagatatgtgtacaaattttatttttaaacttaaaaaatttattctaaactttctstgctccatatgaatctgcaggaatgtgtaagagtttctatgtggacataagttttcatttctctgagtgaaattgctggatcaaatggtaactcattatctttttgaggaactgccagactattgtttgtggctgtactattttacattcccatcagcagtgtccaagggttctaatttctccacgttctcaccaagactcatctgacattttgattatagccat

SEQ ID NO: 464719 - DNA, 626 bp, Homo sapiens
gacaataaaggatatcttcttgaactttaaaaaaggaaagtcaatcagaataggagctagaaagtatagccaaactatacattctcagaaactagggtctaataacatcagkgtagggtacccagaactacttcttgcagaatcttttgaagtccagagtccaagctatatcccaagagaaaatgatggcatgtctcagcttcatattttctttttacatgactgaaatactgtaaacactggtctcatttggggaaaaatctttctgtttatctcaatcctcatcacacagaagttctatcaacaagtataggtgggctctggcaatatttcttatcttgaaaaaatacagaaccatccattttggaagcttattcttaactctcctatgcattctcagcttgagtttattttaattttttaccatgtactagatttttttatgtttaaaatatatgaaatgtagctgtaagcagagttacaaatcctaagtgaattgaattaccattattttaagaaactttaagttgctagtccattactctgattttctagataagacaagtataggaaaattatttgcttagattacagaagtaattggcaacaggttctagactctcatt

SEQ ID NO: 464720 - DNA, 634 bp, Homo sapiens
ctcatgtaactcagggaagcactttgtgtttattggtgcattataaaggatattacaaataatacagataaacagctagatggaagagatgcagaggtcaaggtatgcaggaaaaggcaggaagcttctacggcctcttggggcatgccaccctccatgtcagcaacctggaagctccccaaactccatgcttcaggaaagtttatgaaggcttcattacataggcatgattgattattaattcagtcttcagcctctctcctcttctgggaggatgaaaggtgaggctaaaagttccagacttttaatcatggcttagtctttctggtgaccagctcccattcaggaggccaccaagagtcaccttattagaactcctatcatctaggacattccagaggattcaggagctctgtgtcaggtgctgctgtcactcaggaaattacaaaggtcttgggagctctgcgttaggaaccaggtcaaagaacaaatattagaacaaaagattctcctagcacccagaaaattccaaagkgttacaagttctgtgtcaggaaccaggtcaaagacaaaatattagaacaaagatgaacctagctccctgattactcgggaaattacaaggatttttgga

SEQ ID NO: 464721 - DNA, 348 bp, Homo sapiens
tgagctatgggaccaagctggggttctctgcctagtgacaagcaaggggggtggctgagacccatgagagacagactggcatctttttaggttaacttcagcttgttggagatattggtaagacattgaggttctttgttactttgttagtctgagggtagcaggtgtagtaccactgcagaggcagtggcagggaggctttctgttgcccctggggctccacctttgagaaacccaaagttgctgttactgaaagtgctcasccagtggggtggcatggctgcactgctggcatgagcttgggactccacttgttgaggagcagggggtcaagggctcaccaggagg

SEQ ID NO: 464722 - DNA, 584 bp, Homo sapiens
tgatttttatatgtagattctgtatcctgcaactttactgaatatatttataagttataatagttttttggtgggatatttaggtttttccaaatatgagatcatatcatctgaaaacaaggataatttgaattcttactttacagtttggatgccctttatttctttctcttstctgattgctctagctaggaccatcaatactatgttgaataacagtggtgaaagtgggcatccttgtcttgttccagatcttagaggaaatgctttcagtttttccccattcagtatgatactagctgtggatctatcatatgtggcttttattatgttgaggtacattccttctatacccggttttttggggatttttgtcatgaaggctgcggccgccacagctgggaatttgctgggtcatgcctgaagccagtacaatactagatcttgcctaaggcccttggtgactgccctctagctaccactgatgtttattcaaggcccaaaggctctttagtcagcagatggtgaattctgctaggactagtttctttccttcagggcagtgggttcccttctggcccacg

SEQ ID NO: 464723 - DNA, 621 bp, Homo sapiens
ttatatagaaaagcaaaagaactagaatagtgttttaaattttgagaagaawgaataaagtgggaagaatcagtctacctgatttactgtatagccacagctatcaagactgtgttgtatttgcaaagggatagacacatagatcaatgaaatataatcaagaacccaggaataaatccacacaaatatgtcccactgatttttgacaaaggtgccacagcaattcaagagaaaaaaggtagcctttttcaacaaagagtgctggagcaattggatattcactggaaaaaaagaaaaacaaacaaacaaaaaacctcaacctaattctcacatcttatatgaaaattaactcaaaatggatcatggatttatacgtaaaacataaaactttaacccttttagaaaagaaaacagaggccaggcacagtggctcaccctgcaccacaaaaaatacaaaaaaattagccgggcatggtggcgcatgcctgtagtcccaactactcaggaagctgaggcagaagaattgcttgaacccaggaggagaaggttgtagcaaactgagatcgtgacactgcactccagcctgggcaacagagtgagactccatctcaaaaaaaaaaa

SEQ ID NO: 464724 - DNA, 621 bp, Homo sapiens
ttatatagaaaagcaaaagaactagaatagtgttttaaattttgagaagaaagaataaagtgggaagaatcagtctacctgatttactgtatagccacagctatcaagactgtgttgtatttgcaaagggatagacacatagatcaatgaaatataatcaagaacccaggaataaatccacacaaatatgtcccactgatttttgacaaaggtgccacagcaattcaagagaaaaaaggtagcctttttcaacaaagagtgctggagcaattggatattcactggaaaaaaagaaaaacaaacaaacaaaaaacctcaacctaattctcacatcttatatgaaaattaactcaaaatggatcatggatttatacgtaaaacataaaactttaacccttttagaaaagaaaacagaggccaggcacagtggctcaccctgcaccacaaaaaatacaaaaaaattagccgggcatggtggcgcatgcctgtagtcccaacyactcaggaagctgaggcagaagaattgcttgaacccaggaggagaaggttgtagcaaactgagatcgtgacactgcactccagcctgggcaacagagtgagactccatctcaaaaaaaaaaa

SEQ ID NO: 464725 - DNA, 609 bp, Homo sapiens
tgaccacctagataaatgttcagagaattatgctgagaaaaaaaaaaagccaatttcaaaagattacatgctatttgattccatttacatgacattcttgaaatgacacaattacagaaatggagagaaaattaatggttgctaggagttaagaagggagtggtgggcaggagggaagtgggtgtggctataaagggctacacgaggaatcctcatggtaaaggaaatattctgcaccttgattgcatctatgtcactacgctggttctgatattgtactatagttttacaagatgttagcattaggggaaactaaatgtgtataagaaatctctattatttcttgtaactgtaagtaaayttataatttctcaaaattttaaaattaatttaaaaatcaatatacaaaagttaagtgtggaaaatattgggtatttcacaagtcctttagaggcacctacaaagaatattttacagtatattcttgaacatgagggatgcattttcctccagttgcaccatcagatctagttttcttgtggcccattcatttcagactgtattctggtgtccaggaagacctgcaacacctccagcaaggatttaaaa

SEQ ID NO: 464726 - DNA, 609 bp, Homo sapiens
tgaccacctagataaatgttcagagaattatgctgagaaaaaaaaaaagccaatttcaaaagattacatgctatttgattccatttacatgacattcttgaaatgacacaattacagaaatggagagaaaattaatggttgctaggagttaagaagggagtggtgggcaggagggaagtgggtgtggctataaagggctacacgaggaatcctcatggtaaaggaaatattctgcaccttgattgcatctatgtcactacgctggttctgatattgtactatagttttacaagatgttagcattaggggaaactaaatgtgtataagaaatctctattatttcttgtaactgtaagtaaatttataatttctcaaaattttaaaattaatttaaaaatcaatatacaaaagttargtgtggaaaatattgggtatttcacaagtcctttagaggcacctacaaagaatattttacagtatattcttgaacatgagggatgcattttcctccagttgcaccatcagatctagttttcttgtggcccattcatttcagactgtattctggtgtccaggaagacctgcaacacctccagcaaggatttaaaa

SEQ ID NO: 464727 - DNA, 563 bp, Homo sapiens
ggagtaagtggaaactctatggactgtgatgcagatctgatacctgtgaaaggagaaagggaaggaaggattgsgtaagaagagcctgagactgcagcacaactctgagaacatttcagctgtgctgataaggagtccccaagcagactgctcattagaagagtcctgcattgcaaaagaatgagacacactcagtcattggctggggattacaaatccttgtaacaaattgccttgttaacgaatgtcatagtgatgaaccaaaagagcaaagagctagagactgtcaattaactatgctcgctgcagcagggtatctcaaagaagatctaagtggcatgagcacagaggcatgagagtatggatatgaggatatggtgttgagaattgttcacgatggcaaaacaactagaaacaaattaaatacccaaattaggggaaaggttgagtaaattaagtcctatccacgccaaggattaatatgtagttcatcaaaaagagtgaagtacgccttactcttgatctagaggagtttccacacattaatgctaagaaagctagtg

SEQ ID NO: 464728 - DNA, 563 bp, Homo sapiens
ggagtaagtggaaactctatggactgtgatgcagatctgatacctgtgaaaggagaaagggaaggaaggattgcgtaagaagagcctgagactgcagcacaactctgagaacatttcagctgtgctgataaggagtccccaagcagactgctcattagaagagtcctgcattgcaaaagaatgagacacactcagtcattggctggggattacaaatccttgtaacaaattgccttgttaacgaatgtcatagtgatgaaccaaaagagcmaagagctagagactgtcaattaactatgctcgctgcagcagggtatctcaaagaagatctaagtggcatgagcacagaggcatgagagtatggatatgaggatatggtgttgagaattgttcacgatggcaaaacaactagaaacaaattaaatacccaaattaggggaaaggttgagtaaattaagtcctatccacgccaaggattaatatgtagttcatcaaaaagagtgaagtacgccttactcttgatctagaggagtttccacacattaatgctaagaaagctagtg

SEQ ID NO: 464729 - DNA, 563 bp, Homo sapiens
ggagtaagtggaaactctatggactgtgatgcagatctgatacctgtgaaaggagaaagggaaggaaggattgcgtaagaagagcctgagactgcagcacaactctgagaacatttcagctgtgctgataaggagtccccaagcagactgctcattagaagagtcctgcattgcaaaagaatgagacacactcagtcattggctggggattacaaatccttgtaacaaattgccttgttaacgaatgtcatagtgatgaaccaaaagagcaaagagctagagactgtcaattaactatgctcgctgcagcagggtmtctcaaagaagatctaagtggcatgagcacagaggcatgagagtatggatatgaggatatggtgttgagaattgttcacgatggcaaaacaactagaaacaaattaaatacccaaattaggggaaaggttgagtaaattaagtcctatccacgccaaggattaatatgtagttcatcaaaaagagtgaagtacgccttactcttgatctagaggagtttccacacattaatgctaagaaagctagtg

SEQ ID NO: 464730 - DNA, 484 bp, Homo sapiens
gctgcatcccaattaattgtcaacatttacaatcacctggccccactaggcttccttcccccaccacagagctctcacccactgactcagcaagagcagttaagaacatgcataggtcacaggatgaccacagttatgtccacttccacagtaaatgtgacagttcacatgtccaccaaaggtaaaggaaaaaaatagacaaaacaaccttgctatcaaaagtctacacaatggcagtctcattcaactagaagaaggaacaaaatgaaaggtgaggaawcaatgttagaaccagccctcccatgaggaacagttttgatagaaaatgaatgaaagcaagtaaacagacttcggaagccctgaaagacagtgaaacagccaaagaaaagaccaagttcaggaaactctgttgggaagatgattaaaatgtcaaaagacagaattgaagaaaggtatgtcaaaggcagtaaggaagcccaaagat

SEQ ID NO: 464731 - DNA, 484 bp, Homo sapiens
gctgcatcccaattaattgtcaacatttacaatcacctggccccactaggcttccttcccccaccacagagctctcacccactgactcagcaagagcagttaagaacatgcataggtcacaggatgaccacagttatgtccacttccacagtaaatgtgacagttcacatgtccaccaaaggtaaaggaaaaaaatagacaaaacaaccttgctatcaaaagtctacacaatggcagtctcattcaactagaagaaggaacaaaatgaaaggtgaggaatcaatgttagaaccagccctcccatgaggaacagttttgatagaaaaygaatgaaagcaagtaaacagacttcggaagccctgaaagacagtgaaacagccaaagaaaagaccaagttcaggaaactctgttgggaagatgattaaaatgtcaaaagacagaattgaagaaaggtatgtcaaaggcagtaaggaagcccaaagat

SEQ ID NO: 464732 - DNA, 567 bp, Homo sapiens
gaaaaaaatcttaagacctctgggattaaagcatcaggtagcctataaaggaaaaactatgagattaacagctgatttctcagcagaaaccttacaagccagaagggatttgggtcctatctttagcctccttaaacaaaataattgttagccaagaattttgtatccagcaaaactaagcttcagaaatgaaggagagataaagtctttttcagacaaacaaatgctgagagaatttgccactaccaaaccagaactatatgaaatgttaaatagagttctaaattctgaagcaaaacctcgaaatataccaaaaatagracatccttaaagcataaatctcacagggcctacataacaataacacaatgaaaaaaaaagtatttgggctacaactaacatgatgaatagaacagtacctcacctctcattactaacattgaatgtaaatggtctaaatgccccagttaaagatacagattggaagaatgggtaaaaattagccaaccaagtaactgatgtcttcaagagatttacctaacacataaggactcacataaacgtaag

SEQ ID NO: 464733 - DNA, 567 bp, Homo sapiens
gaaaaaaatcttaagacctctgggattaaagcatcaggtagcctataaaggaaaaactatgagattaacagctgatttctcagcagaaaccttacaagccagaagggatttgggtcctatctttagcctccttaaacaaaataattgttagccaagaattttgtatccagcaaaactaagcttcagaaatgaaggagagataaagtctttttcagacaaacaaatgctgagagaatttgccactaccaaaccagaactatatgaaatgttaaatagagttctaaattctgaagcaaaacctcgaaatataccaaaaataggacatccttaaagcataaatctcacagggcctacataacaataacacaatgaaaaaaaaagtatttgggctacaactaayatgatgaatagaacagtacctcacctctcattactaacattgaatgtaaatggtctaaatgccccagttaaagatacagattggaagaatgggtaaaaattagccaaccaagtaactgatgtcttcaagagatttacctaacacataaggactcacataaacgtaag

SEQ ID NO: 464734 - DNA, 581 bp, Homo sapiens
agccaaaaccttggagtgtgtagaaaacacacgagtggaaaaaccagctcagcttggttttctgatcctagctctgccacagctggtgtgacctttggtaaaacagtaaactagtctctgggtgctcagggttttacatctgtaagttggtaaaatccctgtctccctgtctcaggggggcaaataagaacttgggatggtcaaatgctatgaactctttagcagataaaatatatgttttcccttaaaatataaccattgtgggtaatcaaaattctgaaaagctgtgatatgaatggcaaattcagtagcatcagtaacacaawtagcacaaagagttctcttgctacaatataatacagaaggacgtagactttgggttttagtcataaaatgttcaaaatggctttatggccatgtatctgagataaaacaaaaattttattttattttacaaatttccatatgcaacactgaaaaacaaaaattttataaataaaatataccagactttcagattgttggtgagtgttagtttttctctttggcttacttttcagttatttccttactcaatattt

SEQ ID NO: 464735 - DNA, 581 bp, Homo sapiens
agccaaaaccttggagtgtgtagaaaacacacgagtggaaaaaccagctcagcttggttttctgatcctagctctgccacagctggtgtgacctttggtaaaacagtaaactagtctctgggtgctcagggttttacatctgtaagttggtaaaatccctgtctccctgtctcaggggggcaaataagaacttgggatggtcaaatgctatgaactctttagcagataaaatatatgttttcccttaaaatataaccattgtgggtaatcaaaattctgaaaagctgtgatatgaatggcaaattcagtagcatcagtaacacaatyagcacaaagagttctcttgctacaatataatacagaaggacgtagactttgggttttagtcataaaatgttcaaaatggctttatggccatgtatctgagataaaacaaaaattttattttattttacaaatttccatatgcaacactgaaaaacaaaaattttataaataaaatataccagactttcagattgttggtgagtgttagtttttctctttggcttacttttcagttatttccttactcaatattt

SEQ ID NO: 464736 - DNA, 482 bp, Homo sapiens
ccagttttcaattttccatgttgctgctcctctctctagcatgaaaaattgcaagttgactctaagacacatccaacactgctgcatatcattatggtctcttcccttttgtttttagcctattgtcttgcctgtccaatgggcattgtaaaacctatgtctgagaaccacaccaactctcaagctctgtgagatgctgggaacctggtatctagatgacacgaagtgtgcgttgcaaaattaactcattttccacatataatccatggttgttataattccagccctatagagcagtgagtaaaatatttcttttcaaaacaagactttgatttctagaaaatactctttattttaaatgtgcaggcmcttttctaggagtaaatcggaagtggcctttacctcaaataaggggagtagactcttttcatccatcttaatctgcagtaagtatcattgtccatcatgccatcgctgtctgc

SEQ ID NO: 464737 - DNA, 635 bp, Homo sapiens
tgtctcttttggcatcactttccttttgacataaggttcacagtgctttcaaagaataaataatataagatttctaaatcttaagtaatcacaactttattcaaacttacaacctatgttaccatatttgtaatagtttcatgaactattcaactttgtttaatactaggattttcctttctacatttgctcatccaaaaggaccttatttgctccattcctcaaacaaggtggcctggggaagagacatggggagggccatatggcagtgggcacaaagtgtgaagacttttgtgtcacatgttaacacacactagagatcatccaccacagaagcggcaggaaatagcctaggaggtgaacagatccagctagctagctgccattaaccagactttttcatcggccaccccagaatggcatgaatggagaggtcacagtggtcaaactgatagaaagatgtgcacccaagagcatagacttctayttaccaaagccaatctggctattgctgcctctgaatgtctaacctgctaggaagagagaccaatattgagcccccaatatggtttattcctcagagaccaactgaccactgggtggcaagttgctaccggggaccccttctatcctgg

SEQ ID NO: 464738 - DNA, 609 bp, Homo sapiens
ctatctttagcttccttaaacaaagtaactgtcagccaagaattttgtatccagcaaaactaagcttcataaatgaaaaagagacaaagtctttttcagacaaaaaaaggctgaatgaattgtcattaccaaactagaactacaagaaaagctaaaaaggagtyctaaatcttgaagcaaaagttcaatatgcactaaaataaagcctccttaaagcataaatctcacagggcctataaaacaataatacaattttttgaaaaatctaggtaacaactaatatgatgaatgaatggtactccacatctcaacattaacattgcatgttaatggcctaaaagttccacttacaagatacagaatggcagaatgcataaaagccaccaaccaaatatctgctgtcttcaagagactgccctaatacgtaaggactcacataaatttaaggcaaaagagtgaaaagtatactccaagcaaatggaaaccaaaagtgaataggagtaactattcttatatcagacaaaactgactttaaagcaataagagttaaaaaacaaaaagacaaagtaggacattatataatgataaaagaattagtccaacgagaag

SEQ ID NO: 464739 - DNA, 615 bp, Homo sapiens
gctgggctgcagaatgaagaaaaccagctgccttaggcacagattttgctaaacatgctggagaaaaccaacatttttagtgagaagcttggcatatggcatgatagcctcttgggcatcaccagtatcttcagccccagggactcagtgggctggaaggagattaatgccatgtggaggcagacaactytggtgctcagatcctgtccaataatatgggactgacatttcaggggcattgacttgttccctgtggaaatcattcctatttttgaagtctttgacagggaactgcccctgaaccactctggagactcaaaacttttcttcgatatacattttagtgtataatggaggttttcctggatgagtctgagaaagatgaacttggtcattgtctaccctacacaaccaatgaggacagaggaatgactgataagcaaagaagaagagatgggtcctatttcaaaagaaccctgttaagatcatttgttgcttttaattgcttcttatatccctgatcttttattggaatcattctcattgttcccaaaaaacaccttttagcattttatttagtgcagatctgctgatgacaagtattttgtttttgtt

SEQ ID NO: 464740 - DNA, 615 bp, Homo sapiens
gctgggctgcagaatgaagaaaaccagctgccttaggcacagattttgctaaacatgctggagaaaaccaacatttttagtgagaagcttggcatatggcatgatagcctcttgggcatcaccagtatcttcagccccagggactcagtgggctggaaggagattaatgccatgtggaggcagacaactttggtgctcagatcctgtccaataatatgggactgacatttcaggggcattgacttgttccctgtggaaatcattcctatttttgaagtctttgacagggaactgcccctgaaccactctggagactcaaaacttttcttcgatatacattttagtgtataatggaggttttcctggatgagtctgagaaagatgarcttggtcattgtctaccctacacaaccaatgaggacagaggaatgactgataagcaaagaagaagagatgggtcctatttcaaaagaaccctgttaagatcatttgttgcttttaattgcttcttatatccctgatcttttattggaatcattctcattgttcccaaaaaacaccttttagcattttatttagtgcagatctgctgatgacaagtattttgtttttgtt

SEQ ID NO: 464741 - DNA, 537 bp, Homo sapiens
gaccatcttggtgtggttcaataattccaagaccctactctgtttcactgaattgaagtaggggtagggagratggttgctggcccccatattgccattgaggtgtttagagtcctggtgcccatggtccctcaggtcccactttttgctgtgtggtgtcatttttagggcatagaaatccttccctggcctgtctatggtcccgccttcccaggcatacaatgcagttgacctctgggatatgaccatctgaccatatctttggttcttgggaatcctgctctctttttttttactccttccaaccttgaggaatcctctcctggtcttagagaagtccatcttccttcatatgtatgcttgctcagtcctctccttttaggcttttgggtactaaagctgggttttctactggagagctcatttctgccctcccctgaggtactgaccatggacctaaatggggaggggacagtgggaagaggcagatacagaaaatacttttttgaatagaaggataacacctcaaagtatcat

SEQ ID NO: 464742 - DNA, 576 bp, Homo sapiens
tactactaaaccagttatgagaaatctgctcccaagatccaatcacctctcaccaggccccacctccaatactgggactacagttcaacttgagatttgggtggggacagcatccaaactatatcactatctttaacactctcccttgccattccagatatcttcctaaaatacttccgcttcctacaatgaaatccctgctcaccatgccaggacctaagacgctgcaaaatctggccacactctacctgtgtcctagccacacatcttagccttctctatcattctttctctttcctgaaaagcaattcctgagtacccaaccagaaagaacctttgtcyctcacacctggctgcattgatttctagatttcctgattgccaataacatattgaaatacaaactgctctctaattgtcttcttttttaaatggatggcttattttaattaatgagtaacttgtggatttggtgggcaaaaaccatggaatgttcccagtcaagggaagggtgacacagggagcaggccaccatgtctacaagggctgaggtggaggtggcataaagagagacag

SEQ ID NO: 464743 - DNA, 576 bp, Homo sapiens
tactactaaaccagttatgagaaatctgctcccaagatccaatcacctctcaccaggccccacctccaatactgggactacagttcaacttgagatttgggtggggacagcatccaaactatatcactatctttaacactctcccttgccattccagatatcttcctaaaatacttccgcttcctacaatgaaatccctgctcaccatgccaggacctaagacgctgcaaaatctggccacactctacctgtgtcctagccacacatcttagccttctctatcattctttctctttcctgaaaagcaattcctgagtacccaaccagaaagaacctttgtctctcacacctggctgcattgatttctagatttsctgattgccaataacatattgaaatacaaactgctctctaattgtcttcttttttaaatggatggcttattttaattaatgagtaacttgtggatttggtgggcaaaaaccatggaatgttcccagtcaagggaagggtgacacagggagcaggccaccatgtctacaagggctgaggtggaggtggcataaagagagacag

SEQ ID NO: 464744 - DNA, 563 bp, Homo sapiens
tgcctagtcagtctcaatgtgagaacctggatatttcagttgaaggtgctgaattcactcatcccttttcattcccctctgtgagtgctgcagaccacacctgcttttgatcagtcatcttgtttgttccaaaaatatctttaaattagatcaggccaagtgtggtggctcacacttgtaatcacagcaatttgagaggccaaggcaggcagatcacttgaggccaggagtttgagaccagcctgagaaacatgatgaaaccttcctataaaaaatasaaaaattagccgggcatggtggtacatgcctatagtctcagctactcaggaggctgaggattacttgagcctgggaggttgaggatgcagtgagccgagatcatgacactgcactgcagcttgggtgacaaagcgagtttctgtctcaaaagaaattaaatcaaattaaattggaacttttagcatcttttgcttcctctttaatcaccaaaattcctctctctaaggaataagacataaaaattgctgctctaactttgtctagggggagaaaagggccaagaa

SEQ ID NO: 464745 - DNA, 563 bp, Homo sapiens
tgcctagtcagtctcaatgtgagaacctggatatttcagttgaaggtgctgaattcactcatcccttttcattcccctctgtgagtgctgcagaccacacctgcttttgatcagtcatcttgtttgttccaaaaatatctttaaattagatcaggccaagtgtggtggctcacacttgtaatcacagcaatttgagaggccaaggcaggcagatcacttgaggccaggagtttgagaccagcctgagaaacatgatgaaaccttcctataaaaaatacaaaaattagccgggcatggtggtacatgcctatagtctcagctactcaggaggctgaggattacttgagcctgggaggttgaggatgcagtgagccragatcatgacactgcactgcagcttgggtgacaaagcgagtttctgtctcaaaagaaattaaatcaaattaaattggaacttttagcatcttttgcttcctctttaatcaccaaaattcctctctctaaggaataagacataaaaattgctgctctaactttgtctagggggagaaaagggccaagaa

SEQ ID NO: 464746 - DNA, 563 bp, Homo sapiens
tgcctagtcagtctcaatgtgagaacctggatatttcagttgaaggtgctgaattcactcatcccttttcattcccctctgtgagtgctgcagaccacacctgcttttgatcagtcatcttgtttgttccaaaaatatctttaaattagatcaggccaagtgtggtggctcacacttgtaatcacagcaatttgagaggccaaggcaggcagatcacttgaggccaggagtttgagaccagcctgagaaacatgatgaaaccttcctataaaaaatacaaaaattagccgggcatggtggtacatgcctatagtctcagctactcaggaggctgaggattacttgagcctgggaggttgaggatgcagtgagccgagatcatgmcactgcactgcagcttgggtgacaaagcgagtttctgtctcaaaagaaattaaatcaaattaaattggaacttttagcatcttttgcttcctctttaatcaccaaaattcctctctctaaggaataagacataaaaattgctgctctaactttgtctagggggagaaaagggccaagaa

SEQ ID NO: 464747 - DNA, 532 bp, Homo sapiens
tgatttttatgtgtattctgcataggtactttattttcacatttttaagctttacattaaaataagtccatagtgccatgaaataaaacattgataaattttacacatacagaaataatatatccayattatgtagcaaaataataataagcaaagtcaaaagacaaataaattgagaaaagtatctgccacttatgtaacatacaaagctaatcttgctaacatacaaagagttcccacaaactgagaagggaaaaaaaatcaatctaatggaaaaataggcaacaaatctgaacagattgttcacaaaaaaggaaatgcaaatagccgttaacatgaaaagatgagcaacctaaattgatacatcaatttttatttaagatattggcaaaaatataaatgtttagtaatataccctgcatggtgagaggtggggaaacagtcactcatccatcagaggtagacggacatgcaaatttgtgcagtccccatgaagagtaataattttctggacatgccatcccaaaatatg

SEQ ID NO: 464748 - DNA, 540 bp, Homo sapiens
tttcttgcaagtcccacttatcacaatacattgtcatatgaaagattaagatccaaagctggggaaattgactagctattgtactttctaatagttgctggtcaaaattttcaagtagtttagataaatccaaatcttgcaagtgaatttattctccatcataattcttgaacctaagtgtgttttatcgctcatcttcacttcctttccacccagcagccacctttgttttcatcttgtggattaagtctatgtcagatgaaattctaagcatcctgagaatttcaaccctmtcatagtcaatttcaccaagaagctggaaatgtacaatagtgccttatgcacattatcaccacctcatcccctgcactgacatctctagagcatgaaacgacatttcttctttaaatgaagacaaagaaactatgaagataagggagcaaccagcacccaaaaccttctttctaagtcttaaataagtgtgtcttgtatagctttaaattattgtgatgcgcttttacacctacagttgaaaaatac

SEQ ID NO: 464749 - DNA, 540 bp, Homo sapiens
tttcttgcaagtcccacttatcacaatacattgtcatatgaaagattaagatccaaagctggggaaattgactagctattgtactttctaatagttgctggtcaaaattttcaagtagtttagataaatccaaatcttgcaagtgaatttattctccatcataattcttgaacctaagtgtgttttatcgctcatcttcacttcctttccacccagcagccacctttgttttcatcttgtggattaagtctatgtcagatgaaattctaagcatcctgagaatttcaaccctatcatagtcaatttcaccaagaagctggaaatgtacaatagtgccttatgcacattatcaccacctcatcccctgcactgacatctctagagcatgaaacracatttcttctttaaatgaagacaaagaaactatgaagataagggagcaaccagcacccaaaaccttctttctaagtcttaaataagtgtgtcttgtatagctttaaattattgtgatgcgcttttacacctacagttgaaaaatac

SEQ ID NO: 464750 - DNA, 608 bp, Homo sapiens
aaaacaggatctcaaaatcatttggaaacttaacctgcttgctatctatacttacatattgttcactgatcctcaagttataataaaggctcttggtagagaattccatgccttacatgatgctgatgatgcacatacaaattctgaggcaggccaggttcagttactcatgcctgtaatcccagcactttgggaggccaaggtgggyggatcatttgaggccagaaatttgagaccagcctggccaacatggtgaaacctcgtctccactaaaaatacaagaattagccgggcatggtaccacacgcctgtggtctcagctacccgggaggctgagacaggagaatcacttgaacccaggaggtggaggctacagtaagctgagattgcaccattgcactccagcctgggtgacagagcaagaccccgtctcaaaaaaaaaaaaaaaaaaattctgaggcatagtcacttcctgcccatattcccacctccagtctctgtaagcagaaagaagaccatggaaacacaggcattatgttcccattcacacataaacaaggagtttcagtcaggttggggggttgtttggctcgctgatgggttttaaa

SEQ ID NO: 464751 - DNA, 600 bp, Homo sapiens
cttggttaaatataggtagtgaaagtagccattcttattgttccacatcttagaggaaaagctttcaatttttccccacttagtatgctggtagttatatgtttgtcatatatggcttttgttatgttgagtgtattagtcgattctcatactgctataaagaaatatctgagactgggtgatttttgaagaaaagaagtttaattggctcatgcttctgcaggctgaataggacgtatagcagcttctacttcttgggaggcctcaggaaacctaaaatcatgacagaagatgaagragaaggaggcacatcttatatggtggagcagaagcaagaactagggtctggggataggtgctacacacttttaaacagccagatttcgtgagaactctgtcaggagacagcaccaaggggatggttctaaaccattccttagggatccatccccatgatcaaatcacctctgaccaggccccaactccaacactgggtattgcaattcaacatgagatttggatggagacacagatccaaaccatataattgaggtatgtaccttgtatatcaaatttgttaaaggttgtttattttggagg

SEQ ID NO: 464752 - DNA, 571 bp, Homo sapiens
agtcctttccactctcccacattgctccttttcagacacaaaacacaaaagccaggctctgtgaatgaattgttgccacagaagtttgattgcaattaatccctcagcgatcattttaacaacactaatagagatagaacacatgcaaacacacacacacacacacacactcacacttatggaaatacatgtgccttatatgcatggcctctaaagtgattgctgatggacaatagatcgccttttcaagcagaaaagggacattttaaaatggattgctttcaataggtctttgacatctctgaagcagaatttgtcaaaaatgttgagattccgactgaaagcactctccatacacaaacataccaaaagcctgtcttgttgtatagctacttatcctcttgcatattcataataagcattgttgtcctacctccgtgaattctccttgctttgttagaatcttgtatrtcagaactgaaagagaacagatcaaccatcttgtttttcacacaagaaaacaacagcccagagggaaagtcactctgccaaggctacatgatggtggcag

SEQ ID NO: 464753 - DNA, 610 bp, Homo sapiens
aatttccctagtttctaaagtcagcatgtggttccaggcctctttcaacttttagtttaaaagtaactaaaatttctatacatctctggaatgtcacgctgaaactcattttacaaccctaagctcctgccttaaggtccataaataccactaaggaaaaatccactgcggtgcattcagtcctcttgccaaagcgctctactgcaccctcttgcagcattcttcctttctaataactttccttttcaaacctattctgttgtcggtaaattctttttaccaacctgcgcgtcaaccacttcccaataccagggctctgacacctctcccggcaactagtacaagtggaagtggcagggaagacaagagaaaccttagccctggaggaaaggaggataagarcaactccctttgtgaagaagagaccatgtgaacccaggagggtgccccactctcccagctcagaggagatgctgcaggagtcttacagaatggggatgtcagtaccagtgccctggccttggggcacacagggatcaggatgccaaccacactgcagggagagaagcagcacaggcagagactgcaggagccaccacagcccaaggag

SEQ ID NO: 464754 - DNA, 634 bp, Homo sapiens
tccctgtgtccatgtgttctcattgttcagctcccacttacaagtgagaacatgtggtatttggttttctgttgccaggttagtttgctgaggatagaaattatacttttaattgttgatgtcatcatcaaggaagatagtggagtcttaactgttttccccaaaaacaaaaatacttcaaaaggtcaacktctatcattttgtttagaattcattagctgtctcctcaccttgtctgcttcattttttgtatatggacagggttgtggtaccagatgtgtacttagtctcactatgggttgtgacacttgatttagaaaacactgctgttgggacacacatgagaattagaataaagcactagatggacaggtcttttctccctagaaaacttccagaggggacagtgctcttgacatttcagagataatgaagagagttttcaagacactttctatttccatacgagttcctttgtatgctgggttgcctgccattatgtttatgtaattctgacagtgttcttaatgacacactaacagattgtaaaacacgctgctggcatttacttgttttttatatttttaaaacaatgtccttcatgtaacagtagttaagcgcggcagaaggacat

SEQ ID NO: 464755 - DNA, 634 bp, Homo sapiens
tccctgtgtccatgtgttctcattgttcagctcccacttacaagtgagaacatgtggtatttggttttctgttgccaggttagtttgctgaggatagaaattatacttttaattgttgatgtcatcatcaaggaagatagtggagtcttaactgttttccccaaaaacaaaaatacttcaaaaggtcaacgtctatcattttgtttagaattcattagctgtctcctcaccttgtctgcttcattttttgtatatggacagggttgtggtaccagatgtgtacttagtctcactatgggttgtgacacttgatttagaaaacactgctgttgggacacacatgagaattagaataaagcactagatggacaggtcttttctccctagaaaacttccagaggggacagtgctcttgacatttcagagataatgaagagagttttcaagacactttctatttccatacgagttcctttgtatgctgggttgcctgccattatgtttatgtaattctgacagtgttcttaatgacacactaacagattgtaaaacacgctgcyggcatttacttgttttttatatttttaaaacaatgtccttcatgtaacagtagttaagcgcggcagaaggacat

SEQ ID NO: 464756 - DNA, 625 bp, Homo sapiens
ggtcagattttgttactctttggttggcttaatggcaagatttacaattcaattcataaatttttatcactttcccaagtggtatgtttttgtctcaaaccttcactcttttaccaaattcaagccagttacattactttccagtgggcaaatgtcttttggcttggcaaaaatttctaccctacggtaatttytgaaacagagacccaaagactttgtctatggaggggaattcagagccgagatggacagatgaaagaaacccattaactgctgggtaaaacattccttattggctcttagacaacaagtagaaacatgttttgtccctaggagagtctgagattttgattagaaaaaactcctgggaagtgccgccaaaaagatagtcattcattggctgatcatctgatcaaaccctgccaagatgatagaaaggtctacggaatcatccaggaactttaaggtgatgtcacattcatcttttctgacaacatgactaagaatcatgatgcctgtgttttttctgtcaatggtttgtggttccatagaatgagtgctgggtttggattcaggagtatgggctagagtcttcctaggttcttgtaactatttataagtacaa

SEQ ID NO: 464757 - DNA, 625 bp, Homo sapiens
ggtcagattttgttactctttggttggcttaatggcaagatttacaattcaattcataaatttttatcactttcccaagtggtatgtttttgtctcaaaccttcactcttttaccaaattcaagccagttacattactttccagtgggcaaatgtcttttggcttggcaaaaatttctaccctacggtaatttttgaaacagagacccaaagactttgtctatggaggggaattcagagccgagatggasagatgaaagaaacccattaactgctgggtaaaacattccttattggctcttagacaacaagtagaaacatgttttgtccctaggagagtctgagattttgattagaaaaaactcctgggaagtgccgccaaaaagatagtcattcattggctgatcatctgatcaaaccctgccaagatgatagaaaggtctacggaatcatccaggaactttaaggtgatgtcacattcatcttttctgacaacatgactaagaatcatgatgcctgtgttttttctgtcaatggtttgtggttccatagaatgagtgctgggtttggattcaggagtatgggctagagtcttcctaggttcttgtaactatttataagtacaa

SEQ ID NO: 464758 - DNA, 557 bp, Homo sapiens
agtgctttgagggaaaaggagctttcttttctgatgggtgccttggggccgtgatttggattttaaggtcatgaatcctaaggctcaagcctcttgccccaggggggagaagtctggcttctgtccacatgtaggcaggctggtgggaagcagcttgctactgctacttgcagcaggccttgaagctaggcagagaggcagcccacaggatggacctgggmctgtgagctctagttacagttcttagttattgctgcacgtaatttcctgctgtcatccctctcttagggttttcagggaggctttattaaaagtaacagcttagtctcaaccctgtgatgtggaattgatgtgggagtctgcctcttggagaaggagtggcaaagaaaagggtagtgtgtctatagcagctgcaggctgggggactctgcagtcccagcccgcagaaggtagttgatgagggcctaagagatggaccacggccaggagagactggaggtaaaggcagtagtatgaactaacaggtatgtctgccaccatcctggggaggaacatca

SEQ ID NO: 464759 - DNA, 565 bp, Homo sapiens
actatggcactgtttccatgtgccctcaaacacttttgaatccatctttcatataaagttgctattccaactacaaataaatgttacattcattcaagttaatgtctttgtaacactattttgttatctagttttattttttatgtgtacttggatatgatcaaattgcattcctacgaaaatactgtattattcattsttagcagtaatttggagtggcgttccctccaattcatctgaggttgttttactttatgtcttcagtctgtacctactgttctgcttccaggccttgcatccttcaagaagtaacttctgttataaaaaggacaggactcccagaggatgaaggaacaaaactgtgcttctaccgcatgtcaaatataaacataatcttaatccagatttaaacatggctagccaaaccatgagcatagaaaatgtatttttcacctcttcattaattggaaataaatgtcctttacatatacctatgaggtgctgaaacagaaaatgctcctctaagctgtgaacacgtaaaacactggcatgcatttaggaaagt

SEQ ID NO: 464760 - DNA, 552 bp, Homo sapiens
ctcttggcatgtatatatatcttacgaattcaataaaacaaataaacacaagaaaacagtaacaagccaattcaactatacatgtacaaacacccttagagaagtctattattaatatagatataaaaatattttcatttgttaaaagcaccataagtaaaactatgaaacctaccaaaagtaattgttagctaggcttggagaatttggtctttgttgctttaaaagaaaagaaaaaaagggatagcctaattaggatttttaaaatttgtttgtttttctgcttggagagcagcattaacatatttggcataactaaactggagctaagaatcctaatgtttctaaaggccytggggtgctctttccacatctggactgaaaggatatgtccttttaaagtaggaattatgtatgcaagtggggtagtaatgtgttcataggtaaacacacacacacgaacacacacacacacacacacacacactggcattttctgttgcgtaccatccccattggatataagaaatcatgagaaagttttgactgggt

SEQ ID NO: 464761 - DNA, 550 bp, Homo sapiens
tcacagtgcttaataaagttgttgatgtataagtacaataaatgtagaaaaaacagtggtcttgatgtataagaaaagattgtccatactttgagaggttatggtttaaattatagaagagaaaattcaaatgaagagaaattaagtggcatctaagaagtgaatttaaaatactttgtaaacatcctgggaacaattgcaaaagagcattgtgctgcatgagagaaaataggaactgtggacttcycttcatagttcttcatcatccagtatgccaacctgggctttttcacacagtaattttatggtcctaagagcagcaaaaggatcatcctcaatgtgcaaacacttttgaagtctctgcaatcatcatatttgctactgtcccatgagccaaaaaagtcatatagccaagctcagagtgagtttacgagcatactcgcaaaaggcctggatacaggaagacaaacacattgggaccctagctgcaatccatttatcatagaagggtaaggattcccaataatagcttctactaattccatatcct

SEQ ID NO: 464762 - DNA, 452 bp, Homo sapiens
tctcctcccctcccacctaactaaaatcttcctacacctggaatctggttttaagtcacgtctattccttctagaatgtgtaggtaragctttctggttactacttccttcacgctgcaaaaagtcattgttgcaatgtggatattttcccttcaggggctcaccacttccacaaataattcttctggttttgatgcccccagtaaaatattattctcccattgcttttggtgttttagacatgaagtccttgcccatacctatgtcctgaatggtattgcctaggtaaaattgacaaatgggatctaattaaactaaagagcttctgcactgcaaaagaaactaccatcagagtgaacaggcaacctacagaatggaagaaaatttttgcattctactcatctgacaagggctaatatctagaatctacaatgaactcaaacaaatttaca

SEQ ID NO: 464763 - DNA, 608 bp, Homo sapiens
aataatgtatatcaatttataaatgtattataaaacttaaatatgtacaataaaattaataaaaatgaatttaaaaaatagttctgcatttcaaaagatcccattgaaacatttcggtttcaggacatcctaccccaaaatatggcaacttggcatagataagattttaagcaaaakaaatctgtgaaatgccaggtgcagaaaggattttatgacttccccctgaacagttcataagaccctcgtgtgaaaggtacccttcatatacctggaggaaagaagcatccttatctctgaagacataggggctctgagaggaatctgaacaaacaggacttgccacttccccagttttctacgtttatctcatattattttcatcctatcagtttcttccatgactttccactctcgatcaaatccctaatacataattggcaaattgctggaggctcagtgtaggacaagtctgagcattaataaccacagagggacccagtcatagggatgtccccaactttggtgagttttacctccacgagctcaaccgggttctcactgtaaacaaaggagtaaaagtttctcattctccttttagggggagagaa

SEQ ID NO: 464764 - DNA, 608 bp, Homo sapiens
aataatgtatatcaatttataaatgtattataaaacttaaatatgtacaataaaattaataaaaatgaatttaaaaaatagttctgcatttcaaaagatcccattgaaacatttcggtttcaggacatcctaccccaaaatatggcaacttggcatagataagattttaagcaaaataaatctgtgaaatgccaggtgcagaaaggattttatgacttccccctgaacagttcataagaccctcgtgtgaaaggtacccttcatatacctggaggaaagaagcatccttatctctgaagacataggggctctgagaggaatctgaacaaacaggacttgccacttccccagttttctacgtttatctcatattattttcatcctatcagtttcttccatgactttccactctcgatcaaatccctaatacataattggcaaattgctggaggctcagtgtaggacaagtctgagcattaataaccacagagggacccagtcatagggatgtccccaactttggtgagttttacctccacgagctcaaccgggttctcactgtaaacaaaggagtaaaagyttctcattctccttttagggggagagaa

SEQ ID NO: 464765 - DNA, 561 bp, Homo sapiens
attagaataagaagctgtatttatggtcgtccaagaattcaggctctggagccagactgcatgggtggaaatctttgctctgccttttgttagtgtcttgaagggaaaattgttcaactgctctgacttacattcttcatttgtaaagtttgtctgawctttacatagttcataagcttgttttgaggatgaaatgagttaatttttataaaatacttaggatgggatttgaaacataataaattatcaatagattataagctctgttattttaagaaaatagtgctcctcagaccttactttagacaactctcctctagagtataaaatagtctatagagagataaactaggaattctattaattatttttaattggttattttaatacataataaagcaatgttatgtatagattctatagcttctaggtcagtttttactataagaacactaaaattagagctttgttttaatagaatagcttaggaatttgaaaaactttgaaattgtctcgcttctcatagagcacgtcttccctatacgttcttaaaatattccc

SEQ ID NO: 464766 - DNA, 595 bp, Homo sapiens
aatcatgtaatgttttctccatccctatatttaatgtaactggttggcgctattcaggtcaaagtcaatttaaatttttggattagtagaacatatcctttgctgaatatcagacttatcttcaaagtgatacaaacacttcccttgctttattttctgtctataaaaactttggaatgtttttaaagacattaatatttttacatgtgcagawaaagtctttaataaaaaatatttttcttaatatcgctgcttacttttacatctcgatagctcactaattcattctacaaagccaggatcactctgataccaaagcccacaaaggacacatacacacaaacaaaaccacagatctatatagtattcctgataaatatacatgaaaacatcctccacaaaatagcagcaaatcaaatccaacagcacatcaaaagataattcaccatgatcaaatgggtttcatcccagggatgcaaggatggttcgacataagcaaatcaataattgtgattcaccacacaaataatttaaaacaaaaacatataattatttcaatatgcaagaaaagcatccagtaacccttcatgattaa

SEQ ID NO: 464767 - DNA, 481 bp, Homo sapiens
aactttttgttatatgcttgtatttgtggatgtttaattagggacgctggattatgttattttccctaaaaggtgttaggttttgatatgtcaacagttaaattactgctagaatgtttggtcctgttagatttggttgtattatttgctaagatgaattaaattttgtttagtccctagtcttaatgaggagccttccctagagtatggcacttacccataaagcatggctcctctgatatctcaactgaatgtgaaatatctagtaagttagctcctttccttctgagctcatctctaacttctccctatgtcatgcaatacctcgtatctcagtgaagctgaggatcacagtagacatccctgcttgggctcatgggaattaccttacattcagccctcagagaagagcctatgggggacattcaccccctacacacagctcctyaactaagggagaccactgcattgtttggactcc

SEQ ID NO: 464768 - DNA, 615 bp, Homo sapiens
gaaacccatgagctcactctgtttcagttgcttaacctgaagttacttaaacccaacttcagtttttgttttttttttctaaatctgtgagatttttttttctaaatctgtgagatggggtaacattagcactcatatcctattgtgaggattaccaaagttcatacttgttaaagcatgtcaaacagtgcctggcacatgttaaatgctgttaatgtaagctcttattattaaccattgttcaccttatatgagggactgcagtgaaacaaacacaaccatattcagcttcattctggacctttaactctgccaaaaccccttcctgtctagagcaatacttccctttccccttttcttgtttttctcagtgctgtgtcgggtctgtgacatcaaatattatcttgcgtgtatggccaccaagcctgtattcatatatatatatatatatatatatatatakagagagagagagagagagagagagagagagagagagagacacagagatgtatatatgtcacttaccccacatactctgaagctatctgcacatgcaagtagccacaaagttgtagtgagacttttcaattatttgccatatatagattttgc

SEQ ID NO: 464769 - DNA, 461 bp, Homo sapiens
taatttctattcttttaattctgcgccattgataagcatgtctgtttttacaccaatgccacactatcttgatcgttgtaacttcayattagcatttgaagttggtggtgtatttcctccaactttgttattaattttcaaaatcataaatgttagtaatattattctacatcagacagtggcttgatatattacatgcatcatttcattttatattctcaacagaattataagataagtattataagtttacagagtcaactgaaatttagagaaaccagaacttctaatctgcctggtggtaataaggcatcaacagaaggtgtgaggggacctgtactcacacctacagctggtagtaatgacgtgctgtcctctttatccaggtgaggagttatgaaaggaggagagcaaaaagagaaggtttaaacaagacccagagtctcataacatgatagtca

SEQ ID NO: 464770 - DNA, 461 bp, Homo sapiens
taatttctattcttttaattctgcgccattgataagcatgtctgtttttacaccaatgccacactatcttgatcgttgtaacttcatattagcatttgaagttggtggtgtatttcctccaactttgttattaattttcaaaatcataaatgttagtaatattattctacatcagacagtggcktgatatattacatgcatcatttcattttatattctcaacagaattataagataagtattataagtttacagagtcaactgaaatttagagaaaccagaacttctaatctgcctggtggtaataaggcatcaacagaaggtgtgaggggacctgtactcacacctacagctggtagtaatgacgtgctgtcctctttatccaggtgaggagttatgaaaggaggagagcaaaaagagaaggtttaaacaagacccagagtctcataacatgatagtca

SEQ ID NO: 464771 - DNA, 461 bp, Homo sapiens
taatttctattcttttaattctgcgccattgataagcatgtctgtttttacaccaatgccacactatcttgatcgttgtaacttcatattagcatttgaagttggtggtgtatttcctccaactttgttattaattttcaaaatcataaatgttagtaatattattctacatcagacagtggcttgatatattacatgcatcatttcattttatattctcaacagaattataagataagtattataagtttacagaktcaactgaaatttagagaaaccagaacttctaatctgcctggtggtaataaggcatcaacagaaggtgtgaggggacctgtactcacacctacagctggtagtaatgacgtgctgtcctctttatccaggtgaggagttatgaaaggaggagagcaaaaagagaaggtttaaacaagacccagagtctcataacatgatagtca

SEQ ID NO: 464772 - DNA, 553 bp, Homo sapiens
gaataaagtccatgacaaatcttatatgataaatttgaaccctatgaggcagcaaagattttaagccctccaaatgaaaatttcaataaacatgttccagaaagcaagctgggtttcaataaatctcagtacatatccagagcatgtattttaataactcaaagtattcaaawtttagggttgcaattaatttcagatttttaaatggtaaaattgttttcttcattgtttccaaacacgaactccagaatctatagtgttttgggcaataaaggcagcaggtagttattatactttatgagttcattaaacttagaaactccatacatcaccacacccaatttcctctttctcaaatatggtcatttataagagcaaaacaagagacatagagaaaattgtaaactaacatgacagaacagcatctcctggtacacaaagcaggttacttttttccccgtggggttgcagtatagttacttatattagaaataggcttgtttttgagccagagcttccgagttaaaatcattttaagaaaacaacaccatga

SEQ ID NO: 464773 - DNA, 553 bp, Homo sapiens
gaataaagtccatgacaaatcttatatgataaatttgaaccctatgaggcagcaaagattttaagccctccaaatgaaaatttcaataaacatgttccagaaagcaagctgggtttcaataaatctcagtacatatccagagcatgtattttaataactcaaagtattcaaaatttagggttgcaattaatttcagatttttaaatggtaaaattgttttcttcattgtttccaaacacgaactccagaatctatagtgttttgggcaataaaggcagcaggtagttattatactttatgagttyattaaacttagaaactccatacatcaccacacccaatttcctctttctcaaatatggtcatttataagagcaaaacaagagacatagagaaaattgtaaactaacatgacagaacagcatctcctggtacacaaagcaggttacttttttccccgtggggttgcagtatagttacttatattagaaataggcttgtttttgagccagagcttccgagttaaaatcattttaagaaaacaacaccatga

SEQ ID NO: 464774 - DNA, 553 bp, Homo sapiens
gaataaagtccatgacaaatcttatatgataaatttgaaccctatgaggcagcaaagattttaagccctccaaatgaaaatttcaataaacatgttccagaaagcaagctgggtttcaataaatctcagtacatatccagagcatgtattttaataactcaaagtattcaaaatttagggttgcaattaatttcagatttttaaatggtaaaattgttttcttcattgtttccaaacacgaactccagaatctatagtgttttgggcaataaaggcagcaggtagttattatactttatgagttcattaaasttagaaactccatacatcaccacacccaatttcctctttctcaaatatggtcatttataagagcaaaacaagagacatagagaaaattgtaaactaacatgacagaacagcatctcctggtacacaaagcaggttacttttttccccgtggggttgcagtatagttacttatattagaaataggcttgtttttgagccagagcttccgagttaaaatcattttaagaaaacaacaccatga

SEQ ID NO: 464775 - DNA, 566 bp, Homo sapiens
caactgctcccggcctttttacccctttcttgaaagcacactctcttaatagagctttagaactagcctcaatgtatagtggggcaattctttcctaaggtaattttgtattttttgcttttccrtctaaattttagaatcacattgtcaaagcgcatggggaaaaaaaaacatctgttgggatttttactgggattgcactggagttatagatcaatttggagaagggaaaatatatttatatcattgaatatccttttctatgtacatgtatattgtgttataaatgttatagatactaatttataatctaatttttatttagcactagatctcaggcatcaagatatgatgacaactatatttctatacaacattataaatattgactagtatttcattcatgattgtgatatagtttatttagccattctcctttattttgatgtttttgtgatttcttttgtttaatatttaattattgcagtaaaaagtgcagtaatatccttggttagttcctttaattaaactctttaaagtggaatttctagataaaatttataaat

SEQ ID NO: 464776 - DNA, 580 bp, Homo sapiens
atggctgcatagtattccatgttgtatatatgccacattttgtttatccaatccaccgttgataggcacctacattgattccatgtctttgcyattttggatagcactgtgatgaacataaaagtgtatgtgtctttttggtagacgaatttgttttcttttggttatatacccagtaatgggactgctgggttgaatggtagctctgttttaagttctttgagaaatctcctaacttctttccacagtagctgaactaatttacattcccaccaacagtatgtaagcattcctttttttcccttcagccttgccagcatctgttatttttctgactttttaataatagctattgtgactgccaggagatggtatctcactgtggttttgatttgcatttctctgatgattagtgaatgtggcacattttttcatatgtttgttggacactagtatatctttttttgagagcatctgtttatgtcctttgcccatttttaattagtttttatgcttgttttttgcttgttgatttaagttcctcacattaataaattctgaatgttagacctctcttgga

SEQ ID NO: 464777 - DNA, 580 bp, Homo sapiens
atggctgcatagtattccatgttgtatatatgccacattttgtttatccaatccaccgttgataggcacctacattgattccatgtctttgctattttggatagcactgtgatgaacataaaagtgtatgtgtctttttggtagackaatttgttttcttttggttatatacccagtaatgggactgctgggttgaatggtagctctgttttaagttctttgagaaatctcctaacttctttccacagtagctgaactaatttacattcccaccaacagtatgtaagcattcctttttttcccttcagccttgccagcatctgttatttttctgactttttaataatagctattgtgactgccaggagatggtatctcactgtggttttgatttgcatttctctgatgattagtgaatgtggcacattttttcatatgtttgttggacactagtatatctttttttgagagcatctgtttatgtcctttgcccatttttaattagtttttatgcttgttttttgcttgttgatttaagttcctcacattaataaattctgaatgttagacctctcttgga

SEQ ID NO: 464778 - DNA, 484 bp, Homo sapiens
ggtctacatggacagtatcttctcatgagagatgagaatcatacatggtatgattgctaggcatgactatgttctaatatagattttggagaccagttaatacttaatttcaatttcacataaacatttattcaatctctattctcttccagacactacgttcagggtgcaaaaatgaacgagaaaagattatcttgagccttgtggagataatttagtgagaaagccacactggacaggcaattacaagtgtgatgaatgtgccacagttgtgaggacaggatgctgtgggaatgtacagccagaggagttccctgatctttgaggtcagaaatatgctcactggtgaatggaatttactctgagaaatggctttaaaaatgaaaccaatgcttgaacaatagttagttccatatctgactcacatttaatactttccgatcttgttccccttgcttccrttgcctgtaatgtttgtgaacat

SEQ ID NO: 464779 - DNA, 487 bp, Homo sapiens
gcatactaaatgattaacactgcactattcagtatggggagatccaaaaagaatgrgacccagctgttgatttcaagggacataaaaccttataatactccctatagcacataacatcatgatctgaatgcattaaaaacttaggaattcttgttacactgatctcacaatgaaggtctcataaactctagataaacagaatatgtagatcaacatctatttaattcatttggcagtatccactgagtccatgtcatgttccagccacaatactaggtattggggaataaaaatacatgtgggatatattgtgtattagtctgttttcatgctgctgataaagatatacccgagactgggcaatttatagggaaaaagaggtttaatggacgcacagttccatgtggctgacaaggcctcacaatcatggcagaaggtgcaaggtatgtcttacgtggtggcaggcaagagagaataagagccaagc

SEQ ID NO: 464780 - DNA, 487 bp, Homo sapiens
gcatactaaatgattaacactgcactattcagtatggggagatccaaaaagaatgggacccagctgttgatttcaagggacataaaaccttataatactccctatagcacataacatcatgatctgaatgcattaaaaacttaggaattcttgttacactgatctcacaatgaaggtctcataaactctagataaacagaatatgtagatcaacatctatttaattcatttggcagtatccactgagtccatgtcatgttccagccacaatactaggtattggggaataaaaatacatgtgggatatattgtgtattagtctgttttcatgctgctgataaagatatacccgagactgggcaatttatagrgaaaaagaggtttaatggacgcacagttccatgtggctgacaaggcctcacaatcatggcagaaggtgcaaggtatgtcttacgtggtggcaggcaagagagaataagagccaagc

SEQ ID NO: 464781 - DNA, 564 bp, Homo sapiens
ctctctatttctatgaatttgactactttaaagtctacatataagtgatgttatgaagtatttttctttctatgtctagcttatttccccttagcataatgtcctccaggttcatccatgttgtctcagatggcattgaggatttccttgtgttttaaggctgaacgatgttccattgtgtatatgtagcatattttctgtatttatttttctgtactgggcgtttagtttgtttccatatcttggctattgtgaacaatgctccattgaacatgagagtacagacacttctttgagatactgatttcatttcctttggayatgtacttagaagtgtaattgctggctcataagccagtttgattttcatttttattttttgaggaaaccttttggctatactagtttacttttcttgaaagtgtaaaagagttccctgttttctacatccttgccaatatttattgtctttttgataacagccattttaacaggtgtgaggtggtatctcatcttaatttgatttggattttccagattattagtaatgttaaacactttttc

SEQ ID NO: 464782 - DNA, 542 bp, Homo sapiens
aacatgaaaagatttctctttaatactagactcttaytgacacttgaaggttagctaatagagaatgcataatataatagtatggtaacctagacaactgaaaggcatgagataaagatgatacggggaaaaatgtggaatatttgtaataataaatgaaggttgagacaaggtatttgcaagcatatcaatctcttacactagtaagaggcaaaataactaatggtttgttgaattctgagagactaaatgtggtaaattaaaactaaaacagtgaagatttaggttcaacattggtagagaaatcaataggttggtgaaaataaataattggagtagtttatataaaacatatttgtaggtaggcctttatgtattgaatttttaaaatgaaacttattccagtccataaaaatagaggtaaatgacttgtacaatatgaaaaaaattatgaagaaaattaaagaagatacagataaatggaaggacatccctttctcatagatgggaagaattaatattgttaaaatgttcatactgcc

SEQ ID NO: 464783 - DNA, 572 bp, Homo sapiens
ctgtcactagagaaaggataatattttcagcaaatggagctggaacaattaaatgcccatatataaataaaaaatccggacagaaactacattttccaaaaatttgaatcaaaatgggtcataaacttaagtgtaaaatgcaaaactataacattcccagaagaaaacaggagaaaatctgtgtgatctggagtttggcaatktatttttagatacaatacaaaaagcacacctcatgaaaacaattgatacatttgactttattaaagttaaaatcttctgcattgcaaaaaaactaagagaatgaaaatccaagtcataaactgggaaaaaaatgtttgcaaaatttatatctgataaagaacttgtatccaaaatatacaaagaactctttaaatccaacaataagaagacaacccaatttaaaaataagcaaagatcttaataaacatctcaccagataagatatgcagatggaaaataaacatgaaatgatgctcaacatcattagccattagataattgcatattatcacaacaatgagacaccattgcattcctattatggtggc

SEQ ID NO: 464784 - DNA, 467 bp, Homo sapiens
agacggtagatttttttctcccaccataagcttagttgaccacttataaatgaagcayatatattttttaaaaagacaaggattagaagggaatcacatgtgtagaaaactaaagctctattatatttggctttggcagcttccaattctattctgacttagaatgtgaagtgaggaacctgtacttactttgaaagcctgaaataagtggcagttgctagcatttccagcttcgtgttttcctaaatgcctggaataaactcagtagagataaaagaatatacattagtgagcaagtaagaactctttcagtgcattaaaaaagggcctatttggattatcaagtttattgataataacatatatattctttcatttctctgtttatactatttctgatgggaactatggccagaagatgttatggtacaatgttaagataagcttggcttaacaattattagaga

SEQ ID NO: 464785 - DNA, 539 bp, Homo sapiens
ggatgttttttcaatttgcagtaatgcagagggagaaaaatagagtttgtttcattagtttcttatatatgtaccatctctgagagttttagcttttggtgagttgggaatatgatattcatcgctactacaatatcataggggaaaatgtatacagaaacttgtataactgcaaaaagtaaagtttatatgaatctttcacagtaaggctttgagatgatgccaattcattttatggatatttattcatttaatcttttatgggtactactacatacggtatatttttatttctgtgctcttccattttcatctggtgtctaaattaatcctatgggcaatgaaatgatttggtgggagaagcccaagagtaagaggaataatattggtgctgcagctagggaacaccatggagaccatgctagagagggtgcaagcatgctttggtcattagtttgattctgagtaagaagactaagccatcaaatattcattaatgmttatgatgttcaataatctgttagatgttgtagaggatg

SEQ ID NO: 464786 - DNA, 638 bp, Homo sapiens
ttagctgttttatatagtatttactccttggtttctaaaaaatatgcttatatggttattgacttcttattatctaagaaaaaagaactctctattcttactatagttgtatcataacttttggttaaataaattttcagtattttcttcacacatagctaacaatacagctaatatttattgagtatttactatatgccaggaatatctttaagtgcttatattcattaattccattatcacaacaatcagagtgagtgttattattattcatttacccattttataaatgggagaagtaagcctccaagtaacttackttatgattatgtaagaattttcactattgagccaaagcaagaacatgattgcatttcctttcttattcaaattttttattttcttgcagtttacaatggtgtcactttaaagtttgcattattcacttcatcactgattcttcctccaaagcaaatatagaactcctctgaatattattttcctcatgatcaaaacgtaacacacatccatcacccctccccccagagtctcttatcctgctctaatctagaatgattgttctgcaggcctgcactcccgttggattctttatactctaaatcttgtattttcacctt

SEQ ID NO: 464787 - DNA, 582 bp, Homo sapiens
ctttttagttcttaatatcatttttgaaaagcctggctaccatttgatgtcctttttattaaacttttttttcccctttggaagctttatgaaccatttttattccaaatacagtgacaagttcatgacgatgtatctttgtgttcattttttctcatttattatggtastccttttaaatatagagtgttatattcttaaggtctgagaagctttcttgtattatttctttgacaattttttctccaccctcttcttcttctttttttttctggaactcttagtcaaacgttcatcagagtgttgtacattcttttgtttgattctactttcagagagatttcaccaactttattttcccatcctttcactaatttagaaaacatttctgctatcaaattttgattttatgagctcttttgtgatagttaaatgctctttataaaatatagtcatgtgtcaattaatgatggggatatgttcttagcaatgcgttggtaggctatttttaaaaaccaaatatattttataaatataaatatattgaatttctaaatgcagtttaaaatatctaccttttta

SEQ ID NO: 464788 - DNA, 582 bp, Homo sapiens
ctttttagttcttaatatcatttttgaaaagcctggctaccatttgatgtcctttttattaaacttttttttcccctttggaagctttatgaaccatttttattccaaatacagtgacaagttcatgacgatgtatctttgtgttcattttttctcatttattatggtactccttttaaatatagagtgttatattcttaaggtctgagaagctttcttgtattatttctttgacaattttttctccaccctcttcttcttctttttttttctggaactcttagtcaaacrttcatcagagtgttgtacattcttttgtttgattctactttcagagagatttcaccaactttattttcccatcctttcactaatttagaaaacatttctgctatcaaattttgattttatgagctcttttgtgatagttaaatgctctttataaaatatagtcatgtgtcaattaatgatggggatatgttcttagcaatgcgttggtaggctatttttaaaaaccaaatatattttataaatataaatatattgaatttctaaatgcagtttaaaatatctaccttttta

SEQ ID NO: 464789 - DNA, 579 bp, Homo sapiens
ggaggtacattattataatttctgtgtctctccaattaagacagcccacccaactaatacagagtagccatagtagcctactaacacaattagtgaattgatgattttctggagcatagatcatcccaagacaataggaagagacagaatgttatttcaaatagaaattctacttctaattgcaagagaattagaagctcactccttgccactcccacctctgccctgtacctcctttgattaaaagaaaacttgttcatattttggaatgtttagtgcctgctatacaaaagaacccccaaattataaatccccatattktgtggctaaactccattcttcaattaataagaaaatgcagtacaaatgtgtggaaacccctcagatgtgagaaaccatatgcaattggttcatgaagtaaaaagtaaaaacagaaagagactttaggaaggagggtattaatatgtccaaattagtaaaataaacagaaaaattgttatgtgttagaaagcacaaggatgtatgttattactaattaattgtaatatgtttgctttaaaacatttttgaaaacataaa

SEQ ID NO: 464790 - DNA, 519 bp, Homo sapiens
ttagcagtcttagcctttatccaagactttttactctttccctcaggctgctgtagtttaagtcatcctctagaaagcaaaacaaaacaaaacacaaaacccaccaaagctcttcaatcttttgtccattgaataaatcttcaattctctttcttatgccctttaatgttctctctctcagttaagattgggcttcttggtttcatattctattctctgtgggaaagcattaaaaataagaactaaacaaaaagtcttactgtaaagagaatttttctggggtctctgcttttctttttgatgtttaatctattctgcaaacacagaattttagctaatctgtccctcactgtatctgcactcctggaagtttagtccctgtgggcagtttctttcttttttttttttttttgacaacttttatatatagccttttagagatcatctccyttctccaggcccattctgctgcaggcttgtgaacttgaagcaacgtgagtgtgtctgtatgtgtgcacg

SEQ ID NO: 464791 - DNA, 587 bp, Homo sapiens
aagcgtaggtttaatttgataagaaactgccaggctgttttccaaagtggctgtaccatactgcattcctatcaggaatgtatgagagtgccagttgctctgtgtccttgtcagcacttggtattgttttttgttttttttttagccrttctagtaagtgcataatggtatatcattgtggtttttaattgtgtttccataatgcctaatgatatcatatttcttttcatgtgtttattagacattcatttttgtcttcatatctttttcccattttaaaaatgaagttgattgttttcttattgctgagttttgtgagtttttaaagtgtattctggaaacaaatcctttatcaggtatgagatttacaaatattttttctccaatctatgatttgtcttctcattctctttatgattttcttcatagaacaatatattttcattttgatgaagtccaatttattaattattcttttataacggattgatcacttggtgtcttatcaaaagactctttgattaacccaaggtcatgaagatgtttatctacatttcttttctgagtttcatatttttctattttac

SEQ ID NO: 464792 - DNA, 587 bp, Homo sapiens
aagcgtaggtttaatttgataagaaactgccaggctgttttccaaagtggctgtaccatactgcattcctatcaggaatgtatgagagtgccagttgctctgtgtccttgtcagcacttggtattgttttttgttttttttttagccattctagtaagtgcataatggtatatcattgtggtttttaattgtgtttccataatgcctaatgatatcatatttcttttcatgtgtttattagacattcatttttktcttcatatctttttcccattttaaaaatgaagttgattgttttcttattgctgagttttgtgagtttttaaagtgtattctggaaacaaatcctttatcaggtatgagatttacaaatattttttctccaatctatgatttgtcttctcattctctttatgattttcttcatagaacaatatattttcattttgatgaagtccaatttattaattattcttttataacggattgatcacttggtgtcttatcaaaagactctttgattaacccaaggtcatgaagatgtttatctacatttcttttctgagtttcatatttttctattttac

SEQ ID NO: 464793 - DNA, 617 bp, Homo sapiens
taccttgtttcctccactgtaaaaaccctgccaaagtcttagcgtatttctgcagacaggagacaattgaacaaattagtcttccggggtgtaccagtttttaatttttttttttaaagaggggaaagtgtcagagagccattgagctctgcccttagctcactattttattgacaacctgtgggacatgcttagtttctaaaactttctacctttaagtaaaacttccagccatctatcatgctaaaattcttcctggagccayttgaaaagtgacagtctgcagctcttttatatttggtttctggatctcatgtcttgaattaatgctttcatttaaaacatttaaaaaatactgcataatagatggacatattttggggttacatgtggtaatttgatacattcatatactgtgtgaagatcaaatgacagcaactgagatttccacattagtagaatttaatgcatgtatttggtggtgaaaatgactggactttccttgtttttggatttaatgcattatgatattatgatgtttaattgtccaggacatgtatgtcaacccaaggcaaatgtttaatcttgtttacactgttcaaatgcctctaacatta

SEQ ID NO: 464794 - DNA, 617 bp, Homo sapiens
taccttgtttcctccactgtaaaaaccctgccaaagtcttagcgtatttctgcagacaggagacaattgaacaaattagtcttccggggtgtaccagtttttaatttttttttttaaagaggggaaagtgtcagagagccattgagctctgcccttagctcactattttattgacaacctgtgggacatgcttagtttctaaaactttctacctttaagtaaaacttccagccatctatcatgctaaaattcttcctggagccatttgaaaagtgacagtctgcagctcttttatatttggtttctggatctcatgtcttgaattaatgctttcatttaaaacatttaaaaaatactgcataatagatggacatattttggggttacatgtggtaatttgatacattcatatactgtgtgaagatcaaatgacagcaactgagatttccacattagtagaatttaatgcatgtatttggtggtgaaaatgactggactttccttgtttttggatttaatgcattatgatattatgatgtttarttgtccaggacatgtatgtcaacccaaggcaaatgtttaatcttgtttacactgttcaaatgcctctaacatta

SEQ ID NO: 464795 - DNA, 473 bp, Homo sapiens
ggcaaatttatattatgtcctaataattaataagttgaatttaaaggcaaaaatagcatatcgtgtatatatatatacataatagcatgttgtgtataaatatatatatatttatctgtgtgtgtgtrtatatatatatatatacacacacatatatatatacacacatatatatatacacacacacacatacacacaaacatttcctaaaggctaatttgaagagaaattactctgtctctaagagtctagctgtactagtcatgaaaaatcatgtgcatgtgtgtcaaatatgtatacaccacaaataaatatatatgtatgtgctagtggaataggcccgttggaatattcagctttagcttttcctttaatatggtgttttgactaaaatgttagaacaggaaggattcttggtgacacattttgtttttaaactgtgatccttggaaccccaagtggctttggacatg

SEQ ID NO: 464796 - DNA, 469 bp, Homo sapiens
cactgcgtgataagtgctgaggcttgcttcactgatactgctgagctgtagaaattggacgttgacctggcactgcaatcattgcttcccaggagcgtgatccttctgcagctgccaccactgtcaaatatacagatcttcctggtccctgcaactctgggatgggtacttggattggtgtagcctggwtgcagcaaggacttggaaagaatgatctgggattttcagagacaaaataacgaggagttttagagtagggcctctggaaccaaattttttgggctacatacagctttgtttttctatttactggttgtaactctgtgcaggttgcttgacccctctgtgtctcagtttcctcatttgtaaaatagaaatatagttgcaattacttcatggggttggagggaaaattgaataggttaatctaggtaaattgcttagaatgcttcctgatgcatatataaaa

SEQ ID NO: 464797 - DNA, 478 bp, Homo sapiens
cctgggtggcaggaagactcagagacctcttcaaactggcaatgcaccacatctcctgccccagccttgctcccagaaagacccaaacccaaagccagttttgtaaattacaccttcagtggctgagaccctcacaaatgaaatcctacaggccttgcttccttttcctaaacctctgctctgctgtcgccccccttgtagtttggctacttctggaaactttccttagggccaaaggagacttccacaagcagtcactttcctccttccttagttccccttccacatctcccaactcccaacaatcccaaagagtctgctctcagcccctcttccttccccgccaggctgtgagagaagaaaccrtaaacaaagggatgcagagactcctaagccagggaccccagcccctctcagtccccagggctgggagacatatttctctcataagcctgacaggaccttacagtgggcaggg

SEQ ID NO: 464798 - DNA, 605 bp, Homo sapiens
tcccctccttcctcctctctacagaagtcacaccccgttccagacctagatcactaggctatctgatgattctaattacttttgtatttcatctattgcttcgttaatacttttcactacctaattactttatcacatcaatatttgctgcttcctcctctagactgtaagttcctatggccaggaatactgtcttctatcacttctgtactgcggtacacactaagcacttaacccaacgctcccaaatcctattttgtaaaagaattttctccagaataaaagaaaaaattgtaataatgttgtgagctagtcactaagctcaacttgtctgataatttttattctcagataatgttctcttgaatttttggtgttagaatttcctttatgraaataagatatagcggttttaaatagcagaattgttgtttttacttttcttaataaaataggcaatttaatacccagggcccctcaaatattttgaaactgaaatcccagtgcctgggaaccactggttgacaattcatcccaagcaggccatgacaattgtcccctctggagacctccggtaactttgtagaactcattggccattcact

SEQ ID NO: 464799 - DNA, 598 bp, Homo sapiens
gtgctggttttactcaagagactaagaaagaatttaagatactcaaatatagaggaacttgaaggagaaatttgagtgactagaagccctacactcataaatttcagcaagtayggaacagaagagtctcaaaactatggaactgttgagagaggcataaattagccatcaaaaagttctgacaaataccataaaatatgaaatgatgggttggagattgaataagaacctggaggcaggtatcatggttaagaactaagttcatgaaccttggaatcagaaagacctttctgttcagttcctgattctacctctgcacaacctttgtcacctgtaaaatgggtaataatactgtttaatggtgttgtaagaatcaagtgaaacgtatctatatataaatgtccacataatattgcctaaaacacactaggaactaagaatatcctgccccccccccgtagttattgtttatatattatcaataagcaataactgttagccctcaactttttgttccttgatgcaatttttctgagttagttcagtcaatcttactctgaaggagtgagaccaccttggccatagatttgtgctaata

SEQ ID NO: 464800 - DNA, 594 bp, Homo sapiens
ttttaattttgatgagaccagtttatcaattttccttgtatagactatgatcttgggatcaattctgagaactcttcacctaggcctaggttctgaatagttttttctttttccaaaaactttatagttttaggttttacatttaagtctgtcatccattttgaattaattttgtataaggtatgaggtttatggcaaggttcaatttttttttaggatgaatgtcaattgctccaagatcattgttgaaagcctattggaaaaacatatttttaaaattttatttttaattgatacttaataattgtatatttaccgggtacaatgtgatgtcttgatacgtgtatacaatgcggaataatcaaatcagggtactcagcatatctatcacctcaaatatttatcatttatttggggtgagaacatttgaaagcttctcttttagctatttgaaatatacaacacattattattaagtatagtcaccctgctgtgcaatagaacttattcctccygtctgaaactttgtacctatcgaccaacatcttccctttccccatcacccctgttccaccctagtctctggtaaccact

SEQ ID NO: 464801 - DNA, 379 bp, Homo sapiens
ggtggggccctaatccaatatgactggtgtccttataagaagaggaaaagacacaaggaatgtttgcatacagagcaaaggccatgtgaggacacagcaagagggctgccgtcagcaagccagggacaaaggcctcaggagaaaccaaccctgctggcaccatgatctctgacttcccacctccagaactgygaacaaataaacttctgtgttttagtccacccagtttgtagcatattgttattgcaacccagcagaagaatacagccttgcacaatcatttttttaaagaacacttttatcatatttatttcaaaattaaatagatacagaagccacacagaactgcataaagagtttattataaagctaatacttt

SEQ ID NO: 464802 - DNA, 608 bp, Homo sapiens
tcaatactgcatctcctcatgtttccttttcttgagcaatgtagtttccatgtgagatggctctctaggagtaaccagaatcctgttgtcttttgtttctgaaacagatatagggcacactcaacagagagagagagaaagagagaggagagagagaggagagagaggagagagtccttgcacacaatgcttccgtgtattgctgyactccaccccttggtctacagccatagccgtacttggcagagcacaagactctctgtggttctgcctcttggcatcatgttgttttttgatctttggtaagaaaccatgcctgacttatgcatggccatcatggaagttgcttgtgttcattttccgtgtgtggaatggtctgacttggcccatctacttccctgtctctacaaaggaaggtctacctgggacaacaaactaggcccttaaaacttttcatggtttaaaaacgaaacaaaacaaaaacaacattttatggttgatgactccagcccaaaacagttaacaaaatctgaaccacgaatgcctttttaatctcaggagaataatcatcattttcatcagtgtttgacaggactcctgtaagacaa

SEQ ID NO: 464803 - DNA, 608 bp, Homo sapiens
tcaatactgcatctcctcatgtttccttttcttgagcaatgtagtttccatgtgagatggctctctaggagtaaccagaatcctgttgtcttttgtttctgaaacagatatagggcacactcaacagagagagagagaaagagagaggagagagagaggagagagaggagagagtccttgcacacaatgcttccgtgtattgctgtactccaccccttggtctacagccatagccgtacttggcagagcacaagactctctgtggttctgcctcttggcatcatgttgttttttgatctttggtaagaaaccatgcctgacttatgcatggccatcatggaagttgcttgtgttcattttccgtgtgtggaatggtctgacttggcccatctacttccctgtctctacaaaggaaggtctacctgggacaacaaactaggcccttaaaacttttcatggtttaaaaacgaaacaaaacaaaaacaacattttatggttgatgactccagcccaaaacagttaacaaaatctgaaccaygaatgcctttttaatctcaggagaataatcatcattttcatcagtgtttgacaggactcctgtaagacaa

SEQ ID NO: 464804 - DNA, 478 bp, Homo sapiens
atcttcacagcctcctagaaacctggggcgtgtacctccattctactgacattgctgagagccatttttaatgtctcaatcatatgaaaattacatgttaatcatgaccaagaccacttttttttttattcyacctactatcttccaatttttttccatctctactggaatagcctgcatttagaatatttttgctcaccctcctaagcgttctctcttttgtctctctcttctcaaatccattttcattatactctaatgaatgaaacattcatttggaagcaatgtgacactctagaccccttctttcaccaaacattgcctcttaacgttatacatttggatactttcacaaccagaacccaatctaagttctatgcaccccggccactaacaaacaactctcaacacatcagattactcacaaacgaaaattccaccaatttgcttttcttttcttttttggagatagggtctc

SEQ ID NO: 464805 - DNA, 569 bp, Homo sapiens
ttcctacatgtatggtcagttatgaagtttcaggaaagaaatatgcaagtcattttgtgggtttttttttttttctggctagactttaggagtaattaacttgcaaagatatcaaaatgtccatcccctttcttctctgacagatgccagagacgcggaacaattgagcaagaacaaggtgacacatattctgtctgtccacgatagtgccaggcctatgttggaggtaagagagcaccgtggggcgtgtgtgggtgtcctcatttgtattccgtgggagtacctaygacgttaatgaaggcaaccaggttctctccaatgcgaacgtactcctgtgatctctggcggcattcccattgtgttcaggccgtgttgatgttaacacgctgtctgtagcgtggcgcgagggtgtgtgctttttctgatcacactcctgctgcattgccactttggctttcgtggctaaatgcctaggaataagctgaggctgcatttccctctggaccttaaggacatttaaaccccattttcattcctttcagaattatctctggttttaaaatccaaaa

SEQ ID NO: 464806 - DNA, 576 bp, Homo sapiens
acaatgcaagttcgtcctggatgtggatcccactgatgttctctggcaatgcttgactgcacagagctttgctgtgtgtagtctctcattcccgagggtctctcctgccttttttaggatgtggcagtagacactagagagcatcattgccacgtggctcttctgtctggcagtgcaatgacccctccttgaccaaactttagtcaggttcctctgagtccttttctcaacaaggcctggtccttgcccgaccgagtccagtgcgagcagagacctgctaagcgtatcccctaagaccccaccaagctcctgttcctccaccccgatgtctaatccagttcccctgagtggtattccacccactccctcaccctgcccttggctttccatccacccttgttcctgccatattggagtcgcgtcctcccctgttgtgatggtctcgaatagagtcttccttgctggcttaaccaagtgtcaggatcactttttacagcagtgactctacagttataatcactrggcgattttctagatcaaaatgtttctagactataagcatgtttatctgcccaa

SEQ ID NO: 464807 - DNA, 455 bp, Homo sapiens
tactactttcttgacgacctgtgaaaattagtggattccacaggctgtcaaactgaaaatcaattatcttctaggatctaggctatcagtctgactaaaaataaacagtgggttcccagctcaaaaggctaagagagataaaagtcagagagaytgtggtataatggtgcatggtagggtactgggtaaagggattgaaagctgaatgtcaaccactctaacatattatgaccttaaaagaaaaaaattattgatatataatgcagcagctcagagtagcaggaaacctagagtgtaattaggagacctagattcttgtctctattctgttgctactttcaaggcactaatcctccaggtttttgtttccttctctgtgaaacaaaatttaaacgatctgtaagttccttttcccagccctaagagcctataatttggtctttcctgcctacaca

SEQ ID NO: 464808 - DNA, 573 bp, Homo sapiens
cttcttagaaatacagattatcaggcttcattccagatctgctgactcagaaactctaggggatgggacccatcatctgtgtttttaacaagctcatgcaagtttgagaagcactggctaagatgcagacttgaagtygggcagaacttggtttgaaccgcagctccatcacttactagcttgagtaacaaacaagtggtataacctctctcaacctcagtgccctcatttttaaaaaattagtataataatgcatacctcaaagggagattatgagggtatactgaagtaacacatgttcagtactaagtacatagcatgcagaagtgttctgttgatgggagctactattaattatatttatgtgtgtttattcttaggttttgatcattaacgactgatttcaatatgttttctgtaacgataacataacaacagcagctgcactgttttcttcacttggcttcctatgcgtgggactcctttttctcttgtgttctactggtcatacacctctcatgttctcatgccccactgttggcctccccttcccttggtcttcatcttaccttt

SEQ ID NO: 464809 - DNA, 551 bp, Homo sapiens
gccatcatagatagttcctctgttggatgggcgaagtttttcaaaaattttcgggaaaggattcaccattctagataccattaagaacattcgtgattcatgggaagaggtgaaaatatcaacattaacaggaatttggaagaagtcaattccagcccttatagatgacttggaggggttcaagacttcagtgaaggaagtaactgcagatgtggtggaaatagcaagaaaactagaattagaagtggagtctaaatatgtgactgarttgctacatctcatgatacaaatggagcagatgaggacttgcttcttatggataagcaaagaaactggtttcttgagatggaatctattcctggggaagatgcagtgaacatcgttgaaatgacagcaaaggatttaaaatgttacataaacttacttgataaagcagcagcagggcttgagaggactgacaccaattttgaaagtcctactgtgggtaaaatgctatcaaacagcatcacatgctacagagaaattgtcataaaaggaagagtcaattgatg

SEQ ID NO: 464810 - DNA, 512 bp, Homo sapiens
aggacttcctgggagtccctcacccccagaacccgtggacctggctacggaggttagtcatgcctggaagtgccaagatgtggacaggtggtgctcagaaccccacctacgtgaggaggcactgaactgggttctggcagtttggccagaggaggatgcatgctaacaaggcccccagcttgcctggggactgagtgactgtgtgtgcgctctgtccaggggcttctttttagagaygttcctgcaccatgtctgctgttgaaaggagatagggcaatgcctccaagcttgtctgacctgcagcctaccggctgcatgtggcccaggatggctttgaatgctgcccaacacaaattcataaactttcttaaagcatgatgaggtttttttgtgtgtgtggtttttttgtttgtttgtttgttttagctcatcagctatggttagtgtgagtatattttatgtgtggcctgacaattcttcttcttccagtgtggcccagggaagccaaaaga

SEQ ID NO: 464811 - DNA, 512 bp, Homo sapiens
aggacttcctgggagtccctcacccccagaacccgtggacctggctacggaggttagtcatgcctggaagtgccaagatgtggacaggtggtgctcagaaccccacctacgtgaggaggcactgaactgggttctggcagtttggccagaggaggatgcatgctaacaaggcccccagcttgcctggggactgagtgactgtgtgtgcgctctgtccaggggcttctttttagagacgttcctgcaccatgtctgctgttgaaaggagatagggcaatgcctccaagcttgtctgacctgcagcctaccggctgcatgtggcccaggatggctttgaatgctgcccaacwcaaattcataaactttcttaaagcatgatgaggtttttttgtgtgtgtggtttttttgtttgtttgtttgttttagctcatcagctatggttagtgtgagtatattttatgtgtggcctgacaattcttcttcttccagtgtggcccagggaagccaaaaga

SEQ ID NO: 464812 - DNA, 565 bp, Homo sapiens
ctatacctcttactcagtctccagtaaatatttattgcayggataaataagttacctggcaaattgtaggtacttaataaatatttgttcaattattgaattgtacatggaaattaaatcatattttcaatcagtcaggaagttacctatttggagaaacatctaatgtatcctatgtgaagtgactttcttctccacttaaaattcctagttttctttttagtttttccagattatgcaaataatacatgttacagaaaatcaggaaatcacagaagaaaataataatgatgcagaatcctttcatgtcaaattaaaaacttatattgcatatataattttaaatcctgctttttacataatcatgactattttgttacatcattaacttttttggcttaacatcctgtttagtggctatacaacattctgacttatcaatttgccttaattttagctatttctcttgttacttacactgtagtttggttttaatttttcactattataaaagacatttagcaatgaaaagtttgaatataaattcctgcttgcatttctgact

SEQ ID NO: 464813 - DNA, 507 bp, Homo sapiens
atcaagctgttgtttagatttttggaccatttaaataccttgagcagagattattaaatagaaaggccagtgtataaagaatggttttatacaaggtgagggtagaaccagacaacacccgtgattacattgcgaggtgttttggcagatgtcagatccatggctaacacaagacaaaccagcagtaccgagtgtggggacstggattcctgatttgctgttcacgcatctctggggaggggaagttcacctcatgaaaggcacatgattcatagcagggctccttggtggctgcttttttttttaacacttgttctgcagcagcacaaaggaaacagttttattctttaattacttgatatgaactgtctcactgatgacaactgtgcagaagtcttgcagaacctatctggcctgtaacttgagtttggatcttggcatcctaactgtctgtaagccatcagaatctctaaaaccacctacacagcagagaagcctgtacagctc

SEQ ID NO: 464814 - DNA, 537 bp, Homo sapiens
ccaagttccctgctcttatgcagcttacgttctagcagaagacaatacatttcataagtaagtcaattgtataagagttaggagatgataggaactattgcaaagtttaaaagtggaacagagtaagatgactgkaggctcagggatgtggagtgtggatgtggcacatgttgtagtattaagatccagtagtcagaatggaccttgtagagaacaggagatttgagcaaaggcatgaaagctatgaagaattggccaagcagttatttgggattcccaggggaagagtgctgcaagcagggacactggctatagcaaaggacttacagtgaaaggaagcatggaaggtcaaggaacagtgaggacactgtgagcagcactggagtggacgagggcataaatgataggagagagttacaggagggtgatgtgaagatcattgtcagcagtaactcacctcctcttgccctcgcttcctcattgatacaatgtatagaaaaatatctctgcaaggggctgggagaaggtgataacagg

SEQ ID NO: 464815 - DNA, 555 bp, Homo sapiens
cttttcttagaagcttatttctccattaactgctacaggggctggaattctctcccctagaatatgactttgaaggccctgttgcctgttgagaagggtgtggaagtagttcaagaaatgggagctaaaggaggaagtggaaggaacackcatggaaacccctcaaatgcttgcaaaaacagcagcccttggattcaagagtgcaacatttgttcaccttctggaacaaaagttcaaacataaatcagtaacccctgaggacttgcggcttggggtaagaatttctccacctcctaaagtggtgctaacttaaaaagcaagtgggtggagtccttaaaaagggccagattgaaggtctgtgcaggtggacaagcagcttttaagagccattagaaaacttagccccgggatataacaggaacaaaaagcacttggtgagttatgaaaagccagcaaagccagagttccaattcgtatttgtcccggaaaagagccgattttagttgaaaaagcagaggaagcccgagacattacatggtttaggctttagcccca

SEQ ID NO: 464816 - DNA, 435 bp, Homo sapiens
tttcatgcaaaggagattctccattgctgactttttatgatgaaggtgccacatggtagggaacagtgggcagcccacagaagctgaragcaactctgtgagcaagaaggtggcaatcacagtcctacaaccacagggaacaagatcctgccaacaacctgaataactttggatgaccccaagcctcagattagaatcacagccctcgctgacaccttaattttattcctgtgagaccctgaacaaggaacctagctgtgtcatgtctggacttctaacctgtagaactgtgagctaataagctgttgttttaagccattaaatttatggtaattagttatgcagtaatagaaaatgagtagaccctctacactgaaactacaacagatcatattcagggaaattttacaactctgagtggctggagtgctacca

SEQ ID NO: 464817 - DNA, 435 bp, Homo sapiens
tttcatgcaaaggagattctccattgctgactttttatgatgaaggtgccacatggtagggaacagtgggcagcccacagaagctgagagcaactctgtgagcaagaaggtggcaatcacagtcctacaaccacagggaacaagatcctgccaacaacctgaataactttggatgaccccaagcctcagattagaatcacagccctcgctgacaccttaattttattcctgtgagaccctgaacaaggaacctagctgtgtcatgtctggacttctaacctgtagaactgtgagctaataagctgttgttttaagccattaaatttatggtaattagttatgcagtaatagaaaatgartagaccctctacactgaaactacaacagatcatattcagggaaattttacaactctgagtggctggagtgctacca

SEQ ID NO: 464818 - DNA, 568 bp, Homo sapiens
acacaaaaacttatatacaaacgatcacagcagcattacatatttgtaatagctaagaatggaaacaacccaactgttacatcaactgatgaatgaataaaatatggtatatccatacaatagaatattatttgcccataaaaaggaatgaaatactgatatatgctacaatgtagattaatcttgaaaacattatsctaagtgaaagaggccagacacaaaaggctaaatattgtatgatttcatttctctgaagtgtccagaataggcaaatccatagagacagaaagtagagtagtagttgagaggggttgtgaggagaagggggagtgggaagaaatgctgatggctgtggtgtttccttttagggcaatgaaaatattatggaatttggtagtggtgatggttgtacaactttgtcaatgtgcttagaacccactgaattgtacactttaaagggggtgaattttatgttacataaattatatctcaaagctgttattaaaaaaaaaattgtcacaaggctcagttactcaagactcaaagcgtgaatattcctgagtatagg

SEQ ID NO: 464819 - DNA, 555 bp, Homo sapiens
tagataagcaaaattaagattttaaaaaagtcacacaatatcattgtggtacacactakttcaaacctttttctgtgtatgtgtgcgcaaaataaagtggatgtttccactgaaagaaatatttattctgagagagaggaactgggagccggactaagtcctctgagctgattctaccgtcagtttgtgacaacttcgaaaatgctctggactaagtcactgtagatttgccttggaaagcagggctatgagtgaacactgcaacaaccattaagttttagagtataagcaatcttggtgttgagtatctttggtcaaggaaaacacaaaagaaaatacatttttccctcacaccctaaggagtgggttgcactggacagaaatatgtatcggcagaagggacactaaacacacctttcgtaccgacaaatttcaagggcaatattcacttccagtcttgttagaaatctaaggggtacggtgacttattatggagcaactggcactcagtggtaatgtgcagtcattcagcctcaagggagagcttctgaattc

SEQ ID NO: 464820 - DNA, 589 bp, Homo sapiens
catactataatgaggtatatgtttagaatactgactctatgaaaaatttttaactcrtatttttgtttttgctctggcagaacatgtaaaaataagcaaccttattaatacagcagtgaaaacattcatactaatggaagacttttttgctatcactttagataatattcatagtaaaactaaaccttttaaactaaatatttaactagctttaaaatctatccttgatcttagtgagaaaaagtaaatttctgtaattatggatgaatttaacaaattttgcatataatccaagaaactaaactaaactcacctgtttcatttgcctatatctcaatgatcaagacaaaatactaacttttcttgaaactagacaaaattaaattcattattaaaacaacagtttacaccattaaagcaataaaaaaaaaaaaaacagtagagtcctaggctcaataaaacaaagggcagagtgccatctatgtataattatccagaggcctgaaccactctttcccattcttgggacactgatcacttttatcacatttccaactctcaagagaattccaaagtaggagagaggaga

SEQ ID NO: 464821 - DNA, 622 bp, Homo sapiens
cagagtgccatctatgtataattatccagaggcctgaaccactctttcccattcttgggacactgatcacttttatcacatttccaactctcaagagaattccaaagtaggagagaggagaaatagtgaaggggaaaaatagagcagagggagaacgaatgyctggcgctttaggagaggcaggtagagtccctgcaagttttccagagaggagaaaagagaatcttttttcactgagtcaacaaacatgaatgctttcaacatgccagaaaatgttctagacattattatggcatcaattttaagtagttaaaataacgccttcaaagattcagaccataatagtccttgtccaaaatatcatatgactgatgtggagcaagaaacgtgtccatcaagaaatccagagtaaaggcaggagtgacatcagcaaatgagaaggactgatatcaaccagctttaaactgtcatgatgaaaaagcaacatcagttgagggatgccaaatgactcatgtttttctttatttttgttttctattatgatggagaaatatgctttttgacaactcgtatattgaatatgacttagatttcacaatttaaagcataagttttaagtcta

SEQ ID NO: 464822 - DNA, 622 bp, Homo sapiens
cagagtgccatctatgtataattatccagaggcctgaaccactctttcccattcttgggacactgatcacttttatcacatttccaactctcaagagaattccaaagtaggagagaggagaaatagtgaaggggaaaaatagagcagagggagaacgaatgtctggcgctttaggagaggcaggtagagtccctgcaagttttccagagaggagaaaagagaatcttttttcactgagtcaacaaacatgaatgctttcaacatgccagaaaatgttctagacattattatggcatcaattttaagtagttaaaataacgccttcaaagattcagaccataatagtccttgtccaaaatatcatatgactgatgtggagcaagaaacgtgtccatcaagaaatcyagagtaaaggcaggagtgacatcagcaaatgagaaggactgatatcaaccagctttaaactgtcatgatgaaaaagcaacatcagttgagggatgccaaatgactcatgtttttctttatttttgttttctattatgatggagaaatatgctttttgacaactcgtatattgaatatgacttagatttcacaatttaaagcataagttttaagtcta

SEQ ID NO: 464823 - DNA, 597 bp, Homo sapiens
atgagtcactttgtgataaatgttttaaatgtatgataatgtccaaacacagaaaagtaaaatcttgtgaaagcaaagtaagcaaatagcctatttatgaggtatgaggtagtgaatataattgaagattaaattttattcagtactttctggaagccagtacaaataaggaaagactgtggatcaaataagcctcattattcaatataatgcccccatatatccatataagcctcattatccaataacaataatcaaactagacaatattaatgaatattacacatgtagaatctcatttagtcctcattagagctcattaagtagttattactgtaactttaatttcccaaatgcagayacctgggctaaatagggtaagtagcttggctaagatcactaaggtaataagtggcagagagatgcttagaacaaactgggcactcttgctcagagcccacactctcacaaccatgctacactgccttcatttatactgcttctttagggaagacaaagttccttctggcactaaattccaaaaggaattcatcatatgggatcttatgtaagggacattgaacaacatgatgaaga

SEQ ID NO: 464824 - DNA, 509 bp, Homo sapiens
aaccaaatgctgcaagtgatagtcatatattgtcacagctgaatataggtaataattatttcwgcctcctatattttttcaaatcaggaagctgaatagagccactaatagagaatgctttaccatcctaccttagaatcaaggtctataaacccacaaattttcttatgtggctaattcatcttaactcaaactttaaatgccagaaggtctaagtgggcctttttgtggtaatttagagcttgaaataaaatttaacatcagtgttaatttagagtgatgttgtgttagaacttaataaacattaccaactgtagccatttcataataattaagttacgaggaacatttattaaaatatttaaaggaaagatccctaaaatagaactaaaacattaagttagcaatataggtcgtaatatattttccatgctgcttcctataaatttatcttcctcacacctactatttaacctttttaaggccccctaggcttacttattttatgt

SEQ ID NO: 464825 - DNA, 450 bp, Homo sapiens
ctttaccatcctaccttagaatcaaggtctataaacccacaaattttcttatgtggctaattcatcttaactcaaactttaaatgccagaaggtctaagtgggcctttttgtggtaatttagagcttgaaataaaatttaacatcagtgttartttagagtgatgttgtgttagaacttaataaacattaccaactgtagccatttcataataattaagttacgaggaacatttattaaaatatttaaaggaaagatccctaaaatagaactaaaacattaagttagcaatataggtcgtaatatattttccatgctgcttcctataaatttatcttcctcacacctactatttaacctttttaaggccccctaggcttacttattttatgtaaactttagcataataatgcaatattcacaaaatctttaaaaagaacaggccactctg

SEQ ID NO: 464826 - DNA, 395 bp, Homo sapiens
atgctttaccatcctaccttagaatcaaggtctataaacccacaaattttcttatgtggctaattcatcttaactcaaactttaaatgccagaaggtctaagtgggcctttttgtggtaatttagagcttgaaataaaatttaacatcagtgttaatttaragtgatgttgtgttagaacttaataaacattaccaactgtagccatttcataataattaagttacgaggaacatttattaaaatatttaaaggaaagatccctaaaatagaactaaaacattaagttagcaatataggtcgtaatatattttccatgctgcttcctataaatttatcttcctcacacctactatttaacctttttaaggccccctaggcttacttattttatgt

SEQ ID NO: 464827 - DNA, 467 bp, Homo sapiens
ctccttttcaggtttgacccaatggcctttcagaaagtcaccaaatctctaacaatgtgaattacttttttgtggattcatttcatttgtttgaggcasccatagtaaaaactttcaaaactgttctaaatgtgatcagtttttcgaaaaggtgactcctcagctttaatcaagtaaaagtacacaagcccacacatctttttcagaaaatcaggtccctctgatctatataattggtgaatatggtttataaagtatttagaaaatcatgtgcttttttataaaatgtagtttttatatttaaaatgtgtttgaagggtaggaagaaaaaagtaactttgaaatcagtggtctacttgcttcagtaaagaaaacaattttatctttaggagataatgattaggagggcaaaggaagaaagaagagaggatctgagtagggtggttgccttggccagaataaaaata

SEQ ID NO: 464828 - DNA, 545 bp, Homo sapiens
gtttctaccactggcctgtgcctcataagcaagcattaatggtttctggttttcacttctcgtgattaccgttcaaatagtatcttgtcactcaatttctaggtttactactagataatatggacgtcctttataaaagatgtaaaattgattccatttatactaccagcaaatccttctcattttttaagttatgtcttatttttagcttttccagtagttacctttatgactttaagtaacacattctccttttttttttattcagtcactttagaatatatctttggtattttccaactctcctactatttatcaacygtgtaatagtgataacggaagggggcagagaagtgctgagaaaagaattcttgggcaggtccctggctagggctccacccccaggtttgtgctcacgggcctgggtgaggacatgcacgcctattttcgtgcccaaatgttgcatttcccaagaccaccctagcctgtgatgcccccatcctgtgcttataaaaaccccgaaaccctagcaggcaaacacacaa

SEQ ID NO: 464829 - DNA, 545 bp, Homo sapiens
gtttctaccactggcctgtgcctcataagcaagcattaatggtttctggttttcacttctcgtgattaccgttcaaatagtatcttgtcactcaatttctaggtttactactagataatatggacgtcctttataaaagatgtaaaattgattccatttatactaccagcaaatccttctcattttttaagttatgtcttatttttagcttttccagtagttacctttatgactttaagtaacacattctccttttttttttattcagtcactttagaatatatctttggtattttccaactctcctactatttatcaactgtgtaatagtgataacggaagggggcagagaagtgctgagaaragaattcttgggcaggtccctggctagggctccacccccaggtttgtgctcacgggcctgggtgaggacatgcacgcctattttcgtgcccaaatgttgcatttcccaagaccaccctagcctgtgatgcccccatcctgtgcttataaaaaccccgaaaccctagcaggcaaacacacaa

SEQ ID NO: 464830 - DNA, 391 bp, Homo sapiens
ttatttcataataaaaaggcatggtaatttagtggtggcatgaatactttcagcaaatattttaatggaaaaatgaataaccatatagaaaaaatacaaacctgaacctttactccataacatacatgaaaattaaataaatgtaactaaaatatctctaaatgtaaaaagtaaactttaaaaaattctagaagaaatagaggagaaaatttyatgatttttgagtaggcaaatatttcttagaaaataaaaaatgataaattggacttcaccaaaatcaaaaatattttattttcaaaagacactgttaagaaaatataaaggccagccacagacaaagactgccaaatattgtatatacagtaatacatcacttgatgatggggaaaca

SEQ ID NO: 464831 - DNA, 585 bp, Homo sapiens
tatcgcttcgtgatgggctttatgtcctatattaatcaccaatttgtgttctacttaaaaacaaggttttgctggagttggtatcttggggttgagagattggggacagggcatatagggactgacgaataattctccacaaggaatttggttcctaacgtaaatgtagtgtgcaaggaaatttactagaaatcaggagagaagtaaattatatgacctcttcccactcatcctcaaaaatcaaattctcttctctacaaaataatgaaagatgaytagggatcaaggtgtttgcccaaaaagattattttttatgagtacagagtttcactgtattttttgctgctcagatcaagtatgaaatatatacatacacaaacctgttgaccacattcactcaatgaatagttattgagcaagtgtgtgccaagtcctgtgcctgatttatggtggaaacactaaagacgaccctatctttgggaaattaatgaacagaagggcataaaacacatgaacatcttgagagaagcattaatttcctaaaaaccttctagcatgggattgggtaatttgattatattaaga

SEQ ID NO: 464832 - DNA, 585 bp, Homo sapiens
tgcattttaatcccttaaagaaaaactttggataatgactaatattagcaaaattgacrtaattgtccaattgaatcaactaaaaatatttaaattatttttctgaatcctagtaagcttagtagtgaaatcaggaaatgatttcccgtgaaactaaatagcctagaacaaaatgtccccttttcaccagaaaactgacagtctaataattgagaattttgttatataagaatagaaagtacacagatgttacttattgctgtttgccaaaattaaatttctttctaaagttttgtttaaaatatgtgtaactgtagaatatgtaacacatttttacccagtagtaaatattatgtatgtgtgtatataagaaattttagatactttcctaatatttactgatgagttcatagttcattgctaataataacatattttctaaaatcataaatggcaaaatcagtatattttttattaaagcatgccaaaaaaagtagtttttgcattagtgatacactttatggtgtatattttcaaatagagtatctactcagacaaaaaaaagtacagctagacgaggagaca

SEQ ID NO: 464833 - DNA, 542 bp, Homo sapiens
agatgtcatgcatgttgctacctcatagatatgttaatgagtgacacaaagtttccaggtccagtcacaaaaatgccatttccctcctccacttccttacccacattcaaaaggccaaggtaaacacgtcctggggcaacagtctggagagtataaccctagaaataaaatggattcagataaattccagagtgatctgccagtgactaatggtaatatctttagttagccagagttcaaaaatacaaaaagataaaaatcttgagtgcaatctcataaatctttaacccatgtagccctactccayagcaaagtcttcttgaaagcaaataatgatttaaaaaattaacttcttatgttaactagctacccagataagttcaagaaatggaatgaacattatccaggaattgaaaggaaatgactaagagttaggaaatggtaccagcatcaagtatgacaacttgtaaagaagggtgacattccacacctcctatctgggtagggtttacaggacttcctatgaactgtcataaaagata

SEQ ID NO: 464834 - DNA, 578 bp, Homo sapiens
atataccctttattgccttcacctgagaaggatgactcctastatgaaccctccctgggccactataagggagtcacgagagaatggaaaggagcgttatgttgactaacatggaatccaaagagatgaataaatcttctacctccaaaggccatttcttaattaaaaaaaaatcctttcacattagttacccctcatacttataatgctatctaagaaatattatctccattttacaaataaggaatggaggaggttcacagatgtcatgtaaattgcttgggccagtggatgagcactaggcatggttgtaaaaatctagactcttttcatccatggcttttgtgcttttctctccactggggtacctttcctcagtggaggaagtcctttcatttttctcacgtcaaaaagccaaaggctatcataggagaatttatgattactatcaggattgttggttaaatataagaatgtgaggctggtaaatatagtttatttatataaatacacagtaggagactttatctctttaatatgtgatccagaaaatagaatttgtaaagctgatgatgaac

SEQ ID NO: 464835 - DNA, 557 bp, Homo sapiens
atataccctttattgccttcacctgagaaggatgactcctactatgaaccctccctgggccactataagggagtcacgagagaatggaaaggagcgttatgttgactaacatggaatccaaagagatgaataaatcttctacctccaaaggccatttcttaattaaaaaaaaatcctttcacattagttacccctcatacttataatgctatctaagaaatattatctccattttacaaataaggaatggaggaggttcacagatgtcatgtaaattgcttgggccagtggatgagcactaggcatggttgtaaaaatctagactcttttcatccatggcttttgtgcttttctctccactgrggtacctttcctcagtggaggaagtcctttcatttttctcacgtcaaaaagccaaaggctatcataggagaatttatgattactatcaggattgttggttaaatataagaatgtgaggctggtaaatatagtttatttatataaatacacagtaggagactttatctctttaatatgtgatccagaaaatagaa

SEQ ID NO: 464836 - DNA, 544 bp, Homo sapiens
tagagatggagtcatattcattttatataaaataatataagcatttttttctgaactctartctgagtcatttcactgatattcagatctccaaaacacataataaatctgaacacattcaatgctagtgagagaatttctacaaagcactcgatgcccagtagatgctgagtaaacagtagccaatttcactgagtacctaagtggtacccagtataaagaaagtcctagaagttcacaagaagttacagaccctgtttcgtgcactcttgaagttgacattccactttgattgtaacttaaatacatatacatgtgaatagcaacaaaagctggaatgtgattaagtctaaaagtaaatattccaataataaatgctgcaggaattagagaaaaaaaggcattattttgagctgggtaatacctttttttataaaaattattgagctcgtgattgcaataagctatacaaatctcaatcatcaaaaaattaatgttaacaacatgtctaaaaataagtatgtaagcactaagaagtttaatg

SEQ ID NO: 464837 - DNA, 544 bp, Homo sapiens
tagagatggagtcatattcattttatataaaataatataagcatttttttctgaactctagtctgagtcatttcactgatatkcagatctccaaaacacataataaatctgaacacattcaatgctagtgagagaatttctacaaagcactcgatgcccagtagatgctgagtaaacagtagccaatttcactgagtacctaagtggtacccagtataaagaaagtcctagaagttcacaagaagttacagaccctgtttcgtgcactcttgaagttgacattccactttgattgtaacttaaatacatatacatgtgaatagcaacaaaagctggaatgtgattaagtctaaaagtaaatattccaataataaatgctgcaggaattagagaaaaaaaggcattattttgagctgggtaatacctttttttataaaaattattgagctcgtgattgcaataagctatacaaatctcaatcatcaaaaaattaatgttaacaacatgtctaaaaataagtatgtaagcactaagaagtttaatg

SEQ ID NO: 464838 - DNA, 575 bp, Homo sapiens
ggttaggaattaattctatctgcctacagcattattcagtaatacatttgctataatcaaataataataacagttaatctttaatgccctcttgctatgtaccaggcatggtactcaaaaatttagacttaattctaattaatacatttagtcctcacagtaagcctatgaaatggatactcttatcaactgttttatagatgagaaaacattagccacagcttagcttatttgaagtcacaataatattaactaagtaagagcaaaagccaagattcaaatgtagattattttactacagactgagaaacgaattaaactaggagcctaagatactttctggaattgaaatgatacattatatatacctataaagataattgactatagcttcctaaactacaaattgtcataaaaatgacttctgtcctatatcaattagaaactggtattaaaattgagtattataaracaatagaatgtctagagcttttaatacattgatatcaatatcaattgatagacttcaaaagcttcataattcatttattcaaataaatagactttaaaacatt

SEQ ID NO: 464839 - DNA, 510 bp, Homo sapiens
tacattcttttagaaaaggacttagcaaagagtgacctgaacatttagaacaagttgaacctgacattacattttttatccagaagatttatcattgtttgtgatagacaatgcattaaagacacattgaatttcaagtagctacaagcaaacagccttcaaaatatatcagaagactgaagaacaacttcagacagcactgaggagatgcttcagatgaaaattcctatattatgagaagtataaaactgtcttcacaagaaactaaggaggtttggagtgctctgactctaacagcagcataggcrgccctctgcctatgcttggcgttgatgtacattgtttccataaaaagaactgactgcgttagaatgaaaggaagctatctgtgcagacctgtctttagaacctttgaagataataaaataatatttgattctatggtgatattctctagatgaagctatggtgaaaaatgttttggaaaggaaaaaaaaaaaaaaacagaca

SEQ ID NO: 464840 - DNA, 584 bp, Homo sapiens
tatgatattttgtataggcatgttctatatttaatcatctggatggtgtgttatgatgatggtctggggtggaaaaacacttattggctctgaagaacacagatgcaagcagtgatgaatacagcctgtgagttcatcagtgcaaccagctggaacaaacataagcaatttgaaaagttctatctgccactttctatctgtattaacatctgagaaatgttgaatcctgcaaaccaagtgaaagtcaatttatctgaaagttcagctgtgttcaaaacagtttttttaatatgcaatgttgtactattatggaaatatgaagtgatcccttttctggattttcttaagaaaatgcaataaataaaatattgatcatttgtttttaaaataagatgttttgtattaaacagtgggaaaaaaagaagctaaagagtggatagaaagatgagcaaacttagtaatcagkaaaataaagtttaaaaaaagtagtgcatatggaataagttttaaatgataaagtcagatccaccatttgctaaagatgacagatcagcctgctgttgatgaagaagaaaacacgaaca

SEQ ID NO: 464841 - DNA, 586 bp, Homo sapiens
gtgtgaaagatgtactcaccataattaggggagtcagagatcacctctaaccatctttaagctcttacatgggcccttcagctgaatctataaaccaaactgacaccaggcagattaacaaaacaaaagcatacacattttattagttttgcatgtacatggggacttcacaaaagagtaaagtccaaagaagtggccaaaaaaagatgcttctatactttttagacaaataatgataaattttagaagaaatgacaggacaaaggaaatctggctagggacagtaactatattcaggttcactgtaggccgccagttcccagtctctggcgataagggctattttctagctctggtactgggagggtactcctcccagaggaatctttatggcttgctgcctgcaggaagagacaggtcagctagacctttctgaaactatcatttctccaatgttttcaactcaacgtagtcaatatattaacccagcatatttcgggatgstatatcattcagtccttcacatacaaccacaaaattccattcaatatgtatcttagagcagtggttctaggatatatgtgtg

SEQ ID NO: 464842 - DNA, 576 bp, Homo sapiens
gttaaaatgatcaattttgttatgtgtattttatcacaataaaaaatcccacaatccatacagaaacagaaagcacataatatggcaaggaacatacaagccagaaaacataagaggacagaggcccaaaatatcaatcataacaataaaggccaatgggttaaaccccattatagactttaagatggaacaagattattacaattttctgctatctataataaagattatgaggtatattagtcaagccaaaattgttatataccgttactaacattaagaataatcayattaagcataaattactagaagtactaaaagaagttggcaagaatacaatggtcagaggaagttttaatacatccctttcagtccttgacagatcaagtaggcaaaaaattattaaactagagacatggacaatggtatcaagtgctaataagtaatgtggaaaaaccacagcaaagagaaccttattctttaaaaaaaaaatgtacttgccacatcctttggccagagagcaaaacaatttttaaaaatgatgattatatataaaataattccaactacttgaaa

SEQ ID NO: 464843 - DNA, 441 bp, Homo sapiens
ttgaattactaggtttatgtttctaaagatcactctggccactttatgagaatgcaatatgatagcaaagagtggaagcaggggagttacagtaatcatttaggagataatgatggcttggatgaaggtggaaacagtggtgatggagagaactgaatggacttgggatgtattttgaaggcaggactgtcagatgttgtgatggagatgcagtaggagtaggaacgaatggaagagtcacttaaattgttcattttagccactcyctgggtggttgtgacatttatcaagacagagaaggctgcaaggggtgttaggtacatggtgggaattcaagagttctgtgtgaagaagctcagacagagcacgcatataaaacatctaagtagagaagtcaagcaggcatttggctgggagtcaagctcatgggagaggttatga

SEQ ID NO: 464844 - DNA, 331 bp, Homo sapiens
acccatgaccatgcagactatgtgtatgtcattcccaatgagtgttactgagaagaaaaggctgaggacttccttccagaaaacaagaagtcagacctttaattccagaattgcatgaaatccaatcatcagttagaaaaatttcaacaaaacaaaaactggcatcatctctgtctttcggggctaataatgtaaagaaatggaaagttaaatccagtgatagatacgcacgagaccataggctttccaccatcatatcccttcctttgtagactaattcttccatgaatcaaatgcttgggtcacrcagaatatttgcagcccccaaatg

SEQ ID NO: 464845 - DNA, 457 bp, Homo sapiens
agttactagtttttttttcatctttttttttggttataccattatgcaaggagttagttaaaaaatgtatttgatagactatacatatttgatatatatatgagatagacttttatgtatatagcagtgtgttgggttctttagagggaaatagcagtataaattagggtttctttccttcaggaggtgacaaatcattgaaaattagagttgaactattatctacacattatataatgatacaaagcaatatttcccccgtaaataatacagccaactaatgctttggaaattaagaagggagacggtgtggtctagagtgatttgttgaagccktcagagagatatctgagcttgagctgaactttgaagcttggatttagggagaaatgggaaggtcatttcaggtagaaaaacataaaactggaataagtgtggaagagggaataacttatgc

SEQ ID NO: 464846 - DNA, 533 bp, Homo sapiens
tattaattaattaattataaagctaactttaagacaccaatattgctaaataaacaaatgattcagcaagtttttaattttaatattatctttctctaacttgttttttaaataattataattatatatttattcaattattactttatgcaagatattrttccccatgtttttaaaaaattattactgtggtaacaacttcatgagattttccctcttcacaaaattttaagtgcacaatatggtattgctaactgtagacacaatgttatatggcagatctttataacttattcatctttaaaaactgaaatcttgtatctattgaacagcagctgccggtttctccttctccctaggccctggcaaacaccattctactttgcttcctatgagtttgattaagtggaatcaacaaatcacaaagaaagacagggagaaaaagagacacaaataattacaaaagacattgaaaactattaataaaatgacaatgagttttaagctatcaataattactataaataaaatgg

SEQ ID NO: 464847 - DNA, 550 bp, Homo sapiens
gtgtccaagttagattggcttgggtggtagagttgggcaagtgatattctagcattccaggattcagtctggttttataattttcaccctgggattaatttcctacaatctgagtctgtttcagaatccacaaatcccagaatctcttaggtggttcytgcgtccaccaaccttgagatgtaatgggccagcaatggtcttttgctcaggtactaattcttttactcattcatttattcattcattccacatatgttaagtgtctaccatgtgccacataccatgctgggtgctaggaacaaaacgaatagtaaacttggtccttacaatcgagggatgtgcagtctgttgtgagaaatgggccatgaatacatacaaatttaatacaaagtgaaagaggtaggtggcataataaaaatcgagataaagaataatggagattcagaatgattcaggatctcacttctcttacctctaaaatggaaatgaacagattgtcttttccacaaggtggtttacaggtttaagtaaggtcgtttctctgtgtaca

SEQ ID NO: 464848 - DNA, 536 bp, Homo sapiens
attttttgatggagtctttagttttttttcagatcatatcatctgcaaacaagggtaatttgacttcttcctttccaatttggatactctttatttctttctcttgtctgattgctgtagctaggactaacagtactaagttgaaaaatggggtgaaaatagacatccttgtcttgttctagatcttagaggaaagactttgttttctgtgtccagtrtgatactagctgtgagtctgtcatatatggcttttattatgttgaggcatgttccttctatacccagtttttttgcagatttttatgaaggatgttgaattttatcaaatgctttttcagcatgaattgaaatgattgtatggtttttgttcttcattctgttgatatgatgtatcacatcaatttacatatgttgaaccatccttgcattcctgggatgaatcccacttgctcatgatggatgaccttttaatgtattgttgaatttggtttgctagtattttgttgagaatttttgcatcaatattcatcagatgt

SEQ ID NO: 464849 - DNA, 595 bp, Homo sapiens
ggtatggtttgttcttgtttctttagttccttgaggtgtgaccttagaatgtcagttagtctctttcagtctttttgatacaggcatttggtgttatgatcttccctcttagcaccacctttgctatatcccagaggttttgataggttgtgtcattactgtcgttcagtttgaataattttttaatttccatcttgattttgtttttgacccaatgctcattcagaaacaggttatttaatttccatgtatttgtatggtttcgaaggttccttttggagttgatttccagttttattccactgtggtctgagagagtgtttgatataatttcaattttcttaaatgtattgagactcttatggcctatcatatggtctatcttggagaaagttccatgagttattgaatagaatgtgtattctgtggttgttggatgaaatgttctgtatatatctattaagtccatttgttccaaggtatcgtttaaatccattgtttctttgttgactgtctttcttgatgacctgtcaagtgctgtcagtggagtattgaagtccccyactattattttgttgctgtctatctcatttct

SEQ ID NO: 464850 - DNA, 605 bp, Homo sapiens
gaaccaaatagatatcatttctcaaccttttatatggtgtttccattagatgaattattttaaaagacctgactattacaatattgatgactatgtcaaaaattcatccaaagaataccatcataggatagactgcctctctgttgagacagggagatatctcaatttttaaaaatcaccaaattcattcattctacaaatcagtaggctgaatggtactatggtaataagtctataggtacayggacaagattattatttaataattaatctttctttgcctacctcctttctcaaggtagacatcattaaccctataaaaaagggatcagttctctcttgaatgtattctcatcctaactacaactttaaacaaaattgtgagattagataatgagaaggttaaggtgaaatgaaggtttttctagtatctataagcagctttctcagacataaataatcaaaagtccttttctcaaattgattttggggaagagtatcccttttgagtacattgctgaatagactagttaaactaatcgtgattgccttgtgtctgggcacccactcattcagaaatgtagtgactactgtgtcccagatac

SEQ ID NO: 464851 - DNA, 574 bp, Homo sapiens
ttaactttgtagcatgttcagtcatacagaaacaagttttaaatttagatcaagtcaaatatatcaattaaaaaataatttatrattttcagttcttgtctgataaatctatccatcctccaaggtcataagaatattctataattttcaaatagttttaaagttttgctgtttttcattgaggccttcaatctatttggaatttatttttattatggggagaagatttagtatcaataattgttcactttttcctctaatgtgtcatgctatctttaacaaatctgttatgttctattgatctatttgtctactgctgaccaataatacagcttcataagtttttatatctagaaagtcaagtcccttctgtttgttcttctttatcagaattgtcttgaatatttttggatctttgcttttccatttgaataccagaagtattattccaggtttattaaaaaatcttgttaagattttaatcagtattgcccaactgacaacatctctggctgatactgcctcagagaaaccaaacggctccagcactgtgaatctgagcagaaaaaagcat

SEQ ID NO: 464852 - DNA, 597 bp, Homo sapiens
  misc_feature (1)...(597): n = A,T,C or G
gcagtctgcctcacctcattctactgaccaccattgcagatggagccttggtgggcacagagccagccagccccaccccttccagtgccccacccttgtgctaatactgtgcagagaacagcagatcctcccccaacctgagcaaccactcctgcttgcagagcacaaagaaggcacctagacctgtgcccaytagtgtcgtggtcctgagtcaacaccaccgtccaacagtgaccagtgcacacaggtcaccagcaggggcccctatggccgtcttccccaacagntgcattacctctatcantgtggtgaatatccacagggaggcaggcaccctgctgctgctaccattactgctnacatgtgtgaatgaggatggagcctgctgtcactgcactataaaatgctttggatgacaccacccattgaagtgtagtgaccagcagtctgggagcaacttggccacctccagcacagtggatttttaaccttaaggagccagagaacaaagtcaaggccccaatacaagttccccagagttagagcacacaggccaggaggtgggagctgagcactgactccctaaaatcttccaga

SEQ ID NO: 464853 - DNA, 602 bp, Homo sapiens
tgaagtggcttcttttcaaacatttatgagaaacataaaattttagtttgctttctcaagtgaataataattactctggatgggaaggattcatccagagacataaaaacatccccagtcactactaattaaaagaaatctactaagacatatatcactttggctagaaagcaatagcattccttattctaactatatcacagggcttgccaagtctcagtgaaaaggggaattaatttgacccagaaaggcttactcagagaggcatccaccagtcctacgctgttgtcagactaacaaaaacagtgtggaagaacaagagttagggtaagaatgatctaagagaggtttyctgaagccagcactatatcaggctgaaggcagtgagattcatccaacaagagttcaagattttgaaaactggcacacacagaagcctaagcagtgacacagtaagtaggaaacaggggatgaccacaatattttggtcaattcatataaagggtccattggatgatatgtgatatgtcttattgacaaaggtcaggctggactaaggtatagagcaaatatgtccttactcaaacctcctcagaagtaga

SEQ ID NO: 464854 - DNA, 641 bp, Homo sapiens
tgctactgagctgatattagaaatacattatttgtacatcagttgtttccagaaattcaccttaaaagcacagttctttctgggagtggtgggctttaagcaattagcayataacactgaccaaatatatcaaagattggcaatgtagtggacttaaaaatctggaaagaaagagaacaaaataaaaacaatattccttttattaacaaaatatgatcataataactgtaaaagaatttttatgacaggaaaagtcacccttaccccattgtcttaaaactctaacataaccctttcctgcattttttctctgcccactggggctttaaaaaaaatgtattggtagtcagaaatattttgatctgagaagactgggggagtcagtttagggtcagtagcctggcttagagtgtgggtagattattgctgagggatatttggggagagtcctgaagcctagaagtgaaaggtgaggaggctgcaagaggagagggactggctgggttaaagcccagaaccttgtaaagcacctgcttttgggtggtggttctctacctcctgggtcctgccttaaccagatcaaatggctgctctctccttaggcagaaaccacatgccttctgcccgctagctgcctctgg

SEQ ID NO: 464855 - DNA, 571 bp, Homo sapiens
agatgtttaatagggattgagagacactggtatcaacccaagagcaatgatttttaaaactgttacatatatctaaattacatgaagagggtgctaagaatacagactaccaagccccacatcgagtgagtctaattcagcaggtctcagasagatgtgacccaggaatgtgtatttttagcaagctgtaagaaacatggctgtgctgcagccaagcaggcacaggctgaggtaaacatcctgcatgactcagcaggattggagtgcaggcacacattctcatgccttatataatcacagctatctaaacataacatagagaagctcatgacctggctctcagccactattgtttgtaaggtgtataaatgtaacactgacactgagaaagagctgctaaataaagccatatctcatctacctgctgtctctcgagtgttcttctagctccctgccccctatccacccactcccctcagacctcagctggggctcgaacctgacaattggcatagtcagcaggatgaggtgagtgggtcttcattccttgaggcttccaggtcagctctgt

SEQ ID NO: 464856 - DNA, 419 bp, Homo sapiens
ccagttaatctgtgttctgttgccaggtacggggcaacgtccaaccaaccatggggatagtcagggtggtggtggtagtgggggggcacgggtttgaagtaaagaagaaatgggcagaatctggcactattttgagtctgtcaaatygccatacatgaggtaaaacacataattcttggaaatgtaggtaatatatgatgtctcaatatatgacagactagtaatagtggatattgcatccttattattatgattaataatattattattaattaatgatcctcaaattaattaattaatcctcaaattaaaattatcctaacattacatggccaattatttgtgggtggaggggttgactactcatgactcaagtagttttattgttagatgaaaaggatgcagagcgagtggaagcc

SEQ ID NO: 464857 - DNA, 419 bp, Homo sapiens
ccagttaatctgtgttctgttgccaggtacggggcaacgtccaaccaaccatggggatagtcagggtggtggtggtagtgggggggcacgggtttgaagtaaagaagaaatgggcagaatctggcactattttgagtctgtcaaatcgccatacatgaggtaaaacacataattcttggaaatgtaggtaatatatgatgtctcaatatatgacagactagtaatagtggatattgcatcmttattattatgattaataatattattattaattaatgatcctcaaattaattaattaatcctcaaattaaaattatcctaacattacatggccaattatttgtgggtggaggggttgactactcatgactcaagtagttttattgttagatgaaaaggatgcagagcgagtggaagcc

SEQ ID NO: 464858 - DNA, 419 bp, Homo sapiens
ccagttaatctgtgttctgttgccaggtacggggcaacgtccaaccaaccatggggatagtcagggtggtggtggtagtgggggggcacgggtttgaagtaaagaagaaatgggcagaatctggcactattttgagtctgtcaaatcgccatacatgaggtaaaacacataattcttggaaatgtaggtaatatatgatgtctcaatatatgacagactagtaatagtggatattgcatccttattattatgattaataatattattattaattaatgatcctcaaattaattaattaatcctcaaattaaaatkatcctaacattacatggccaattatttgtgggtggaggggttgactactcatgactcaagtagttttattgttagatgaaaaggatgcagagcgagtggaagcc

SEQ ID NO: 464859 - DNA, 564 bp, Homo sapiens
gggaagtattgccctgcttcaaccagcagataagtgctccaccccttgctctctctcctgaagcaggaatacactcttcactatgggggtgactgatctgctttgtgggtgcaagatagcagtcatgtctccttttgttactgttctctcctttgtatggcccccacaattgtctttcaaaggttcaagaaacttctgaagaaaacacccaagaaccacttctgcataccagaaccatggcagcctggtctgggtgacagccaaaaaactttttctgtaaatagctggagagtgaatattttatgctttttgcaggccatgaggtttctatcacagctactcaactcgggcttgtagcagaaaagcagccatagacactatgtaaatgaatggatgtgactgtgtttcartaaaagtttactgggccatagtttgctgacccttgagttagatcaacaaaaggctctctttactggaaggtacttccatattacagcaggttaccagagtgttctgggctcctctggtgaactgtgttgaggatggttggcctggaaggcagta

SEQ ID NO: 464860 - DNA, 593 bp, Homo sapiens
atttcttgtatcaccccaaaactcactaargcagatttactttcaactgcactcaatcaaatagatggtatgcttagaggtatcacagggaagatcctcttcacagccctgccctcactctccactgttgcagagttaatctttagaaatattgagtccccaggcttgccatgttctcctggtagggtgggaggaaatactcagtgattgtttctctcctatgattctgcttctcttcctatgctgagaattctgttctgtttgctgctgatagctcccaaataatgaatggtcaggtcgtgggatgacttcagaaatggcaaccactgaatggcaaagaaagtccttccaagtgtgtttgtatcatccagagcctaaatcatgcctatataaggacttcaggtagaggattacatagggcatgtagctccacagttaggaattctgagcaaatactgcactagaaggaagcatataggtggctgaattgttttcagaaagctttctcttcccttttctggttgctatggtctatatattggtgtctccccaaaattcatgttgaaaacctaatcaccaatgtgataatacta

SEQ ID NO: 464861 - DNA, 593 bp, Homo sapiens
atttcttgtatcaccccaaaactcactaaggcagatttactttcaactgcactcaatcaaatagatggtatgcttagaggtatcacagggaagatcctcttcacagccctgccctcactctccactgttgcagagttaatctttagaaatattgagtccccaggcttgccatgttctcctggtagggtgggaggaaatactcagtgattgtttctctcctatgattctgcttctcttcctatgctgagaattctgttctgtttgctgctgatagctcccaaataatgaatggtcaggtcgtgggatgacttcagaaatggcaaccactgaatggcaaagaaagtccttccaagtgtgtttgtatcatccagagcctaaatcatgcctatataaggacttcaggtagaggattacatagggcatgtagctccacagttaggaattctgagcaaatactgcactagaaggaagcatataggtggctgaattgttttcagaaagctttctcttcccttttctggttgctatggtctatatattggtgtcyccccaaaattcatgttgaaaacctaatcaccaatgtgataatacta

SEQ ID NO: 464862 - DNA, 575 bp, Homo sapiens
agccagggcaagctgtctgcagctgctgctggaagggcggtgcagatccaacagttggagacattggtcaactcrgtgtaggtgtgggcccagtccatgatgttgttggagcatgccaacctacagctgaaatgacaaagcaggaaccggtacctatagcggtaaatcacatcactcaggcaaaatacaggccaactttttatctctggataacaatgcaaccatcaaggacttctgccctggctgatgataccacaccttcttagctccccatggttcttttgggtctcgtagctgtgttaaagtcacaggggagatcataataggccacacagacataataggccacacataataggccatacatatgttccccagaggagggtcccttccctacttttcccctaccaatggtcaatcatgaaggccacacattaaatacccaaggagtcacatgtaagtcatactgcatgccctcccctaagggggctacaatagccaatcatctgtaatggagggcttggagggtccatggccaacaccaggttttctgttcccctcccttcaggggcacc

SEQ ID NO: 464863 - DNA, 575 bp, Homo sapiens
agccagggcaagctgtctgcagctgctgctggaagggcggtgcagatccaacagttggagacattggtcaactcggtgtaggtgtgggcccagtccatgatgytgttggagcatgccaacctacagctgaaatgacaaagcaggaaccggtacctatagcggtaaatcacatcactcaggcaaaatacaggccaactttttatctctggataacaatgcaaccatcaaggacttctgccctggctgatgataccacaccttcttagctccccatggttcttttgggtctcgtagctgtgttaaagtcacaggggagatcataataggccacacagacataataggccacacataataggccatacatatgttccccagaggagggtcccttccctacttttcccctaccaatggtcaatcatgaaggccacacattaaatacccaaggagtcacatgtaagtcatactgcatgccctcccctaagggggctacaatagccaatcatctgtaatggagggcttggagggtccatggccaacaccaggttttctgttcccctcccttcaggggcacc

SEQ ID NO: 464864 - DNA, 582 bp, Homo sapiens
caggaaaaacagaacacttttttatgttcctacctcaaaaaacagggcaatcagaaactgcaggaaaaacaagacttttttttwaaagaagttatggtaccaaatataaaactttcaaaaaatgtgacatggttttaagtacgtaggtgaaatatagaaaagaaagatgcttttgcatattcttcctttgagtgatgatataacattgaaaccttagaatatgaattaataacttaatagctgggtctgcagtaaacatagctagccataatattttagaatccacttattgacaaggcatgtaagacctaatgataattttaaaaacagaatatgaattaaccccagcaatgtgtagggacagctgactgaaagaagaaatgaggaggaagaggataaagtaggggtcatctaactattcagagaacatgtaagaggacggaatacctgctatcataccaaaaaatcaaaacctgtataaaaacatgacatgtatatcatacatatatgcaactattatatacacaagattaaaaaaatttttaattaaaaaaaaaccctgccaaagcctttttaaaaaag

SEQ ID NO: 464865 - DNA, 372 bp, Homo sapiens
tgaataaatatttttaaacaatatatttgcctgggtgtgactggttgggagcaaggggtctgccttaggaaccagatccctgagctgaagtatgaaaatggggctggtcaggactcatctgagaactggcacagggttgtatgtgctgggaagctgatgactgggaccatccatgagaagcagggcagatagcagccagaaaacagcccagggacytgaggcaggttccccactcacactacatgatcgctgcatgaagtggcttggagaaaatagagaaacaattcccagaaaaaaaaagacatcactttgaatgtttgaatcttcttccaccctcaccattagcaggctgcccattaaccttcagggggc

SEQ ID NO: 464866 - DNA, 553 bp, Homo sapiens
tctcctggccatatacaagaatgcccatttacaccatcatcaacactatgttttcatttttcaaatgaagatgaaaaatgcatctatgttaaaactgacatttctttattaataaatagaaataaaatttttcttttgtggattgctccttttatgactttgacccattttagttttaaggtgtctatcttttctatgtttacaagaaaaatttaatactaaaaatttaatgttggccaggcacggtggcccacacctgtcatcccaacactttgggaggccaaggtgggaggatcacttgagcccaggagttcaagatgagcctgggcaacatagtgagaccccccgtctctacaaaaaataaaaaaattagccaggcatggtgccacatgtctgtagtcccagctactcaggaggctgaagcaggaggatcacttgagctcaggaggtcaaggctgcartatgctgtggtgctgtggtcataccactgcactccatcttgagcaacagagcaagaccctgtctctaaaattaaaaaaaaattgttatgcct

SEQ ID NO: 464867 - DNA, 592 bp, Homo sapiens
ggtcagttccattcattacctcacaggtcagggttgtgttgatacaagtccaggagatctttggttttgagaccctctctaaaaagaaagtaaagattcagttcaatttaggcaattttctgattttaataaacatatctatttatacagtgggggatggagtcagttagggacaagggaacaatgtcaaagacctctagcaacttttggaaattattttattttattttatttacaaagagcattcagaaaaaaattatttctgatgacattcacagatacattatgccactaaatagtgtatcatatgtaatgtttatatgctgtcttataccttaaaatgctttcacatatatgacatcacttaaccctaacagacaggctgatgtttttcttcccatttacagacaaaatgttcaaggctctgagaggtccagtaggtggtcttggggcaccacctaaaacatggcagtcagggtttaggagtaygggtaagaaagtgcctccagagtttgagaaaggcaatgctttaacagcagccaggaaccccatcctggaggaatcaccacattgacatgtgactggggacctt

SEQ ID NO: 464868 - DNA, 443 bp, Homo sapiens
ggtccctcaccctcccttgccagggcgccctcagggaggccacactgcaggaggcaaagtatgaggtggggaagatggatcggccttatactcaccaccccccatacgaggctcctctggtatggayggtgtctcctctctggtgggaagtatgtgatttctctatttctatttctcttttgtttgggcttcctagaaattcagagctaggtgtgaaattcccaattcccacacacaagcaacatccccagcagtaataaggacgttccacacacccaggacttgggatatttgtgtattttcaagaataaaagtttgccctttagcctcctcagagccccctcccttctcctcgctctccccttatcactgctattcatcatcttactcctacagataccccctcttcctggtggcaccgggcattggtaactcatggctgt

SEQ ID NO: 464869 - DNA, 598 bp, Homo sapiens
ctagtagcaactaccaatgaattttatttattctgctatctgtataatatttgtggcaggctggttaacaaaaatttgtgggctggtaaattttcaggctaatttaactgtaagagtgatttgaaggagaaaggttagaagatggtgacactgagtaaagccattcaagttaaaataaacagaayagaagagaaacgggtgttttcagaccacccacattctctcttttctgcctgctctctccattgcccacccacctaaacactagccctctcagagtacaccttttcctacctgtgtgctcagtctcttctctcacctgcctacggaggaggtgtgctttcttttatgggcaggacactgggttgctctacagactgcacctccctaacagggtccactagtgtaggaggagtgctagggtggtaaacagaatgtgggctctgaatgatctaggttcaaagcctggctctgccactttctggctatgtgaccttggacaagttccttgaccctttgaagcctccgtttccatattataaaatgggataaccatatttaccttgtgtgcatattgttaaggatctgagggcgcagt

SEQ ID NO: 464870 - DNA, 443 bp, Homo sapiens
ggtccctcaccctcccttgccagggcgccctcagggaggccacactgcaggaggcaaagtatgaggtggggaagatggatcggccttatactcaccaccccccatacgaggctcctctggtatggacggtgtctcctctctggtgggaagtatgtgatttctctatttctatttctcttttgttygggcttcctagaaattcagagctaggtgtgaaattcccaattcccacacacaagcaacatccccagcagtaataaggacgttccacacacccaggacttgggatatttgtgtattttcaagaataaaagtttgccctttagcctcctcagagccccctcccttctcctcgctctccccttatcactgctattcatcatcttactcctacagataccccctcttcctggtggcaccgggcattggtaactcatggctgt

SEQ ID NO: 464871 - DNA, 443 bp, Homo sapiens
ggtccctcaccctcccttgccagggcgccctcagggaggccacactgcaggaggcaaagtatgaggtggggaagatggatcggccttatactcaccaccccccatacgaggctcctctggtatggacggtgtctcctctctggtgggaagtatgtgatttctctatttctatttctcttttgtttgggcttcctagaaattcagagctaggtgtgaaattcccaattcccacasacaagcaacatccccagcagtaataaggacgttccacacacccaggacttgggatatttgtgtattttcaagaataaaagtttgccctttagcctcctcagagccccctcccttctcctcgctctccccttatcactgctattcatcatcttactcctacagataccccctcttcctggtggcaccgggcattggtaactcatggctgt

SEQ ID NO: 464872 - DNA, 443 bp, Homo sapiens
ggtccctcaccctcccttgccagggcgccctcagggaggccacactgcaggaggcaaagtatgaggtggggaagatggatcggccttatactcaccaccccccatacgaggctcctctggtatggacggtgtctcctctctggtgggaagtatgtgatttctctatttctatttctcttttgtttgggcttcctagaaattcagagctaggtgtgaaattcccaattcccacacacaagcaacatccccagcagtaataaggacgttccacacacccaggacttgggatatttgtgtattttcaagaataaaagtttgccctttagcctcctcagagccccctcccttctcctcgctctccccttaycactgctattcatcatcttactcctacagataccccctcttcctggtggcaccgggcattggtaactcatggctgt

SEQ ID NO: 464873 - DNA, 618 bp, Homo sapiens
cctttgctgtgtagaaactatttagcttgtatttctggtgctacagaaatacagaggatcataagaaatgactatgaacaattatttgccaaaaaattggatttttatgaaatccaatctagatgaaatggataaatttctagacacatacaacctgccaaaactgaatcatgaagaaatagaaaatctgaatagrtcaataattagtaaggagattgaatcagtaataaaaagctccccatcaaaaaacagcctaggactggatggcttcatagctgaattctacctaatatttaaagaagaaaaatatcaattcttctcaaactcttccaaaaaattgaagcagagggaatactttcaaattcatttctcaagcctgcctttaccctggtattaaatccagacaaggacactacaagaaaataaaattacaggccaatatccctgatgaacatagacgaaaaaattgtcaacaaaatagtagcaaattggattcaacagcacataaaaggatcatgcaccatgatcaagtgagatttacccttggggtgcaaaggtggttcagcatacacaaatcaataaatgtgatacaccatattaacagaatgaagggcaaaa

SEQ ID NO: 464874 - DNA, 504 bp, Homo sapiens
gcagtggctaatgcctgtaatcccagcactttgagaggtcaaggtgggcagatcacaaggtcaagagttcgagaccagcctgggcaacatggtgaaaccccatctctactaaaaatacaaaaattagcctggcatagtggtggtgcatggctgtaatcccagctactcgggaggctgaggcaggagaattgcttgaacccgggaggcgggggttgcagtgagcggagatcgtgccactgcactccagcctgggcgacagagcaagactctgcctcggtgggggggcagtgagggagggaagcaattaagaaaatcccggctctctgytcctcccattccacagacagctgcatcttctcgtgtagcgccagctgcatccctgagacatcatggtgaaggtgaagcctggagtcaatggattaggctgtattgggtgcgtggtcaccagggctgcttttaactctggtaaagtggatattgtcgccatcaatgatgccttcaatg

SEQ ID NO: 464875 - DNA, 551 bp, Homo sapiens
accaccatcccgtgtttcctaaatcatctgtattaagcattaattaattttataattaggaagaaarttataagaaatacatatcacaatatatcatctatattttcatctaaaaagttggtaaatgttaaagagtaaagacaatgaaacagctgtgtgtcattctactagagacttccccataggctgatgcagggctgttaatttaaatccaactcaacctgggcaataataatatattaataagtgtattaacattatggtagcaaaataatggtccagaaggatgcaggcctttgattcaatatcctcatatttgttataatctcatcaaaatgagattttctggtgaaatttcttctatttcttagtttaaaagtaattttctcaagaatccctagaaatagtgattatttgagtcagtcaaacctttaaaaaagcaaaattttctgccatagtgtatgcttaaaaaactaaacaaaagtgtttagaatttaaactttgaatcttggcatacaactaatactcagaggacaaagaatgcatttctg

SEQ ID NO: 464876 - DNA, 483 bp, Homo sapiens
gtaaaatttgatatgttttgtttaaatagcttaaaatgaaaagtatgaatggaagaacttattagaatttcttttcatgtgatttaatttcaggaaatattaaagctcttaaatatgagagtaagataaagtagttgtactcctatagtatcctttttttttttttacagaatcagttgcccctgaaaattaatagaaatatagagacagcttcagctttactgcctaaaattctctatattagaatttcattaatgattattaactaaatgagaacaaaagctttacctcaagtaagcttttaagaactaatattaaattttttaaatggaataaatagctaatattcaacaaagactatatttaaaaattgtgttcttttttattttaaatgacaaaaattaaaagttattgggaagcactaggaatggccacaaacgtrgttattatactacaccctccttcaaccttggctgccatcac

SEQ ID NO: 464877 - DNA, 519 bp, Homo sapiens
gacataaccctctgcctgccactatacagctcttccttaactgttgtctatcctcaaaacagagacctgcagtattctctctccttcactacccgcacccaaactcttggcaagcctcaaaccgtcatgcttctctagctcttatgaacccaccctatccagaccaccatcactgactgtttccctgactgcagcagcctcctcacaacagccatatttttcatcttctacggtttcatattattcccaccatggttytatgtctccccattttctttggaatccaagcttcatgccatggcaaataagggtttaaatcacagtgcttaacccagtttctcaacatcatttgcactgttcatccctagctcagtggacagtaagctcattggctaacttctttattttcatacacactaagctctttcatgcttcaggaaatttacacatgcctgtttctctacctgaaagctattattcctgatcaaaatttctgtggctggttcttttccatctttg

SEQ ID NO: 464878 - DNA, 437 bp, Homo sapiens
cagcattccaatgcccatcctatctaaagcaatgattataatgtggaaatagtagggggggggggcatctgcaatttaacatatcatagcaattatatcacacaaatgcaagcagattcagaaccttaagattttatgtatgaaaaagraacatcaaacacactttatatctgaatttagctcagcatactatggttgatccattttattttaatatcaaaggacagtagagcccagactttaaactaatatcctccaagcactcatgttttaattagatgccatctgtattctatgatccctgttatttcagaatctcagagtgagtaaagctgacctaaatctaaagctctttgatttcaaaaagagtcctgtgctcagcttagcatcacactggaaggagcaagacaagaaacaacccatgaaagcatataaat

SEQ ID NO: 464879 - DNA, 588 bp, Homo sapiens
tgtgttaggaatatttaaatattaaatatctaaatgtataaagaatattaaatatttgtgtgaaagcccattaccttataagcagataataattgaacttgggaaataataaacatttatatatttttcccaaagttattccctgatttgtatttttcactgtttcatgttctaactccatggtggaaattccaagacatttttcaaaacctcacaaaatgccattattaatttatattctagtcttagttcagtgttcctaaaaagcttctttaaattacagtgcctggttgaggaggcacttataattagagtcaatgggcaaaaaatgacttagaattactgtgggyatctgcaaaataatattcacattttactttaaaatgtacctgtctgcttcactgtgtatagtaacgcgatgtgtaaaaaataatgaagtgtttcgtacctgaagtgtgtgtgtgcgtgtgtgtgcgtgtgtctgtctgagtgtgtatgatacaaaacaagtaaaaaatatttatagttggctttggaattgaatcataaatgttttctaggaacaagcaattaaactacatggggctt

SEQ ID NO: 464880 - DNA, 531 bp, Homo sapiens
attttgctaatgaggccttgctctgaattcgaaataagatacaaataagctgtgaagcattacatcctatacctcatttatcccacagaatgaaatcaatrtaaaattgtattgcatagttggaagataattcgttgacagcatctaaaatagttatcttaattttgaattgtgtgatttggaaagatttaaatcaccatcagtataaattgcaaatttcactttggaaaattattttcttctattgtaagaatataaaggatgatattataataacgactacaagtcttaaaaaaactttaacacacttcaagtgtttaaaattctgagagtttctactacttaactcctacatgctgtgaacttggaaaagtgcctggaattcaaatgatgaaacacccaatgtcaacacagaatgataaattgagagagtgaaagcaaagtccaaattaaacaggaagttttagcttatttttcctaattatttgccagaatgaacatttaacatgaacatataatgaacatttaaca

SEQ ID NO: 464881 - DNA, 556 bp, Homo sapiens
cagcaacagagaaaaagtatctctgctgctttgagtctctaattccaaagacctttttttaatttttattttttttaaagagctcacttgattaggtcacacccacgcaggataaacctcccttttaattaacttaaagtaacctgattagggacctttgttacatttgaaaaattccttcacctctrtcatattctatcagttagaagcaagtaaccgtttccacccacacttaaaaggaaggaattctataaggctgggactctttgggtagtcattttagggtgtgcagactacaagaaataagaaactcagtgcagtgattatattgtacagacttgactgagaagaaaacaacataggcctgtaattatgggaaatataggatcaagaaagagcttgggatatgtatgtatatattcgtttttgtcagttagcttttgttgcttaacaaaccatgccagcatttagtgttttaaaacacaatattttatttagctcaaaaattttttggtcaataatttgggctgttttcagctaggtggttctgcagata

SEQ ID NO: 464882 - DNA, 618 bp, Homo sapiens
ccattcaacaagtctataggaagttccaaaatttcccacattttcctgtcttcttctgagccctccaaactgttccaacctctgcctgttacccagtttcaaagttgcctccacattttcaggtatcttttcagcagcaccccactctactggtaccaatttactgtattagtccattttcatgctgctgataaagacatacctgacactggacaatttacaaaggaaagaggtttagtggagaactcacagttccacatggctggggacacatggctggggaagcctcacaatcatggtggaaggcaaggaggagcaagtcacatcttacatggatggcagcaggcaaagagagagcttgtgcagggaacctcccccttataaaaccgtcagatctcatgagacttattcactatcacgagaacagccccatgattcaattacctttcactgggtccctccacagcacgtgggaattcaagatgagakttgcgtggggacacagccaaaccatatcatgggttcagggttaggtgtgtctgagctcagactctccttgggtgaggcttaccgaggctgctctggggaatggggtgtggttctcaggccaatggagtt

SEQ ID NO: 464883 - DNA, 536 bp, Homo sapiens
ttctagttgtgatgattccctatgataatgcaggtagagcacacagcacaatgcccaacagccagtcagacctcagttaaatattaacaactcttttgaaattaatattatgcataaaataatgtatgttacacaaactggagacctagaaagactcatgcttggagatgtaggcacaagagctcatttgcagaacaggagtttccaggagtaccagttgggccatgggtacactgtggcccgtgtctgggctctcaggaaggtcactaagcttcttgatgggagctgaggcagctgaaggttggcctctcargccagtgtggcttgagggctgggtggagcaagtctgcagatggtgatgttgactcagctgtgaggagctgggggcaaagggaacagaatcagcatgggaggctgctccacggccatgatctgattcaatgtgtccatgctccctggtaatgcttcagacaaaacataggatgggaggcagcagttgaagccactgcccacaacgtggcctggggtttggctga

SEQ ID NO: 464884 - DNA, 582 bp, Homo sapiens
cgtggtgacttgcacccagagaggcaggggagtttgaggaaaagagaagggcccaggaaaagaatggcatgaagcagaactcggaggaatgcagacaagacatagcttgaggctgcaaaacagccagtgtacagttgcccacgttgttctctgagatgagcaccctgcttcccaaagctgctcttgaactctagcaactcagcaaggacattatcagtgattacagctctggacccttcattctccagtcttccctgtccctgcagaagctgtttcccatawgtaaaatgcctgccaaccttccctaatacacatcatgaatgaattcctatttatccttcaaaactcagctcaaatgtcacctcctccaggaggctttccctgaacgctccctccacagttaatcacaccctcttgtggtgtctcacagtgccctctgcatctctgttctctatgttgtgccctattggctcgtatgtcatcttcccttgctcttctcaggtcagggagtgagtcttgtccatctccacatctccagctcctgtcacagaggctggcactgggtggaggctcagctaaaat

SEQ ID NO: 464885 - DNA, 449 bp, Homo sapiens
aggcagggccctgggcctcactcttccgaggacaatggagaggaaagttgttgagggctttgagtagagggttaggagctcaggcttacatttccaagaggtcccgcccctgggtgattcagtgctgagagccagctggctccaagctcttccagcgccaccctgttcagctgctgagaagctggcactacccacagggggcttggtgtcctgctgcctgggtctccaaaccatgggcctggaggggcctcattgcgcgcgcgygcgcgcgcgcacacacacacacacacacacacacacacacacacacacacacacacacggtccagctgcagtcactcagggtaaatagaatttgtagggcttggggacttccctgcatgtgcaggtgagctgaggccccagtatattccagtaacctggaaacagggtgcaatcctaggtagaga

SEQ ID NO: 464886 - DNA, 449 bp, Homo sapiens
aggcagggccctgggcctcactcttccgaggacaatggagaggaaagttgttgagggctttgagtagagggttaggagctcaggcttacatttccaagaggtcccgcccctgggtgattcagtgctgagagccagctggctccaagctcttccagcgccaccctgttcagctgctgagaagctggcactacccacagggggcttggtgtcctgctgcctgggtctccaaaccatgggcctggaggggcctcattgcgcgcgcgtgcgcgcrcgcacacacacacacacacacacacacacacacacacacacacacacacacggtccagctgcagtcactcagggtaaatagaatttgtagggcttggggacttccctgcatgtgcaggtgagctgaggccccagtatattccagtaacctggaaacagggtgcaatcctaggtagaga

SEQ ID NO: 464887 - DNA, 449 bp, Homo sapiens
aggcagggccctgggcctcactcttccgaggacaatggagaggaaagttgttgagggctttgagtagagggttaggagctcaggcttacatttccaagaggtcccgcccctgggtgattcagtgctgagagccagctggctccaagctcttccagcgccaccctgttcagctgctgagaagctggcactacccacagggggcttggtgtcctgctgcctgggtctccaaaccatgggcctggaggggcctcattgcgcgcgcgtgcgcgcgcrcacacacacacacacacacacacacacacacacacacacacacacacacggtccagctgcagtcactcagggtaaatagaatttgtagggcttggggacttccctgcatgtgcaggtgagctgaggccccagtatattccagtaacctggaaacagggtgcaatcctaggtagaga

SEQ ID NO: 464888 - DNA, 409 bp, Homo sapiens
aaaagacaaaatataagaaggttttttttttaaacgggacctttggaagaaaaaatgtgaaayttaaaataaagaagacattttaatataaaaaatataaccaaaaaacacatttttcaaaagaataaaaactttacaaactaaaacaaacaaaaaatccttaccttttcagacaatagcttatatggcttcattaatggctgaaccttagaagagtctgaatatatttctccataaatccatccatttgccaacttaaaaaaaggcaaacattaaaaattgttttacacgtgttaattttagagattgtagatatgcaggtgtttaagtgcgtgtttgataaaataaacctaaaatgaactaaggtaagggttaagattgaaattttatccagcataagtcactataa

SEQ ID NO: 464889 - DNA, 568 bp, Homo sapiens
tcccaaaatatataatctatatattgctacaagatttrtaagcttagaaattgtctttatgaaatactaagcacaccggactcttattctttagaatgaatatgctgaacatatatgtttcttgggtcatagttaacaaattaacacacattctctttttaaaatatttgtatgtggctaaggcaaatatgattgaattgacacaaagcctgacctgttcaagatgaaaaagcacatttgctatatccaatactctttctaccgtcttctctggatctgaggtatcatcagtcctgtttggtaagtctttgtaaagagccatttgccatctaatagcaggatcctccaactgcagaaaaaaggaaaaggttacaatgggaagatgggaatctaaaaacaaggttacaatctaaagataggaagagtccacccatcattatttattgggctttacagtgtttaccagttaagacatgacgcgcagctgcagttatgtaggatgaacaggtctggagatctaatgtacagcatggtgattacagttaataatgctgcaattcatactgga

SEQ ID NO: 464890 - DNA, 558 bp, Homo sapiens
aaatcttctgtaccacaagttatattacaattcataggatgcagaatatattttrtaaaatttcacatcaagtagtatggatcactcgtgagggtgtgtatattagacctacagtgttttactggatccgctatttggtgagggaccatctcgggaaggatcctcggcgcttttgatggcttcttccattgctgcaagaagcccattcccaccttatcctctcaaagcagtaccaaaacactcaggcctcagaatgagcaatctcaccacgacatttcgcattttcctccacactctcccctaaagtagaatggggaagataagtaaacaaatatgattatatggaagttctgaacaaataaatgttatactaatcatttcctatgtataagaataactaaaacccaacaatatactaataaagccaaaatgtaatcctaattgctagcattaagtatatgagacacagtaaattttgcttgcattaaaaattttcagagtaaagcattatggaggcataaactattgattctcactaacttgttattattatagaat

SEQ ID NO: 464891 - DNA, 558 bp, Homo sapiens
aaatcttctgtaccacaagttatattacaattcataggatgcagaatatattttataaaatttcacatcaagtagtatggatcactcgtgagggtgtgtatattagacctacagtgttttactggatccgctatttggtgagggaccatctcgggaaggatcctcggcgcttttgatggcttcttccattgctgcaagaagcccattcccaccttatcctctcaaagcagtaccaaaacactcaggcctcagaatgagcaatctcaccacgacatttcgcattttcctccacactctcccctaaagtagaatggggaagataagtaaacaaatatgattatatggaagttctgaacaaataaatgttatactaatcatttcctatgtataagaataactaaaacccaacaatatactaataaagccaaaatgtaatcckaattgctagcattaagtatatgagacacagtaaattttgcttgcattaaaaattttcagagtaaagcattatggaggcataaactattgattctcactaacttgttattattatagaat

SEQ ID NO: 464892 - DNA, 623 bp, Homo sapiens
agttcatttttttttattcttgtgttatttccctttgggcagatataccagagcttatccatttacctttttcgttgatagacttttgtatyacctctgtgtttttgctaatgtgaacagggattgaatgcctattcttatttttttacctatcttacaagagtctttgggtggacccatttttaaataaaggaacacatgtcatactgttttccaaagttactgtatcaatggacattcttaacaacaatggttaaaagagattctggtgatccacaccccctccaatatttgatatatgagttactgacttttgtcaaccaaatgggtatgaaatggtattttgctggagtcatgattttcatttctcttggctaggtacttttctgtattacaaacatcacttctttctgaaacaaaagagctgatgagtggttctgcacgtatctctctattatgatgagtacagaatctgctctaatatgtgcttactgctccttgttccatactttggtgataatttgaaaaatcattttacatctttgtatctttcaagccacacttcattctaaactctattcccctactcctatcatatatacttcctctttaaaaaatcctat

SEQ ID NO: 464893 - DNA, 563 bp, Homo sapiens
tacctggaaactttggggcccattctgtaaaggacccctgggctctcttacaatctatgttcttggttctttgttattatgttattacaaaatttaatgcttccctatttcctaatctgtatgtcactggtactattattatctttgtcctgatagtgtctattttgtggctcaaagtatagagtaaagaaaagatattttccttaagcaaatgaaaatgagttagaagagaggtacagagacagcaaaggaagatgagctacagatgcacaaggaraagaaactgtctcaaatggggaagccaaaggcggggaagatttttaatttctagctttgcctaaagctataatgggcgttcaattattatggtagttttgccaccttgtagatttgggtttgtaaggttagcatacatgaagctttactttctcataatcatgactggcaaacaggatgagctaccttcaggtatatggtgacccctttcattctagacttgagctattatagcctgccttctctaggggcataattaatgaaagaaaaggaatatatatagcatg

SEQ ID NO: 464894 - DNA, 505 bp, Homo sapiens
tgtggaggaaatgacgaacataaatcctaacagttcttttagactgacatgaagtatccaggatgactgtggatgaacatacggtcaagaatctcagcaagtcttcaggacagactaggtctgaagagccgggatgggcatctgtttacctcattayagggcgtgaaactcaagcacaatttctggcacacaggaggcctcaaataatagttgtgaagatgcataaatttcagaaatgccaaggttggtcccctattccttcacttagttttcccccattaatataatagaatgaaaacttctatttattagtatactttctctttgtttcgctgatgtttttttctgagatgggaaaaataacaaatattgtgagcaagtatttttgttgttgttgtcagtaatcacctccagcacagaaatttttaatagtctctgtttccatttactaagatgaaagaatcttactagcagcaaagtttaagtttttataaaaatcagactc

SEQ ID NO: 464895 - DNA, 624 bp, Homo sapiens
atgcttagcacttactaattgcattaatatttgctaaataaatgtaaagtggctttaaatagacactttgaaggtcacatatattctcttctctctgagcaaataagatgctaaaattttacaaggatttcagtgatttcrgcatatcttgcttctcaacagtcatctcagactattagatccagcagataaaattagaaagaaatagtaatgcataacagagccacaagtcttaggttaatttagaagagttttctcaagatcttcaacagtctagctagtagggcaacaaaaggttatttagatacaacaaagatgaaaaatgaaaaaatatattaaactttctgaaattcatagatctactcacaggcaaatttatggccaaaggtatttattgcttaaaaagcaaaagagaaaggacaaatcaaattaatattttaggaaatcaatatttaggaaaagcaaatggcttcagaaaatggaaatgtcataataataaaatcaaaagttaggagaaaaattgtggagttaataagttcaagcagtagctcttataaaagagaggcagaaacagtgcaattagaagaaaggaaaatatagaaagacagttgcagaaaatattta

SEQ ID NO: 464896 - DNA, 514 bp, Homo sapiens
atgataatattgggaatgatgcagacacctgagaagaaaacagaggtatgtaaaataaatgactaaatgataaatgagccttatctatcatttgtaaaagatggacagcaattcagcaattgtagtgaytgtagcagcacttagcttctgtcgtataatgtttactcagagaaaagtcatgaaatcttatctcctgtgcatataaacagacttaaaataataagctttaggttctgggatagcctcagccccttccttcttatgggaggtggacaaagcacttcatccttgtgggtgtgtacttcttcattttctgaattttttcagcttctgggttcagatagtgagaatttagttcaaatgtgaagagctaccataataaaacaaatatgaactgttgtataatactcaggctagtttccccaatttaattataaccagttttatgtcccccggcccatgcaactgctacctattgtgggcatctgagtcacccctgtggctccctctgcct

SEQ ID NO: 464897 - DNA, 514 bp, Homo sapiens
atgataatattgggaatgatgcagacacctgagaagaaaacagaggtatgtaaaataaatgactaaatgataaatgagccttatctatcatttgtaaaagatggacagcaattcagcaattgtagtgattgtagcagcacttagcttctgtcrtataatgtttactcagagaaaagtcatgaaatcttatctcctgtgcatataaacagacttaaaataataagctttaggttctgggatagcctcagccccttccttcttatgggaggtggacaaagcacttcatccttgtgggtgtgtacttcttcattttctgaattttttcagcttctgggttcagatagtgagaatttagttcaaatgtgaagagctaccataataaaacaaatatgaactgttgtataatactcaggctagtttccccaatttaattataaccagttttatgtcccccggcccatgcaactgctacctattgtgggcatctgagtcacccctgtggctccctctgcct

SEQ ID NO: 464898 - DNA, 413 bp, Homo sapiens
ggttcaccatttaacccattacagagttgaagttacctgggcaaggagactatgctggtggtgcttaagcaatcctaggcaggaacaagatttgaaacaggctagagagaaaacataattccttactcttaggttcattcatccaatatatgtcccatccaatgggatgtcccatctaatatatgttgcactgygtcccaagcactatgcaagcactaggatacagtggtgaacaaactagactttctcgactatgctcagtttacctttataacccaatggccaggtctctgatgttcagagacagttgaattatagtcatggtcagaagtcataaacataattgccttcaggtgccagacatggaatatagtaactgaagctcatcagatgtaacaaaaggcacaacaaaa

SEQ ID NO: 464899 - DNA, 570 bp, Homo sapiens
tctcaacaacccctatccatttgtctgggcccaagacttagtctcttctcattctaggtgactactaatttttgaaattctggtttcttagtattggcttttgccccctaagacagcaacatcttctgcatcagtgttaaactatctgtatagttttagctcttcttcaatatttccagtgttcacaratattaactctcttgtaagcttagcaatacatcttaaattatatttgttgtcatttagtcagtatctgagtgttttatgttaatgcaagtctttatagaatgtcttgtctgccatactgccagaagcagttatgtgttattactagtttttaaaatgtattgtcacctaaaactttacatttctgttgctattccctgagcatttaaaaaaagaattttttttcctcttgtaaatttagtgtttggtacctattaattagacctatcctatcctattcattatgatacttaggtcttcttacccagactttttgtctacttcatcagttatgaagcaagagcagtgagttaatatttcctactatgaatgtttctgtatatt

SEQ ID NO: 464900 - DNA, 570 bp, Homo sapiens
tctcaacaacccctatccatttgtctgggcccaagacttagtctcttctcattctaggtgactactaatttttgaaattctggtttcttagtattggcttttgccccctaagacagcaacatcttctgcatcagtgttaaactatctgtatagttttagctcttcttcaatatttccagtgttcacaaatattaactctcttgtaagcttagcaatacatcttaaattatatttgttgtcatttagtcagtatctgagtgttttatgttaatgcaagtctttatagaatgtcttgtctgccatactgccagaagcagttatgtgttattactagtttttaaaatgtattgtcacctaaaactttacatttctgttgctattccctgagcatttaaaaaaagaattttttttcctcttgtaaatttagtgtttrgtacctattaattagacctatcctatcctattcattatgatacttaggtcttcttacccagactttttgtctacttcatcagttatgaagcaagagcagtgagttaatatttcctactatgaatgtttctgtatatt

SEQ ID NO: 464901 - DNA, 630 bp, Homo sapiens
cttcatagcagcaacccactctctgtggtatcaatttacattattagttcattttaatactgctataaagaactgcctgagactgggtaacttataaagaaagcattttaattgactgacagttcagcatggccagggcggcctcagaaaatttacaatcatggcagaaggtgaagggatagcaaggcaccttcttcacgaggcagcagaaaggtgaagagtggcagagtgaaggaagaakagcctcttacaaaaccatcagatctcatgagaactgactatcacaagaacagcatgggggaaaccacccccatgatccaatcacctctacctgttctcttgacatatggggattatggggattacaattccccccatgatccaatcacatccacctgatctaccttgacacgtggggattatggggattacaattcaagatgagatttgggtggggccacagatcctaaccatatcaaggagcaacagaaatttccaataatcttgaaagtttaggcaatgctgtggaatgggcaacttctaccttaaagagctgtgacctggatttttatttgtcttacttgtttctattccccctttgttattttctctccctttagtatagtcata

SEQ ID NO: 464902 - DNA, 630 bp, Homo sapiens
cttcatagcagcaacccactctctgtggtatcaatttacattattagttcattttaatactgctataaagaactgcctgagactgggtaacttataaagaaagcattttaattgactgacagttcagcatggccagggcggcctcagaaaatttacaatcatggcagaaggtgaagggatagcaaggcaccttcttcacgaggcagcagaaaggtgaagagtggcagagtgaaggaagaatagcctcttacaaaaccatcagatctcatgagaactgactatcacaagaacagcatgggggaaaccacccccatgatccaatcacctcyacctgttctcttgacatatggggattatggggattacaattccccccatgatccaatcacatccacctgatctaccttgacacgtggggattatggggattacaattcaagatgagatttgggtggggccacagatcctaaccatatcaaggagcaacagaaatttccaataatcttgaaagtttaggcaatgctgtggaatgggcaacttctaccttaaagagctgtgacctggatttttatttgtcttacttgtttctattccccctttgttattttctctccctttagtatagtcata

SEQ ID NO: 464903 - DNA, 598 bp, Homo sapiens
tactggcaatgaatcacaagactaccctgccaaatgggaaatgtaagctgatgaactggatttgaaatcttaaagccaacctgggctgagcagctctggcttttgtggacactgaagcctgcagcccatgaggagattcctctgttacactcaaaagacagcttagccaggcatggtggctcacacctgtaatcccagcactttgggaggccgaggcaggcggatcacctgaggtcaggagttcragaccagcctagccaacaccatgaaaccctgcctctactaaaaaaatacaaaaattagccgggcatggtggcatgtgcctgtaatcccagctactcaggaggatgaatcgcttgaacctgggaggtggaggttgcagtgagccgagatcacgccattgcactccagcctgggcaacagagcaagactctgtctcaaaaaaaaaaaaaggacactttagcaggcatgaagaaaacttgtctttatcattctgtctactcttgctccaagacttatttgtatttatcaagcatttttatttgatttaagtaaagtacattaatgagaaaataaagtcttttctcacttcactttc

SEQ ID NO: 464904 - DNA, 598 bp, Homo sapiens
tactggcaatgaatcacaagactaccctgccaaatgggaaatgtaagctgatgaactggatttgaaatcttaaagccaacctgggctgagcagctctggcttttgtggacactgaagcctgcagcccatgaggagattcctctgttacactcaaaagacagcttagccaggcatggtggctcacacctgtaatcccagcactttgggaggccgaggcaggcggatcacctgaggtcaggagttcaagaccagcctagccaacaccatgaaaccctgcctctactaaaaaaatacaaaaattagccgggcatggtggcatgtgcctgtaatcccagctactcaggaggatgaatcgcttgaacctgggaggtggaggttgcagtgagccgagatcacgccattgcactccagccygggcaacagagcaagactctgtctcaaaaaaaaaaaaaggacactttagcaggcatgaagaaaacttgtctttatcattctgtctactcttgctccaagacttatttgtatttatcaagcatttttatttgatttaagtaaagtacattaatgagaaaataaagtcttttctcacttcactttc

SEQ ID NO: 464905 - DNA, 536 bp, Homo sapiens
gggacatttggagttttgagcattgtgaatgcatatactcccgcttttctttcatcagtttctttctcactgttcatctttcacagtgctttccactattttgaggggttgtgttcccctaattttcatgttttaatgcctttttcttaatttgttatagatctggaaagtgatgaaactgtgtgagaattaatgggagagttattcttagagacatgtagagctctaggccaggggctttgaagcttttagctgttgccccagaaactaccaaggaatctgatgtcatgagaatgaacggcytgagctacaaaattaacctacttgattttaagcttcttcagggtgggatcacctcttattctgactagatgtttataatatatttaaaccctgatgtgatgccacagcactggtgcagaatgaatgggttagttcttgcttccattatttatgtttgccgtttcctcttttgtagtgggttattaataagccaataactgactgcaaggtgtttgaagccagatatttgactc

SEQ ID NO: 464906 - DNA, 586 bp, Homo sapiens
ttacgcaacacacatcttcagagtgacccataaatctctgagattcaaatgcccagcttcttcaaaactaggttcttttaggtctaccaattaaattcggctgggaaattacaagagacattttctgcattacggaatgtaatattggaaatyataaggccatatctccccttaaatggctgaactatataaaaaataaaaatcagacttttgaacacagctatctctcactgagttaaagacatagatgtgaatcatccaaaacagaatttaagccaaactacttattggtgactctataatattatctattatagatacttgcctattctgatgtatatttatatcagaattgtattcaaaattatgtaaggtgggataacattgtggaatattaatagattattttctctcccaccaatttgcctatctaaacagctattcaactctgtatcctcacctcaagaaagggctatggtcaaaaataaaggattctttatgatttggtttccagaaacctatacctattaagagataatacgatggagcaattggattcaggggattatgacggacgggaggcagg

SEQ ID NO: 464907 - DNA, 482 bp, Homo sapiens
taatatgaatgaagatgaccagagttcagcaggtttgtagttctaatgagtccgatcttcctgcactggatggcaactggcttattggtatgcagatgtttcttgggcatattttggtctcagcagaccctagaaagagcttaatgatttctgtccccagggttgtctgtattaaccttamgaaaaggcacatacggaaggaaaactcttagcactgacatggaacccttaagttaaaatttttttttttccccctgagttggaggaataatattcttcggtattctcttttcttggaactgggggttcttagtggaatacaaagtaacctatgccatagataattctatcattagacctaggattcacttttacatccctagggtaattggatctgattctttggtcttcatagtcctttgaattagaatgatactctagcaaccctgtaggattgtgtattgtatgtgttggaactgata

SEQ ID NO: 464908 - DNA, 515 bp, Homo sapiens
gcaaaagttacctttgtaaattccacaygaaaaagttcaaaagcttgtttccaaacaagcttttggaaccacatatcatgaaccgccctttcgaggtctaatggactcaaaccacagatcctcatgtgtactcatacctcacgcaagccacagaatgcagggctcaggatgcacttgccaatgacttcctaattttgaactggcaagttaccactgaattatcactttgcccataacaggttcaactattgtgtgtatctctcttaaaattttttggtattaagtatagctgccagaagacaacaaatcatcactaactaaactgtacataccatagctcaccttctggcagaaaaatcccattctcttatgttctggtgaatctgtactcttttcaggctatgagccgatttcaagaaaaactactatctcacctgaaatcatgtgcaaatagggggaaacatccaaagtgtaccccaaacatgcaaagttctccaggtctagaaggaattata

SEQ ID NO: 464909 - DNA, 447 bp, Homo sapiens
attttcctggaagtttttgcacaacagaaaggagttgcaatacaaagcataagtttaacacctgctagatatgtgttctctgaggaaccccaagcctacctgatgggtgtcagattctctccctgctacagctatttgtcaaactcttgaaagtccagctttccttcccatggaaggaaaattcccacggaatgctctcttccgtgtttacccacagaaaggagagaaaggttctttctcacacaagtctaaggccttcctctaagtcaccttttcctatcatagaactcacccagcacttctcakgataaatgatactgcagaatatgagtttgcttcagggaaatcccatacccactgtgaaaaatatggtaactctccaatatcagttctccccctttgctaagtaatagaaccctccaaatattaggttgacacaaagccgac

SEQ ID NO: 464910 - DNA, 444 bp, Homo sapiens
ttcctggaagtttttgcacaacagaaaggagttgcaatacaaagcataagtttaacacctgctagatatgtgttctctgaggaaccccaagcctacctgatgggtgtcagattctctccctgctacagctatttgtcaaactcttgaaagtccagctttccttcccatggaaggaaaattcccacggaatgctctcttccgtgtttacccacagaaaggagagaaaggttctttctcacacaagtctaaggccttcctctaagtcaccttttcctatcatagaactcacccagcacttctcaggataaatgatactgcagaatatgagtttgcttcagggaaatcccatacccactgtgaaaaatatggtaactctccaatatcagttctccccctttgctamgtaatagaaccctccaaatattaggttgacacaaagccgac

SEQ ID NO: 464911 - DNA, 371 bp, Homo sapiens
acaatacaccctcatctattgtagtaaaaaaaaaaaaaagctgaagtctaaattacacaaatgtagcagcataatactattaaataataagtaattcaatattctatttcatggcattattttacaggagcactatttgatcatcttctctttatcacacatacttcttccatttatcttacagtatctttacataaacactaaaatagttatactcagattgtacacttttgaagggagttagcctatttgtgtcaattatttactaaaacaaagctaaataacagcaacaaaaaagccttgttggaacagggaccaggggaatgatcasagcaataagtagcttgcatgaaaatattattaactctgaa

SEQ ID NO: 464912 - DNA, 495 bp, Homo sapiens
ctctgattcccctgattctgatttggcaagccaatcaatcwtttgtattaattgggaaagaaagccaatatttctatatgaatatactcatctcaaaacttttcaagataaagtgttttacaaactatgcttctgagtcaataggattcagctgtttcgttttcatttcagcaacttagaggaagtttcatcttcagcaaaaaattgctataagacacttcctataagccagccctgtgccaaattatttacatgaatcaccttctctagtctttaaacagccctattatgaatggacaattatctcaatttgacagatgatgaaactgaggcttgaagagattaagttacctaagatcacacaatatgcctccaaaattcgaagagggccgaaggttgtaattgtgcaagaagaagcaaattttctatctctttgaaccatagactgtggatccactgcaaccttgctgaaatggaagtctttgttgtttcatg

SEQ ID NO: 464913 - DNA, 609 bp, Homo sapiens
ttctcagcagtaaaaaaaaaaaaaaaaatgaattattgatacatgcaacagcttatatagattataagagcattatgctgagtgaygaaaaaagacaaagggtcacatagtgtgtgactatattcacataacattgtctaaaaattatgaaatgtagaacaaattagtgctttccaggggttatgaatagtcaggagagggagggaaatatgccagtaagacaataagagagggagatcttttcataatgaataattctgtattttgatttgttgatggttaaatgaatctaagaaggatctgataatctagtattagacgcatagtacagtagtgaactttcagcctctagagaagtgctctccaatagaagtaactaaaaagatggaaatgttctaaatctgtactatacaatatgttagccactggtcatgtggttgtaaagcacttgatatgtgctctataatattttgagcaagtttcttatgttttctgtgcctttgagtttctcatttgtagaatggagataataatatctacctcaaagtgttgctgtaaaggtaaatgagtttatgtatgtaagacaccgacaggagtgccagcacatag

SEQ ID NO: 464914 - DNA, 387 bp, Homo sapiens
gttagccatttgttattgtcattgttgtgttttgttctctttctaatgtctggaccttcaaatgattcagactcatgggaccatacttcattctgtttttataaytttaacctgtaagattctcattttaattggaatttcatatttaggaattcttgggtgccttggatatatgaagaaaagattcacatctgcttccactaaacaactagcgaattaacaactgagatttcttataattaaattatttacttgatttttttaatccatataaatagcttgaacttaggttgaaacccatgagaatttgtggctacagttcatagggttaatatttaccttctccatccagagccaaggttaatgctgacaaaatacaatctaata

SEQ ID NO: 464915 - DNA, 635 bp, Homo sapiens
agcaaatatatatatattttttgaattttattataagagatacatagtgtatatatatatattttaattttactataagagataaggtctttgtctgtcacccacgctggagtgcagtggtgcaattatagctcactgcagccctgacttcctgggctcaggtgatcctcctgcctcagcctcctgagtagctgggcctgtaaatgctaaaaaccagctgccagcacgttcagctaatttttctactttttgtagagatggagtcttgctatgttgctcaggctagtcttgaactgagctcaaccaatcctcctacctcagctttcccaaatgctggaattacaggcatcagccaccatacccagccttgcatattgttttggtggcatctcagatgaccttgttagctggattttcttgtcagaaatcgaggataaaaaggatttccawatcacttttatacaggatgaaatggagctttggtcgaaaccttaagccaccaaactctttttgggttgggtgagagctgtaggttgatgagccattatatcaaataacaattatgactggcacttgaaacggtgggggtgggagagagggaataaatagtttggatgctggcttggactgctggg

SEQ ID NO: 464916 - DNA, 610 bp, Homo sapiens
tcagcacagagggaacatgataattgataggaggcagttatggatgagcagggacacrtgcatgtgaaagaggtgaaaaatgaatattttgttctcaagaaatgtataatctaatttcagataacagcccttcatgaaatagtgacatgaaatgccaggcagggtgtagttacactgaataggaaatttgtattagattattcacaaatagtctagaagattcaaggatcacttgacgatcaggtgggattgcttgggaatggatggaaagtgccccccactttcctgctaccctcacatagtagaaaacatgctttaaaaaggtatgaggatgaggccagtcacagtggctcactttgggagtaatcctaacactttgggaggccaagatggaaggatccattgaacccaggagttggagagcagcctgagccacacagtaaaaccctgtctgtacaaaaaatacaaaaattagccaggtgtggtggtgcatacctgtagtcttagctactccagagactgaggtgggaggatcacttgagcacgagaggtcaaggctgcagtgaactgtgatcatgtcactgcacctccagcctgggtgacaaagtaa

SEQ ID NO: 464917 - DNA, 598 bp, Homo sapiens
tctgacactcactccttctaacatcttttgacaggatccaagtagcaccccagcaatacattcctaaggcccaatggccctgactcaagccaggctgatgaaagctaagatgcagcattctagaaaccctgagctcaactctagccaatgctgacatcctgactttcaaacccatccgtttccaaaaggaaaaaacttttcaagctttccaatcatgataagttctgagccacctaatactgatgttttgtagttgattgggtgaaatagaagtcaaacctagtctcaagctctcyaaggtgacatactttcctctagttcttgctctagatgacaaatatcttcttgagggtagaaccagtgaacctctctttcccaagagccacacttcatcaagcagcccaggtcaaattttacaatgtgcaaactagctagagaatagacattacctagaagtcagcacacttcctactcatgcaattttgttaccttcagtaaaaaatgtcttgggtcactttcgtacaagaagaatagaaatcagttctttgatgactgtaagttagccctaaggtcttgctttctggtctttttctcatct

SEQ ID NO: 464918 - DNA, 560 bp, Homo sapiens
gcaatgtctaccttatatagtctaaaaaggggaggagccctcagttctgggaattgcccacccctttccgggaaaactcattaattatctactccttgtttagcataaaatcaagaaacaaccataaaaatagccgaccagcagcccttggggctgctttgcctatcgggtagccattcttttatttcttcacttctctaataaacttgcttttcaccttactctggatttgccttgaattttttcttgcgagagatccaagaatcccctcttggggtctagttcgggatccctttctagaaacagaattgcaataccacacatggtaagcatttaacaaacgcctgttgagtgaatgggtgaaaaatagtaattcaatgtaccrtcaataaacagttagagaaagtcttgaaaatattttaagtggggtgtggtggttcatgcctgtcatcccagccctttgggagacctgatgtgggaggagcgcttgaggccagtagttccaggctgcagtgagctatgatcacatcactgaactccagagtaagaccctgtcaaca

SEQ ID NO: 464919 - DNA, 523 bp, Homo sapiens
gggtggggaggtgacttcatgatctctagggtcccttccagttacaagattccatatttaatatcctcacccttcattcaccaactgggcaatccctaaaaaagccatttatctctttaagctttaatattcttttcaataaaaacattacctgcgccttcacaggtttgatcctttcaatgaaagtcaaaacctgtgacttcacaggtttgatgtgaaatactagttatattcttctaggactcataataataatgtttattaaaataaaaaatgttaatgaaacacctaaaaatcaatttgcctgtctcctgacgcacattgcgaggccctgactaattgatctttatggttcttttggttctaaaagtctacagatcctgtggttctgcagatttcaattatagaagacaggacttyggaaaacatgaaaagaccacttaaaagaggtgctcatttgaatttcctcacatcatctatatcacgtgggaaactttgttgttgttgcaaatgagagaagagc

SEQ ID NO: 464920 - DNA, 587 bp, Homo sapiens
ttaacatcttactaattgtcaaattctacttattcaggtctttaaaaatttccttcagcaatatttatagttttcagtgtacagctcttgcacatattttgacatatttatctctttgtttttgatgttattcttaatagtactaaaaatttttgcaataatttgttgctagtatatagaaataaaattgatttttccatattaactttatatcttgtagcttgccgaaatcacttattatatccagtagctatttgtttgcacatgtgtgcattctttatgcttttttaggacattttctgcaaataaaaatagttttacttcattgtttctaattcgtatttcttttctccttattgcatcaaggccattccattaatgtaatgttcaatakaaggagtgaaataaaatatccctgactcaaaaaaaaaaatccttgtcttgtctctcatcttagtgcaaaagcatttagtttgtaaccattaagcataatgttagctttggtgttttgtacccttttttagatttatgaatttcccttctgttcctactttttgaaagtttttctcataaacgggtgttgaatt

SEQ ID NO: 464921 - DNA, 587 bp, Homo sapiens
ttaacatcttactaattgtcaaattctacttattcaggtctttaaaaatttccttcagcaatatttatagttttcagtgtacagctcttgcacatattttgacatatttatctctttgtttttgatgttattcttaatagtactaaaaatttttgcaataatttgttgctagtatatagaaataaaattgatttttccatattaactttatatcttgtagcttgccgaaatcacttattatatccagtagctatttgtttgcacatgtgtgcattctttatgcttttttaggacattttctgcaaataaaaatagttttacttcattgtttctaattcgtatttcttttctccttattgcatcaaggccattccattaatgtaatgttcaatataaggagtgaaataaaatatccctgactcaaaaaaaaaaatccttgtcttgtctctcatcttagtgcaaaagcatttagtttgtaaccattaagcataatgttagctttggtgttttgtacccttttttagatttatgaatttcccttctgttcctactttttgaaagyttttctcataaacgggtgttgaatt

SEQ ID NO: 464922 - DNA, 622 bp, Homo sapiens
tggaggtcctcttaagtagctttttaaaactatagtatttcctaatattcatttagattataagtaacattcttcaggctataaagtatttttaaattagaatcttagataacagaaaattattaatttaccagggagaatataattaataaaatrcagtttattttatttttattttatttatttatatttcgagaaagggtcttactctgtcacccaggctggagtgcagtggcatgatcttggctcactgcagcctcaacctcttgagttcaagcaatcctcccacttcagcctcctgagtagctgggactacaggcacataccatcacacctagctaataattttttgtgtttttttaatagagacagtatttctccacattacccaggctagtctcaaattcctgggctcaagcaatctacctgcatcagccttccaaagttctgggattacagacatgagccactgtgcccagccacagttcattgttgaatcagaaagcataattggcagaaagacaaccttgttagttggggggcctagaaaaacagtatagaaatggccagtcccaagaatgaccttatttagagaaaaggtctttgtaggtataattaaaaa

SEQ ID NO: 464923 - DNA, 622 bp, Homo sapiens
tggaggtcctcttaagtagctttttaaaactatagtatttcctaatattcatttagattataagtaacattcttcaggctataaagtatttttaaattagaatcttagataacagaaaattattaatttaccagggagaatataattaataaaatacagtttattttatttttattttatttatttatatttcgagaaagggtcttactctgtcacccaggctggagtgcagtggcatgatcttggctcactgcagcctcaacctcttgagttcaagcaatcctcccacttcagcctcctgagtagctgggactacaggcacataccatcacacctagctaataattttttgtgtttttttaatagagacagtatttctccacattrcccaggctagtctcaaattcctgggctcaagcaatctacctgcatcagccttccaaagttctgggattacagacatgagccactgtgcccagccacagttcattgttgaatcagaaagcataattggcagaaagacaaccttgttagttggggggcctagaaaaacagtatagaaatggccagtcccaagaatgaccttatttagagaaaaggtctttgtaggtataattaaaaa

SEQ ID NO: 464924 - DNA, 552 bp, Homo sapiens
cccttgcgcttcccaagtgaggcaatgcctcaccctgcttcagctcgcgcacggtgcacgcacccactgacctgcgcccactgtctggcactccctagtgagatgaacccggtacctcagatggaaatgcagaaatcacccgtcttctgcgtcgctcacgctgggagctgtagactggagctgttcctattcggccatcttggctcctccccccggggccaatctttttcaaaacatcagtcttaaaagtagrttgtcttgctcatacagccagggatctctgaggatccgcctgcagtctgcgtgagatgaaacatctcgatctatcaactgccacccctgaaggagctgaaggagcatctcacttcttgttttctccctagcagggcctatttgacagggtaacacaaacaggattctgtgctcctctgagaatcccccttctacatatgggagagccagcctcgccaggatgctgtctggatgaggctcagacgtagactcctgggtaaactgtcctggctggtctgtagcctaataggagactgaagt

SEQ ID NO: 464925 - DNA, 552 bp, Homo sapiens
cccttgcgcttcccaagtgaggcaatgcctcaccctgcttcagctcgcgcacggtgcacgcacccactgacctgcgcccactgtctggcactccctagtgagatgaacccggtacctcagatggaaatgcagaaatcacccgtcttctgcgtcgctcacgctgggagctgtagactggagctgttcctattcggccatcttggctcctccccccggggccaatctttttcaaaacatcagtcttaaaagtaggttgtcttgctcatacagccagggatctckgaggatccgcctgcagtctgcgtgagatgaaacatctcgatctatcaactgccacccctgaaggagctgaaggagcatctcacttcttgttttctccctagcagggcctatttgacagggtaacacaaacaggattctgtgctcctctgagaatcccccttctacatatgggagagccagcctcgccaggatgctgtctggatgaggctcagacgtagactcctgggtaaactgtcctggctggtctgtagcctaataggagactgaagt

SEQ ID NO: 464926 - DNA, 552 bp, Homo sapiens
cccttgcgcttcccaagtgaggcaatgcctcaccctgcttcagctcgcgcacggtgcacgcacccactgacctgcgcccactgtctggcactccctagtgagatgaacccggtacctcagatggaaatgcagaaatcacccgtcttctgcgtcgctcacgctgggagctgtagactggagctgttcctattcggccatcttggctcctccccccggggccaatctttttcaaaacatcagtcttaaaagtaggttgtcttgctcatacagccagggatctctgaggatccgcctgcagtctgcgtgagatgaaacatctcgatctatcaactgccacccctgaaggagctgaaggagcatctcacttcttgttttctccctagcagggcctatttgacagggtaacacaaacaggattctgtgctcctctgagaatcccccttctacatatgggagakccagcctcgccaggatgctgtctggatgaggctcagacgtagactcctgggtaaactgtcctggctggtctgtagcctaataggagactgaagt

SEQ ID NO: 464927 - DNA, 407 bp, Homo sapiens
gaattcatccatgtttccgactaggtatgcttttttttcacattttagatccctaatccatttggagtttactcttgtgtaaggtatgagatacacatctaatattatctttttccacatggttactcagttgtccttatatcatttatttcaagtaccaattcttgaggaaaccattcctgattactctaayaggacttagtctctcccacttctgattatctaaactttttatttatactactgttttcccctaccttgacctataattaattctgttcctattttatattccctatgaatcttaactcctgaaggcaaacagaaaacaaacacattgagctcatcttcatatttctgtaatgcttagcatacagtgggctacttaatacgtatttgcagaatgc

SEQ ID NO: 464928 - DNA, 507 bp, Homo sapiens
atgtcatacatactctatatagtatgttgattttcttatgactaacagagactgtgctaatctcattcaagttcacaaagtatgaatattgaggatgatggctttaaggaatataataatgagaaatgatgggtcaaaatgaagacctcaaagtgaggtctattagcctattggacagtctctcagaggttatcatggaaggcctgaaaaagcattagataatataatgtgaaatactattttttttcattgtcaggggagacggactagatgaatttaattgaagttttccatctctcatttctaggactctaagaataacagcatcagagatggaggggggcttttgagcctattagttattgaaaaagataaaattcttactgcctctgttgaaacaaaatgtaccaaaaatccacattatggatggtcatgagcaaaaggtataatgtgaaacaatgtaaytactctttactaacgtctatcaggatggatttgttttttcct

SEQ ID NO: 464929 - DNA, 548 bp, Homo sapiens
tgacagcctagtagtacccaaccttgattcacatgctggggtgcaaatgagtgagaagcagcctcaagaagctgatggtgtcacccaactgcccttgggaggggtccactgcagcctggggacagagggaggtcagagtcacgtccyacctgctctgataactctggccccaggcacgtcattgtactgtgggatggagtttcagggtgaggtaggcggctgaacggcaccatgtaaaaaccagtttgtgcctccaaaccaaactggcactcagacattagctgtttgacccctgaatgccaatgaactcatcttggctacctgtgtgtaaacctttccctagcttttgtcttttatcaggagaaatctggcagaatagtgggggttcttttttttttaaccttttatctgggcttatttgtccaaaactacaatagcagggggcctttaaagcctaatgaacgcaggttacagagtggcctcaagcagaaggaacgtctcatgttccatctctctgaattaggggcaggaggccagctggggcttac

SEQ ID NO: 464930 - DNA, 519 bp, Homo sapiens
ttttaaaaacttatcctttcaatttaatatcataaatgtaaataactaaaaaacatgtaacattagaatcataagactcataagactcccagagcactttgggaggctgaggtgggcggatcacctgaggtcagaagttcaggatcagcctggccaacatggtgaaaccccgtctctactaaacatacaaaaattagccaggcgtggtggcgtgtgcctgtaatcccagctacttgggagcctgagacaggagaactgcttaaacctgggaggcggaggttgcaatgagccgagatcgcaccgctgccctccagtctgggcaacagagcraggatccgtctcataaacaaacaaacaaacaattaaacaaaagcagtgcactccattaggcaataagtggtctatccaacattgagaggaggtgctgccctccctctgccttaattctaagtttgactaattttcctaaaatgttatcaaaaacattggtgatgcagcatttttaaaataatgcatcga

SEQ ID NO: 464931 - DNA, 621 bp, Homo sapiens
gcttaggaaaactcatggcagagcagacagtgaggcccagtttgtatcctgtattgacatgccagtctgtgcaacaaagcggctggttggccgcttcctgcactgttgccctctgaggtgtgactgcctcctctggccttttggggtgatgcactgcagaccacggtggagtctgaggacccggaaagtgttttctggttttgatgactgattcacactaaggcttgtttgaagccgtctgagatctctgtgtgcacaaggcatctcagtatggctgtgtgcccttcatgtggctyggggaaactgtcaggactccagggtgcgacatgcaggcccctgcaccctacagccccgccttgggtttaactgtcatccacttgcactgttttgggtgtggtgctgagctggaattctctgggaccagaaacttccccttcctctgcccagaaaagtggacaatcaaggttcccaggctcactgatctgggtatttctaaagcctctctcttcctgcttgagagctgtttctgtcctcagagaagggataaactgaaatcccagattttgtcatccttgatctccctctctttcccttcctcctgcaacctctcagttccagaaa

SEQ ID NO: 464932 - DNA, 553 bp, Homo sapiens
tctaatacttggcctacatgttgtaaacattgtttgctaattaaaacttcaacttgaagattgggaaaagcttgcttcaacagcaaatattcatacctagttaccatatgaaagacaaatttcctcagtagaagaaacctacgtagtgtatccagttacatatttggatagactaagtaggtttagtatatttgcacaggatatattaactcagtgcttgggtgttttgatacacaattaaaaagtaatatattaatagctagtaattgtcctctgactttccaattccagacgccctagggagttcacttttcaaacactctacagagacactgagtccacacaatagcttgaacagccaggaagcacagaactcgggaagcccactggcctcttctgagcttccctgctacactggaaagcacaatgcaagtagatctaaattcaaaagtaaggctgtgtttaggcctaatgaatcacctgccttccgcygaaggaatcaggtcctttcaagaaaaaagtttcaggtatgaatcatatcttcacggcacaa

SEQ ID NO: 464933 - DNA, 582 bp, Homo sapiens
cctacctcttaccattgttgcattggggattargtttccaatacacgaattttgggggacacattcaaactatagcacctgtctctttggttctactcatagcagacttgggtacctggatgttgtgtgtagctaagcactgacggtttatagggcacaggggaaggggtttgaggttcccttatagcaaacaggagtatattagacacctcaggttttaccacttctgggaattcttgctggttctgttactccactttgtgacctgctcttcctacttttcttcttcacccctttcctcactggttacctgtgaattccaagttcttctgactctacactaagcatcccaggatatcatcagtgcgatgaggaaaccatccttcctgcatcagcacaaagggtcacttgtgtgttttttaacaggctgcatccttcttagatggccaaaggttttaatagtatttttttcttctttacccaaatatgcaggaagctaacacaattacacaatccaatcttctggtaccagtatcctccatgaatgggaaacatcaactgagtttataagctataaaaatt

SEQ ID NO: 464934 - DNA, 606 bp, Homo sapiens
agttgtagtattagtagtgacatctgaatggtttaggaataatggatactttatgtgtagttgaaaccagttctttatcagttgtcatcaagattacacttctcccttattttttcctttttttgccataatttaactaactctacattccctttcttggcatcattcagatagaaatttccaacatagaaagatattcacagcaagttcagtctcacatctatattcatgacaatcattgcatatactatttctaacaaatcttaagattgatcttcatcggactgattcacgacaagtgacccatcctgartcaattgccatggggaagtgaacatgtggattgaccagaccagaattacattccagccctggatcaaagggtgggattagctttcccaattacagcccggttatgggaaatttttttctcattacattaagttgctgatagaagaagagagaatacatactgcatacaaagaagacaaaactatctctactataatatgcatatgagttgatgtcttaatgttgaaagaatctccaagcacagtagtttacaaacattgctagtttgaattgtatctagaaaatgcatggttg

SEQ ID NO: 464935 - DNA, 574 bp, Homo sapiens
ggaagtatgatggttattttatgtgtcaacttgggtagaccacagcacccaggtatctggtcaaatgctatcctagatgtttctgtgaaaatattttctgggtaagattaacatgcaaatcactggacttcgagtaaagcagaytgccctccataatgcaagtgagcctcatcccgtcagtgaaggccttgagaaaaagactgaccttccccaaggagagggaatggggaattctgctagcagactgccttcagtctcatactgtgacttttttcttcagcctgcctgcctatccttcagattttggacttgccagcctcaacaatcatgtaagccagttccttaaaataaatctcaatcactctctctgtctctctctctctttctctctgtacacatcctgttggtttccctggagaatgctaatataggaagttcacttcaactgttcctgcagctgttcacgctatactttttctgagtactcttcccctgatagaaagttgtctgggactttcatgagtgaaaagtatttttaaatatcacttttccccttgcctactttatttttttc

SEQ ID NO: 464936 - DNA, 574 bp, Homo sapiens
ggaagtatgatggttattttatgtgtcaacttgggtagaccacagcacccaggtatctggtcaaatgctatcctagatgtttctgtgaaaatattttctgggtaagattaacatgcaaatcactggacttcgagtaaagcagactgccctccataatgcaagtgagcctcatcccgtcagtgaaggccttgagaaaaagactgaccttccccaaggagagggaatggggaattctgctagcagactgccttcagtctcatactgtgacttttttcttcagcctgcctgcctatccttcagattttggacttgccagcctcaacaatcatgtaagccagttccttaaaataaatctcaatcactctctctgtctctctctctctttctctctgtacacatcctgttggtttcyctggagaatgctaatataggaagttcacttcaactgttcctgcagctgttcacgctatactttttctgagtactcttcccctgatagaaagttgtctgggactttcatgagtgaaaagtatttttaaatatcacttttccccttgcctactttatttttttc

SEQ ID NO: 464937 - DNA, 269 bp, Homo sapiens
cattttacctctctctgtcttaatttctcacatgtaaaatgaagaaaataatatctaagccacatgctacragtgttgaatgagattatagaggtggaagtattcaactccttgccttagatacaatagatgctcaataattgcttgctcacttatattttctatacaacatagatgcataatgcagggagggtgagatgcattaggatgttcatacttctgattgcaaaaggccatatgcaatgcaaatccttcatctttgttgtgtc

SEQ ID NO: 464938 - DNA, 605 bp, Homo sapiens
gtcctcagctacatcatcaattggttttgtgaatcacctgacccttaatgggaaccttcatatacagtcaaagacagaatttagattaggatgtgaacaggccaaacagrcttttagcctatctttatctggctaatgaaataatattaccgagtagtgatttattttcttcttcttgtttgactttggtcatttcttttttcttctaggactgcattaaattgtaggaatgcaacttcaattaatattataataatcctcattgctgatagtgttttttaagctcattatcatcacatttgtgcatgatgttttaaagatgcacaagggatttaaaaatccccgattaaatatttccagttcttactaatataaattcatacagcctaaaagtattaatgtgatcaatgctaagaatagcaacatccacagtaaatatgctgaaccattgtaaattgcaatatttatctgatttattttcttgaatgttgtctcctactccaaacacagattattggagagttctgctatgtataagagatgtcagaaataattttggccagttatatggggatcaatttatgtgtctattacgcacctaccaa

SEQ ID NO: 464939 - DNA, 605 bp, Homo sapiens
gtcctcagctacatcatcaattggttttgtgaatcacctgacccttaatgggaaccttcatatacagtcaaagacagaatttagattaggatgtgaacaggccaaacaggcttttagcctatctttatctggctaatgaaataatattaccgagtagtgatttattttcttcttcttgtttgactttggtcatttcttttttcttctaggactgcattaaattgtaggaatgsaacttcaattaatattataataatcctcattgctgatagtgttttttaagctcattatcatcacatttgtgcatgatgttttaaagatgcacaagggatttaaaaatccccgattaaatatttccagttcttactaatataaattcatacagcctaaaagtattaatgtgatcaatgctaagaatagcaacatccacagtaaatatgctgaaccattgtaaattgcaatatttatctgatttattttcttgaatgttgtctcctactccaaacacagattattggagagttctgctatgtataagagatgtcagaaataattttggccagttatatggggatcaatttatgtgtctattacgcacctaccaa

SEQ ID NO: 464940 - DNA, 551 bp, Homo sapiens
gattcataggcactattcattaaattttacaatgtagatgccatgtattactagtttatacccattatgccagccatgaaaacagacagttgtttccatataacctgaatctaaaagtaatcagagacagcatgatgtaagttagtcagagggcctaataggaatctggaatcctgaataatygatgataaatatatcttaagtctagttttcatttacctctatagagaagctgaggaattctgcagaggaaaatgtttgtgttttgtcttaatttgtggcaatagagatggaaataagagagaggaaagtgacattcataaatgtggatgaaaatttttgaggtagagttaatttttgcctttattcctggaggcaatttataaggctattttaactttgtatgtcctagtctcgagaaagtattgaatttgtgattttaatatgctgctccctgcaggcactttccacgccagtagtaatctctgcactatcaggccaagctctcagcatgtgtaatagccaagaaaaaaactagcaaacagaactcc

SEQ ID NO: 464941 - DNA, 553 bp, Homo sapiens
actggggttcccaacctgggtgagactggggttcgtgaccagggaaaagagccagcatgggaactatrgtgggaacatggctcatggatggaaaaggagatcacagctgtggacaagaatcattcagctgaaatatttccagtcttactgatactgctctaggacatcttgaaacacccatttctgaggggcctgggtagagttgttctggatctcttccatttgcccctacatggcctctgtctcttcttctacacctggctctgagccactggaggcttcctggacttctgcattattttgcttggctgccataacaaaacaccatcaactgggtggctcaaacaatggacatttattttcttacagttttgagggctagaagtctgacatgaaaatgttggtgcagctgacttcttctaggcctctccttccttgacttatagattgccaccttctacggagcttcacgttgccttacttctgtacatgttcgtgtctgaatatcctctttttcaaggacgctagtcaaatcagatgagggcctacccta

SEQ ID NO: 464942 - DNA, 553 bp, Homo sapiens
actggggttcccaacctgggtgagactggggttcgtgaccagggaaaagagccagcatgggaactatagtgggaacatggctcatggatggaaaaggagatcacagctgtggacaagaatcattcagctgaaatatttccagtcttactgatactgctctaggacatcttgaaacacccatttctgaggggcctgggtagagttgttctggatctcttccatttgcccctacatggcctctgtctcttcttctacacctggctctgagccactggaggcttcctggacttctgcattattttgcttggctgccataacaaaacaccatcaactgggtggctcaaacaatggacatttattttcttacagttttgagggctagaagtctgasatgaaaatgttggtgcagctgacttcttctaggcctctccttccttgacttatagattgccaccttctacggagcttcacgttgccttacttctgtacatgttcgtgtctgaatatcctctttttcaaggacgctagtcaaatcagatgagggcctacccta

SEQ ID NO: 464943 - DNA, 462 bp, Homo sapiens
tgaaatagttgactcttcagagtctcttctatcacaatgttttcacatatcagttattctatgtattactgattagtagtaagtaaaatggaaagctcctcactccagaccagaaaaaaactctttatgacagatttgcctcaggaatgaaggataagaaacaactggtctcataggaatcccagggcaaagaagatatttactaagtcaaatttcttagaaatttacaaagatcaaattagtgagattcatcctgtgattataccttattccatcattatccaggattaatattcttatgagaagaagggcamtgtagtccttttatttcttccaggtgaggcaattgtgcctgtgtatatctgtcagttcatacatgtggagtggaagtttgactacctctgtgcagggtgataaatgataaaagacactatgttgaaaccttggaataaaaagatgttt

SEQ ID NO: 464944 - DNA, 531 bp, Homo sapiens
aaagctcctcactccagaccagaaaaaaactctttatgacagatttgcctcaggaatgaaggataagaaacaactggtctcataggaatcccagggcaaagaagatatttactaagtcaaatttcttagaaatttacaaagatcaaattagtgagattcatcctgtgattataccttattccatcattatccaggattaatattcttatgagaagaagggcaatgtagtccttttatttcttccaggtgaggcaattgtgcctgtgtatatctgtcagttcatacatgtggagtggaagtttgactacctctgtgcagggtgataaatgataaaagacactatrttgaaaccttggaataaaaagatgtttagacatggtgcttgatttaaatttcaatgttttatagctgaggaattagtcttagaaaacctgaatgaaaattcaaaactctgtcatttgaattgatagccacaacattttccactcaatggcactctatattaaatttattctgtacattaagtacatt

SEQ ID NO: 464945 - DNA, 434 bp, Homo sapiens
aagaaaagattttagattattatgggattaacaaaaaccagttgaagtaagcatctgatgctacaaatttctcttctctctctgtctgtctctcattctccctttgtgtgtatgtgtgtgtattatgatctcagcataaactatcagrtattgcctcataatgataaagatttacttttggaactattcatggaacttttaaccacatagaaacgatgttgagatcaaaaggaacctaaaactttagggagaaagaatcaatccacactctcatgatatgtacatatttaataatactctatgaatcagttggaagagcaatgtgatctctagttatctggagaatgttactagaacattatgcattcagtatcctgtaggtatgatgggagttttagggatcacatcaaatgatctgtaggcttagggattaa

SEQ ID NO: 464946 - DNA, 567 bp, Homo sapiens
tcagggggtattcatgggacaagtggaaatatggagcagccttgaacaggaaatggagccacctccccgagctgactcctttccttgagccacttcttttagaaatcacttcccatccctaacaaagacattcttaggactccaagggggggccttactgaatgattagggaagccccttccctttggaatttggcatcattcccttggtggagaaaaaacaaacaaactacaacaacaacaacaacaaaacagcagcaaatgagccttaagtgagaagcagggagagaaggactggggcaggggatggggatccttgcccttctttttcgtctgtgcatttgacctctacccttttcttcctttctcactgagatgtctttcaattttttttttttttkgcctgctgtttcttttttctctttcacacagaggttggtcctgatgaacatgccagtagctgaggacatgacggtccacttcacctccacacttatggctctgatccggacagctctggacattaaaattgccaaaggtaagcttaggaagggaggtgggaaggagg

SEQ ID NO: 464947 - DNA, 510 bp, Homo sapiens
aacaccatcacatgctgtggaaaaatatttggtgagaatcaattaatgtgtcaaacttcattatcctcttatttgaagaaatttccccagccatttctatattaagtaaccactaacctttttcaatcagcagccattaacatcaaggcaagaccctccaacagaaaaacgattatgacttattgaaggctcagaggattgttagcatmtttttagcaataaagcaattaataaatattcaagtatttttaaattaagttgtgagctttttctagacataatgctattgtacacttaatagacttcagtgtagtataaacacaagttttgtgggcactgagaaaccaaaatgtcactagcagtattgcgatatttgctttattgtggtgatctagaaccatgcccacaatatttccaaggtaagcttctagagtgaaatgtttcaacaagaaccaaaatgctaggaacttgaaattgcatcaaacaaagttacaccgtgacaactttgtg

SEQ ID NO: 464948 - DNA, 559 bp, Homo sapiens
cgtgcatcgacttcgccatcagcgccaaacctctcacccgctacatgccgcagaacagacacaccttccagtaccgcgtgtggcactttgtggtgtctccgtcctttgagtacaccattatggccatgatcgccttgaatactgttgtgctgatgatgaaggtgagaggagagaggcacaagagccractgagccccagcgatggttccctcccagggcaagtgggaagacaccccaacatcccagcccatcactgctttacctacttttccatcattgaatccttttgtgatcttattttgttcaataacccaacctctggggctttgggggtccactgagcaaaatgcagtgcagactatagtagccatccaggggctcccaagacctgagatggcaatgggaggcagcttcagacaagggtggaaaaatcaggagacagagatccatcatcacggggtctaaaggagccttggagtattcagagaggctcatcctatttaatactaaatgactaactccagtaactaactctagaaaagtttcttccctgcccacc

SEQ ID NO: 464949 - DNA, 620 bp, Homo sapiens
gtgattcttatgcctcaggctcctgagtagctgggattatacacatgtgccaccatgtccaactgattttttagtagagacagggtttcaccattttggtcaggctggtcttgaactcctgacttcaagcgatctgaccacctcagccccccaaagtgccaggattacaggtgtgagcaacaatgactggccaaaaataattttttttaaaaaagattttgttctgattctgatggggaatggactcttttctaaagttaccagcagttctttaactggttagcgctacgttaggcatagctcgtagtttttagggtggcaggtatgtaaaaaaagaggagagrtggacaaaaccaagacagcagaagtagctatttgagggatttcggaacccttgactgacagtcacttcctgggacagtcctgattttgctgctctttccccacctctttcttttcaaggcttactccctacacacttaccctagctctaacccttcctgctgaggggcaccccattcacaaggcagcggataccagatgtgaggaatggaaagaaaaacgttgttacttgattgttcttatgagttatacactcaggctcttggttggagggctct

SEQ ID NO: 464950 - DNA, 606 bp, Homo sapiens
tgcattgctagctatttaaccctgggaaagatacttacagtcttcttccctcagttcccttgtctataaaataaaactgtctaacttgtaggatagtttttaaaaataaatgaattaatgcatgtaaagcagttaaaaccatacctgatacataataagggaactgtaaattttagctctatttgtgttacttaatatctcatttgagtcacataacaaccttatgaaataagatgggtacacagtattattttagyttacaactagatttcagaaagattatgggactttcccacaatcatacagctagtcagtctgagaaaattagaaaaatggcacttgacatatagtaagtgctcaaccagtgtttgctgctgttgtcactctgatttggcaatgctaagttccaattccagattttctgactccagtcccaaattagtttctttctttcatttttttttctttttccctgcactcaggtttctatagtgaatagaattattcactatagaactcagaactattcagtttagaactgaaatactagccagaccttgcaagcaacactattacttataaggtacttcaatacccaagttttcc

SEQ ID NO: 464951 - DNA, 564 bp, Homo sapiens
atagtaatcagcacagtgtagtattgatggaaacgaaacaaaccaaaataatcaatggaacagaatggaaagtgcagaagcagacccatgcatatgtggacaattgacttttgacaaaagtgtaaaagccatctagtagagaaataataatcttttcaacaaatggtgctgggactaggtgctgtggctcacacctgtaatcccagtgctttgggatgccaaggtgggaggatcacttgatgccaggagttcaaaaccagcctaggcaacacagcaagacctcccctctaaaaaaatatatatatattcttaattagytgggcatggtggcacccacatgtagtcctagctatttgggaggctcaggcaggaggattgcttgagcctgggatttcaaggttgcagtgaactatgatcatgcccatgctactgcactccaccgtgggtgacagagcaagaccctgtctcttaaaaaaaaaataatgctggaaccattgaatattcatatgtaaaaaaattaactttgatttatggcaccaaactgtatgcaaaactttattcaaa

SEQ ID NO: 464952 - DNA, 564 bp, Homo sapiens
atagtaatcagcacagtgtagtattgatggaaacgaaacaaaccaaaataatcaatggaacagaatggaaagtgcagaagcagacccatgcatatgtggacaattgacttttgacaaaagtgtaaaagccatctagtagagaaataataatcttttcaacaaatggtgctgggactaggtgctgtggctcacacctgtaatcccagtgctttgggatgccaaggtgggaggatcacttgatgccaggagttcaaaaccagcctaggcaacacagcaagacctcccctctaaaaaaatatatatatattcttaattagttgggcatggtgrcacccacatgtagtcctagctatttgggaggctcaggcaggaggattgcttgagcctgggatttcaaggttgcagtgaactatgatcatgcccatgctactgcactccaccgtgggtgacagagcaagaccctgtctcttaaaaaaaaaataatgctggaaccattgaatattcatatgtaaaaaaattaactttgatttatggcaccaaactgtatgcaaaactttattcaaa

SEQ ID NO: 464953 - DNA, 564 bp, Homo sapiens
atagtaatcagcacagtgtagtattgatggaaacgaaacaaaccaaaataatcaatggaacagaatggaaagtgcagaagcagacccatgcatatgtggacaattgacttttgacaaaagtgtaaaagccatctagtagagaaataataatcttttcaacaaatggtgctgggactaggtgctgtggctcacacctgtaatcccagtgctttgggatgccaaggtgggaggatcacttgatgccaggagttcaaaaccagcctaggcaacacagcaagacctcccctctaaaaaaatatatatatattcttaattagttgggcatggtggcacccacatgtagtcctagctatttgggaggctcaggcaggaggattgcttgagcctgggatttcaaggttgcagtgaacyatgatcatgcccatgctactgcactccaccgtgggtgacagagcaagaccctgtctcttaaaaaaaaaataatgctggaaccattgaatattcatatgtaaaaaaattaactttgatttatggcaccaaactgtatgcaaaactttattcaaa

SEQ ID NO: 464954 - DNA, 564 bp, Homo sapiens
atagtaatcagcacagtgtagtattgatggaaacgaaacaaaccaaaataatcaatggaacagaatggaaagtgcagaagcagacccatgcatatgtggacaattgacttttgacaaaagtgtaaaagccatctagtagagaaataataatcttttcaacaaatggtgctgggactaggtgctgtggctcacacctgtaatcccagtgctttgggatgccaaggtgggaggatcacttgatgccaggagttcaaaaccagcctaggcaacacagcaagacctcccctctaaaaaaatatatatatattcttaattagttgggcatggtggcacccacatgtagtcctagctatttgggaggctcaggcaggaggattgcttgagcctgggatttcaaggttgcagtgaactatgatcatrcccatgctactgcactccaccgtgggtgacagagcaagaccctgtctcttaaaaaaaaaataatgctggaaccattgaatattcatatgtaaaaaaattaactttgatttatggcaccaaactgtatgcaaaactttattcaaa

SEQ ID NO: 464955 - DNA, 670 bp, Homo sapiens
tcactctttctcaccaccacctcctccatcacactggcccatgttctcctcttgactcccartttctgctctgccctctcttctcccctgtgagctctcaaataattacttgagaatcatttcactttccctactggaaatatgcaaagtgcaatatacattatttctttcacaaaaggcagccttccatccttcaatcccacacccctggcggaggaggggacttcccaggagccctctacctgggccacccagggccctgtgagtccttctgtctctctcttttagggctcctttcggatctaccctctgccggatgaccccagcgtgccagcccctcccagacagtttcgggaattacctgacagcgtcccacaggaatgcacggttaggatttacattgttcgaggcttagagctccagccccaggacaacaatggcctggtaagagtttgggtgtggggccttctcctgtagcaagataattacagtcatcagccacaataattgtcatgttctttctttctgggcgtctgttatctcactaggggaaagatactccatcaaaacaatgtattcaggaggattgtccccatggggatttatctaagagcttgcggggggcttaaggtcccctggttcatccttctcattttacaggtgtgagcca

SEQ ID NO: 464956 - DNA, 538 bp, Homo sapiens
ctttacagaaacagtgcgtaccattccgacgttacaatgctggagttggcaggtgtgcgcaggccaagcagtggggctggacactctttcggtggcccagaaagagtgctgaatttttgctgcatatgcttaaaaacgcagagagtaatgctgaacttaagggtttagatgtagattctctggtcattgagcatatccaagtgaacaaggcacctaagatgcgccgccggacctacagagctcatggtcggattaacccatacatgagctctccctgccgcattgagatgattcttactggaaaaggaacagattgttcataaaccagaagaggaggttgcccagaagaaamagatatcccagaagaaactgcagaagcaaaaacttatggcacgagagcaaattcagcattaaagtaaatgtaattaaaaggaaaaaaaaaaaaaactttacacaacttctccatcttcttttccttcctctttctcagaaacagttgccgctccctgccccctaaacctactcccctctaagcttt

SEQ ID NO: 464957 - DNA, 538 bp, Homo sapiens
ctttacagaaacagtgcgtaccattccgacgttacaatgctggagttggcaggtgtgcgcaggccaagcagtggggctggacactctttcggtggcccagaaagagtgctgaatttttgctgcatatgcttaaaaacgcagagagtaatgctgaacttaagggtttagatgtagattctctggtcattgagcatatccaagtgaacaaggcacctaagatgcgccgccggacctacagagctcatggtcggattaacccatacatgagctctccctgccgcattgagatgattcttactggaaaaggaacagattgttcataaaccagaagaggaggttgcccagaagaaaaagatatcccagaagaaactgcagaagcaaaaacttatggcacgagagyaaattcagcattaaagtaaatgtaattaaaaggaaaaaaaaaaaaaactttacacaacttctccatcttcttttccttcctctttctcagaaacagttgccgctccctgccccctaaacctactcccctctaagcttt

SEQ ID NO: 464958 - DNA, 578 bp, Homo sapiens
aactacatatatatttgagatgtcagcttttctttctggtttctaccagccccattaaggtttcaaaccttttagatccaagtcttggcctgagctagggctctgggagtgaggaactgcctatctccccggtggggaggaagcttctccaagcaccgcgcattgtcagagtgggcatggggcctgagcatgtcctgtgccatgcatagctctgggggacactctgtctgcccctgaattgcctcactgttacagttaagaagatgaacctcgtcaggggctattaccagtgctgccttttgttccaaaccactgcaraggaacaaaaaaaaaacaaacaaaaaactgcactagttttaaaaattggaagtggcaaaataggagatgtaggcttgatgtagatatgaagtaattattctaaattagtgaaaactgacaactgaacaacactgattatgaaacaaagattttggaccgcccaccctgaataatgaagagttatgtcaagcaaaattgatatgaaacgatgtgtagtgatttcaagttgaccccccttccactgttgataagtactcggt

SEQ ID NO: 464959 - DNA, 571 bp, Homo sapiens
tactcaggcacatacttaaagaaagtacccaaaccgaaggaactagaaagactttcgcttcttttgaaaagaagggaagtggtgagtgagcttcggcattcagccccacccaaagagctccccagacctgggccacagtgtcaggaaattgcagcagagagttcagagagacaggactaggtccagcaaaggaaaaatgattaaggggtcaaagacagggataaaagtggctttttttccccaaatattgagttggagtctttatttttattttgtatttttatttatttttattttttgagacggagtctcgctcgttagcccaggctggagtgcagtggcacaatctcagctcactgcaacctctgcctcctggattcaagcaattctcctgcctcagcctcctgagtagctgggattacaggtacgcaccaccacacccagctaatttttgtatttttggtagagaygaggtttcaccatgttagccagactggtcttgaactcctgacctcatgtgatccacctgccttggcctcccaaagtgctgggattacaggcatgagtcatc

SEQ ID NO: 464960 - DNA, 618 bp, Homo sapiens
ggggaaaaaatggagtctaaagtaaggtcaagtggcttaccaaagatcacatacaaatgaagtgataagctgatacctactctgactccaagctcattcaatgaaaccatgatagcctacacagctatcactatataacctatcactctcctactagttctagaagctytcaggggcctaacttaacctgtggccatttatccagtcattaaaatagatcaaacatttaggaggaagatatagcacatggtaattttttataagtctcctttccatgaagtcagattaaaattaaaaaggagttggcgtttattgattgtgcctaactcagtaatacataacaaatactgacaacaacaacaatattcaaagctgctttaattaatattgaaaactttgccataataatgttagcttgtgcacttaatgagaatatgaataatttctgttcatcatcaactctgacaattatttaagaatttttggcattagaagagttttctgttaaaaaatatcatttacttttaattgttttatgtaactgatgaaacacagttgtataaataatccaaaaccttgtctagagacctggaaatgaaaaaaaaaatccaaaactaa

SEQ ID NO: 464961 - DNA, 612 bp, Homo sapiens
gcagaaacatttgctgaatgaaatagtgaattagcctttaaaacaagtggaaaaagaaaaagagaaaataaaagaaagatctgtgcagcttggaaagttccctctgctggggtttagcaggttgatccagggagctaagcctcctaccttgtctgtgggagaaagaggagtactcatgtgacctcttaatgtccaagcttaaaggatccgtaagtggttgaatcttgaccttaggagctcactcttctccctttccttataactctctacatctcctcttccctttttcttctttctttctttatccccataatagaccataaaatcaaattgacatgtattgtgaatattggttgaacatwactgatatgaatttttaaaccaaattagtttaaatttttatacctatttcttccaaaaataatcaatgcaaaacaaacttttattagctggacgtggtgacacatgcctgtggtcccagttactcgggaggctaagatgggaggattgcttgagcccaggaggttgaggctgcagtgggctgtgatggtgccactgcactccagcctgggtgacagagcaagaccctgtctcaaaacaaagcagaacaca

SEQ ID NO: 464962 - DNA, 593 bp, Homo sapiens
tttctttctgaaggttgtaagagagaagaccgtattccttagctttgtggctcccttccttcatcttcaaagccagcaatgggccagacatggtggcttacctctgtaatctcagaacttttgggaggccgaggtgtgtggatcacctraggtcaggagtttgagaccagcctgatcaacatggcgaaactccatctctattaaaagtaaaaaatctgccaggcatggtgataagcgcctgtagtcccagctactcaggaggctgaggcatgagaatcgcttgaacccaggaggcaggggttgcagtgagctgagatcgtgccgctgcactccagccttggcaacatagcgagactccctctcaaaaaaaacaaacaaaaagccagaaatttgtcccctctctgaccatgtggtcacacagccctctgacccagcatgaaaaattatctgcttttaaatatttatgtgggccgggcacagtggcctgtaaacccatcacattgggagatcaaggtggaaagatccctagagtccaggagttcaagaccagtctaggcaacatagtgagactatgtctctattaaaaaattgtt

SEQ ID NO: 464963 - DNA, 593 bp, Homo sapiens
tttctttctgaaggttgtaagagagaagaccgtattccttagctttgtggctcccttccttcatcttcaaagccagcaatgggccagacatggtggcttacctctgtaatctcagaacttttgggaggccgaggtgtgtggatcacctgaggtcaggagttygagaccagcctgatcaacatggcgaaactccatctctattaaaagtaaaaaatctgccaggcatggtgataagcgcctgtagtcccagctactcaggaggctgaggcatgagaatcgcttgaacccaggaggcaggggttgcagtgagctgagatcgtgccgctgcactccagccttggcaacatagcgagactccctctcaaaaaaaacaaacaaaaagccagaaatttgtcccctctctgaccatgtggtcacacagccctctgacccagcatgaaaaattatctgcttttaaatatttatgtgggccgggcacagtggcctgtaaacccatcacattgggagatcaaggtggaaagatccctagagtccaggagttcaagaccagtctaggcaacatagtgagactatgtctctattaaaaaattgtt

SEQ ID NO: 464964 - DNA, 593 bp, Homo sapiens
tttctttctgaaggttgtaagagagaagaccgtattccttagctttgtggctcccttccttcatcttcaaagccagcaatgggccagacatggtggcttacctctgtaatctcagaacttttgggaggccgaggtgtgtggatcacctgaggtcaggagtttgagaccagcctgatcaacatggcgaaactccatctctattaaaagtaaaaaatctgccaggcatggtgataagcgcctgtagtcccagctactcaggaggctgaggcatgagaatcgcttgaacccaggaggcaggggttgcagtgagctgagatcgtgccrctgcactccagccttggcaacatagcgagactccctctcaaaaaaaacaaacaaaaagccagaaatttgtcccctctctgaccatgtggtcacacagccctctgacccagcatgaaaaattatctgcttttaaatatttatgtgggccgggcacagtggcctgtaaacccatcacattgggagatcaaggtggaaagatccctagagtccaggagttcaagaccagtctaggcaacatagtgagactatgtctctattaaaaaattgtt

SEQ ID NO: 464965 - DNA, 566 bp, Homo sapiens
ttgtcccctctctgaccatgtggtcacacagccctctgacccagcatgaaaaattatctgcttttaaatatttatgtgggccgggcacagtggcctgtaaacccatcacrttgggagatcaaggtggaaagatccctagagtccaggagttcaagaccagtctaggcaacatagtgagactatgtctctattaaaaaattgttttaaaagtagcggggcatggtgacagtccacctgtcgtcctagctagttgggaggctgaggtgggaggaccccttgagcccaggaatttgaggttacagtgagctatgatcccaccacttcactctagcttgggcgaaagagtgagaccctgtctgggggaaaaaaaaaaagaaaaaacaacgaaagattaaagtgattagacttggcttatctagataacacagcataatatgcttgtctcaaggttcttaacatgaatcatatctgcaaagtctctttcgccaagtaaagcaatatattcacaagttaggaagtaggagaaaaggatgtggacatctttggtagctgttcttctacctttc

SEQ ID NO: 464966 - DNA, 505 bp, Homo sapiens
ttaacacatcatctttcacaagatgatttgtctgtgtactaatatgtcatggagaagttatggttgcattatttgttcgtcaaatttacagttacctgttatatatgtttctattgtttcatgtagttttctgaatataacacttatggttttcagtattacatttcaaatctaaaattattggtttagaatacatttattggtttggtacctgtgtaaatttcagttgccatatacrtatttatttcaaggtaactaaatacatgcttctattaaatattttaagattttcgcttaggttgaaaggaaagggagagaaacatctctaattggctggtaccataggcactgtatgtaccttaatttatttaatcttcccataaacttgggaggaatattttgttctgaggatatccacagggaaactgactcttgcaaaggctgagtaatgtgctcagtcacacggctagcaaaggagccactcaggatttgaagccaggtcgtt

SEQ ID NO: 464967 - DNA, 582 bp, Homo sapiens
atagtttcttccactttagcatagtttctggcctaaagtagttcagtgaatgtttattgaataagtgactaatactgcagataggtctttacagaatcagttgaatcatcgtggaacaaatctggaagcacaataataaagctctcctttccagctcagttttctgtgatccatgaagataacctgaattcytgagatgaaaatatgggtcacctttgttgaatatttaagtatgtcactgaggaacattgctcagttgttgacagaagttggtctcaagatctcatcccaatgacaaaagttaaataagcttagctttgaccacaatgactccataccaaagcccaccagaacacagtagaacattgtaactcaggtccattagttcagtcccagtgctcaagcatactgacgtagaactgtaaggttatgacaaatgtgattcattccccaagttcccttgtcgagttttttattttttattattattttttgatttatcatgattttagtaataagaaatggagtaaaggcattgcagaagccttcattccagctttgccatccatgacacccgcgttt

SEQ ID NO: 464968 - DNA, 598 bp, Homo sapiens
ctcctttccagctcagttttctgtgatccatgaagataacctgaattcctgagatgaaaatatgggtcacctttgttgaatatttaagtatgtcactgaggaacattgctcagttgttgacagaagttggtctcaagatctcatcccaatgacaaaagttaaataagcttagctttgaccacaatgactccataccaaagcccaccagaacacagtagaacattgtaactcaggtccattagttcagtcccagtgctcaagcatactgacgtagaactgtaaggttatgacaaatgtgattcattccccaagttcccttgtcgagttttttattttttattattattttttgatttatcatgattttagtaataagaaatggagtaaaggcattgcagaagccttcattccagctttgccatccatgacacccgcgttttctcttctcaaccctgaattcatgcttataatttatccccagtrgatttgactcagtctatatggcatcactttggtgagaaagctcttagaccttaggagtagccttaaagatttatatttctttacaaccccatttgtcaaacaaaagtctgactat

SEQ ID NO: 464969 - DNA, 519 bp, Homo sapiens
ttggtgcaaacccatagaatgtacaacaccaagagtgaaccctaatgtatgctgtggactctgggtgataatgatgcatcaatataggttcatcartcataacaaatgtacactctggtgggggatgtttatgataatgggggctatgcatgtgtgggggtaggagtaaatggaaaaatctctgtacttcctctgctctattttgctgtgaacctataactgctctgaaaaataaagcctattaaaatgtgtgtatatataaatatatacgtactcatccatccatataaaccttatccccaaaaaactatgttaatttacaaaagtgcgtgtaatacaaaagaatataataaattacttgtgcaatctgggccagaggaatatctgtgcaagaatgtaaaacataatcgtgttctaaaagcattgctgaggggaagatacgaatttggctctgcattttctaagttttcagagaaaagaggaaacaacatccagttatagtaattatggtgtccacaa

SEQ ID NO: 464970 - DNA, 519 bp, Homo sapiens
ccttttttttttttttaattaaaacagagtctcgctctattgctcaggttggagtgcagtggcacaatctcagctcaccccaatcttcgcctcccaggttcaagcaattttcccacctcagcctcccaagtagctgggattacaggcacctgacaccacggccrgctaatttttgtatttttactagaggcagggtttcaccatgttggccaggctggtttcgaactcctgacctcaggtgatccacccacctcagcctcccaacatgctgggattacaggaatgagccaccatgcttggcctcacctttatttaatacaaaatacttttaaatttcccttgagatttattctttgacccaaagaatttataaatattctacctaatctccaagtacttggggattttccaattgtctttctgttactggtttctactttaattccattgtggtctgaaaacatacattgtatgatgtctcttaaagttgttcaggtgcgttctgtggcccagaacatg

SEQ ID NO: 464971 - DNA, 633 bp, Homo sapiens
gggggctgcataacatgtatactgtaaaggggctgcataacatgtatactgygctactctggggggggtgccatgcacattgctgtgccaggtactatttatatgcttatctatcaacttgtttaattatcacaacatctctagaaggtagacaatataaatatccctattttaaaaatatgggcattgaggacaaagagcttaagtaaccttaaaagagcacaaagctaataagtggagaaattgagattgtagttacagggactgtgcaattagagacacttcaaattcgcaggtttcctatcccatttaaccagctatgagaacacaattcttatcccaacaaactgggtgattgacattaaataagtcaatctctctggacctctttttgtgcatccatgaaatcatagaagtggattacataatctataaatgtccctaccttaaaaacaaatctatgaaattgcaatatgcatttttaaatttaatttctagctcagagacctactgcattttttactattttcaatccactttttaaacataaaatgttcattaaaacagaaactacacatctaacaaatgtctaataccaaaaatctatgaggaacttaaataaaacagcacaca

SEQ ID NO: 464972 - DNA, 492 bp, Homo sapiens
aaagcacatggatgatagtttgatttctgtgtcactcttcatggaaaccataggtcctaattcagtgctcagcacatagtaggcactcaatacatgtttcctaaatgaatgatgaatgaaaatgtcatgaacaattttctaaaaatccttcagccaggcatattttatgaagcaccacatacatgctcctaaagtacatgatcctgtcaagtsggtggtgtgatgtaaatatgatgccccacgcagaaaatggaagcctctggaaggctgtggggacactcttccctgaagattttaaagataaagaaaagccacagctctgagacacaatgcttcctgtgagaagatgaatggatagaatgttgactgaattcttgttaagtggcactcaccatgttgggcatagaagatgagtaagacacatatgttttctgtccttacagaccctgcagcccagtgggagaaacagacaaacatgcaattatagagcag

SEQ ID NO: 464973 - DNA, 507 bp, Homo sapiens
tgaacaattttctaaaaatccttcagccaggcatattttatgaagcaccacatacatgctcctaaagtacatgatcctgtcaagtgggtggtgtgatgtaaatatgatgccccacgcagaaaatggaagcctctggaaggctgtggggacactcttccctgaagattttaaagataaagaaaagccacagctctgagacacaaygcttcctgtgagaagatgaatggatagaatgttgactgaattcttgttaagtggcactcaccatgttgggcatagaagatgagtaagacacatatgttttctgtccttacagaccctgcagcccagtgggagaaacagacaaacatgcaattatagagcagaagggtgagggctgcaaaaggatcgtggcacagaggagggtgccagaaacaggcacaagaagtcaggaaatgcttcctggaagacatgatgcccagactgagtggagaatgaggaggattttgcaaggagatgagatgatgg

SEQ ID NO: 464974 - DNA, 507 bp, Homo sapiens
tgaacaattttctaaaaatccttcagccaggcatattttatgaagcaccacatacatgctcctaaagtacatgatcctgtcaagtgggtggtgtgatgtaaatatgatgccccacgcagaaaatggaagcctctggaaggctgtggggacactcttccctgaagattttaaagataaagaaaagccacagctctgagacacaatgcttcctgtgagaagatgaatggatagaatgttgactgaattcttgttaagtggcactcaccatgttgggcatagaagatgagtaagacacayatgttttctgtccttacagaccctgcagcccagtgggagaaacagacaaacatgcaattatagagcagaagggtgagggctgcaaaaggatcgtggcacagaggagggtgccagaaacaggcacaagaagtcaggaaatgcttcctggaagacatgatgcccagactgagtggagaatgaggaggattttgcaaggagatgagatgatgg

SEQ ID NO: 464975 - DNA, 442 bp, Homo sapiens
tttgagctgaaatgcttttataaaaagtcttacagaataatcagagaacgtgttctgtcctacttcaccgtcaagtgaaaatattgccccctcacattagaaatatctttcttgttagatatacaataggggaatcaatttcttaatcggtcagtaatcgccttgaaggcagataatccattgacctaaaaatcattgtgattgagaccctgagcatgggtttccaaacagctgacattacacagccatgacaygagaagggcattgtgtgaggcttgtgcataactcaggtttcttttcaccattttctttgcttccgtttaaatgctttaactgtggtcttgctctgtgtagcaggctgaaaaatgatacctttttccccaaaggtatctacatcctaattcctggaaccggtaatcatgaataaagtggctttgcagat

SEQ ID NO: 464976 - DNA, 442 bp, Homo sapiens
tttgagctgaaatgcttttataaaaagtcttacagaataatcagagaacgtgttctgtcctacttcaccgtcaagtgaaaatattgccccctcacattagaaatatctttcttgttagatatacaataggggaatcaatttcttaatcggtcagtaatcgccttgaaggcagataatccattgacctaaaaatcattgtgattgagaccctgagcatgggtttccaaacagctgacattacacagccatgacacgagaagggcattgtgtgaggcttgtgcataactcaggtttcttttcaccattttctttgcttccrtttaaatgctttaactgtggtcttgctctgtgtagcaggctgaaaaatgatacctttttccccaaaggtatctacatcctaattcctggaaccggtaatcatgaataaagtggctttgcagat

SEQ ID NO: 464977 - DNA, 519 bp, Homo sapiens
taaaaacaattttattaattgaaactacgatgaaagcagatgaaactacgatgaaaacatactccagctgagtatattttctttaactgaggcaatacatattaacttacctacttaatatactaaaaatatcagaaggtagatagtgaaatgatcttagataaagttgaaatttgctaagctaaaataatgaaatgattgattgggttgtggaaaaggaaatgaaagatgggaaatagaaatttagtttctttgaatttagagtaaaatgaaattggtgttcasagaagtaatgtggatacctggtctctatctggagggaaggacaggcggaatcgattgtagggaaggtgagaaataacaattttggttttttagaaatcacatgtaagtatttccttgcaaccctccagaggccatgcctttgctccatgctgtgagtcctgctgctcacttctgacttcctactgttttgagttcttgacactggcacttcccagctctcacactttgtcagaa

SEQ ID NO: 464978 - DNA, 597 bp, Homo sapiens
ggtccatttggtctatagtgcgggttaagtccagtgtttctttgttgattttccatctcaaagatctgtccaatgctgaaagtggggtgttgaagtctccagttattattgtattgggttatatctctctctttagctctaataatagtatttgctgtatacatctgggtgctccagcattgggtgcatatatgtttaaaattcttatctcctcttgctgaattggcccctttatcattatataatgaccttctttatcttacagcttttgtcttgaaatctattttgtctgatacaagtatagctactcctactcttttttgctttccattgacatggaatatcttttccctccctttatttttagtctatgtgtgtcttgataggtgaaatgtgcttcttstaggcaacagacattgggtctagctttttttttttttttatccacttagccactttatgtcttttgattggagacttaagtccatttacattcaatgttattattgataggtaaggatttactcctgccattttgttatttgttttctggttgctttgtgatctcttccttctttcttcccttcctgtcttcct

SEQ ID NO: 464979 - DNA, 564 bp, Homo sapiens
caaattttcagtttagctttctttacaagaacaaagttacatggattatatcaaagttatcatcagtggcatataaaccaagagatgggacatctggggagttttttttttgtggggccaggaaaaattctggaatagctgaattcatctgtgcaagcccatttgtaaagatggtgccagggatctgcaactgctgatagatgtagaatctttacccacgtgggagttaccagggagtgccgagtaactggtgatggaaagaagtataattaatgtagtctccattgcttcaaaaagggacatgcaaaccagttatgcacaggtgatgagtctgtttgatccatcagttatgtcacctggttcttttgtcccctttgcctgtgatgcatggtgtatattaaactttctggcatccatattgtcaatatgactgcacagtagtcatccttgtgccacttaacaaactagtgtaataagctactggggctatcctggcagcttggccagtggacacctggtattaccctgaaggggmagggacagaagcaagccccattgtagctc

SEQ ID NO: 464980 - DNA, 560 bp, Homo sapiens
tttgctgactgtttctcctcttggctttcctaaagtatatgtgccctatgggatataatgctctttacttgactttcccttatttcccggagtctgattcttctcagagttatgctcccaattaaatattgactataaaagtaaggaacacaaaggaaagttttgaaaagcataacaaactaacaatgctattatggaaatgtgggaattcattcaacagtaacacttcatttttggccttaatgaaccaatcttgcagcagaccaaagtgctcataatgcaggtcactttgtaagtcaccaaacctcccttagcrgtttattttaatgtcttttgttctagcaggaaggaaaatagtcccacagcttttaatactctccagctgttcattcgtaaagacttcaacatgaagcttatagggagaaaattgtgtacttggtttaaattctacaagagactctaaaaaggcctgaagttcttcagcctccactctcaggatttgtacctttctgatcagcccaatgacacttacattgcttcacagggctttactgtggtga

SEQ ID NO: 464981 - DNA, 560 bp, Homo sapiens
tttgctgactgtttctcctcttggctttcctaaagtatatgtgccctatgggatataatgctctttacttgactttcccttatttcccggagtctgattcttctcagagttatgctcccaattaaatattgactataaaagtaaggaacacaaaggaaagttttgaaaagcataacaaactaacaatgctattatggaaatgtgggaattcattcaacagtaacacttcatttttggccttaatgaaccaatcttgcagcagaccaaagtgctcataatgcaggtcactttgtaagtcaccaaacctcccttagcagtttattttaatgtcttttgttctagcaggarggaaaatagtcccacagcttttaatactctccagctgttcattcgtaaagacttcaacatgaagcttatagggagaaaattgtgtacttggtttaaattctacaagagactctaaaaaggcctgaagttcttcagcctccactctcaggatttgtacctttctgatcagcccaatgacacttacattgcttcacagggctttactgtggtga

SEQ ID NO: 464982 - DNA, 580 bp, Homo sapiens
tggtgattctttggtcaccagttcaggttacttagggaacaactaggaggtgtcagatattcttcagatttttttctgaacaggttttatttttattgttatttttttcaagtggagaacatgatgtwgttctaggcaagtcttatgaaacatccatcatgaaggctgtttcatgataaaaagagtgcatgggagaaataagtttgagaaataaatttagagcttagaattagaaacagcctgttaaagggtgctatggtctgaatgtgaaacttaatcaccaacttgatggtattcaagtgtggggcctttgggaggtgattaagacatgaagatggagcccttatgaatggcattagtgaccttatacagggagctgttcaccccttctgtccttccacctcttcttccatgtgaagacataacatttgtcccttctgccttttccattatgtaaagatgtcttaaaacaatgccatctatagatcaggcccccaccagacacagaatctgctgctgccatgatcttagacttcccagcctccagaactgtgagaaataagtttctattgtttaagag

SEQ ID NO: 464983 - DNA, 565 bp, Homo sapiens
gaagagttatgacaacagatgtccactgcagtctggctttgtctgggcccgcatggtggaagaactagtttttttaaaatagcaattgattctaacctctgaaacatttagcaaattattgttgtaagtggttttgctcttcccagttgcaggaagttttytaaaaaaaaaaaaaaaaaaaaaaaaaaaaaaaaagccaaggcttcccaaccaggaactatgaagttgatagtttgctttatatttaacagcaaagttaaaggttaatggtttgacaagtccttacccatttatcatctcaaacttaaaaagttgcatgaaaactggcctctcccgctgaaacctaaatgttccatcccagctcctggcaggcctgtgtttgtgacccggtccaagcctcatgtgtcctcctacacattccaggaagaaggcagggaatgaacggaggtggccggctgcaactcagctcccagccacggccgttccaccacaccagtctcgcagatatttcttctgccccagaagctgtcagatctaaggtcccatgttaggagggttcagatgg

SEQ ID NO: 464984 - DNA, 620 bp, Homo sapiens
cccttgcacctgctgtgaaggttttgttgacttctttctccagcctgtcagtttggctctgagcttggtgaattatgactcagcgatggttggttccctgtgtgggaagcaggcgatgctttggtttgctaacaggtgcttcttcctgaagcagttgcctcctgcagcttctgagcctcttctgccatgtcattcagtgcagtgggagtgaggaggcagtaaacacgtctatacactaccagagaaaaccagtacctagagactctgccactcatgtctactaagttctctactgcagcttgttggtcaatcttcatgaacattttcagtaaagcactctggatgcttttataggaaagagccctgcaggccattatccaaccattattatcgccattacygtcaccatcatcaacattgtcatcagcatcatcttcactgtagaaatcaaacattcattaagtagttaattctggatgattttctgtttgatgctgaatcaaaaattaaacagtctaggttctttctgtcaaggattatgactgaagacagacacacttatatggacatacatttataggtattacagaaacagaaaaccaacctgatatcagctagtg

SEQ ID NO: 464985 - DNA, 578 bp, Homo sapiens
gggagtgaggaggcagtaaacacgtctatacactaccagagaaaaccagtacctagagactctgccactcatgtctactaagttctctactgcagcttgttggtcaatcttcatgaacattttcagtaaagcactctggatgcttttataggaaagagccctgcaggccattatccaaccattattatcgccattaccgtcaccatcatcaacattgtcatcagcatcatcttcactgtagaaatcaaacattcattaagtagttaattctggatgattttctgtktgatgctgaatcaaaaattaaacagtctaggttctttctgtcaaggattatgactgaagacagacacacttatatggacatacatttataggtattacagaaacagaaaaccaacctgatatcagctagtgtgagtagctgatttaaaagtggattcatgattggagtatcaggaagaaaacctttagaaatcccaaggaaaagcatataacttgcctctctctagttagtatttcagggatacaggacagtagtaggatctatctttgctgagtcttgatgattaagaaga

SEQ ID NO: 464986 - DNA, 579 bp, Homo sapiens
ttcttttctaatttggggaacatttactacaggttgagtagtcctaatgcaaaaattcaaaatcccaaatgctccaaaatctgaaactttttgagcaccaacataatgctcaaaggaaatgctcactggaacattttggattttggattaggaatgctgaaccagcaagtataatccaaacaatccaaaaccccaaacacttctggtcctgtgcattttggataagggatactcgacctgtagccatttaaaaaaaagaagaagatagtgctgctgctgaaatattcaataccagttgcttataaacaaaaaaagaaattactgagactcaaacatgaagaggcacatagccttaggtaagacagaggaccagaattctgttctcctgatttctagccctgtattcttttcatyacacagcactctcctctctttcaatgatgtcttaaccagacctttttttttttaacctttgtacaagattttattaaaggtctttacagagcaacaaccagactccagaatacagctgccaaggagaccctgttacactgtggggactggctagggcaatgcagg

SEQ ID NO: 464987 - DNA, 598 bp, Homo sapiens
acctgacagaatacgttaaaatataaccccgcatttatctcttttaattagtaaatgtgaattctgagatcaaaaagtgtagtcctgaggatgttgggagtgtccattctagaagcaaagggagaatctggggaatgcaaagagggagtgagctgagcccatggctaaagatcaacccctttcccttggatgtctgtggagagcaacagtgcttgaatactgctctcctctcctaggtgttggagtttgaaatctctagcagccagcatcataggacactcactcaaagcagactgaactggttattgggagtcatcaccttcctattattccttctagtaastgacaggctgaaggaagcctcaggaacgtttctccagaataatggccaggtgtgtgagtcagccctatgcagaatggagcataaagaagaataattcttttggatgaaataatagaaatcctatttaaagtagctaaactgaaagggggaaatttattcactgggactgaggtgcctcactaaatataaggacgagaattcagtcaggactgaggaacttgaggcagggactcatacagcaccagaatgttctct

SEQ ID NO: 464988 - DNA, 579 bp, Homo sapiens
aacaacagcaacaacaaacaatggcaggctttcagtttccacctgtggtgctatgttttgattaaaagattrttgtccactgtatttttttttcaggtgagaagaaatagcaaaagcagttgagggaccaagtagtgggtcctgtagggataaggaagcattctgttggatggcttttaaaaatgttccttccagaattgcctacttcattaataaatggtttttgtcttagaagtctctgattttataaattgacatgatttcttgttctgttatggattcgtcatgtccttcaataagcccatcacccattttcaccatgttttctataggcactttttctacagtgttaaccatgtcatcttcttatcgctattttcacaatcaccttgattgagaaccattctggctatttcaagtcaagatagaacaagtggagtctcattgatgttaaaaaaaacttctttgatatctacttccatcttactggcagactgaaggtatgattttgcatatgtaaggaggtcagacatcattttttttctcacttgacattcagcatccttcaaagtcaccacc

SEQ ID NO: 464989 - DNA, 556 bp, Homo sapiens
ggcaggctttcagtttccacctgtggtgctatgttttgattaaaagattattgtccactgtatttttttttcaggtgagaagaaatagcaaaagcagttgagggaccaagtagtgggtcctgtagggataaggaagcattctgttggatggcttttaaaaatgttccttccagaattgcctacttcattaataaatggtttttgtcttagaagtctctgattttataaattgacatgatttcttgttctgttatggattcgtcatgtccttcaataagcccatcacccattttcaccatgttttctataggcactttttctacagtgttaaccatgtcatcttcttatcgctattttcacaatcaccttgattgagaaccattctggctatttcaagtcaagatagaacaagtggagtctcattgatgttaaaaaaaacttctttgatatctacttccatcttactggcagrctgaaggtatgattttgcatatgtaaggaggtcagacatcattttttttctcacttgacattcagcatccttcaaagtcaccac

SEQ ID NO: 464990 - DNA, 467 bp, Homo sapiens
accaaagctagtgtataaaattagattttgtatttatggacttactcatctactatgttacagkagtctttgttttgtgaaactccaaggaaatattttctacacattacaggttaagaaagaaaaacatgcgtgtattttgtcttaaacatgaaataatgtgtgaagcattctaaaaagtacttacaaatggattaaacacattggcgttatttatagttttactatggttctttattttgtgacttgttattcatagtctttgcaatgacgccctctagtgatcgatttccaaaaatgcattaattaacttgtaagcctgttacagtctttctcttttgactctactgatcctttgccacagcctttgtttggtgttctcttttattgctcttccattagttattcttattctcctttaatggcattagggaaagatcagaagtttcaggagcaaaaaaaaaaaa

SEQ ID NO: 464991 - DNA, 595 bp, Homo sapiens
tactgcaaaaactcaaaggatcactagtagctactatgagcaatagcatactaataaattggaaaatatagttggaaatggatatattcatagacacatacaacctatgaaaattgaaccatgaagaaacccagaacctgaacagatcaataacacattatgagatcaaggccacaataaaaagtctctcagtaaagaaaagcctgggacccagtggtttcattgttgaattctactaaacatttaaaaaagaatgaataccaatcctactcaaactcttctgaaagtcattctgtaaggcaagtattaccctgataccaaaatgaaagacacataaaaaaaacaccaaaaacacaastacaggccaatatctctgatgaatattgatacaaaaatccttactaaagtacaagcaaactgaattcaacagtacattaaaaaaaccatttatcatgaccaagtgggatttatcccagggatgcaaggatggttcaacacatgcaaatcaatcagtgtgatgcattatatctatggaatgaaagacaaaaaccgtatgatcatttaaattgatgctgaaacagcatttgataaaatt

SEQ ID NO: 464992 - DNA, 570 bp, Homo sapiens
gggcagtgattattttttaacatgcagcctggaatatagtagtaggccctgaataaatagtggttgaatgcttgcgtgagcaacagatatttatcaaatgcctgtaatataccagctctgttctaggcagtgggggtgtggcagtgaaccaagcagacaaaaactgctgaagtcttggagtttatattctgatgtaggaaaagagtcaacaaataaggcagggaagaggaagctgcagtgaggctgtgctgcattaagaagtggaatcaaggaaaggtcttgctgggcagacctgaagaaggtgagaagggagggacctgaacaaggtgaggaacaygggagggaggagaaatgagacttttacaaggatgtgcaaaggccctgagaaaacaagaaaggggctatgtggctaaagccagccagctcctgggggcagggcaggagatgtgtcagagaggtgctggtgggataactccaaacatgtagagtcttgtaagccactgagaggactttggattttgctctttctgagataggaagccactggcaggctctgagcagagtgacata

SEQ ID NO: 464993 - DNA, 584 bp, Homo sapiens
atattttaagacagacttctttataacacatatcaaaccatcctttgctggcattaaattcttcagctttagatcctcatcttccttaatgctttaagttgtcatataatgactttgctttttctcaggtcctattagtctataggtatgctcattcttctagcaatcctgcactcacataaaagctgcatttttagtatgagattatcagtatgagattaaaagatattwtgcaaaaactgcaaggttttcggacctgcgggcatagctgtagtgatgcaaattttctttcctttttttaataatgactcttaggctggattcatgtatcttaaatggtgagggattgcagctgcagacctaaatatcaagcacttcagctttttcttttaacgtcatgacttttctctgcttcttgggagtacttccagcattattaatggcactttgtgtgggtctgtgatgttattcaggtttatggtattgcactaaacatgataaaaaatatgtgacaactgcaagagatccacttttttactgtgatatgcaatttattggagagacagactgtttacgcagaggtg

SEQ ID NO: 464994 - DNA, 459 bp, Homo sapiens
tgtgtgaacattcatgcataagaagcccccatggtaggttgctggatctttctcctcttttgtcattaagttaaatattctcttccagaaatcaagaggctaataaggagttaataaatgttttaaaacttagaccacggaatgtctacacaatgcccagtttggatgctatggtattctgactgttttcatgttgattttcatgccacagtgagcctcttcaggcatggaaacaaccaaggattatttgcttctgtcttctttgttttccagccctcttatattttcatcacagactccatcgcttccaaaaacagtgtgtcaggatttactaatgaatttcagctctgtcctgctggaccaccattcaaggacatccgtccaaaccygcccctctcaagaagggcttatccacatgcacctgatttacaaacaaccttagttccccagtttggttcc

SEQ ID NO: 464995 - DNA, 475 bp, Homo sapiens
agtcctttacctgtatgaataataaaaatatattttctgtgtcttttcatattctctgttttgttgcttagctcaatactcttttgagggtttcatgtaaactctagtaatgtatgccatgtaagtgtttttatctgcaattataaaattactttgtatattatttttccttcactctgctattgtaatgtagtttataggtttatacatcaggcaaacsaagcccaaaattaatagaagaaaagaactaataaagattagagcataaataaataaaattgaaatgaagaaaacaatacaaaacatcaatgatacaaaagttggttttttgaaaagttaaacaaaattgttaaatttttagtgatactaagagagaaagagagaagatccaaataaataaaatcagagatgaaaaaacacacattaaaactgacaccacagaaattccaaaaatcatcagtggttactatgataa

SEQ ID NO: 464996 - DNA, 584 bp, Homo sapiens
tctgtgtcttttcatattctctgttttgttgcttagctcaatactcttttgagggtttcatgtaaactctagtaatgtatgccatgtaagtgtttttatctgcaattataaaattactttgtatattatttttccttcactctgctattgtaatgtagtttataggtttatacatcaggcaaaccaagcccaaaattaatagaagaaaagaactaataaagattagagcataaataaataaaattgaaatgaagaaaacaatacaaaacatcaatgatacaaaagttggttttttgaaaagttaaacaaaattgttaaatttttagtgatactaagagagaaagagagaagatccaaataaataaaatcagagrtgaaaaaacacacattaaaactgacaccacagaaattccaaaaatcatcagtggttactatgataaactgcatgccaactaattgcaaaatctcaaagaaatggacagatatctagacatacaaccgaccaagattgaaccatgaggaaattcaaaacctgaacagactcatagcaagaaacaggataatattctatatataagattttt

SEQ ID NO: 464997 - DNA, 488 bp, Homo sapiens
attcaaattagaaaggagatgtcaaattttccctctttgcaaacaacatgatcatatatgcagaaaaccctaaagactctatcaaaaactgttagaagtaacacatayacttagtaaagtggcaggatacaaaatcaacagacaaaaataagtatcatctgtgtatgccaatagcgattcatctaaaaaaataaatcatgaaagcaatagcaacaaatgaaatgaaacaaaataaaaagggaaaaacttaaggagttgaatgatcgctacaatgtaaactataaaacactaatgaaggaaaatgaagaaaacacaaataaatgggaagatacccagtgttcatagatttaaagaattagtattcttcaaatgttcatattaccccaaatagcatacattcaatataatattcatcaaaataccaatggcatctttcacagaaatagaaaaacaatcataagctttgtatagaaatgcaaaagatcctg

SEQ ID NO: 464998 - DNA, 625 bp, Homo sapiens
gcaaacaagatgggtatgagaaatggcctaagactgatggaaattaaactttgggttgatggacacattgaataaataatgaagagaataatttacacagtaaagacccaaaggagtgaagtagggattaaatytagcacatttcttgacttttaaaagctacataaaaaggagaaaaacaaaacaaaatgaaaataacaccccaaaagcataaactgggacactaaaaatcaagtctggatagacaggcaacaaaagcaaatgagtggcttgtgaacaagcaaaccaaaaaaaaaaacaaaaaaacaaaaaggaacgaaagaaaaatgaatgcagcttatatttaaatacatagaaggctggaaagagagagagagatcatgatagcatcactgcactccaacctagacaacagagagagaccttgtcttaaataaataaataaatatatacatacatacataaatacataaataaatgtctaacttgctattacttatgttttgcatttgaatagtgtttctcattactttgtattttgtaatcatttatcaacatgaagcataaaattttaactaatattttgattaagaaaagaatttgagagaaagtacatttacaaggg

SEQ ID NO: 464999 - DNA, 517 bp, Homo sapiens
tgaatagaacttgaactataaaagaagtaatttacaacataaggaatacaatttaggtatagaacagaggtcacttttaagtaactgaactagctcttggctttggcttggttacttattagcctggttcctctgggaggaaaaatgtcacttttcttttttctatatactcaagctgttactgtggcttgtataatttactcaggagggttagaagtagggaatgtcaacatcttcatcccaaatgtatcacttgcccaggccaggaatgcagacggtaaagctagttgagaaaaaacmcagtgtctatcaggcacgcccacttttcagtactagtcatataggtgaactgcaggcaagtcccacacaagcatactagcatggtcctcccttatctaggttttcttttcatgagtttcagttttccatggtcggtggtgatccaaaaatattaaatggaaaattgcaaaaataaacaattcataagttttaaattgtgctccattctgaccattgt

SEQ ID NO: 465000 - DNA, 590 bp, Homo sapiens
taattaaacgcaggcaaatacatacaacagtcaaagagacctacacacttagatgacaatgttcatgccctctctatgtaggtagagttacattaaaaggcttattataagactgacccttctgagcaactgtcatgggtaaacacatgattcaactgcttgattgcctaatccacagcagttgtaaatgcaaaattactttcaaaaggagtcaagtgctggagcccctagatcagcctgtcacctcattgaacggagcctgcgctagggtcagtgattcttaaagtgtggtaacaggaccaacagcatcacaggaaatcttgtaggaaatgatgattcctgggccccgcaaaractatgtgaaccagaaatgttataattggaggccagcaatctgttattattattattattattattattattgatggtgtatcactgtcactcaggctggaacataatggcataatcttgactcattgctgcttcaaacacctgggctcaagctgttctcttgcctcagcctcttgaatagctaggactccaggcatgtgccacaaggcccagctaattttgtaaaaaagatattt

SEQ ID NO: 465001 - DNA, 607 bp, Homo sapiens
gtctaatgaatgcctactttactgttatctttttcttattagtatacgaaaaagacactataaaaatttcagcctgggtgtgtgcatgcatgtgtttatgtttgtgtgtgtgtgtgtgtgtgtatgcttatgtatgaataaatgtatatatgtatgtatgtatatatctgcctatatatctaaacacctatatagagatatatagatatagagwgttcttcatttggattctaagattccacacttacattgtatttctcttattcctatggctttactttctgggttgcacattctgtttccttctcacaccacactgtcatctaaatgttagagtaattcaaaattcagtacttgaaatttcgttcctattttaaatcacgaattagtgatcctatttcagtttcatggctttaagaacatctctatgataatgtctcccaaatatctatttccagcctgaacatctttcttaaatttcataaccatatatccaactgcctacttgacacttccatttgatatctaaaaacatctgatatttagattattcaaaactgggatctcccaaaagaaaaataaccagtccttctttagtcttccccat

SEQ ID NO: 465002 - DNA, 467 bp, Homo sapiens
gcagcactattcaaaattgccaaaatatgtaatcaacctatgtgtccatcaatggatgaaataataaagaaaatgtgatacaaatacacaaaatactactcagccaaaaataaaatgaaactctgtcatttgcaacaacatggatggaacgttgggacattgtattaagtgaaataagccgggcacagaaagacaaatatcatgttctcattcatatgtagaagcaaaagtactgaacttatgggkatagagagtagaatgatgattatcagaggatggggaaggtagtatgaaagggtaataaagaggtgatagttaatggatacataaatagagtaacacagcagaaataaaatctagtctttagtagcacaatagtagagtgactatagttaatcataatttattgtatatttcaaaataactaaaagtggaactgaaatgctccaaacagaaataaatgataa

SEQ ID NO: 465003 - DNA, 467 bp, Homo sapiens
gcagcactattcaaaattgccaaaatatgtaatcaacctatgtgtccatcaatggatgaaataataaagaaaatgtgatacaaatacacaaaatactactcagccaaaaataaaatgaaactctgtcatttgcaacaacatggatggaacgttgggacattgtattaagtgaaataagccgggcacagaaagacaaatatcatgttctcattcatatgtagaagcaaaagtactgaacttatgggtatagagagtagaatgatgattatcagaggayggggaaggtagtatgaaagggtaataaagaggtgatagttaatggatacataaatagagtaacacagcagaaataaaatctagtctttagtagcacaatagtagagtgactatagttaatcataatttattgtatatttcaaaataactaaaagtggaactgaaatgctccaaacagaaataaatgataa

SEQ ID NO: 465004 - DNA, 579 bp, Homo sapiens
accctgcttccaccgcatcaggaacagataaagcagtgaggctggacaggtaccatatgatttacacacttaagtagaaaaaacttgctcatcaaatccaaaagaaggaaaagtatgtccaagcagagagttacatccagccctggcagtaaggtctttttattgaattgtaaggacatcccccagccycaagtccactctttggttgctatgcaaggggcaacaatctaccttgctgtctttcccagcagtttgcctttgggtgatgaacatgttttgcaactatgtagaggtgatggctctacaatatcctgaatacactaaatgttagtttattttactgaattatataatttaaagtaataaattttattatttgattattatctcaaatatacatatacacatatatacatacaaatatatatcacttgtgtataggttggttatatctacatatataatttgatcatgtaatatatacatcttagttatacttacatattttcattaaatttatttattaaagcaatgagatctcaaccataatgtaaacagaatttagggtacttaaaaaaa

SEQ ID NO: 465005 - DNA, 579 bp, Homo sapiens
accctgcttccaccgcatcaggaacagataaagcagtgaggctggacaggtaccatatgatttacacacttaagtagaaaaaacttgctcatcaaatccaaaagaaggaaaagtatgtccaagcagagagttacatccagccctggcagtaaggtctttttattgaattgtaaggacatcccccagccccaagtccactctttggttgctatgcaaggggcaacaatctaccttgctgtctttcccarcagtttgcctttgggtgatgaacatgttttgcaactatgtagaggtgatggctctacaatatcctgaatacactaaatgttagtttattttactgaattatataatttaaagtaataaattttattatttgattattatctcaaatatacatatacacatatatacatacaaatatatatcacttgtgtataggttggttatatctacatatataatttgatcatgtaatatatacatcttagttatacttacatattttcattaaatttatttattaaagcaatgagatctcaaccataatgtaaacagaatttagggtacttaaaaaaa

SEQ ID NO: 465006 - DNA, 632 bp, Homo sapiens
caccatatatattttcagtttgtttgtcttctgttcttgttacttgctgagtaattttaatttttataaacctaaaatatttggcccaattaaaatattcaaaggttataaccrtcagaaaaattcactaataaatataaatttgtttacataaaaaatgataagcttattagtggcattttaacagaccataaaataaaaaaaagcacttattctcatatacttccaagaaagaaagaattatcaaactctacttagcagagatgatcagaaaataagttattttgcctcaggcttccctgggaaagacctactttattagaattaaaataagccacttattttaattctaaattcatgaaaacacacactacctctaagcatgtctgttggtaagtttaacgtatttgtctaaattcaatttttattcttccagcttacagataatgaagacaaataggtttcatatgtcaaactctgtcactgcttggagaagacttttaaaaatccatcacctattgcctagtttatttatttaaaatgtacagaaacttctttagtccattaataatatgggaaagacaagatgtctttggattttaatataagcaaatttgtcaccctttcacgtt

SEQ ID NO: 465007 - DNA, 606 bp, Homo sapiens
aagcagccacctaaaataacatagctaggaaaggttagaggcattctaatttaaatttaatggtttattttgctttgcatttctgcccataaactacaaaaatgtcaggctattagtggtatttttcaagatgttaaaatataatattagcctttttcctsccttttgatccatattttctttgtggcaaataattttggtacatttattaactaatctggcttaaagaatcctaagatgccttttggtcttatgacaaacaatcatggccaagcagcagacaaaaatgtgaaattccaaacccttgttggtctaagattgtctttcttgcatatcaaagcaatgtacaagtctagtttctcacatgcagttgtcattaaattaggactggcagagttcacaaataaaaatacaggtaagatagttaaatttgaatcagataatcaatggatttttaaatatgaatatgtctccaatattgcaattattaaaagtttatctaaaaatcaaatttaaatgaatgtcctatatcttacagacctagatcacgtagctttcattctataacaattagcactaaactcttcttcttgcagcttccaactg

SEQ ID NO: 465008 - DNA, 486 bp, Homo sapiens
tacctccagtgaacattgctttctggtatctatgcctytgtgtattccatctcccattttaactagggctgaactgagtcagccgtaagctatggcagagtgagagttttggacttgaatagatagatcataaaggtattatatattttaccttggtgttttagtacctttgctctgggggtatccatctgctatacaatgtggacacttaagcattcctttgaagagattcacgtggaaaggaaccaacttatcagcaacaacctgccagccatgtaagtgagtcaccatggaaacagattcaccagcagcagaaaagctttcagatgactgtagccctggtcgatgtgtgaagacaacatgaataacttagagtccaaactgccagccacacagctccagagcttgtgacccacagaaactgtaagagataataactgagttattattgttttaagcaactttatgatgttgcagtttggtaca

SEQ ID NO: 465009 - DNA, 556 bp, Homo sapiens
cttggataaaaagtggaagagctttgaatggtgggaagttttacccacactgcagttaggggttctaataatttctgataggtgtaataagtcacatacttaaatgaagccggcaagctctaattaatatatgactatccataattaaggtttcttttatttttttctgcattgtattcacatcattactatagttacatttcataaatttaaaagtgcttttcacaagccaaatttatgcctatgagtaatgattgatgcaagtttagctttgctgttctttaattttgacaattctcactttttaaacttttaaagaaataccttgaattaatggtayataattatctcatacttaataattttcttatagataatatttccctaaacaatttaaacagtgattagttatgatgatagtttcaagagtttttcttatcaattgaagctgaatggtcaatatttgatgggaaggaaacttcaaacagaataatgtccacataaagcaatatttaaattcaaaagaaaatattttttattgctgctcaatattata

SEQ ID NO: 465010 - DNA, 258 bp, Homo sapiens
agtaaaaggaaaccaacaaaacaacttmtaattttcaaaaaaagttcctccacaatgaagagggcaacaagaacctcaatggattagggtcagatctttatgagtacacatgttgttttatgagtacattgtgaacacattaatagaaagtgagataaagctttgctcaaattaaaaatcaaaccatttgaggacacctctttcagtcctatatagatgcaaaccacttttttccaattattaaacatattttagttg

SEQ ID NO: 465011 - DNA, 595 bp, Homo sapiens
tttatttatgaaatatgataagcatatgaaaaaagtagaagaaaatawtagattattttacacttaagacaaacagatgtgttattatttggcacatttgctcaatatttcttttgttaaataaaataaaaattatattaatatcttatcaatttttgtatctccttacataaaggttgctattatactaaagggaatggatgtaattttccagtattttaacacttttactgtgatatatatatatatgtatatatattcattcaaataataatagctaccatttattgataccttaccatagtccagatactatgctaaataatttatatgcattaactcattaaaatgctatgcctaccctatgcaaaagtttttatattgtcaccattttaaagataaatatttgggatacggtgtcatttttctctagttttgaaagtttcagatttcacacattctttttcaaccttccttttttcattcaacctgcagtttatatttttatagcttgggaaatgtaaatcatttattttaacttgggaataaaccataaatgtttatgtgtttccttaaaatggaaaactaagtcatt

SEQ ID NO: 465012 - DNA, 634 bp, Homo sapiens
gaaacagaaatctttgctagaattttggtgttgccattaaaaacagtcttaaaatgtatattcagccatgtgtgtgatattttcaaatatctctttgggcactcatttttgaaaaacttatttataactttctcacctactaatgtaacataattttgtatatgagcatgtagcagtttttcataaagaaatacactgttttaaggaawgatctgtatctttatttagtaagtatttattcattgtttagctgattccaccagtatttccatagtctcatttatgtgtccagatgataacatattttattgcaaaacacgtacattttggaacttggtgacagtttctttgcagcttataaaatgatgacattttctaaatgctctgtgggtccatgataagaatatcaacccttttgcaagccgaacacaatgtttattattaataaatcatttttgagtcaattattcatatcctccttatccttgttttatttagacctatatggccttattttatttatgaaatgatatctctaccattttaaaagatccttttgtactacatgaatttgagcagtcttaagttctttaggtaatagagtgcaattattaaaaaaaaaaaaaaatcctgt

SEQ ID NO: 465013 - DNA, 634 bp, Homo sapiens
gaaacagaaatctttgctagaattttggtgttgccattaaaaacagtcttaaaatgtatattcagccatgtgtgtgatattttcaaatatctctttgggcactcatttttgaaaaacttatttataactttctcacctactaatgtaacataattttgtatatgagcatgtagcagtttttcataaagaaatacactgttttaaggaaagatctgtatctttatttagtaagtatttattcattgtttagctgattccaccagtatttccatagtctcatttatgtgtccagatgataacatattttattgcaaaacacgtacattttggaacttggtgacagtttctttgcagcttataaaatgatgacattttctaaatgctctgtgggtccatgataagaatatcaacccttttgcaagccgaacacaatgtttattattaataaatcatttttgagtcaattattcatatcctccttatccttgttttatttagacctatatggccttattttatttatgaaatkatatctctaccattttaaaagatccttttgtactacatgaatttgagcagtcttaagttctttaggtaatagagtgcaattattaaaaaaaaaaaaaaatcctgt

SEQ ID NO: 465014 - DNA, 521 bp, Homo sapiens
aacttacaattagacttggtaaataatgtactgtgcttattcaattctattcacaggcttttataagtgttgttaattgttatacttggaataaacactggttaagatgggaaaatattctctcaaaatccagcattgtcacgtgattgaaaacaaatgatgtatttcaaaatagtttttaggaatatcagtcacttatcccagatcatrccaaagtagttaagtctctcaaataatcgtagtctaagagtgatgacccctcagtgaatagctttccatatctaccctccactgagttggtgctaccaagaagtgagttaaccatggccttctggtgtgttattttcaccttatttggtgaaatgctcttgatgcattggaatgccttaataaattgaccaaataacattgttgttttctctcttcccataactaagaagggggatgcattataaggtaaaaataatgtaacaaatataacaatatagtaaaaaaaataactagggatcataggtcctgtt

SEQ ID NO: 465015 - DNA, 521 bp, Homo sapiens
aacttacaattagacttggtaaataatgtactgtgcttattcaattctattcacaggcttttataagtgttgttaattgttatacttggaataaacactggttaagatgggaaaatattctctcaaaatccagcattgtcacgtgattgaaaacaaatgatgtatttcaaaatagtttttaggaatatcagtcacttatcccagatcatgccaaagtagttaagtctctcaaataatcgtagtctaagagtgatgwcccctcagtgaatagctttccatatctaccctccactgagttggtgctaccaagaagtgagttaaccatggccttctggtgtgttattttcaccttatttggtgaaatgctcttgatgcattggaatgccttaataaattgaccaaataacattgttgttttctctcttcccataactaagaagggggatgcattataaggtaaaaataatgtaacaaatataacaatatagtaaaaaaaataactagggatcataggtcctgtt

SEQ ID NO: 465016 - DNA, 594 bp, Homo sapiens
acctaccctacttacaaagactttttttcagccagcacataaatattttattaagtagatattttgtttagttttgtttttgtcaagatataacatttagtgattctaaaactttgttaagagagtagatctcgtgttaagtgttcttaccacaaaaagtggggggtgggggcatgaaacatttagaggtaatagttgttattaccttgattgtggtgatgggcccatggctccacactcatcatgggtctaaactcatcaaattgtgtacaataaatatgcrcagtttttatctatcaattatacactcataaagctgtaaaaaaattttaaaaataaagtttccttggaagcttgggctgaaagccaataaagaagtcacatgccatttaaagtttgtttattgcattttacccactacagatgtgagtgacctttatcaagaatctgcatttccaacccattaaacatctctcccccattaacctgatagttgttaaccctgatagctgtcttgaccggccagtgtttccatttgtgtggattctggattagcctgaaaatagctgtcataatggaagatgggtaatcctc

SEQ ID NO: 465017 - DNA, 560 bp, Homo sapiens
ttcatggaatctgtaacagtaattagcaatgcctctcacatgtatcatacttcttcatacttccatgattttgtatatgctgttcttttcccgagaaagtctgtctctaccagtgtgtcaggcagcctcttgttctttctctaagaatctcttagttagtgtccatttgaaataacagacataagtagaaaggaatttcacaaatttacactcccatgtaatcaccaccacaatcaagatctacattttcatcatcccaaaaaatttstttgcgtctctcacaagcaccccgacatgatcagccccagacgttgatctatgttttgtcaataaattagaatagtcttttctaaaggttcatatgaatgtaataatgcagtataaactccttctgaatcttttttgagtcagcatgtttttgagatttgtctatcttatggagtatatctatagttcatttctttatgctgtatgggtagcattctattttatggatagaatagaatgtgtttatccatttggaatgcttcaggttggggctatttaaaagtaaagatgct

SEQ ID NO: 465018 - DNA, 580 bp, Homo sapiens
ggggttgatttgtaaattagctatttaacattacgaccaaaacacttttccaaatggagatttaaatctatctcaatatactagatgaaatccaaactatttattcatagctctgtctttggggaagaattagaagactaattgttgtaacacgttattacctcaaagggatttttgagattaattctgaaataatgaayagcctaagttctaatttttgaataaaaattttatttacaggcaaattgtttaaaatggtgaagcaaaaatactaataaagtactgatttaagctagaaacagtcatacaacctctttttaaaagatctgtttaaccagaccagtagttcttagatcaataattcattgatcagattactccgtagttgtttacttgatatacttagataatggaaataattagaatcatgaaaaatacttgagttgtttggtcaattgcaattgtgtgatcattcacttgactgctcagtcaagtccttatgatattagcataagtcaccctattttgattgatttgaagaaattccaagtttttaataacagcactgctttcttcatag

SEQ ID NO: 465019 - DNA, 460 bp, Homo sapiens
aaagcaaatcgtgacgagaaaatggctctgttatcacaggtctgcacgtttacataacagaaaaagcaagggacagaaytatatttggaccaaatccaaatcactgagtgattctactaaatgatgatcgcatactaaatttttttttgttttttcacatacattttaaagtgagagatattattttaaattttagagggtgagcatcaaataacattgtggtttctgtaatcagtataaattacgcaacaatcagtttaaatgggatcatttacaactgctcacatagctcttgagtttatattaacaatgtagaatttaacgcaggatagtctattcctcaaagaaacaggaataatgaacacaattaaatgtttcactttgacccagactatttttcagaacataaagtcatcaacattcatattacagcaatgctttttcttttccgcccaattag

SEQ ID NO: 465020 - DNA, 460 bp, Homo sapiens
aaagcaaatcgtgacgagaaaatggctctgttatcacaggtctgcacgtttacataacagaaaaagcaagggacagaattatatttggaccaaatccaaatcactgagtgattctactaaatgatgatcgcatactaaatttttttttgttttttcacatacattttaaagtgagagatattattttaaattttagagggtgagcatcaaataacattgtggtttctgtaatcagtataaattaygcaacaatcagtttaaatgggatcatttacaactgctcacatagctcttgagtttatattaacaatgtagaatttaacgcaggatagtctattcctcaaagaaacaggaataatgaacacaattaaatgtttcactttgacccagactatttttcagaacataaagtcatcaacattcatattacagcaatgctttttcttttccgcccaattag

SEQ ID NO: 465021 - DNA, 396 bp, Homo sapiens
agtcctacctatttgggaggggaggctgaggtgggagaatcactggagcccaggaggttgaggctatagtgagctgtgatcgcaccactgcaccccagccttggcagcagggcaagaccccgtctcttaaaaagtagaagaagaaaagaaaagaaaatcraagcaaagcagcgtcactagccaggcctcatgtcacacaacccccgggctgctgtcattgtgcagtcggccctgaaacagaactcattgcagaagagcccatccctggctcctgggccacacgtgtgccagggtttctcagagccatggctctggcctgactctccctgcccccgggcccctgccagttcgtcatgcaatgcccctgtctaggcaagctgcctgcacacaggccgg

SEQ ID NO: 465022 - DNA, 579 bp, Homo sapiens
cacaattacaatgcttactaagtgagaatactttgcagggctggggcaaagtcctccacaaggccatgtatgctctgaatcagcgtccaatatatggtactctttctcccatagccaggattcatgggtccgggaatcaaagggggaaagtggaagtagcaccactcaccatcacccctagtgatccactagcaaaatttttgcttcctgtttctgcgacattaggttctgctggtctagaagtcttagttccagagggaggaatgctgccaccaggagacataacaacgattccattaaactggaagttaagattgccacctggaaactttgggctcctcctacgtttaagtcaatggctaagaagggagttacagtgttggcttggtgactgacccgaattatcaagatgaaatcagtttatcactccacgacagaggtaaggaagagtatgcrtggaatacaagagatacattagggcatctcttagtattaccatgccctgtgattaaggtcaatgggaaactacaatggcaggactacaaatggcccagacccttctgaaatgaaagtttgggt

SEQ ID NO: 465023 - DNA, 648 bp, Homo sapiens
tcttctctttcttgtttctttttttcctgccttcttctagtaaagatgattttctctgatgatatgatttagtttcttactttttttgtgtatgtgtgtatctattgtaagtttttggtttgatgctgcratgaggctagcaaatattattttataatccattattttaatctgatagcaacttaaaactctttacagaaacaaacaaaatgagaactaatgaaggctctacacctaaacttcatagccctgcttttaaactttgtgttgtttctatttatatctgattgtactatgtcttgaaaagtagatgtagttattattttttcattaactatttagtctttctaattatgatgagtattttacacaccacagttacagtgttatactatactgtgtttttctgtgtacttactataaccagtgagttttgtaactgcaggtgattatttatgcttgctaatgtctttttctttctgattgaggtacaacctttggcatttcttgtaagacaggtctggtattgacgaaatccctcagcttttgtttgctgggaaagtcttcttttctccttcatgtttgaaagatatttttgccagatatactattctagagtaaaagttttttttccttcagtggtttatg

SEQ ID NO: 465024 - DNA, 591 bp, Homo sapiens
tgtaaatggttgataatggatttgaagtttctaacagtatgactcttgtgataaaatgaaagccaaaagaataaatctctcatgacagagtatcagacattaatacaggacaatatatcagagtgatagcagaaagcagctgattaactcaaattaaattatttgaagagagtttagtaaatgggctatttacaaagtagcaggcatatagtagcaaaaccgcaatgaataatacaagaatctggggttagtaacwtggggttgagagtgacagagtaggttacttccttagaactgaatgggcaaagggaaggaatggatgatagaaataggaggaagaataggatctgtgtggggacagtatcctaatagaaactatgacctttatttagtcaaaggacatagccagcccaggaagtctgcagggagaaggccaagagaatatatatgctatcctcattatccccactcctactgatttcctaccagcactccccattaatcaaaacctatccaaagccagaggacatggaggtacttttaaatgattcacataattcagtccctagaatatacagcagggtgaagcat

SEQ ID NO: 465025 - DNA, 537 bp, Homo sapiens
caattcatgtctgatcctgaatgattctggtatattaagttgtgctataactggaaatgtgtgtttagccaacaaaaatgacaaaatagtaacaattgaaagctacaaagccaattatttttatataaaaacttcaaaaatatcatgactagttattatgggaaccattttatctaggagtggtttgtaaggcagcattttaagtttccataaaaacagaaccttctgttttagaagagatgtcagyaacataaccagaaacctctatttccaagtgcagtggtttctcctgtccataactcaggtttgaactaacttccatttgaatctcttgctcttccactttaatctcttgctcttccacctccaaaagtttatctggagttgaagctacctacttcttcatcttcatttttatgtagaaggctacaaatcattttgggtctataggagaaatcattttcctgattatcagtcattccatcccacctatattttcttctccttccttcttttctgtcagaagagttaccatgc

SEQ ID NO: 465026 - DNA, 591 bp, Homo sapiens
ctgtgtgggggctctcaccccacatttctcctacacactgcagaggttctccatgagagccctgtccctgcagcaaacttcagcttggacatccaggcgtttccatccatccactgaaatctaggcagcggtttccaaaccccagttcttgacttacgtgcactgacaagctcaacatcacatggaagctgccaaggcttgaggtttgcaccctttgaagccacagcctgagctctatgttgacccctttcagcaatgrttggagcagctgggacacaaggcaccaagtccctaagctgcacacagcagggggaccctgggcccaacccaggaaaccatggttttcatgctaggcctccaggcctgtgatgggaggctctgccatgaagacccctgacatgccctggagacattttccccattgtcttgaggattaacattcagctcctccttacttatacaaatgttttcagccagcttggatttctcctcagaaaatgggattttcttttctattgcattgtcaggcttcacattttctgaacttttatgctctgctgcccttataaaattgaatgccttcagaagcac

SEQ ID NO: 465027 - DNA, 632 bp, Homo sapiens
ccctttgcttatgggtaaccagttgccttttgtgttttaaaattattatttaacattttaatataaaaaataaaataattcaacaggtccgaccacagcaggcatttgatataatttttaataagtaaatattgctaaccagtattagaaaaactttattaaaaatgatttggttattagtaactttgaagctcatttaaaatacatgtgggttatttgtgagttactttataagagtgamtgtatctgagttgttttgtttgcagagatttttgttgagatatattaaagatataaaacttgtaagtcacccttagaaagcatatttttccacatgcataatttcttttctcattcccttgaatctgtgtcatattctgtttctgaactttatattgaattgcaaatattcatagcattcaatttctagccaaatagaaaaaaatgagatgataatatattccaaaaaatgaggcatattaatataattatattaaaacaggctttgtctttctgtccctttttcagtctctgggacttcaactacaagagaacaccttctcaggtcttaagtaattcctttaaagacatgttatgattctgtcaaattaatcaaaccaattttggaggat

SEQ ID NO: 465028 - DNA, 572 bp, Homo sapiens
acagttttgtcttttccgggatgttctgcagatgggggcatgcaacaggccaccttttggttctgactcatctcacttagtgtgatgcactggagacccatygcgtgtcacatggatctcccgtttgttccttttgacggctgagcagcttcccattataggacttgggcttacagctggggagaggcatcatggggtctcagggcccctgggctggggaccgtcagctgggtcagagtttcatgctgcctcaggaggccttggacccctcctcaagcctccgtgtcccctcctcatggcactaggaaggtttcaggctggtcagacggtaccatctggccttgccaggatgccctggaagaggactggtttctgagcagacacagcccagccagccctcagcctcggcctcaaacctgtggaacgttgtcctgaacacacacagacaccttggctcagtcagataggcagggccagcgaggaacctggacggttaacagatggctttatggcagaggtagcaggttccagccccagcttgtacagtccccactgtgtgatcctgtgtgtgg

SEQ ID NO: 465029 - DNA, 612 bp, Homo sapiens
actaaggaaaacaaaattataggccagtatttctgatgaaaacagatgcaaacattctcaacaagataccagctcacgcctgtaatcccagcactttgggaggtcgaggcaggcagatcatgaggtcaggagttcgagaccagtctggccaataaggtgagacccccatctccactaaaaatacaaaaattggcctggcattgtgggaagstcctgtaattggagctactcaggaggctgagacaggagaatcgcttgaacccaggaggcagaggttgcagtgagccgagatcgtgccattgcactccagcctgggcaacaagagcaagactccaccatgtgaaaaaaaaaaaagataccagcaagccaaacatgacagcacattaataagatcatcattcaccatgattaagtgggatttatcccagggatatgagataatccaaacaatacaaagcaataaatgtgatacaatacattagctgaacagaaaagaaaaaaaaatgatgttttcaatagatgcagaaggtgcatttgacaaatttcacatcttctctcagctctcaactaataaggtatagaagaagttaccttagtgaaataaaggctata

SEQ ID NO: 465030 - DNA, 612 bp, Homo sapiens
actaaggaaaacaaaattataggccagtatttctgatgaaaacagatgcaaacattctcaacaagataccagctcacgcctgtaatcccagcactttgggaggtcgaggcaggcagatcatgaggtcaggagttcgagaccagtctggccaataaggtgagacccccatctccactaaaaatacaaaaattggcctggcattgtgggaagctcctgtaattggagctactcaggaggctgagacaggagaatcgcttgaacccaggaggcagaggttgcagtgagccgagatcgtgccattgcactccagcctgggcaacaagagcaagactccaccatgtgaaaaaaaaaaaagatascagcaagccaaacatgacagcacattaataagatcatcattcaccatgattaagtgggatttatcccagggatatgagataatccaaacaatacaaagcaataaatgtgatacaatacattagctgaacagaaaagaaaaaaaaatgatgttttcaatagatgcagaaggtgcatttgacaaatttcacatcttctctcagctctcaactaataaggtatagaagaagttaccttagtgaaataaaggctata

SEQ ID NO: 465031 - DNA, 504 bp, Homo sapiens
tattccccctttgagcagagtcagacatgagttacaaaaacacatttaaataagacctagtagttcccaaataatacctaaaatttgggaattttaaattcccaaatttaatttttttaaacttaaaatttaaattcccaaatttcaatttaaaattaaattgaaattacttacatgaaataccaaaacatctcaactgagaaaagagcatcaaaagatgccaatgagaaggtaatacagttgctagaattatctgacagagattgaaaaagagccatcaaaaacatgcttccttgaaaattatgaacatgcttgaaaataaagaaaaaatgcaaagtctcaatgtgacaagttagactgattgctaagtcacaggtaacagttctcacagtgtacttctacgctcatttatgacaccaactgcaacttaaggagttttccaaaacccccctcaattttgataattyacttgaaggacccacagacatcactgaaggttatttc

SEQ ID NO: 465032 - DNA, 553 bp, Homo sapiens
tgtcattcaaaaaaagatgttatgtattatagaaacttccctcaaataccaatttctccttagaaatacttgtaattgatggtctggaaaagaatgagaacaaattaaaataaatgggaagaggtaggccttaaattatagagtaaaacaggagataatcaatactaattagctaacaaaaacactaccccaaaatctaaccacaaaggggattataacacttcaaaatgaattaaagataattaaataactaatgaaagatatgacatgatgcaagtcmgaaatgcaaatacttagaatagaaatatacaaaaaaagttggaaaataagaattgacagtattcagaaaaaaatttaaataaaaagacacatttatttcaaagagaaaaactaaatcaaaatacgccaagaaatcatctttatgaagtgtagggaaatattttagagtaatagaaatatgaatagcagtgatgattatatgactatataaaatttccaaatcttttcaaaatgtaagcttaaattgagtaaatgtattccatataagtaagtc

SEQ ID NO: 465033 - DNA, 553 bp, Homo sapiens
tgtcattcaaaaaaagatgttatgtattatagaaacttccctcaaataccaatttctccttagaaatacttgtaattgatggtctggaaaagaatgagaacaaattaaaataaatgggaagaggtaggccttaaattatagagtaaaacaggagataatcaatactaattagctaacaaaaacactaccccaaaatctaaccacaaaggggattataacacttcaaaatgaattaaagataattaaataactaatgaaagatatgacatgatgcaagtcagaaatgcaaatacttagaatagaaatatacaaaaaaagttggaaaataagaattgacagtattcagaaaaaaatttaaataaaaagacacatttatttcaaagagaaaaactaaatcaaaataygccaagaaatcatctttatgaagtgtagggaaatattttagagtaatagaaatatgaatagcagtgatgattatatgactatataaaatttccaaatcttttcaaaatgtaagcttaaattgagtaaatgtattccatataagtaagtc

SEQ ID NO: 465034 - DNA, 570 bp, Homo sapiens
gatgaccaatttttcttgaataagagctggttaaattttgccttgatgaaagagaccttatcaagacttacccactccagaaaaactttgtaaaataaataagacytgagctgattttcatctttctgtagatagttggttatacctggagtgtctgtaaactttaagaagtaactttaagaggaaaccttaagaagaaaatggaacatagagttgatagaaaaacgcagaaatattaaattataaaatggaaagaaaggattaataataaaaaatatttattttggtagaaataagactatagaaataaattgactcattcaaatatattaaaaactagatggaaaaactaggattcattatgtgtagcttcagaggttaaagccgacatgagtggatggaaacctaggagatatatattggtagcaattaagaaaaaaaaagtaatactacctaaaaattgaatgtcctgccttcagaaaacatgaataatctgatcaccagagtagctcatccatcaatgcttcaagtattatacaggaggaattcaaatatcagatggataggtca

SEQ ID NO: 465035 - DNA, 570 bp, Homo sapiens
gatgaccaatttttcttgaataagagctggttaaattttgccttgatgaaagagaccttatcaagacttacccactccagaaaaactttgtaaaataaataagacctgagctgattttcatctttctgtagatagttggttatacctggagtgtctgtaaactttaagaagtaactttaagaggaaaccttaagaagaaaatggaacatagagttgatagaaaaacgcagaaatattaaattataaaatggaaagaaaggattaataataaaaaatatttattttggtagaaataagactatagaaataaattgactcattcaaatatattaaaaactagatggaaaaactaggattcattatgtgtagcttcagaggttaaagccgacatgagtggatggaaacytaggagatatatattggtagcaattaagaaaaaaaaagtaatactacctaaaaattgaatgtcctgccttcagaaaacatgaataatctgatcaccagagtagctcatccatcaatgcttcaagtattatacaggaggaattcaaatatcagatggataggtca

SEQ ID NO: 465036 - DNA, 570 bp, Homo sapiens
gatgaccaatttttcttgaataagagctggttaaattttgccttgatgaaagagaccttatcaagacttacccactccagaaaaactttgtaaaataaataagacctgagctgattttcatctttctgtagatagttggttatacctggagtgtctgtaaactttaagaagtaactttaagaggaaaccttaagaagaaaatggaacatagagttgatagaaaaacgcagaaatattaaattataaaatggaaagaaaggattaataataaaaaatatttattttggtagaaataagactatagaaataaattgactcattcaaatatattaaaaactagatggaaaaactaggattcattatgtgtagcttcagaggttaaagccgacatgagtggatggaaacctaggagatatatattggtagcaattaagaaaaaaaaagtaatactacytaaaaattgaatgtcctgccttcagaaaacatgaataatctgatcaccagagtagctcatccatcaatgcttcaagtattatacaggaggaattcaaatatcagatggataggtca

SEQ ID NO: 465037 - DNA, 568 bp, Homo sapiens
ttttcagttttttaaaattatattctatggggctttccatgtaaatatgcatgccatccacaactaacaagcatattttattgtaaatatcaatattgcrtattttctaattttcaaattatgtagattcaagttttatttactggcaaacttactaaacaaggataaacaataagtaatagaagacgatcttttctttggcataattatactatccaataagaataatttatttcaggataaagtttatataccttcttgagttgattattctattaatttgtttaataagtaacattttcagaactagagtttataatatctaaagacactttatatatatgaaagtccttttgttttcctctcaaataaaatatcaattcactaagcagaaaattcttcagtcatattttttcctctcaaaacaccatgcgttaatctaccataccttgcaattagtgttttagattaaagaaattgttttcattcttacttggttacctttccagtgaggaaaacaaaacaaaacaaaattcttttgctgtcacagtcttggaaagacaagctg

SEQ ID NO: 465038 - DNA, 593 bp, Homo sapiens
tggctcatctacaaaccattgacagttaatgtgatatcagcaaataatcagtttatcaatttgtactccataaaatttttctctcatatgtaagttcatgtatcaatatcaaaagaagagtctcacttaaagtaactctctctatataagccaaaataaaaattgagatgaaaatctcagaaataaaggttataagaaagaaatctgacaaaaatatgtcctagtaaatgaatcagcattttatttgctggccctatcaaattagaattttacaaggacatagtggtgtaatctctgagtccatttgagaaggtaatgaagtaattgtttgccagtgattgatacccagcacaaagaagacaactaaagaggtgagcaaagaagagtcttccaaaataattttcagcacaaggtaattgccaaatattttactgtgattgaagttactacattacaacaaaagacaagcctaaaatcaaaaaactggagaaaaratgacgtgacactgatctccaagcacatacttggacaatttaacaggcatttaaggaagtagaaatttaattctgaaaatcccttgtttaaattagtct

SEQ ID NO: 465039 - DNA, 578 bp, Homo sapiens
tatgctttctggtatttttgcaaacatctatttggatctgttcccctaaattagaatctatttcttctcctgctaggaatgttcaggattagatttcacttctgagtaatataaacaagtcagtagattttcacttatctcttgatttaaaaaagcacatgaaaactacaaagctcagagtggattgttactaaaatttattcagtttcagtctgtttcactgtgacattcacaagtgacctgtcttcctacgtaatctccagctttattgctgcgaattgatttcttaggaagcactgactggggaatgaaaggatgtgatgatcctggccaccctgaaatataactcttagtatatatcagtggtggaaaggaggcagggagaattggtgaagctgagtatctataaggtacagagatataagtgaactgggktaaattaaatgaaataaactgctatattgtagttgatcctatttgttctgctatttactcagggtgcctataaagacactggtatctggcaaatttctaccctgtagactttggaccagataggctgggtttgcttaagagcc

SEQ ID NO: 465040 - DNA, 382 bp, Homo sapiens
gacttccattactatgctgaataggagtggtgagtgtgagcatcccatcctgtcttgtttcagttctcaagggaatgtttctgccatttgcccattcagtatgatgttggttgtgggtttgtcatagagggttcttattattttgatgtgtgttccttcaataccttttttcgtaagggtttcttttttatcatgaagtgatgttagatttcatcaaaagctttttgtgaatctattgagattaatgtatgatttttaattctgtttatatggkgaatcacatttattaatttgtgtatattgaaccaaccttaaatcccaggatgaagcctacttgattgtggtgaattaactttttcagttggctaatattttgctgagg

SEQ ID NO: 465041 - DNA, 583 bp, Homo sapiens
tttaatttctttttgaattatagcttgtataaagctactactgtagcactcaaatgagtatagtttttttcactgycctttaaggtatatttttccaaacagatgattatttcaaatgaagcaaacctagagtggagccacccataaaattttgtaaataggatgtatgggatctaaaatgttggacctagatattcaagtaaatattctaaatgaagaggttctcctgagagttcataacatcaatcaaaaatcacttagtacatgaaataatatttgccactgtcttttatgaaaattaaacatgcaatatcttcataattgacaccaaattcttaatatattctacttcctttactatgtcatataaaatttatttgcttgtaacaataccttaattcacataaaaaatatttgaaatattattttttaaggttgatttaaggcagttatactgccccattaagttttcctagactctcttaaacaattctttaaagcaaactgttcaaaattgtttttggtttctttgttttctaatgaaacttctaatgagagttttatcttgatagttatttaaatc

SEQ ID NO: 465042 - DNA, 561 bp, Homo sapiens
acaacagtgaccaaccacacaaattttagtttctgtaatctttgtgtatctagggacacttgtatctgaagtggtttacatgtaagttttttacgattttaattttattttgtcatttctacagttaatttttaaaatttgcctttaaaataattgatttttaaaaattcttagggcacccttgaacttcctttcttaaaacacattgatattcacaactgcctgtaccaaagcaaatgtatgctatataaacgagrtcaggagattgagaccatcctggttaacacggtgaaaacctgtctctactaaaaacacaaaaaaattatccaggcatggtggtgggcggctgtagtcccagctacttgggaggctgaggcaggagaatggcctgaacccggaagatggagcttgcagtgagccaagattgcgccactgtactccagcctgggcgacagagcaagactctgtctcaaaaaaaacaaaaaaaacaaaaaacgaaaaaacaaaaaaacaaaaaagaatatcccaaatagtaacttacatcttaataacttcagttta

SEQ ID NO: 465043 - DNA, 561 bp, Homo sapiens
acaacagtgaccaaccacacaaattttagtttctgtaatctttgtgtatctagggacacttgtatctgaagtggtttacatgtaagttttttacgattttaattttattttgtcatttctacagttaatttttaaaatttgcctttaaaataattgatttttaaaaattcttagggcacccttgaacttcctttcttaaaacacattgatattcacaactgcctgtaccaaagcaaatgtatgctatataaacgaggtcaggagattgagaccatcctggytaacacggtgaaaacctgtctctactaaaaacacaaaaaaattatccaggcatggtggtgggcggctgtagtcccagctacttgggaggctgaggcaggagaatggcctgaacccggaagatggagcttgcagtgagccaagattgcgccactgtactccagcctgggcgacagagcaagactctgtctcaaaaaaaacaaaaaaaacaaaaaacgaaaaaacaaaaaaacaaaaaagaatatcccaaatagtaacttacatcttaataacttcagttta

SEQ ID NO: 465044 - DNA, 561 bp, Homo sapiens
acaacagtgaccaaccacacaaattttagtttctgtaatctttgtgtatctagggacacttgtatctgaagtggtttacatgtaagttttttacgattttaattttattttgtcatttctacagttaatttttaaaatttgcctttaaaataattgatttttaaaaattcttagggcacccttgaacttcctttcttaaaacacattgatattcacaactgcctgtaccaaagcaaatgtatgctatataaacgaggtcaggagattgagaccatcctggttaacacggtgaaaacctgtctctactaaaaacacaaaaaaattatccaggcatggtggtgggcggctgtagtcccagctacttgggaggctgaggcaggagaatggcctgaacccggaagatggagcttgcagtgagccaagattgcgccactgtactccagcctgggcgacagagcaagactctgtctcaaaaaaaacaaaaaaaacaaaaaacraaaaaacaaaaaaacaaaaaagaatatcccaaatagtaacttacatcttaataacttcagttta

SEQ ID NO: 465045 - DNA, 482 bp, Homo sapiens
tattatattgggttgtagtaaaactcatttcaatgtatctttatcaaattgcattttaagctgtttgtatcatattttttcttatccaattgtaaatttcttcagagcataaacgttaaatattcatcytattcttcatattatttaggaaaatgtttagcacaaggttgacatttaatgtttacagaatcagacacataacataataaatgaatgtgcatttattcagaacttacacaatattgtactccattttatcctctggattttgtggtgaatttaaaatatgttcacaagttctttgaaattccttccatcaagaagtggggcttaattaccctttccttgagtgtggaaaagatttgcatctcacagatagcaactgatgaaaatgactgtaacttctgagaataagtcataaaaggttttgtgttttccttctcactctaacttttggatcactaactttgaaggaagccagc

SEQ ID NO: 465046 - DNA, 565 bp, Homo sapiens
ttatttgttagagccgttagttctaaaagcagatgttgtctacttcaatcaattttcagctcttaatggtagattttaaccacatttgtgaaaggcagatactttcaattagtatttttcaggaattacatgacatttattttgaggagaaatttaaggctgccagaatctattgtagcataggattatctggataaaaaatatcaagtatagacagtattgtacgcagctttaggaaacaacttcatttttcctctgattttacactacacaggagatgatgaatgtgtctatcgtaagtgatatggaataaaaataggaatagagtgaatgaattagcaaagttaatatgcacaatataactctcccaacgactggcaactttttgaggtaatccatttgctttctttctcaaagaaacatatacactttgaatttcattttcctatgaatgtaaaaagaaagccaaatagaargataggtagaacctgttcagaaaatcaatttcatccaccatagtctatatgtaatcacatggtagagctgcaataagaaattatgtcac

SEQ ID NO: 465047 - DNA, 464 bp, Homo sapiens
agaacaaaacattataataacagccattcttgattcttgggttatttttaactcctaagcatttaagagcaaaagacagttcagacagaaaataaccaatacaccataagcaaataattattcttccaacctaatatatgtgtagctgaatgtcttacttcagttagctgattttttttaaaaaaaaactactttctgttatagtaggtcattcaacagaaaatttatattagtattaaacaccatcattctggtatcataraaaatattctttttgtttaattctgacaatagcactaggttttaaattatcattctcattttcttggtgaaaataacaaaggctcatagtggcttgtcaagctccccaagatcacaaactaagttgaaagatcaagattccaacatagacttctctggaacaaatttgtcctctttttattgcaccactgagcactaaatga

SEQ ID NO: 465048 - DNA, 541 bp, Homo sapiens
cctccacttattcatattacattacattcattctacaagcctcagttcatttaccatctcatttggttatttcagtccacacgatttttattttttaaaattcctcttgcatttatttacatactcctaatttgctttttttctattttacttcatgtattgattcattccatatatttgaggttctaatgtaataggcagttagaattcataaagaatagctctgctttcttttctattcctcccttttccactttccccacacaatagtatctaaaatgatgctgacagataattagaactcaataagaacttactgcytaaacttttatattaatgcttatgcaaggtttccatatggaaactaatttatatttttgtctgtattttacacatttcaaaataggagaaccaaggtaataatatttttagtgtttatttgtagaaatattatttacttctgcagtaaatacaaacatatcaatagcacattgttagcaaattgatttcataaacatttgatatctgttttgatttttat

SEQ ID NO: 465049 - DNA, 541 bp, Homo sapiens
cctccacttattcatattacattacattcattctacaagcctcagttcatttaccatctcatttggttatttcagtccacacgatttttattttttaaaattcctcttgcatttatttacatactcctaatttgctttttttctattttacttcatgtattgattcattccatatatttgaggttctaatgtaataggcagttagaattcataaagaatagctctgctttcttttctattcctcccttttccactttccccacacaatagtatctaaaatgatgctgacagataattagaactcaataagaacttactgcctaaacttttatattaatgcttatgcaaggtttccatrtggaaactaatttatatttttgtctgtattttacacatttcaaaataggagaaccaaggtaataatatttttagtgtttatttgtagaaatattatttacttctgcagtaaatacaaacatatcaatagcacattgttagcaaattgatttcataaacatttgatatctgttttgatttttat

SEQ ID NO: 465050 - DNA, 556 bp, Homo sapiens
tttccgcctcactcagactaaagaccaactctggctatagctacaaagccttatgccaagtggcctcccctccatcctgccaccaccacctctctcagtgtgactcctcactcagtgtcttccagccacattggcctcttgctgttcctcgaactcattgagcactcccacctcagggcctttgcactgacggttgcctctgcctggagcactcttccctcaggaattcacaaggcttcctgccttacctmcttcaagtctgtgtccaaatctcttgcctgatataaaagagcattatttttcttcattgcacgtaacaccatctaacatatcatatatgaatattttacttgcttatatattttatttcctctactagattattgagggcaggatttttgtttagatgtttaatctttttttttttttctttattgaggtgacatcttgctctgtcacccaagctggagtgcagtggtgcaatttcagctcactgcagcctggacctcccgggctcaagtgatcctaccacctcagcctcccgagtagctgggac

SEQ ID NO: 465051 - DNA, 540 bp, Homo sapiens
aagtagcaaacctgtacatgtgcctcctgaatctaaaatgaaagttgaaaaaatattaaacacaaaaataataaatatgaaataaacattaaattcactctcagttttgaatttcctctctaaaatttaataatggtatctttctaaaacactaatgttataaatacttgagactgcttatcatatttaacatctgaaacatgatagtagatgagcagaatcttaattcatcactcataatagcaaagggcttactgtaccatttcgtgaactcaagtggagtatattttattttgattatagtcaacagagatggggataaaataactccagtgacttatctgtaaaggctttctaattaaatattctaactttattaaatattataattaaaataccatatcaacttttatattggagaaaatatatgatacaaaatatttttgagacmtagaacaaaaatattatcattcttagttttttgagagacacatgaaaaaccaatgtaatatttgtcattttgtgtccaagatgataacc

SEQ ID NO: 465052 - DNA, 652 bp, Homo sapiens
attttagcttctaaccgttcaaatcacccctggcattgaatcacctcttcttcctcaccgattgagtcttccaaactgtggagccagacatcttcaggtaaagaaacactattcccatgtggccccagctgaatttctgactcataggatttgggagcatcacaaaatcataaaattgctcttgtatagtactaagttttgaggtgttttgttatgctgccatagtaactggaataatcagttgtgagacaatttcactagcccaatttaaaacatactttatcttctaactgattgacattagtggagatgaaaagaaatggagattcctgagagayagttacaggttaaaaatataaaaatctaacttagtgatggtttaatggatgatgggtggtaaagcagaagaaaatatcgaggttctaaatttgtccaactcaatggatggtagtgcctttcaatgaggtagcgcccatcacatttgattcttcttcccaatctgggcacatggaaaactgtcatccaatttcttaatagttaggtgccactatgcccagttctggccagtgaattgtaagtaatgaataattatgagtaaggtaatgaaaagtctctgcatgtctttctgatttgtttcttctcctttggtact

SEQ ID NO: 465053 - DNA, 652 bp, Homo sapiens
attttagcttctaaccgttcaaatcacccctggcattgaatcacctcttcttcctcaccgattgagtcttccaaactgtggagccagacatcttcaggtaaagaaacactattcccatgtggccccagctgaatttctgactcataggatttgggagcatcacaaaatcataaaattgctcttgtatagtactaagttttgaggtgttttgttatgctgccatagtaactggaataatcagttgtgagacaatttcactagcccaatttaaaacatactttatcttctaactgattgacattagtggagatgaaaagaaatggagattcctgagagatagttacaggttaaaaatataaaaatctaacttagtgatggtttaatggatgatgggtggtaaagcagaagaaaatatcgaggttcyaaatttgtccaactcaatggatggtagtgcctttcaatgaggtagcgcccatcacatttgattcttcttcccaatctgggcacatggaaaactgtcatccaatttcttaatagttaggtgccactatgcccagttctggccagtgaattgtaagtaatgaataattatgagtaaggtaatgaaaagtctctgcatgtctttctgatttgtttcttctcctttggtact

SEQ ID NO: 465054 - DNA, 652 bp, Homo sapiens
attttagcttctaaccgttcaaatcacccctggcattgaatcacctcttcttcctcaccgattgagtcttccaaactgtggagccagacatcttcaggtaaagaaacactattcccatgtggccccagctgaatttctgactcataggatttgggagcatcacaaaatcataaaattgctcttgtatagtactaagttttgaggtgttttgttatgctgccatagtaactggaataatcagttgtgagacaatttcactagcccaatttaaaacatactttatcttctaactgattgacattagtggagatgaaaagaaatggagattcctgagagatagttacaggttaaaaatataaaaatctaacttagtgatggtttaatggatgatgggtggtaaagcagaagaaaatatcgaggttctaaatttgtccaactcaatggatggtagtgcctttcaatgaggtagcrcccatcacatttgattcttcttcccaatctgggcacatggaaaactgtcatccaatttcttaatagttaggtgccactatgcccagttctggccagtgaattgtaagtaatgaataattatgagtaaggtaatgaaaagtctctgcatgtctttctgatttgtttcttctcctttggtact

SEQ ID NO: 465055 - DNA, 652 bp, Homo sapiens
attttagcttctaaccgttcaaatcacccctggcattgaatcacctcttcttcctcaccgattgagtcttccaaactgtggagccagacatcttcaggtaaagaaacactattcccatgtggccccagctgaatttctgactcataggatttgggagcatcacaaaatcataaaattgctcttgtatagtactaagttttgaggtgttttgttatgctgccatagtaactggaataatcagttgtgagacaatttcactagcccaatttaaaacatactttatcttctaactgattgacattagtggagatgaaaagaaatggagattcctgagagatagttacaggttaaaaatataaaaatctaacttagtgatggtttaatggatgatgggtggtaaagcagaagaaaatatcgaggttctaaatttgtccaactcaatggatggtagtgcctttcaatgaggtagcgcccatcacatttgattcttcttcccaatctgggcacatggaaaactgtcatccaatttcttaatagttaggtgccactatgcccagttctggccartgaattgtaagtaatgaataattatgagtaaggtaatgaaaagtctctgcatgtctttctgatttgtttcttctcctttggtact

SEQ ID NO: 465056 - DNA, 575 bp, Homo sapiens
attttcttccctctactcatcctgagctatttttctggtagtttctctttaaatcttcaaagacaaaacccattacacagtccttcatatgactctagaaaaggtaatatatacctaaacattgctctttacctccattcaaactatttttctaatttattccttttgatgagacaagtaacactaatgagctaaattaacttggctggggcatttgttttgtggttaaatataacatttccaactttttaaatatttttgggtcmatactgaaaattggccatgtcattttaaatcaggtaacaaaatctgtacacaagaaaatctaacttaaacagcaacaatattccttaatattaatataaatgagggtccactatgcatgaaggtccactatgttattatttttctaatgatacttatatatttttatttgatatattattaatatatacaaaaattttaaaatatagttgatatgttttatttaaataaagttaaattattttgttctatgtgtatggcagttttataagattagatatatttttgactcaacattaagagatacacta

SEQ ID NO: 465057 - DNA, 575 bp, Homo sapiens
attttcttccctctactcatcctgagctatttttctggtagtttctctttaaatcttcaaagacaaaacccattacacagtccttcatatgactctagaaaaggtaatatatacctaaacattgctctttacctccattcaaactatttttctaatttattccttttgatgagacaagtaacactaatgagctaaattaacttggctggggcatttgttttgtggttaaatataacatttccaactttttaaatatttttgggtccatactgaaaattggccatgtcattttaaatcaggtaacaaaatctgtacacaagaaaatctaacttaaacagcaacaatattccttaatattaatataaatgagggtccactatgcatgaaggtccactatgttattatttttctaatgatacttatatatttttatttgatatattattaatatatacaaaawttttaaaatatagttgatatgttttatttaaataaagttaaattattttgttctatgtgtatggcagttttataagattagatatatttttgactcaacattaagagatacacta

SEQ ID NO: 465058 - DNA, 588 bp, Homo sapiens
ctataatttggaggtagctgggcttctcccaaaaatgtttatgaggttagaggctgcttaccttgtgattagtactgctcctttttccctagagaagaaggctccacttctcatcttgccttttagagtmcccagtagagacccccctgccggatatttttggggtgttcctaaagctccctggagcctgctcatagtcctgaggaaatgcaagcctgctctagaaaacaactaagtgcaccaggcagagaggagccccaggatttgctccttgactctgggttgggggtgcaggccgaggtctgtggccttgctgactaagatgcattctccagttctggaggatgaggtgccagagagagccctaagtttttcatcagctccattagacaatttacctcatccaccctcttcccttgcagactttccagagctacttgggaaagtaatgctgcttcacccttgtgaagagatgtatggtttgcaaatcacttttacatcattcttgcacatctatctactcttcctaaaatgtcggttgtgaaattatcaccctcattttacagacagaaaactgaggcccagaga

SEQ ID NO: 465059 - DNA, 554 bp, Homo sapiens
agttggacatggtggtacccacctgtagtcccagctgctggggtggggagttggggaggttagctgggaggatcgcttgagcccagggggtggaggctgcactgagcctctgcactcyggcctgggagagtgagaatttgtctcaaaaaaaaaagaaaaatagaaaaagaaaagaaattatctgtttacctgtttacaaattacacatctgtatttctctctagacatggactgcccagtatggtaaccattaatcacatgtagttttttagtacctgaaatgtggctagtgcaatgtgagatttgctgtaagtaaattcgagaaacttaattcaaaacgaagaatgtaaaataatttgttaataatttctagtggctcatgcctgtaatccctgcacttcaggagaccaaggcgggtggatcgcgtgagcccaggagttggagaccagcctgggcaacatgggaaatcctgtctctacaaaaaaatacaaaaaattagctggtggcaaatgcctgtggtctcagctactcacgaggctgaggtgggaggagca

SEQ ID NO: 465060 - DNA, 529 bp, Homo sapiens
ctcctgggatgtaaagccagagacactagtctcatctttccagtggggaaatttatttacattccaaaagctaagctcccagaatctttctttctgttcccaaggagaatgtgtttataccagggagcaatggatttctcgtcttttctcacagygggaggggaaagttggccctttctcctatataaatgcccagattcattttggagggtgtcctcacttacagtagacaccattacatataggatgacatgtgcagcctacatgtacatctgggtctcattgcatagccccagagataagaactgggacaaaagagagctgacaaaattatttgctgtaagtaaaaaaaaaaaaaaaaaagaaaagtgttctgctctagaaatctagtattggcattcaagataatcacattaaatatagatacttaaaacttaacaggactacgtgccctgcctagaaccaatgaaaatggaattctctctgctggctaaacaaaacacatctgttggctgaatttaggctctga

SEQ ID NO: 465061 - DNA, 595 bp, Homo sapiens
tacttgctaacatttagacctttaaaaagagaattgaaatacactccatttgtgtgaatgaaaaatttataatatgtcttttcggacaagaaatcaaacaaaaatgaaaatgtaatttcttactactccagattacatagaggataactgtatctgcatggaaatgtatcatctgagaaatgggttcattttgtcacagaaatcctagttgctggttaggagtgagcaagacagtctttagtcagtcaggcattttgtgagtgagactgtgcagcaccgtgatcgagcatgaagtccccgaggctggactgcctgcatttagggstcacaccaccactgctttatcatgtgatctagggcaagggacttgtcttctctgtgcctcagtttccttacttgtaaagtggagatagaataatgtacacagcatcggatctttgtgaaggtgaaatgagataattatgaaaaatctgtagtcctctgcctgacaagtcacattagctgtgttattagatgaacgttagctgtgttattagataaatgttagctgtgttattatttgctacatcacctccctgctcctctgtgatttaaa

SEQ ID NO: 465062 - DNA, 538 bp, Homo sapiens
ctgctgtttccctccttccctgcagaacagccgttcacctgaatgttccaggcttttggttaacaacccctggtcttctatacccattcacactcaaaatcagggggaattcyttgaaatggttaaaatgcaaaagtgaaatttagaagccctatgaatgaaacaacaatccaacaaaaaattcccaacactttaagcaaatgcttttcaggcagagccttcaaattgctactgtcccactatcttctggaattgtgtgtgtgtgtgtgtgtgtgtgcgcgcgtgtgtgtgtgcacgcgtgtgtgtgtagagcaacaggtgaagcagcaaccataaggtagcctacttcaggtctggcacctgttttcactgctgtcatgtcctcttcactgagatcctgacttaaatatgtacacatgtgaatgctgatttcttagcatgaattttaactcagctcctgctcgagcatcaatgattcccaattcccatcagagtgaatggccccttcctggtctctgcagtcagtcctctgaagctg

SEQ ID NO: 465063 - DNA, 556 bp, Homo sapiens
atgcaaaaaatacattaaatacattgaaaatatatagtgtagctayaagaataaagaacgatggtaaaacaaatgctaatacccactacctgacttaaagaatatgatactatttttttccaattgaaatcccctcaactactcagaattactgctatcccttttatcctttcattaattttcttctagttttctcacatgtgaatctatttctaaatacatttcttcattttgcaagtttttggacttcatataaatgtaaccatattgtatatattcttcttcagcttcttactttttcactaaacaatatgttttgctgatacttacattcatatgtacagtaatagttgatttattttaatgtctatatattattccattgttagaatacaccaggatttatttttacttattttttttgctggaaaattgggtgtcttttttattttttgatataacaaacaatgttgtaatcattttgtatttacttcctagtccactcctgtaagtttctcttgagtacatactagcaatgaagatgctgagtcactgc

SEQ ID NO: 465064 - DNA, 556 bp, Homo sapiens
atgcaaaaaatacattaaatacattgaaaatatatagtgtagctacaagaataaagaacgatggtaaaacaaatgctaatacccactacctgacttaaagaatatgatactatttttttccaattgaaatcccctcaactactcagaattactgctatcccttttatcctttcattaattttcttctagttttctcacatgtgaatctatttctaaatacatttcttyattttgcaagtttttggacttcatataaatgtaaccatattgtatatattcttcttcagcttcttactttttcactaaacaatatgttttgctgatacttacattcatatgtacagtaatagttgatttattttaatgtctatatattattccattgttagaatacaccaggatttatttttacttattttttttgctggaaaattgggtgtcttttttattttttgatataacaaacaatgttgtaatcattttgtatttacttcctagtccactcctgtaagtttctcttgagtacatactagcaatgaagatgctgagtcactgc

SEQ ID NO: 465065 - DNA, 569 bp, Homo sapiens
cccctcaactactcagaattactgctatcccttttatcctttcattaattttcttctagttttctcacatgtgaatctatttctaaatacatttcttcattttgcaagtttttggacttcatataaatgtaaccatattgtatatattcttcttcagcttcttactttttcactaaacaatatgttttgctgatacttacattcatatgtacagtaatagttgatttattttaatgkctatatattattccattgttagaatacaccaggatttatttttacttattttttttgctggaaaattgggtgtcttttttattttttgatataacaaacaatgttgtaatcattttgtatttacttcctagtccactcctgtaagtttctcttgagtacatactagcaatgaagatgctgagtcactgcatatacatactcacaactttattctataatgtaatattctataaagtagctgtatcagtttatactttaaccagtaatggacaagattttctgttacttcccatctttgttaattattacttttagactctaacttttatcag

SEQ ID NO: 465066 - DNA, 551 bp, Homo sapiens
tttttacttattttttttgctggaaaattgggtgtcttttttattttttgatataacaaacaatgttgtaatcattttgtatttacttcctagtccactcctgtaagtttctcttgagtacatactagcaatgaagatgctgagtcactgcatatacatactcacaactttattctataawgtaatattctataaagtagctgtatcagtttatactttaaccagtaatggacaagattttctgttacttcccatctttgttaattattacttttagactctaacttttatcaggctcatggatgtaaaaagcatctcagggtggttttaatttgcatttatctgctcatctatgaagatgagcttcttttcatataattatgagtcattatttttgttttgccttcttttgtttatgcattttgcttgttctatgtcttatttttcctgttgatttttgggagttcatatatattctaaatgtatatttattcactcatatatatgttgcaaatattacagtttatgatttgtcaccttatgatatcatc

SEQ ID NO: 465067 - DNA, 551 bp, Homo sapiens
tttttacttattttttttgctggaaaattgggtgtcttttttattttttgatataacaaacaatgttgtaatcattttgtatttacttcctagtccactcctgtaagtttctcttgagtacatactagcaatgaagatgctgagtcactgcatatacatactcacaactttattctataatgtaatattctataaagtagctgtatcagtttatactttaaccagtaatggacaagattttctgttacttcccatctttgttaattattacttttagactctaacttttatcaggctcatggatgtaaaaagcatctcagggtggttttaatttgmatttatctgctcatctatgaagatgagcttcttttcatataattatgagtcattatttttgttttgccttcttttgtttatgcattttgcttgttctatgtcttatttttcctgttgatttttgggagttcatatatattctaaatgtatatttattcactcatatatatgttgcaaatattacagtttatgatttgtcaccttatgatatcatc

SEQ ID NO: 465068 - DNA, 551 bp, Homo sapiens
tttttacttattttttttgctggaaaattgggtgtcttttttattttttgatataacaaacaatgttgtaatcattttgtatttacttcctagtccactcctgtaagtttctcttgagtacatactagcaatgaagatgctgagtcactgcatatacatactcacaactttattctataatgtaatattctataaagtagctgtatcagtttatactttaaccagtaatggacaagattttctgttacttcccatctttgttaattattacttttagactctaacttttatcaggctcatggatgtaaaaagcatctcagggtggttttaatttgcatttatctgctcatctatgaagatgagcttcttttcatataattatgagtcattatttttgttttgccttcttttgtttatgcattttgcttgttctatgtcttatttttcctgttgatttttgrgagttcatatatattctaaatgtatatttattcactcatatatatgttgcaaatattacagtttatgatttgtcaccttatgatatcatc

SEQ ID NO: 465069 - DNA, 542 bp, Homo sapiens
aaacaatgttagggggttgtggctcattgatggtcagatatgaaaagctgcttcaaatgctgtcccatcagttcctaaaactgcaacatgaaaatgcatcatcatgactaccctttacctatctcccaagcgtgaaattgttttccccagtaaaagtttaaggaaatgaagtaattgctgtttggggcaggaatgctatgagtattaccatgcagttttttccttaaatgtttaattagaaggaagtatggcattcttacagctattttttaattaagccagcagactctaccaagaatctgatcccctctctaagcagataattacagtgacaagtgactttcaagtttatgcccatatatactcctagacttctgatgtgccccagaaggacgttaccattcatgttctgagtgctggcctctgggcctgacccygtctgcctggatttggaactttgactttccttaacttgtgacttgcccccctagattccagcctgtgcttgacctgtggcaacagcaaactcgttaacacctgct

SEQ ID NO: 465070 - DNA, 576 bp, Homo sapiens
tgtgacttgcccccctagattccagcctgtgcttgacctgtggcaacagcaaactcgttaacacctgctccgcatgcataaatacttgccttctgcccaattcttaattgtgatttttggacttstggaccaggctaatccttacagtctggggagaatgaaaacattgttagactgaaatagctaagcccagagtttatgattaatgaggacagacaggccaaggagtcagtaaccatacaaatgttcacaaatgatttgccataaggccttagattttacatattatatatatgaggttcatatgttatagccagtgtcaggacactaacaagtgaaagacttttcaaacccaggtcagggaactcaaagcatagccctcaaaacgtacctcagatcatagggcaaatatatgcagacatatgtagtcactgttgctgagctgaaagtgtcacccgtgccctgaggacacgtttggtatctatttaagacctgagcattgagaggctgtaagaggtgcataaattctgggaaagtcttcatcctttacaaacacaaatgcattgtatgtaaaat

SEQ ID NO: 465071 - DNA, 572 bp, Homo sapiens
actgggtcgaatggtagctctgcttttagctctttgaggaatcactattctttgcacaatgattgaactgatttgcacacccamcaacagtgtataagcattcccttttctccatagcctcactagtatctgttattttttgactttttaatgatagctattctgactggtgtgagatggtatctcattatggttttgatttgcatttctctaatgatcagtgatgttgaactttttttttgtatgtttgttggctgcatgcatgtattcttttgaaaagtgtctgttcattccctttgcccaattttaatggggttgattgtttttcttttgtaaatttctttacattcgaaatgtttttattattaagttgagctgcctcattcttagtatggtttttcactttaaaaagcataaaggtggacatggtggcgtatgctagtaatcccaactactggggagactaatacaggagggttgcttgagcccaggagttcaaggctataatgtgctatgatcatgactgtgaacaaccactgtactgcagcctgggcagagtgacatagtgaaac

SEQ ID NO: 465072 - DNA, 572 bp, Homo sapiens
actgggtcgaatggtagctctgcttttagctctttgaggaatcactattctttgcacaatgattgaactgatttgcacacccaccaacagtgtataagcattcccttttctccatagcctcactagyatctgttattttttgactttttaatgatagctattctgactggtgtgagatggtatctcattatggttttgatttgcatttctctaatgatcagtgatgttgaactttttttttgtatgtttgttggctgcatgcatgtattcttttgaaaagtgtctgttcattccctttgcccaattttaatggggttgattgtttttcttttgtaaatttctttacattcgaaatgtttttattattaagttgagctgcctcattcttagtatggtttttcactttaaaaagcataaaggtggacatggtggcgtatgctagtaatcccaactactggggagactaatacaggagggttgcttgagcccaggagttcaaggctataatgtgctatgatcatgactgtgaacaaccactgtactgcagcctgggcagagtgacatagtgaaac

SEQ ID NO: 465073 - DNA, 572 bp, Homo sapiens
actgggtcgaatggtagctctgcttttagctctttgaggaatcactattctttgcacaatgattgaactgatttgcacacccaccaacagtgtataagcattcccttttctccatagcctcactagtatctgttattttttgactttttaatgatagctattctgactggtgtgagatggtatctcattatggttttgatttgcatttctctaatgatcagtgatgttgaactttttttttgtatgtttgttggctgcatgcatgtattcttttgaaaagtgtctgttcattccctttgcccaattttaatggggttgattgtttttcttttgtaaatttctttacattygaaatgtttttattattaagttgagctgcctcattcttagtatggtttttcactttaaaaagcataaaggtggacatggtggcgtatgctagtaatcccaactactggggagactaatacaggagggttgcttgagcccaggagttcaaggctataatgtgctatgatcatgactgtgaacaaccactgtactgcagcctgggcagagtgacatagtgaaac

SEQ ID NO: 465074 - DNA, 621 bp, Homo sapiens
gaaaaatagcttttctttttcttaaaacttcccaaagctttcataaaattagccctcaggcagtcttacgtatctcatccactcttcttcctctctccccttcctgaagccatttgtaacttastctattacactaggaaggggaagcaaatattcatattattttcttgttatatccttagcattactagacctttgtggtttctatggatgagggacataatatttattaatttattctaaacttcagtcactcataatatacccttttattcctccttcttctgtgatattgggagtgtatagttgtcattgtgacaaaccctttgctgtcagtatctatagtggatggggagaaaaggagggctttgccaatcatcgtctccagtgcatttcccactgtcagtgtcattgtctaatgctgtttgcatccacacagcctaagggaaccgtttaagtgagtgactccctcccttcacttcagcccatcacttaagcatttctctcccttgaaaaaagacaagtggtgcttctaagacttgagtaattctgaatataattgaggactagatgttcctgttttatatcctacagggctggcatctctaatgctgaaagtac

SEQ ID NO: 465075 - DNA, 539 bp, Homo sapiens
ctcatccactcttcttcctctctccccttcctgaagccatttgtaacttactctattacactaggaaggggaagcaaatattcatattattttcttgttatatccttagcmttactagacctttgtggtttctatggatgagggacataatatttattaatttattctaaacttcagtcactcataatatacccttttattcctccttcttctgtgatattgggagtgtatagttgtcattgtgacaaaccctttgctgtcagtatctatagtggatggggagaaaaggagggctttgccaatcatcgtctccagtgcatttcccactgtcagtgtcattgtctaatgctgtttgcatccacacagcctaagggaaccgtttaagtgagtgactccctcccttcacttcagcccatcacttaagcatttctctcccttgaaaaaagacaagtggtgcttctaagacttgagtaattctgaatataattgaggactagatgttcctgttttatatcctacagggctggcatctctaatgc

SEQ ID NO: 465076 - DNA, 539 bp, Homo sapiens
ctcatccactcttcttcctctctccccttcctgaagccatttgtaacttactctattacactaggaaggggaagcaaatattcatattattttcttgttatatccttagcattactagacctttgtggtttctatggatgagggacataatatttattaatttattctaaacttcagtcactcataatatacccttttattcctccttcttctgtgatattgggagtgtatagttgtcattgtgacaaaccctttgctgtcagtatctatagtggatggggagaaaaggagggctttgccartcatcgtctccagtgcatttcccactgtcagtgtcattgtctaatgctgtttgcatccacacagcctaagggaaccgtttaagtgagtgactccctcccttcacttcagcccatcacttaagcatttctctcccttgaaaaaagacaagtggtgcttctaagacttgagtaattctgaatataattgaggactagatgttcctgttttatatcctacagggctggcatctctaatgc

SEQ ID NO: 465077 - DNA, 621 bp, Homo sapiens
gaaaaatagcttttctttttcttaaaacttcccaaagctttcataaaattagccctcaggcagtcttacgtatctcatccactcttcttcctctctccccttcctgaagccatttgtaacttactctattacactaggaaggggaagcaaatattcatattattttcttgttatatccttagcattactagacctttgtggtttctatggatgagggacataatatttattaatttattctaaacttcagtcactcataatatacccttttattcctccttcttctgtgatattgggagtgtatagttgtcattgtgacaaaccctttgctgtcagtatctatagtggatggggagaaaaggagggctttgccaatcatcgtctccagtgcatttcccactgtcagygtcattgtctaatgctgtttgcatccacacagcctaagggaaccgtttaagtgagtgactccctcccttcacttcagcccatcacttaagcatttctctcccttgaaaaaagacaagtggtgcttctaagacttgagtaattctgaatataattgaggactagatgttcctgttttatatcctacagggctggcatctctaatgctgaaagtac

SEQ ID NO: 465078 - DNA, 621 bp, Homo sapiens
gaaaaatagcttttctttttcttaaaacttcccaaagctttcataaaattagccctcaggcagtcttacgtatctcatccactcttcttcctctctccccttcctgaagccatttgtaacttactctattacactaggaaggggaagcaaatattcatattattttcttgttatatccttagcattactagacctttgtggtttctatggatgagggacataatatttattaatttattctaaacttcagtcactcataatatacccttttattcctccttcttctgtgatattgggagtgtatagttgtcattgtgacaaaccctttgctgtcagtatctatagtggatggggagaaaaggagggctttgccaatcatcgtctccagtgcatttcccactgtcagtgtcattgtctaatgctgtttgcatccacacagcctaagggaaccrtttaagtgagtgactccctcccttcacttcagcccatcacttaagcatttctctcccttgaaaaaagacaagtggtgcttctaagacttgagtaattctgaatataattgaggactagatgttcctgttttatatcctacagggctggcatctctaatgctgaaagtac

SEQ ID NO: 465079 - DNA, 539 bp, Homo sapiens
ctcatccactcttcttcctctctccccttcctgaagccatttgtaacttactctattacactaggaaggggaagcaaatattcatattattttcttgttatatccttagcattactagacctttgtggtttctatggatgagggacataatatttattaatttattctaaacttcagtcactcataatatacccttttattcctccttcttctgtgatattgggagtgtatagttgtcattgtgacaaaccctttgctgtcagtatctatagtggatggggagaaaaggagggctttgccaatcatcgtctccagtgcatttcccactgtcagtgtcattgtctaatgctgtttgcatccacacagcctaagggaaccgttyaagtgagtgactccctcccttcacttcagcccatcacttaagcatttctctcccttgaaaaaagacaagtggtgcttctaagacttgagtaattctgaatataattgaggactagatgttcctgttttatatcctacagggctggcatctctaatgc

SEQ ID NO: 465080 - DNA, 621 bp, Homo sapiens
gaaaaatagcttttctttttcttaaaacttcccaaagctttcataaaattagccctcaggcagtcttacgtatctcatccactcttcttcctctctccccttcctgaagccatttgtaacttactctattacactaggaaggggaagcaaatattcatattattttcttgttatatccttagcattactagacctttgtggtttctatggatgagggacataatatttattaatttattctaaacttcagtcactcataatatacccttttattcctccttcttctgtgatattgggagtgtatagttgtcattgtgacaaaccctttgctgtcagtatctatagtggatggggagaaaaggagggctttgccaatcatcgtctccagtgcatttcccactgtcagtgtcattgtctaatgctgtttgcatccacacagcctaagggaaccgtttaagtgagtgactccctcccttcacttcagcccatcacttragcatttctctcccttgaaaaaagacaagtggtgcttctaagacttgagtaattctgaatataattgaggactagatgttcctgttttatatcctacagggctggcatctctaatgctgaaagtac

SEQ ID NO: 465081 - DNA, 529 bp, Homo sapiens
gtgagctcacttcctggaaatcaccagcatcccatatcccattagcaaggagctcagcactgctccttggataaccaaacctattcccaaatcccatctgtgtgcgtctatctcctggtacccttcctagcatcaattctgtatttgtaggagtccaatcaggagacacaaacyactcaaaagtttaaactagaatgagcaagatggctcacacctgtaatcccagcactctgggaggccaaggtgggtggactgctttgagctcaggagtttgagaacagtctgggaaacatggcgaaacctcgtctctacaaaaaacacaaaaatcagctgggtgtggtggcacttacctgtaatcccagctactcgggaggctgaggcaggagcattgcttgagcctggcaggtggaggctgcagtgagcagaggttgtgccactgtactccagcctgggtgacagtgtgagacccggtatcaaaaagaaaaaacatatatatatatatatatatgtaaatttaatataaaaagta

SEQ ID NO: 465082 - DNA, 529 bp, Homo sapiens
gtgagctcacttcctggaaatcaccagcatcccatatcccattagcaaggagctcagcactgctccttggataaccaaacctattcccaaatcccatctgtgtgcgtctatctcctggtacccttcctagcatcaattctgtatttgtaggagtccaatcaggagacacaaactactcaaaagtttaaactagaatgagcaagatggctcacacctgtaatcccagmactctgggaggccaaggtgggtggactgctttgagctcaggagtttgagaacagtctgggaaacatggcgaaacctcgtctctacaaaaaacacaaaaatcagctgggtgtggtggcacttacctgtaatcccagctactcgggaggctgaggcaggagcattgcttgagcctggcaggtggaggctgcagtgagcagaggttgtgccactgtactccagcctgggtgacagtgtgagacccggtatcaaaaagaaaaaacatatatatatatatatatatgtaaatttaatataaaaagta

SEQ ID NO: 465083 - DNA, 490 bp, Homo sapiens
aattctgtatttgtaggagtccaatcaggagacacaaactactcaaaagtttaaactagaatgagcaagatggctcacacctgtaatcccagcactytgggaggccaaggtgggtggactgctttgagctcaggagtttgagaacagtctgggaaacatggcgaaacctcgtctctacaaaaaacacaaaaatcagctgggtgtggtggcacttacctgtaatcccagctactcgggaggctgaggcaggagcattgcttgagcctggcaggtggaggctgcagtgagcagaggttgtgccactgtactccagcctgggtgacagtgtgagacccggtatcaaaaagaaaaaacatatatatatatatatatatgtaaatttaatataaaaagtattaattttggccaggcaaaatggctcatgcctgtaatcccagcactttgggaggccaaggcagacagatcacctgaggtcaggagttcgagacca

SEQ ID NO: 465084 - DNA, 490 bp, Homo sapiens
aattctgtatttgtaggagtccaatcaggagacacaaactactcaaaagtttaaactagaatgagcaagatggctcacacctgtaatcccagcactctgggaggccaaggtgggtggactgctttgagctcaggagtttgagaacagtctgggaaacatggygaaacctcgtctctacaaaaaacacaaaaatcagctgggtgtggtggcacttacctgtaatcccagctactcgggaggctgaggcaggagcattgcttgagcctggcaggtggaggctgcagtgagcagaggttgtgccactgtactccagcctgggtgacagtgtgagacccggtatcaaaaagaaaaaacatatatatatatatatatatgtaaatttaatataaaaagtattaattttggccaggcaaaatggctcatgcctgtaatcccagcactttgggaggccaaggcagacagatcacctgaggtcaggagttcgagacca

SEQ ID NO: 465085 - DNA, 490 bp, Homo sapiens
aattctgtatttgtaggagtccaatcaggagacacaaactactcaaaagtttaaactagaatgagcaagatggctcacacctgtaatcccagcactctgggaggccaaggtgggtggactgctttgagctcaggagtttgagaacagtctgggaaacatggcgaaacctcgtctctacaaaaaacacaaaaatcagctgggtgtggtggcacttacctgtaatcccagctactcgggaggctgaggcaggagmattgcttgagcctggcaggtggaggctgcagtgagcagaggttgtgccactgtactccagcctgggtgacagtgtgagacccggtatcaaaaagaaaaaacatatatatatatatatatatgtaaatttaatataaaaagtattaattttggccaggcaaaatggctcatgcctgtaatcccagcactttgggaggccaaggcagacagatcacctgaggtcaggagttcgagacca

SEQ ID NO: 465086 - DNA, 490 bp, Homo sapiens
aattctgtatttgtaggagtccaatcaggagacacaaactactcaaaagtttaaactagaatgagcaagatggctcacacctgtaatcccagcactctgggaggccaaggtgggtggactgctttgagctcaggagtttgagaacagtctgggaaacatggcgaaacctcgtctctacaaaaaacacaaaaatcagctgggtgtggtggcacttacctgtaatcccagctactcgggaggctgaggcaggagcattgcttgagcctggcaggtggaggctgcagtgagcagaggttgtgccactgtactccagcctgggtgacagtgtgagacccggtatcaaaaagaaaaaacatatatatatatatatatatgtaaatttaatataaaaagtattaattttggccaggcamaatggctcatgcctgtaatcccagcactttgggaggccaaggcagacagatcacctgaggtcaggagttcgagacca

SEQ ID NO: 465087 - DNA, 431 bp, Homo sapiens
gaactgagaccaaatacttaaagaagccagttctttgaagagttgatgggaaagtattccaagaagtgggaatggcaaggggaaaggacttaagatgtaacctcagaatgattaaggaggagcatggtacaagaggatgtcagaaacatagccaggaaagagagctatgcttaagtattaggattttattctttgcaaaggaaaascccattgaagctttaaagcaaggacctaagagttaacataatttttttaaggtaccttaaaaattttgctgaatgaagaattcattgaagtgagtcaggaatgtatgattttggacaactgacacaatgcctgaggcaaaatttcttcatatggaaattggagacaatgatcatatctaccttagcagattatataatgaattattttcctagggctcctgtaat

SEQ ID NO: 465088 - DNA, 431 bp, Homo sapiens
gaactgagaccaaatacttaaagaagccagttctttgaagagttgatgggaaagtattccaagaagtgggaatggcaaggggaaaggacttaagatgtaacctcagaatgattaaggaggagcatggtacaagaggatgtcagaaacatagccaggaaagagagctatgcttaagtattaggattttattctttgcaaaggaaaagccyattgaagctttaaagcaaggacctaagagttaacataatttttttaaggtaccttaaaaattttgctgaatgaagaattcattgaagtgagtcaggaatgtatgattttggacaactgacacaatgcctgaggcaaaatttcttcatatggaaattggagacaatgatcatatctaccttagcagattatataatgaattattttcctagggctcctgtaat

SEQ ID NO: 465089 - DNA, 505 bp, Homo sapiens
aacagttaatcaattgagaatatattaggttgttataggaaccatgaaaaaataaaatagagtgtgtaaagaaggcttgatggccaggaagcttttacagggaagtgacatttgaactgagaccaaatacttaaagaagccagttctttgaagagttgatgggaaagtattccaagaagtgggaatggcaaggggaaaggacttaagatgtaacctcagaatgattaaggaggagcatggtacaagaggatgtcagaaacatagccaggaaagagagctatgcttaagtattaggattttattctttgcaaaggaaaagcccattgaarctttaaagcaaggacctaagagttaacataatttttttaaggtaccttaaaaattttgctgaatgaagaattcattgaagtgagtcaggaatgtatgattttggacaactgacacaatgcctgaggcaaaatttcttcatatggaaattggagacaatgatcatatctaccttagc

SEQ ID NO: 465090 - DNA, 500 bp, Homo sapiens
aagagagctatgcttaagtattaggattttattctttgcaaaggaaaagcccattgaagctttaaagcaaggacctaagagttaacataatttttttaaggtaccttaaaaattttgctgaatgaagaattcattgaagtgagtcaggaatgtatgattttggacaactgacacaatgcctgaggcawaatttcttcatatggaaattggagacaatgatcatatctaccttagcagattatataatgaattattttcctagggctcctgtaataaagtaccacaaactgggtaacttaagcaacagagatttattgcctcacaattctagaggtgagaagtccagatcaagaagctggcagggctaggctgcctgaaaaggtgctaaggaaggaactgttccagtcctctttctctccttccagtagttccttggcttgtgacagcacagtgtcaattctcatatggcatcctccccgtatgcctctctctatgtccaa

SEQ ID NO: 465091 - DNA, 505 bp, Homo sapiens
aacagttaatcaattgagaatatattaggttgttataggaaccatgaaaaaataaaatagagtgtgtaaagaaggcttgatggccaggaagcttttacagggaagtgacatttgaactgagaccaaatacttaaagaagccagttctttgaagagttgatgggaaagtattccaagaagtgggaatggcaaggggaaaggacttaagatgtaacctcagaatgattaaggaggagcatggtacaagaggatgtcagaaacatagccaggaaagagagctatgcttaagtattaggattttattctttgcaaaggaaaagcccattgaagctttaaagcaaggacctaagagttaacataatttttttaaggtaccttaaaaattttgctgaatgaagaattcattgaagtgagtcaggaatgtatgattttggacaactgacacaatgcctgaggcaaartttcttcatatggaaattggagacaatgatcatatctaccttagc

SEQ ID NO: 465092 - DNA, 493 bp, Homo sapiens
gtataaactgctgaactgctgtctgcctaatatttattgtggctatacttcttcttttctgtattaaaggccactgcttttcccagcttgctctttgttctccatcatctrttgtgggtcacttgtgctttctgtttttaacacccgtgttgctgaagtcatttctccaattcatgatccatgaaactacttcagcagtgaaaatggcacccctcaggttcaagtcaacatttttatatttccctctaggtcaagatccaagctatggaagaaatcaggatatgtcaattttctagagcagccaagttttctaaaagtctacctagccatgtagttatgtagcctcactctcacttaaacaaagaaaattaaaaagcacaccagaaaagacttttcttgttaaaaacacatgtttattgtagaaaatatagtaaggaaaaagaagaaaatataaggcaactagaatttctctagttagagataactattattt

SEQ ID NO: 465093 - DNA, 565 bp, Homo sapiens
cttgtcttcctgagtcttctttatcccgaacaccctgagtttttgaatggttgacatgccagctggctttctgcagatgtacttctcgtgtgtaaatttccttctctgtgaggtattcatattgaacatgacctccaagtgtgtttgggtctgtgcagaagacaataggactgtgatttctgatgattaaaacctggattgtatgttactgtgatcagaccctgagactgcgttagcaagttttatagcatctgagtcgctctgttggaggaaagtgcatgtgatgggcatttgcttgcttccccaccagattctctaccttcacccttcctgcaagattccctaggaagctgacttctgctgaatgcracactcaggttctctgcttcctagattctagttgagtttggtccatgggaggccttggcagaaattttgagagtaagagcaaataattacttaaccattagaaaaaaataacgtgaatgtgtccttctatccatggcctcagttcctgttggggagcgtcggtgccaatccctcggtgcatcaccatttctaatta

SEQ ID NO: 465094 - DNA, 351 bp, Homo sapiens
ctgcgttagcaagttttatagcatctgagtcgctctgttggaggaaagtgcatgtgatgggcatttgcttgcttccccaccagattctctaccttcacccttcctgcaagattccctaggaagctgacttctgctgaatgcaacactcaggttctctgcttcctagattctagttgagtttggtccatgggaggccttggcagaaattttgagagtaagrgcaaataattacttaaccattagaaaaaaataacgtgaatgtgtccttctatccatggcctcagttcctgttggggagcgtcggtgccaatccctcggtgcatcaccatttctaattagttcctgttttag

SEQ ID NO: 465095 - DNA, 351 bp, Homo sapiens
ctgcgttagcaagttttatagcatctgagtcgctctgttggaggaaagtgcatgtgatgggcatttgcttgcttccccaccagattctctaccttcacccttcctgcaagattccctaggaagctgacttctgctgaatgcaacactcaggttctctgcttcctagattctagttgagtttggtccatgggaggccttggcagaaattttgagagtaagagcaaataattacttaaccattagaaaaaaataacrtgaatgtgtccttctatccatggcctcagttcctgttggggagcgtcggtgccaatccctcggtgcatcaccatttctaattagttcctgttttag

SEQ ID NO: 465096 - DNA, 351 bp, Homo sapiens
ctgcgttagcaagttttatagcatctgagtcgctctgttggaggaaagtgcatgtgatgggcatttgcttgcttccccaccagattctctaccttcacccttcctgcaagattccctaggaagctgacttctgctgaatgcaacactcaggttctctgcttcctagattctagttgagtttggtccatgggaggccttggcagaaattttgagagtaagagcaaataattacttaaccattagaaaaaaataacgtgaatgtgtccttctatccatgrcctcagttcctgttggggagcgtcggtgccaatccctcggtgcatcaccatttctaattagttcctgttttag

SEQ ID NO: 465097 - DNA, 351 bp, Homo sapiens
ctgcgttagcaagttttatagcatctgagtcgctctgttggaggaaagtgcatgtgatgggcatttgcttgcttccccaccagattctctaccttcacccttcctgcaagattccctaggaagctgacttctgctgaatgcaacactcaggttctctgcttcctagattctagttgagtttggtccatgggaggccttggcagaaattttgagagtaagagcaaataattacttaaccattagaaaaaaataacgtgaatgtgtccttctatccatggcctcagttcctgttggggagcstcggtgccaatccctcggtgcatcaccatttctaattagttcctgttttag

SEQ ID NO: 465098 - DNA, 497 bp, Homo sapiens
ttacttaaactctataagcttcaatttctttatctataaggtaggtataaaacctgaaagttttggcatgagtttagtaaaactgtctgtgaagcccttgtggactgcttggtccatgtaggcatttgataaacggtggctttatatagaggagggaaatgcaagctatctcaaaaagaaatcaggsaaataagaatgccatctgaaatctgtcatatgagaatgaaaggagcatagacaggttttgagtgtggggtgaggagtaggggaggggaggagataagtgaactgcccctcagacttccagggaggagaaaaatgatgtcactgggaactgcagtcatttgaaaagatagcaatcaagcatttctttcagagccctgttcatctttcagtggctttgcttctccagatgcttttgctccttcagttatctctgccttctcccacctcctctccaaccatctcttcccttccttaattcacaatttttctcc

SEQ ID NO: 465099 - DNA, 497 bp, Homo sapiens
ttacttaaactctataagcttcaatttctttatctataaggtaggtataaaacctgaaagttttggcatgagtttagtaaaactgtctgtgaagcccttgtggactgcttggtccatgtaggcatttgataaacggtggctttatatagaggagggaaatgcaagctatctcaaaaagaaatcaggcaaataagaatgccatctgaaatctgtcatatgagaatgaaaggagcatagacaggttttgagtgtggggtgaggagtaggggaggggaggagataagtgaactgcccctcagacttccagggaggagaaaaatgatgtcactgggaactgcagtcatttgaaaagatagcaatcaagcatttctttcagagccctgttcatctttcagtggctttgcttctccagatgcttttgctccttcarttatctctgccttctcccacctcctctccaaccatctcttcccttccttaattcacaatttttctcc

SEQ ID NO: 465100 - DNA, 559 bp, Homo sapiens
atctctgccttctcccacctcctctccaaccatctcttcccttccttaattcacaatttttctccctcttttcaaggcatagtgctttgatttataaattagttctatgtttctgttttctaatttattagtttctgctttcttatttatttattttgagatggagtgtcactctgttgccccagttggagtgcagtggcatgatcttggctcactgcaacctctgcctctcaggttcaagagatyctcctgcctcagcctcccaagtagctggaattacaggagtgcgcaaccaagcctggctaatttttgtatttgtaggagagacaagatttcaccatgttggccaggctggtctggaactcctgacctcaggtgatctgcctgcctcagcctcccaaagtgctgggattacagatgtgagtcaccgtgcctagcctgctttcatatttattaatacattatttccactttcctaaggatagttgttgttcaacctttactagcttttttgttgttcatacttaatacatttatttttattgtgctatagctattt

SEQ ID NO: 465101 - DNA, 559 bp, Homo sapiens
atctctgccttctcccacctcctctccaaccatctcttcccttccttaattcacaatttttctccctcttttcaaggcatagtgctttgatttataaattagttctatgtttctgttttctaatttattagtttctgctttcttatttatttattttgagatggagtgtcactctgttgccccagttggagtgcagtggcatgatcttggctcactgcaacctctgcctctcaggttcaagagatcctcctgcctcagcctcccaagtagctggaattacaggagtgcrcaaccaagcctggctaatttttgtatttgtaggagagacaagatttcaccatgttggccaggctggtctggaactcctgacctcaggtgatctgcctgcctcagcctcccaaagtgctgggattacagatgtgagtcaccgtgcctagcctgctttcatatttattaatacattatttccactttcctaaggatagttgttgttcaacctttactagcttttttgttgttcatacttaatacatttatttttattgtgctatagctattt

SEQ ID NO: 465102 - DNA, 559 bp, Homo sapiens
atctctgccttctcccacctcctctccaaccatctcttcccttccttaattcacaatttttctccctcttttcaaggcatagtgctttgatttataaattagttctatgtttctgttttctaatttattagtttctgctttcttatttatttattttgagatggagtgtcactctgttgccccagttggagtgcagtggcatgatcttggctcactgcaacctctgcctctcaggttcaagagatcctcctgcctcagcctcccaagtagctggaattacaggagtgcgcaaccaagcctggctartttttgtatttgtaggagagacaagatttcaccatgttggccaggctggtctggaactcctgacctcaggtgatctgcctgcctcagcctcccaaagtgctgggattacagatgtgagtcaccgtgcctagcctgctttcatatttattaatacattatttccactttcctaaggatagttgttgttcaacctttactagcttttttgttgttcatacttaatacatttatttttattgtgctatagctattt

SEQ ID NO: 465103 - DNA, 559 bp, Homo sapiens
atctctgccttctcccacctcctctccaaccatctcttcccttccttaattcacaatttttctccctcttttcaaggcatagtgctttgatttataaattagttctatgtttctgttttctaatttattagtttctgctttcttatttatttattttgagatggagtgtcactctgttgccccagttggagtgcagtggcatgatcttggctcactgcaacctctgcctctcaggttcaagagatcctcctgcctcagcctcccaagtagctggaattacaggagtgcgcaaccaagcctggctaatttttgtatttgtaggagagacaagatttcaccatgttggccaggctggtctggaactcctgacctcaggtgatctgcctgcctcagcctcccaaagtgctgggattacagatgtgagtcaccrtgcctagcctgctttcatatttattaatacattatttccactttcctaaggatagttgttgttcaacctttactagcttttttgttgttcatacttaatacatttatttttattgtgctatagctattt

SEQ ID NO: 465104 - DNA, 548 bp, Homo sapiens
tagaattatttaagagaaagcttttaaatttccatgctgtaatttctagttttgttgkgtcataatcagagaatataatctgtagcatttctacattctctactttgcttagatgtttttagggtggggtgtgtaatatgtactgaattttgtaaacattttatggacatacaaatttcaatgtttactttttcaggctataggctttgctacataatttttgtgtattttgtggtcctcatatagattttttaatttctttttgctgtgatagagattagaagggtaaattaatgtctcacttaccatcatttttctttctgtatctcttttcatttcctgatgctttggctttatgaaatctttaggtataaaaattgtgcacacatatctttatgcacagtgttttggattttacccttcataatgagcttttttctctcctttgaatttgacctggcctggtgttaacagcccaggtgtaaaattccagtgagaaagaagtctgatgaggagtcagtaggatctttgtgttgctgagaactgct

SEQ ID NO: 465105 - DNA, 548 bp, Homo sapiens
tagaattatttaagagaaagcttttaaatttccatgctgtaatttctagttttgttgggtcataatcagagaatataatctgtagcatttctacattctctactttgcttagatgtttttagggtggggtgtgtaatatgtactgaattttgtaaacattttatggacatacaaatttcaatgtttactttttcaggctataggctttgctacataatttttgtgtattttgtggtcctcatatagattttttaatttctttttgctgtgatagagattagaagggtaaattaatgtctcayttaccatcatttttctttctgtatctcttttcatttcctgatgctttggctttatgaaatctttaggtataaaaattgtgcacacatatctttatgcacagtgttttggattttacccttcataatgagcttttttctctcctttgaatttgacctggcctggtgttaacagcccaggtgtaaaattccagtgagaaagaagtctgatgaggagtcagtaggatctttgtgttgctgagaactgct

SEQ ID NO: 465106 - DNA, 580 bp, Homo sapiens
ctgtactaggcatggcgatgcttacatgtcagcctgtgtgactgcaagagtctcagtataatttgataacatggcactcagattctagacattattctctgtgtgcttagtgagtgtgatgacataaccttcacaaagattcatcctttctcacatattgataaatcaacttttacatctacaaagttgagagccagaaattaaaaccttattaattcactaaggcatccctatgacggcagtcttccaactagctccattctggggcactctgacatcattrtacactttccaatgaaagcagggagtgtatatgattaaagggagagccctgtggcactcctgaaaaatctcccctcccagttcacattgacttattaaccaacactcatgatcatgtgaaactctagaactggatctgggtgcctggcaggatgacatggagtgaggctcaagcagcactgtgggaattcaagcatctgtttatttctgagagaaaaagtgtaaagcaaaataatatcttttaacaaacgtttgtatttgactaaaaaggaagcaagcacttaatttatgaatttgc

SEQ ID NO: 465107 - DNA, 580 bp, Homo sapiens
ctgtactaggcatggcgatgcttacatgtcagcctgtgtgactgcaagagtctcagtataatttgataacatggcactcagattctagacattattctctgtgtgcttagtgagtgtgatgacataaccttcacaaagattcatcctttctcacatattgataaatcaacttttacatctacaaagttgagagccagaaattaaaaccttattaattcactaaggcatccctatgacggcagtcttccaactagctccattctggggcactctgacatcattgtacactttccaatgaaagcagggagtgtatrtgattaaagggagagccctgtggcactcctgaaaaatctcccctcccagttcacattgacttattaaccaacactcatgatcatgtgaaactctagaactggatctgggtgcctggcaggatgacatggagtgaggctcaagcagcactgtgggaattcaagcatctgtttatttctgagagaaaaagtgtaaagcaaaataatatcttttaacaaacgtttgtatttgactaaaaaggaagcaagcacttaatttatgaatttgc

SEQ ID NO: 465108 - DNA, 580 bp, Homo sapiens
ctgtactaggcatggcgatgcttacatgtcagcctgtgtgactgcaagagtctcagtataatttgataacatggcactcagattctagacattattctctgtgtgcttagtgagtgtgatgacataaccttcacaaagattcatcctttctcacatattgataaatcaacttttacatctacaaagttgagagccagaaattaaaaccttattaattcactaaggcatccctatgacggcagtcttccaactagctccattctggggcactctgacatcattgtacactttccaatgaaagcagggagtgtatatgattaaagggagagccctgtggcactcctgaaaaatctcccctcccagttcacattgacttattaaccaacactcatgatcatgtgaaactctagaactggatctgggtgcctggcaggatgacatggwgtgaggctcaagcagcactgtgggaattcaagcatctgtttatttctgagagaaaaagtgtaaagcaaaataatatcttttaacaaacgtttgtatttgactaaaaaggaagcaagcacttaatttatgaatttgc

SEQ ID NO: 465109 - DNA, 535 bp, Homo sapiens
ggtctgttttatatcagagatcttagcctgacagtctagagtgtgggcacagaacccaagcttataggaatttctgaaaggtctgtaaatcttatccagatggacagtgggagctcataaagaattctgcaagccatcacatctgtcaaacctgctatgtctaatccttaagcctgctttatgtgaagacctcctcttcactcctcacttccagctctcatgagtttctttcataggcaaacccaaacctggaacaatgtgcctgaagacttcgggtgacacagtacccagacttaaataggaggggagccatggtggaagtggccatccagcacaattttcttggtctttactcatagttttgattccttaaaaaaattaaccacattaaaatatgtgtttcataatctacatctaataatacaaatatttaaagtcttttcaagtttgaatacgctacccatgttgctgctacccscattttgtgtgtgtgatttttgtgtgtgtgttagaagctcatgacctttgaaacctg

SEQ ID NO: 465110 - DNA, 593 bp, Homo sapiens
cccaaacctggaacaatgtgcctgaagacttcgggtgacacagtacccagacttaaataggaggggagccatggtggaagtggccatccagcacaattttcttggtctttactcatagttttgattccttaaaaaaattaaccacattaaaatatgtgtttcataatctacatctaataatacaaatatttaaagtcttttcaagtttgaatacgctacccatgttgctgctacccgcattttgtgtgtgtgatttttgtgtgtgtgttagaagctcatgacctttgaaacctgctcttatgagcttgctttgatgatttatttgtccagagaggattttttttcctacctagcattttggactgctatcaacctgagaccactttgaattaaattctcagcttgcaaatttggaagccacacagattgtgtgagttcaggctgaaacctgtttgagagctggattctggctataaactccacagggaacattttctctctccactcagagctgagaccatagggawatttatttgctagctctctttgaaggtttattttatttatttttttaatttatagtacacgtgctc

SEQ ID NO: 465111 - DNA, 635 bp, Homo sapiens
ctcatagttttgattccttaaaaaaattaaccacattaaaatatgtgtttcataatctacatctaataatacaaatatttaaagtcttttcaagtttgaatacgctacccatgttgctgctacccgcattttgtgtgtgtgatttttgtgtgtgtgttagaagctcatgacctttgaaacctgctcttatgagcttgctttgatgatttatttgtccagagaggattttttttcctacctagcattttggactgctatcaacctgagaccactttgaattaaattctcagcttgcaaatttggaagccacacagattgtgtgagttcaggctgaaacctgtttgagagctggattctggctataaactccacagggaacattttctctctccactcagagctgagaccatagggaaatttatttgctagctcwctttgaaggtttattttatttatttttttaatttatagtacacgtgctcactgaaggtgtaatacttatgtgagaatctcaaaatcagttgtgttctttgtatgaccctggttttgtttcctcctgctctcttactttcagtgtgtctcagtatgtctgctcaatatgtcatcttaaatttcaactgagggtggatcttctt

SEQ ID NO: 465112 - DNA, 563 bp, Homo sapiens
gattctggctataaactccacagggaacattttctctctccactcagagctgagaccatagggaaatttatttgctagctctctttgaaggtttattttatttattttttwaatttatagtacacgtgctcactgaaggtgtaatacttatgtgagaatctcaaaatcagttgtgttctttgtatgaccctggttttgtttcctcctgctctcttactttcagtgtgtctcagtatgtctgctcaatatgtcatcttaaatttcaactgagggtggatcttcttcccagctcactcacatggttcttagctagattcagtttctctccatttgtaggactgaggacctcagttcttcacttagggttggctacaggtaatcatcaatttcttgtaacaggacttacactgggccactgacagcatgccagttggcttcattcaaatgagagggcaagagaaagagagagagggagagggcacaagatgaaattcacagtatcttataatctaatctcagaagtggcatctcattacttttgttctattctattcaatagaaac

SEQ ID NO: 465113 - DNA, 635 bp, Homo sapiens
ctcatagttttgattccttaaaaaaattaaccacattaaaatatgtgtttcataatctacatctaataatacaaatatttaaagtcttttcaagtttgaatacgctacccatgttgctgctacccgcattttgtgtgtgtgatttttgtgtgtgtgttagaagctcatgacctttgaaacctgctcttatgagcttgctttgatgatttatttgtccagagaggattttttttcctacctagcattttggactgctatcaacctgagaccactttgaattaaattctcagcttgcaaatttggaagccacacagattgtgtgagttcaggctgaaacctgtttgagagctggattctggctataaactccacagggaacattttctctctccactcagagctgagaccatagggaaatttatttgctagctctctttgaaggtttattttatttatttttttaatttmtagtacacgtgctcactgaaggtgtaatacttatgtgagaatctcaaaatcagttgtgttctttgtatgaccctggttttgtttcctcctgctctcttactttcagtgtgtctcagtatgtctgctcaatatgtcatcttaaatttcaactgagggtggatcttctt

SEQ ID NO: 465114 - DNA, 542 bp, Homo sapiens
tgaaattcacagtatcttataatctaatctcagaagtggcatctcattacttttgttctattctattcaatagaaacaagtacctgggaccagcttayactataggaaagagattatataagggtataaataccaagaggtagagatcatcaagagccattctggtagcagccacaatatcttatccagaatatttcttattcaggccttcaaatgtgctgtcttttctggtctaatggaaatgaaccttccttccatacaatttcttctcctaaattgtactctggctctcttatcacatacaaacgtctatgttaggtatttgtgtctgtcttgattcttggtaggcttttaaactctgtgaatgttggactgtgatgtagacatcatttcaccgcacactctgtaaccaccaaaccttagcagcttattcagtaagcacatacttggctcttaatgagtattgcttaaattgatgaattgaattagtattttaccttctctgttccttagctaagcagaagaatttgtcatttttttaa

SEQ ID NO: 465115 - DNA, 542 bp, Homo sapiens
tgaaattcacagtatcttataatctaatctcagaagtggcatctcattacttttgttctattctattcaatagaaacaagtacctgggaccagcttatactataggaaagagattatataagggtataaataccaagaggtagagatcatcaagagccattctggtagcagccacartatcttatccagaatatttcttattcaggccttcaaatgtgctgtcttttctggtctaatggaaatgaaccttccttccatacaatttcttctcctaaattgtactctggctctcttatcacatacaaacgtctatgttaggtatttgtgtctgtcttgattcttggtaggcttttaaactctgtgaatgttggactgtgatgtagacatcatttcaccgcacactctgtaaccaccaaaccttagcagcttattcagtaagcacatacttggctcttaatgagtattgcttaaattgatgaattgaattagtattttaccttctctgttccttagctaagcagaagaatttgtcatttttttaa

SEQ ID NO: 465116 - DNA, 542 bp, Homo sapiens
tgaaattcacagtatcttataatctaatctcagaagtggcatctcattacttttgttctattctattcaatagaaacaagtacctgggaccagcttatactataggaaagagattatataagggtataaataccaagaggtagagatcatcaagagccattctggtagcagccacaatatcttatccagaatatttcttattcaggccttcaaatgtgctgtcttttctggtctaatggaaatgaaccttccttccatacaatttcttctcctaaattgtactctggctctcttatcayatacaaacgtctatgttaggtatttgtgtctgtcttgattcttggtaggcttttaaactctgtgaatgttggactgtgatgtagacatcatttcaccgcacactctgtaaccaccaaaccttagcagcttattcagtaagcacatacttggctcttaatgagtattgcttaaattgatgaattgaattagtattttaccttctctgttccttagctaagcagaagaatttgtcatttttttaa

SEQ ID NO: 465117 - DNA, 584 bp, Homo sapiens
  misc_feature (1)...(584): n = A,T,C or G
tcttaatgagtattgcttaaattgatgaattgaattagtattttaccttctctgttccttagctaagcagaagaatttgtcatttttttaatktagtgactggttctattaaaagttacctttgtctatatcattttgttatactaaagcacaaatgtataaggtcaaaaaacattctcaagattttgtttaaaccacagccctcagntgtgtatatttatctcttgttttcatatgcaagatttctcctgaaatgggcaacaattacaagagtttttttcctcttctgaactaagaaaataaatatttaattcacaagtttagaaaagtgaacctgaaaaatcacagggctaggtgggttatgaggcccactggtacatgatagtgttgaatgtggattagaatgaactccgtggattagaatctcagaccataggcaaacatttacttgttttagaataagcacatttgagtctgcaataagtattactatttttaagttgaaaatgtaattggtttctaataataaccatattggctagcattatttcaatcgtgtttaatgttttccagtgtcatttcat

SEQ ID NO: 465118 - DNA, 458 bp, Homo sapiens
ttctgtgtataccaaaatccacgcatactcaagttttcgaagtcagtcctgtggaatccacatataacacaaatgggaaaattagtgaggtgtggtgacaagcacctgtagtcccagctacttgtgaggctgaggcaggaggattgcttgagcccaggaggttgaggctgcagtgagccataattgcaccactgcactccagtctgggcaacagagtgagacagaaggttgactttttaatagaatttttctgttcacttgaagatatggtcaggattgtggcatatgaaaattcttcataaaataactatctaatccaattaatgctggaattgggaacagcagaagtgtcatctcagagctactcacaatgaaaggtgatgtctggkgctcaggtgtgttgaggtccccatgcctggactatgggtgctgagtgggatttacttgtccatccattt

SEQ ID NO: 465119 - DNA, 538 bp, Homo sapiens
aactgggtgcggtaaaacattcgtatagtcccagctactctggaggctgaaataggaggatcgcttgagcccaggaagtggaagctgcagtgagctctgatctcaccactgcactccagcctgggtgacagtgagaccctgtctcaagacacacacaaacacacacacacacacacacacacacacacacacacacacacmcacccccaatctcagtctgtccagccttgactaatcaaaagggccttctggttacagaagaggtatgctcttttgtaggacagggagagaccagcaagcttgttcacagacttttcctcatcctctgcttagttttccaagaaccctcacagtggaaatggagtctctgggaaaatgacctaaatctttgggttaccaggggagaaatatgcctcctttgtcaattaataaatggaacatctgtcttaaaatccagggagttctgctagaatgaatcactccctaagaccctgaccaatgcatggaacatgaaaaactgaagtttaactgggcacgg

SEQ ID NO: 465120 - DNA, 538 bp, Homo sapiens
aactgggtgcggtaaaacattcgtatagtcccagctactctggaggctgaaataggaggatcgcttgagcccaggaagtggaagctgcagtgagctctgatctcaccactgcactccagcctgggtgacagtgagaccctgtctcaagacacacacaaacacacacacacacacacacacacacacacacacacacacacccacccccaatctcagtctgtccagccttgactaatcaaaagggccttctggttacagaagaggtatgctcttttgtaggacagggagagaccagcaagcttgttcacagacttttcctcatcctctgcttagttttccaagaaccctcacagtggaaatggagtctctgggaaaatgacctaaatctttgggttaccaggggagaaatatgcctcctttgtcaattaataaatggaacatctgycttaaaatccagggagttctgctagaatgaatcactccctaagaccctgaccaatgcatggaacatgaaaaactgaagtttaactgggcacgg

SEQ ID NO: 465121 - DNA, 438 bp, Homo sapiens
gactcctctacatactactctgggtggcttgaagtgaatttgatacaagaactggagcgagcgcaaagcagagctagatctaggattaatgtgcttgggaccagctcctcactactcacctatgagtctagttccagaacccaagtagaggatggggraacaaggctcctgactttttttccctaatgtctgcatctctttcacatttcttatctccttgcaaagaaactaaacaggctcaactaactaaatgattaaaccctatacagagaatctccaaagactgacaaaatatcattcaagactgttacacagacaaccttgaggatgacttgatgtaccagtgatctacaatatttgggatcattccaaattcccatcaaggatctccctatatcaacaaaggagccaaggaccaaccattcaaatgggccctgc

SEQ ID NO: 465122 - DNA, 606 bp, Homo sapiens
gttatgtccatgtgtgttcaatattttagctcccacttataagagagaacatgcagtatttggttttctgttcctaaattaatttgcttaggattatgacttctagctgcatctatgttgttgcaaaggacatctatcatgcaaaggatattatttccttctatttgtggctgcatagcattctatggtgtatatgtaccacattttctttatccagttcaacactgatagacatttaggtttagtccatgtctttgctattgtgaatagcatggcaatgaacatgcaagttcatgtgtctttttggtagaatgacttacatatgtcgattttgtaccttgcaactttactgaattcattttttgatattaatagttttctggtgaagtttttattttctagatataatactatgtaattttcaaacagaaataattttacttctttatttctgatttgratgacttttattgcttttccttccgtaattgctctggctaagactttcagcactaggttgagtagaactgacgagagtggacatccttgtcttgttccagatttagaagaaaaggttttattatgcagtataatgttagctgtgag

SEQ ID NO: 465123 - DNA, 606 bp, Homo sapiens
gttatgtccatgtgtgttcaatattttagctcccacttataagagagaacatgcagtatttggttttctgttcctaaattaatttgcttaggattatgacttctagctgcatctatgttgttgcaaaggacatctatcatgcaaaggatattatttccttctatttgtggctgcatagcattctatggtgtatatgtaccacattttctttatccagttcaacactgatagacatttaggtttagtccatgtctttgctattgtgaatagcatggcaatgaacatgcaagttcatgtgtctttttggtagaatgacttacatatgtcgattttgtaccttgcaactttactgaattcattttttgatattaatagttttctggtgaagtttttattttctagatataatactatgtaattttcaaacagaaataattttacttctttatttctgatttggatgacttttattgcttttccttccgtaattgctctggctaagactttcagcactaggttgagtagaactgaygagagtggacatccttgtcttgttccagatttagaagaaaaggttttattatgcagtataatgttagctgtgag

SEQ ID NO: 465124 - DNA, 607 bp, Homo sapiens
cactgttagtggataccaaataaattgagtgatatgttacttaaagcgtacaagtatgttcccagcactgctttccactatagcccaaacctggaaataacctaaatatccatcaatggtagaacaaataaattgaagtacactcatataatttatttttgtgcaacagtgaaattttactattatatttactaayatgggtaaatctcacaaacattatttaagtgaaagaaaactaaacaaaaatcttatatactctgtaattccaccctgataaatttcaaaaactggaaaaacaaacatatgaccatagaagttcagaataatggtttctcaggcaagaaagtgggtaatgttctacttctaaatttcattgtggattggtgtgtgtcactttgtgaatccaggtacagactttgatttgtgtacttttgtgtatgttacactataataaaagtttcttaaaatttaggaaagaatcagattgaaaggctaaattgaaaatacaaaggcaaaggaataatggacaatttctagtttatggatataaattgttagtttaatatacaaaacactattgttttctaattgtttcttactccataaa

SEQ ID NO: 465125 - DNA, 607 bp, Homo sapiens
cactgttagtggataccaaataaattgagtgatatgttacttaaagcgtacaagtatgttcccagcactgctttccactatagcccaaacctggaaataacctaaatatccatcaatggtagaacaaataaattgaagtacactcatataatttatttttgtgcaacagtgaaattttactattatatttactaatatgggtaaatctcacaaacattatttaagtgaaagaaaacyaaacaaaaatcttatatactctgtaattccaccctgataaatttcaaaaactggaaaaacaaacatatgaccatagaagttcagaataatggtttctcaggcaagaaagtgggtaatgttctacttctaaatttcattgtggattggtgtgtgtcactttgtgaatccaggtacagactttgatttgtgtacttttgtgtatgttacactataataaaagtttcttaaaatttaggaaagaatcagattgaaaggctaaattgaaaatacaaaggcaaaggaataatggacaatttctagtttatggatataaattgttagtttaatatacaaaacactattgttttctaattgtttcttactccataaa

SEQ ID NO: 465126 - DNA, 607 bp, Homo sapiens
cactgttagtggataccaaataaattgagtgatatgttacttaaagcgtacaagtatgttcccagcactgctttccactatagcccaaacctggaaataacctaaatatccatcaatggtagaacaaataaattgaagtacactcatataatttatttttgtgcaacagtgaaattttactattatatttactaatatgggtaaatctcacaaacattatttaagtgaaagaaaactaaacaaaaatcttatatactctgtaattccaccctgataaatttcaaaaactggaaaaacaaacatatgaccatagaagttcagaataatggtttctcaggcaagaaagtgggtaatgttctacttctaaatttcattgtggattggtgtgtgtcactttgtgaatccaggtayagactttgatttgtgtacttttgtgtatgttacactataataaaagtttcttaaaatttaggaaagaatcagattgaaaggctaaattgaaaatacaaaggcaaaggaataatggacaatttctagtttatggatataaattgttagtttaatatacaaaacactattgttttctaattgtttcttactccataaa

SEQ ID NO: 465127 - DNA, 607 bp, Homo sapiens
cactgttagtggataccaaataaattgagtgatatgttacttaaagcgtacaagtatgttcccagcactgctttccactatagcccaaacctggaaataacctaaatatccatcaatggtagaacaaataaattgaagtacactcatataatttatttttgtgcaacagtgaaattttactattatatttactaatatgggtaaatctcacaaacattatttaagtgaaagaaaactaaacaaaaatcttatatactctgtaattccaccctgataaatttcaaaaactggaaaaacaaacatatgaccatagaagttcagaataatggtttctcaggcaagaaagtgggtaatgttctacttctaaatttcattgtggattggtgtgtgtcactttgtgaatccaggtacagactttgatttgtgtacttttgtgtatgttacactataataaaagtttcttaaaatttaggaaagaatcagattgaaaggctaarttgaaaatacaaaggcaaaggaataatggacaatttctagtttatggatataaattgttagtttaatatacaaaacactattgttttctaattgtttcttactccataaa

SEQ ID NO: 465128 - DNA, 573 bp, Homo sapiens
agctagtttaaaaggctgaaattcttttttttttttctgcctggtttaatctattgataaaactttcaattgtatcttgaaatttcttaagtgagtttttaattccaggatctctgattaatttctttttaacatgtttatgtcttctttcatttcttggactgctttagtagtttccttgtgttgattttcaacattgcctyggacttcattgagccttcttgcaattcatgctttgaattctttgcctgtcatttctgagctcccattttggttatgagtccttgctggagagctagtgtaattctttggtgatgtcacaagattcagatttcttatggtgccagaatccttatactggtccctttcatctggagaggatggcacttctaatttttgtaattatttttgtgtggataggatttttttttctttccttatatatttttttcctttccccttctctctaagtggtgcaactgtagagtatgttgagtagggtcttttggctttgtttctataccccttttcacttcttttagcagtttttatattaggcagtgcaatttgacc

SEQ ID NO: 465129 - DNA, 573 bp, Homo sapiens
agctagtttaaaaggctgaaattcttttttttttttctgcctggtttaatctattgataaaactttcaattgtatcttgaaatttcttaagtgagtttttaattccaggatctctgattaatttctttttaacatgtttatgtcttctttcatttcttggactgctttagtagtttccttgtgttgattttcaacattgcctcggacttcattgagccttcttgcaattcatgctttgaattctttgcctgtcatttctgagctcccattttggttatgagtccttgctggagagctagtgtaattctttggtgatgtcacaagattcagatttyttatggtgccagaatccttatactggtccctttcatctggagaggatggcacttctaatttttgtaattatttttgtgtggataggatttttttttctttccttatatatttttttcctttccccttctctctaagtggtgcaactgtagagtatgttgagtagggtcttttggctttgtttctataccccttttcacttcttttagcagtttttatattaggcagtgcaatttgacc

SEQ ID NO: 465130 - DNA, 573 bp, Homo sapiens
agctagtttaaaaggctgaaattcttttttttttttctgcctggtttaatctattgataaaactttcaattgtatcttgaaatttcttaagtgagtttttaattccaggatctctgattaatttctttttaacatgtttatgtcttctttcatttcttggactgctttagtagtttccttgtgttgattttcaacattgcctcggacttcattgagccttcttgcaattcatgctttgaattctttgcctgtcatttctgagctcccattttggttatgagtccttgctggagagctagtgtaattctttggtgatgtcacaagattcagatttcttatggtgccagaatccttatactgrtccctttcatctggagaggatggcacttctaatttttgtaattatttttgtgtggataggatttttttttctttccttatatatttttttcctttccccttctctctaagtggtgcaactgtagagtatgttgagtagggtcttttggctttgtttctataccccttttcacttcttttagcagtttttatattaggcagtgcaatttgacc

SEQ ID NO: 465131 - DNA, 556 bp, Homo sapiens
  misc_feature (1)...(556): n = A,T,C or G
nnnnnnnnnnnntaaacctttgcttacccacatgacagtaacagtccttaaaaacacctatctttgctaataccttataaaaatctgattcagaaaaacaaacaaaacaagtaaaaagtgatgtacccagtctctcatatacataactcaaataatgcttgttcagatgtarggaactattttaatctacttaaaagtattcagattctatttacccatgatcaattgtgaagactttgggatggctcacatattggggtttcccttgtcatcagtgcatgggaatctgagattaagaacctaataaagctcaaattaacctcagagcattatgaggcttgggctgagatctccactcttctggcctatgcctcaatctccattgcctccataatgttctaagaagaactttcatcattatctgtaagaagatctgtggtttgatttggagatcaaataaatgctaaaaccttcatatcagacttagacaatcagattattttcattttggaaaaaagatcagaaatcttctaactcaacctgcatacaattctgt

SEQ ID NO: 465132 - DNA, 556 bp, Homo sapiens
  misc_feature (1)...(556): n = A,T,C or G
nnnnnnnnnnnntaaacctttgcttacccacatgacagtaacagtccttaaaaacacctatctttgctaataccttataaaaatctgattcagaaaaacaaacaaaacaagtaaaaagtgatgtacccagtctctcatatacataactcaaataatgcttgttcagatgtagggaactattttaatctacttaaaagtattcagattmtatttacccatgatcaattgtgaagactttgggatggctcacatattggggtttcccttgtcatcagtgcatgggaatctgagattaagaacctaataaagctcaaattaacctcagagcattatgaggcttgggctgagatctccactcttctggcctatgcctcaatctccattgcctccataatgttctaagaagaactttcatcattatctgtaagaagatctgtggtttgatttggagatcaaataaatgctaaaaccttcatatcagacttagacaatcagattattttcattttggaaaaaagatcagaaatcttctaactcaacctgcatacaattctgt

SEQ ID NO: 465133 - DNA, 556 bp, Homo sapiens
  misc_feature (1)...(556): n = A,T,C or G
nnnnnnnnnnnntaaacctttgcttacccacatgacagtaacagtccttaaaaacacctatctttgctaataccttataaaaatctgattcagaaaaacaaacaaaacaagtaaaaagtgatgtacccagtctctcatatacataactcaaataatgcttgttcagatgtagggaactattttaatctacttaaaagtattcagattctatttacccatgatcaattgtgaagactttgggatggctcacatattggggtttcccttgtcatcagtgcatgggaatctgagattaagaacctaataaagctcaaattaacctcagagcattatgaggcttgggctgagatctccactcttctggcctatgcctcaatctccattgcctccataatgttctaagaagarctttcatcattatctgtaagaagatctgtggtttgatttggagatcaaataaatgctaaaaccttcatatcagacttagacaatcagattattttcattttggaaaaaagatcagaaatcttctaactcaacctgcatacaattctgt

SEQ ID NO: 465134 - DNA, 386 bp, Homo sapiens
gtttctcaacatactgttcyggaaatattggatacccatccaaaaaaaattaaagttgatccttacaccaccacatacataatttcacctcatatagacattgcaacttaaaaatgtcaaaactgtacacattttaaagaaagcacaggggaaaatttcttcaacttggagtagacaaagacttattagacaggagacagaaaacatgaatcataaaaagaaaaaaatgataaattgaactatgtcaaaattaaaaacttctgcttttaaaaagttaggcaatttgatgggtgtagaactctgtgaaaatactaaaaatcactggactatataaataaaaagtacagattttatgatataaaattatagctcaaaaatttatataa

SEQ ID NO: 465135 - DNA, 615 bp, Homo sapiens
ggctaagttggaggaacactaaaccctccaattagacagacttctctgtacccaatgaactggcatagtcagacaccttcagttctcccctaatgttttaacctcttgtgacttgtcagttcccaaagagaagaaaaagagaatggggatgtgtagaggcccctcctcccagatatgrcaacacacacgggggcctgacggtggagggtggagactgggtgagggaaagcattaggaaaaatagctaatacatactgggcttaatacctaggtgatgagttgataggttcagtaaaccaccaggcacacatttatacaacaaacctgcacatcctgcacatgtatcccagaacttaaaataaaataaaatatttttaaaaatagaatgatggattaagaacctctgaaaattcattctttcatataagaagcaataacactggcaaaaattgtcaaaatcaacttttcaaaatgcaaatagactagaaattatggcctgtgcacagaaagataaagtagtaagtagaaactgtcccttaggaaatccaaacatgaacgttactagataaatcttttaaatgagctattgcaaatagtttaaagaattagacatat

SEQ ID NO: 465136 - DNA, 615 bp, Homo sapiens
ggctaagttggaggaacactaaaccctccaattagacagacttctctgtacccaatgaactggcatagtcagacaccttcagttctcccctaatgttttaacctcttgtgacttgtcagttcccaaagagaagaaaaagagaatggggatgtgtagaggcccctcctcccagatatgacaacacacackggggcctgacggtggagggtggagactgggtgagggaaagcattaggaaaaatagctaatacatactgggcttaatacctaggtgatgagttgataggttcagtaaaccaccaggcacacatttatacaacaaacctgcacatcctgcacatgtatcccagaacttaaaataaaataaaatatttttaaaaatagaatgatggattaagaacctctgaaaattcattctttcatataagaagcaataacactggcaaaaattgtcaaaatcaacttttcaaaatgcaaatagactagaaattatggcctgtgcacagaaagataaagtagtaagtagaaactgtcccttaggaaatccaaacatgaacgttactagataaatcttttaaatgagctattgcaaatagtttaaagaattagacatat

SEQ ID NO: 465137 - DNA, 615 bp, Homo sapiens
ggctaagttggaggaacactaaaccctccaattagacagacttctctgtacccaatgaactggcatagtcagacaccttcagttctcccctaatgttttaacctcttgtgacttgtcagttcccaaagagaagaaaaagagaatggggatgtgtagaggcccctcctcccagatatgacaacacacacgggggcctgacggtggagggtggagactgggtgagggaaagcattaggaaaaatagctaatacatactgggcttaatacctaggtgatgagttgataggttcagtaaaccaycaggcacacatttatacaacaaacctgcacatcctgcacatgtatcccagaacttaaaataaaataaaatatttttaaaaatagaatgatggattaagaacctctgaaaattcattctttcatataagaagcaataacactggcaaaaattgtcaaaatcaacttttcaaaatgcaaatagactagaaattatggcctgtgcacagaaagataaagtagtaagtagaaactgtcccttaggaaatccaaacatgaacgttactagataaatcttttaaatgagctattgcaaatagtttaaagaattagacatat

SEQ ID NO: 465138 - DNA, 618 bp, Homo sapiens
gtttaaaagatattataataataaacagtagaataatacttctacaggaaaataatttgcagtgacaaaatggccttgtttgccatcatcatactatagccatcattaattaaaaaggcagtagaagataaacataaatttgccattctgtgcaccacatttctttacttacagcttataaagtgggatcctatggagaatggtcctgtaccggcctaagaatcaaaaaaggtcttatttgaaaagattatctccttctttgtccaatgtctaccatcaaagttttttttattttcacctgtttcatgaagtattacctgatttccattcttcaaaacaccatagcattgtaagctttacttatacttcttactgagctctgacatattgagctgattatgtacatatcttattttctctaatggacaatcaacaaygtgaaaggaagtaatttattataccgatacattaactcctcctaaatgtcttttatatccctgacattcaggagataactaatacatgtctcttaactttaattgaataaatgacttcttggtctagctaagaaaaacatctgaaactacatgtgaaagtgtagcaatatttatgtccccc

SEQ ID NO: 465139 - DNA, 614 bp, Homo sapiens
tggcagttatgagtgaaaaggtgaaactgggaaaagtgtgaaaaacctagaatattttataggtaacagagtcagttgttgtggtaatatgataggatttgttctatagaaagacaattctgctgctattatgaaggattactcagagtggaagagagaatctgggcagttcatttataacactatagtccagggaagggataattgcttgcaaaagataagaatgaatcctaaaagtgaaaaaaaatagattgaatgtggaggattagaaaaatggtgagtttaaacacgtcttagaaatttacagcttagatggcttaagagtattttgaaactatttattgagatacagaatctagataaaagaacacatttargcaagaggtagcacagaataagaatgttttgattaaaatgtatataattcagtaccagcaatgataaatatgttggaggccttagggaagatatctgagcccacttattcagaaatttagagacagctccttggaatgacagccttttgggcctccaagtcaggtacatcaaggataggacataaaacaatgggcaacaagtgaatgctgaagcaaaactaaagattctagctatgt

SEQ ID NO: 465140 - DNA, 603 bp, Homo sapiens
ataatttatgtgacctgaatttcagatgcctcactatcctgggtgcagttctctagctatgctgtagattatcagtattcttttaaaataataataaataaaactgaagttcatatttcatatgcagcctcttttttctgggrcataatataactgtattctttcctgttaaccttatttagattttcaaattaaaatgtgtcaaatcacaaataatgttttcttatatttaaaaattataacctctgttccaatttttatctcccttttccagtttttggcctaggtatttttatttattttcattttacttcatttcattttcatggttaaataattaaggcatttcaagtacaacattggttattgccattgttttcttctgttctttttttttctaatgggtttatatttctcatttattgaccaaatgttatttaggaatggagtgtttatgtattatagatatattcttgctgatatttaaataacttctgttatttatttctagttttgtttgtgggagaatgtgattgacagttctatttttacaaattattatgttttattagtggtttcttatgaattatgcccagtgaagca

SEQ ID NO: 465141 - DNA, 603 bp, Homo sapiens
ataatttatgtgacctgaatttcagatgcctcactatcctgggtgcagttctctagctatgctgtagattatcagtattcttttaaaataataataaataaaactgaagttcatatttcatatgcagcctcttttttctgggayataatataactgtattctttcctgttaaccttatttagattttcaaattaaaatgtgtcaaatcacaaataatgttttcttatatttaaaaattataacctctgttccaatttttatctcccttttccagtttttggcctaggtatttttatttattttcattttacttcatttcattttcatggttaaataattaaggcatttcaagtacaacattggttattgccattgttttcttctgttctttttttttctaatgggtttatatttctcatttattgaccaaatgttatttaggaatggagtgtttatgtattatagatatattcttgctgatatttaaataacttctgttatttatttctagttttgtttgtgggagaatgtgattgacagttctatttttacaaattattatgttttattagtggtttcttatgaattatgcccagtgaagca

SEQ ID NO: 465142 - DNA, 603 bp, Homo sapiens
ataatttatgtgacctgaatttcagatgcctcactatcctgggtgcagttctctagctatgctgtagattatcagtattcttttaaaataataataaataaaactgaagttcatatttcatatgcagcctcttttttctgggacataatataactgtattctttcctgttaaccttatttagattttcaaattaaaatgtgtcaaatcacaaataatgttttcttatatttaaaaattataacctctgttccaatttttatctcccttttccagtttttggcctaggtatttttatttattttcattttacttcatttcattttcatggttaaataattaaggcatttcaagtacaacattggttattgccattgttttcttctgttctttttttttctaatgggtttatatttctcatttattgaccaaatgttatttaggaatggagtgtttatgtattatagatatattcttgctgatatttaaataacttctgttatttatttctagttttgtttgtgggagaatgtgattgacagttctatttttacaaattattatgttttattartggtttcttatgaattatgcccagtgaagca

SEQ ID NO: 465143 - DNA, 551 bp, Homo sapiens
aataaaaaggatgattgacatggttgtaagagaaagagagaaagttgaaaacrtacctgcaaaacggggaagccaaccagttcacaacaccaaactgtatctggacattcttgtcacaattgggtcaccaagatgacattggaaagagtaagattggcttaatatctgaataaggaactcgacttctccatcagtgcttctcaaatcatctgcagtaaagaaccagtttctttttacatttcatagaaggccaatacttcagtaaaatatgataaaaatcaactactagaaaaacgaaatgaaaagcacctgagctattctatattctgctccaaaaatgtgtctgattatgtgcttgtatgtttcagtaataccaaattttataatagttgcttaccactggtaagtaacacaaatataatttagtttctatacctgtctcattacaagccaataacaaaaagctcatagatcatcactagactgccaactcccaacggagtagcattgctttgtatctgttgaatgccagtttaagattggaggttaag

SEQ ID NO: 465144 - DNA, 551 bp, Homo sapiens
aataaaaaggatgattgacatggttgtaagagaaagagagaaagttgaaaacatacctgcaaaacggggaagccaaccagttcacaacaccaaactgtatctggacattcttgtcacaattgggtcaccaagatgacattggaaagagtaagattggcttaatatctgaataaggaactcgacttctccatcagtgcttctcaaatcatctgcagtaaagaaccagtttctttttacatttcatagaaggccaatacttcagtaaaatatgataaaaatcaactactagaaaaamgaaatgaaaagcacctgagctattctatattctgctccaaaaatgtgtctgattatgtgcttgtatgtttcagtaataccaaattttataatagttgcttaccactggtaagtaacacaaatataatttagtttctatacctgtctcattacaagccaataacaaaaagctcatagatcatcactagactgccaactcccaacggagtagcattgctttgtatctgttgaatgccagtttaagattggaggttaag

SEQ ID NO: 465145 - DNA, 551 bp, Homo sapiens
aataaaaaggatgattgacatggttgtaagagaaagagagaaagttgaaaacatacctgcaaaacggggaagccaaccagttcacaacaccaaactgtatctggacattcttgtcacaattgggtcaccaagatgacattggaaagagtaagattggcttaatatctgaataaggaactcgacttctccatcagtgcttctcaaatcatctgcagtaaagaaccagtttctttttacatttcatagaaggccaatacttcagtaaaatatgataaaaatcaactactagaaaaacgaaatgaaaagcacctgagctattctatattctgctccaaaaatgtgtctgattatgtgcttgtatgtytcagtaataccaaattttataatagttgcttaccactggtaagtaacacaaatataatttagtttctatacctgtctcattacaagccaataacaaaaagctcatagatcatcactagactgccaactcccaacggagtagcattgctttgtatctgttgaatgccagtttaagattggaggttaag

SEQ ID NO: 465146 - DNA, 551 bp, Homo sapiens
aataaaaaggatgattgacatggttgtaagagaaagagagaaagttgaaaacatacctgcaaaacggggaagccaaccagttcacaacaccaaactgtatctggacattcttgtcacaattgggtcaccaagatgacattggaaagagtaagattggcttaatatctgaataaggaactcgacttctccatcagtgcttctcaaatcatctgcagtaaagaaccagtttctttttacatttcatagaaggccaatacttcagtaaaatatgataaaaatcaactactagaaaaacgaaatgaaaagcacctgagctattctatattctgctccaaaaatgtgtctgattatgtgcttgtatgtttcagtaataccaaattttataatagttgcttaccactggtaagtaacamaaatataatttagtttctatacctgtctcattacaagccaataacaaaaagctcatagatcatcactagactgccaactcccaacggagtagcattgctttgtatctgttgaatgccagtttaagattggaggttaag

SEQ ID NO: 465147 - DNA, 605 bp, Homo sapiens
catatgtactatgaatattgtccccaagtctgtggcttgcatttctattatttaaatagtgtcttttaatgagggcaagctttattgaattttgattaattaaatttacaattgttttcttttatatttagtacttcttgtgtcttgtctaataaatgttttcytaaactgagattgaagaaatcttcccttatatttgtgcctagagctttgtagtattagctcatgtgtgtggtgcaggttcatttatgttttatgccttaatcaaatatattgagacataatttatatacaataaaagacaccaattttaagtgtatagtttgatgttttgacgtatatgtagaaacatgtaatcaccaccatgatcaagatatagaacatttctttgcatgtaagacagaaacaaagggttatcagtgacagtttctaccctacatcaggctcagcctccaatgtgtttctgcattatatttgtattgtactttattacttattcatacagataagtaatttcaagttaaaagagaattatttattttttatattatcccttcttgcaatgcttttcaattaaaatcagatataggcaaatctttaatccc

SEQ ID NO: 465148 - DNA, 605 bp, Homo sapiens
catatgtactatgaatattgtccccaagtctgtggcttgcatttctattatttaaatagtgtcttttaatgagggcaagctttattgaattttgattaattaaatttacaattgttttcttttatatttagtacttcttgtgtcttgtctaataaatgttttcctaaactgagattgaagaaatcttcccttatatttgtgcctagagctttgtagtattagctcrtgtgtgtggtgcaggttcatttatgttttatgccttaatcaaatatattgagacataatttatatacaataaaagacaccaattttaagtgtatagtttgatgttttgacgtatatgtagaaacatgtaatcaccaccatgatcaagatatagaacatttctttgcatgtaagacagaaacaaagggttatcagtgacagtttctaccctacatcaggctcagcctccaatgtgtttctgcattatatttgtattgtactttattacttattcatacagataagtaatttcaagttaaaagagaattatttattttttatattatcccttcttgcaatgcttttcaattaaaatcagatataggcaaatctttaatccc

SEQ ID NO: 465149 - DNA, 605 bp, Homo sapiens
catatgtactatgaatattgtccccaagtctgtggcttgcatttctattatttaaatagtgtcttttaatgagggcaagctttattgaattttgattaattaaatttacaattgttttcttttatatttagtacttcttgtgtcttgtctaataaatgttttcctaaactgagattgaagaaatcttcccttatatttgtgcctagagctttgtagtattagctcatgtgtgtggtgcaggttcatttatgttttatgccttaatcaaatatattgagacataatttatatacaataaaagacaccaattttaagtgtatagtttgatgttttgacgtatatgtagaaacatgtaatcwccaccatgatcaagatatagaacatttctttgcatgtaagacagaaacaaagggttatcagtgacagtttctaccctacatcaggctcagcctccaatgtgtttctgcattatatttgtattgtactttattacttattcatacagataagtaatttcaagttaaaagagaattatttattttttatattatcccttcttgcaatgcttttcaattaaaatcagatataggcaaatctttaatccc

SEQ ID NO: 465150 - DNA, 544 bp, Homo sapiens
tgtgtgacttcgcagttcattctttttgtaccattgtgtatatatacacaatggttttattktcttacactctcaacagaaacgtatgacagttaccagttgcttaacattctcaacaaaatgtgttagtcttaatttcatacattaagtagatgcataatagtatccaattgtggttagaattaaaagttttttttgatgactgaagacactgaatatatttttttgtgtgtatattggtcatctacatattttttagttgagcgtcttttcagatcttttgtccattcctcagttagaggcatattttcttctttccaatattttaattagttcctttgtcttcataattgaaatgtaagagttctttatgttttccaggtatatatatttttgttacttgtatattacgcaaatattttcactatattgtaacttgcttttaattttctaccatgtcttttgaagagcagaagtttcctttggttttgataaagtccaacttattgactttgacttttatagttcaagtgttttctgtcat

SEQ ID NO: 465151 - DNA, 348 bp, Homo sapiens
agtgatgccagcaattgggatatgccaaagagaagtcataaagtgctgcatttaagtgaaaaggtggaagttctcaagaaggaaaggaaaaacccatatgctgagagtgctacaattttaggcaaaaacgaatcttctatccatgaaattgtgakgagtatattgttatcattgttctatgttattagttactgctgttaatctcttactgttcttaatttatcaattaaactttaccatagatatgtatagtatgtttaggaaaaaacatactgtatatacggttcagaactacccacggtttccggcatccaccatgggtttgaaacatatcccctgggtaaggga

SEQ ID NO: 465152 - DNA, 471 bp, Homo sapiens
gactcccacagcctcgaatcgcaacacagcagcaggtctgcacttaccacgcctcacactccggtgtgccctttccacacaccttaagcgcacttaccatgcattctatatgccatctggtcgaccacatttcacataggaaatgccacaatcaagttccttacagatgattttgaagccaattctaagtataataattgtattgaaatcttgaagttcagtaaaagaagaggtgataccatcctactggctttataggaagattgtaaacgatctttctttttcctctccaatgtcaccacccaaatatctaaaagcaaaaaggcagtaggcagcagtagataagcagaaatgagggagagtcagactttttgaaccaaaatggttttgagaaaggctgtggcttatccctcagctctygttcgaggcagccgaggggcttggctcatcacgcgggtgtcagatccacgt

SEQ ID NO: 465153 - DNA, 557 bp, Homo sapiens
acactttactgcccccaaggcttttgttgccttggaatgtcctgaccaagaaatacttcatgacctccgtrgcttttcttaccttggtcctaatcaagaaatacctcactgtccccatggcttttcttaccttggtctgtgcacagagttacctggttgccacattatatttgtgggccttctcttcctgtgttgctgagtgtctgggtttattcgtcatgccaggtgggtcttgatctcttacccctgtggccaccacagcgaggcagtgggatgtgtctcctcatgagagatgatcagagaccccacctcagaggagaatgggttgccaggtggatccccaaagttgttggaaataaagcttggagtcgcaaaggaaacaagcacttaaacgaagaatttctcagcaaggcaaatttacttctgcagaagggtgcttctcacagatctggtcactccgagagcacaccaaacaaaggagggaaggggtttttatttctaatgcagcttgtccctgctactgtgtcctgcatccattggctggagttgaactgcac

SEQ ID NO: 465154 - DNA, 557 bp, Homo sapiens
acactttactgcccccaaggcttttgttgccttggaatgtcctgaccaagaaatacttcatgacctccgtggcttttcttaccttggtcctaatcaagaaatacctcactgtccccatggcttttcttaccttggtctgtgcacagagttacctggttgccacattatatttgtgggccttctcttcctgtgttgctgagtgtctgggtttattcgtcatgccaggtgggtcttgatctcttacccctgtggccaycacagcgaggcagtgggatgtgtctcctcatgagagatgatcagagaccccacctcagaggagaatgggttgccaggtggatccccaaagttgttggaaataaagcttggagtcgcaaaggaaacaagcacttaaacgaagaatttctcagcaaggcaaatttacttctgcagaagggtgcttctcacagatctggtcactccgagagcacaccaaacaaaggagggaaggggtttttatttctaatgcagcttgtccctgctactgtgtcctgcatccattggctggagttgaactgcac

SEQ ID NO: 465155 - DNA, 565 bp, Homo sapiens
gggccttctcttcctgtgttgctgagtgtctgggtttattcgtcatgccaggtgggtcttgatctcttacccctgtggccaccacagcgaggcagtgggatgtgtctcctcatgagaratgatcagagaccccacctcagaggagaatgggttgccaggtggatccccaaagttgttggaaataaagcttggagtcgcaaaggaaacaagcacttaaacgaagaatttctcagcaaggcaaatttacttctgcagaagggtgcttctcacagatctggtcactccgagagcacaccaaacaaaggagggaaggggtttttatttctaatgcagcttgtccctgctactgtgtcctgcatccattggctggagttgaactgcacaatttaagctaaactcggttggctaacttgaaaagcacaggaatgtggttagattggcaagaaggacagtttcatgggggaagggacattgtgacaggtggggtaatttatagagtgggtagcagatgtggactccatagatatggaccgatggaagggttttttactgaaaccaagacagg

SEQ ID NO: 465156 - DNA, 557 bp, Homo sapiens
acactttactgcccccaaggcttttgttgccttggaatgtcctgaccaagaaatacttcatgacctccgtggcttttcttaccttggtcctaatcaagaaatacctcactgtccccatggcttttcttaccttggtctgtgcacagagttacctggttgccacattatatttgtgggccttctcttcctgtgttgctgagtgtctgggtttattcgtcatgccaggtgggtcttgatctcttacccctgtggccaccacagcgaggcagtgggatgtgtctcctcatgagagatgatcagagaccccacctcagaggagaatgggttgccaggyggatccccaaagttgttggaaataaagcttggagtcgcaaaggaaacaagcacttaaacgaagaatttctcagcaaggcaaatttacttctgcagaagggtgcttctcacagatctggtcactccgagagcacaccaaacaaaggagggaaggggtttttatttctaatgcagcttgtccctgctactgtgtcctgcatccattggctggagttgaactgcac

SEQ ID NO: 465157 - DNA, 565 bp, Homo sapiens
gggccttctcttcctgtgttgctgagtgtctgggtttattcgtcatgccaggtgggtcttgatctcttacccctgtggccaccacagcgaggcagtgggatgtgtctcctcatgagagatgatcagagaccccacctcagaggagaatgggttgccaggtggatccccaaagttgttggaaataaagcttggagtcgcaaaggaaacaagcacttaaacgaagaatttctcagcaaggcaaatttacttctgcagaagggtgcttctcacagatctggtcactccgagagcacaccaaacaaaggagggaaggggtttttatttctaatgcagcttgtccctgctactgtgtcctgcatccattggctggagttgaactgcacaatttaagctaaactcggytggctaacttgaaaagcacaggaatgtggttagattggcaagaaggacagtttcatgggggaagggacattgtgacaggtggggtaatttatagagtgggtagcagatgtggactccatagatatggaccgatggaagggttttttactgaaaccaagacagg

SEQ ID NO: 465158 - DNA, 545 bp, Homo sapiens
tcttttctcctctgtctgaggggtccagctcggtccaacccacgggaagaatagggtgattcaaggaacccatattcatagagcaagagtttcttcgccygggcgtggtggctcacacctgtaatcccaacactttgggaggccgaggtgggcggatcatgaggtcagagatcgagaccatcctggctaacatggtgaaaccgtgtctctactaaaaatacaaaaaattagccgggcatggtggtgggcacctgtagccccagctactcagaaggctgaggcaggagaatggcgtgaacccgggaggcggagcttgcagtgagccgagatggcgccactgcactccaggctgggcgacagagtgagactccgtcaaaaaaaaaaaaaaaaaaaaaaaagattcttctcccacttgaaagaaaaatcagatctgacggatccaaagccaggccacaggcacagtgtaaattggcaggactagtttctgccgattacgccctctcttcttggaaataggccatgctcaatggtatagataaggctca

SEQ ID NO: 465159 - DNA, 589 bp, Homo sapiens
gtaatcgagctgccatcaagatatgcatcacctcaggttagctttcgtccaactcttcataagtattaaacagtatattttggtagcattcacagagttgtgagtttgatttagagttggacctagcactgttgtaaccatctgctagatctgtgtctcactgactccagaggggacaygctggagtgagctgtctcacaacaatccatcctcataggtctactctattaagagataagttaaaggttttaaattgtatcccaaatcaacactttgtagttatatcacttaattgccattgaaaatgtgtctcctataggtgattttttgttgtgggaagtcagggaccccaaacagagggaccggctgaagccatggcagaagaacataaattgtgaagatttcatgggcatttattagtttcccaagttaatacttttataatttcttatgcctgtctttactgcaatctgaacatgaattgtgaagatttcatggacatttatcacttccccaatcaatattcttataatttcttatgcctctttaagcccttaatcccatcatcttcataaactgaggatgtatg

SEQ ID NO: 465160 - DNA, 624 bp, Homo sapiens
tttaaaacttctccaggcttaggttccatcactcttcctcttcagctattaataataggcttttcacagtttttcagaagttcctttaactttcctgcccttggcctttgaacgtactgtccttgttagtgaaacacttgtatttccacttggttttctagctaaatcctattcatcctttagtgcataccttaagaattacttctttagtgaagctaatctcaaagacaggtaaagtcttattttacattaatctccagtgcttactctttgtaagaactaaattgatacttacaacagcttatacatagtatgttwtaaataaaaagaatgaataaatgattattctatgcttttattgaattccaaaagtattttagaatactatacttaagaaaatttagataggttaatgggaggttaagccctgttctgaaagttattttgtttcttgcgggtaacttttcatatgatgcattttttttttctttaaatactgatttttatgatttttaccccattatttataaatactgcacacagtaaatctcaaatatagaaatagtgacatttcaatttagtagactttaaaatggtttcattatctctttttttagtgatgat

SEQ ID NO: 465161 - DNA, 624 bp, Homo sapiens
tttaaaacttctccaggcttaggttccatcactcttcctcttcagctattaataataggcttttcacagtttttcagaagttcctttaactttcctgcccttggcctttgaacgtactgtccttgttagtgaaacacttgtatttccacttggttttctagctaaatcctattcatcctttagtgcataccttaagaattacttctttagtgaagctaatctcaaagacaggtaaagtcttattttacattaatctccagtgcttactctttgtaagaactaaattgatacttacaacagcttatacatagtatgttawaaataaaaagaatgaataaatgattattctatgcttttattgaattccaaaagtattttagaatactatacttaagaaaatttagataggttaatgggaggttaagccctgttctgaaagttattttgtttcttgcgggtaacttttcatatgatgcattttttttttctttaaatactgatttttatgatttttaccccattatttataaatactgcacacagtaaatctcaaatatagaaatagtgacatttcaatttagtagactttaaaatggtttcattatctctttttttagtgatgat

SEQ ID NO: 465162 - DNA, 660 bp, Homo sapiens
gctcacacaaacagagtacttaatgccagatacaatcttcacaacaattttgagataagtacaactattgtcctcattttaaaaaatgaataaactgaggcaatcttcaaagtgacttcttccattagcaaatatcaggggaagaatttaacccaggaagcctttctaaggagtctttttaaaattggcattcaaagaatatagatttagtagtgtaagactgccagaatatctagcaatctgtgtattcataacagaatagcataaatacattcaaaagcagaactacagacattggaatagagaccccagatagacatttgattggtgtgtgcttttgtatctgcccaggagagaggtatcaaataacagcaaacatagctgccaataacaaaactcattctgatattcataactcttttcttttctctgagtctatatacattgctaataacaatgtcattctgtttctaatatcatagtagcttactccaataaagaagtgaaaatcagtgtaggcttcctgtcattagcttttctcatgaaatttaatgtttttttcctcctgtatggtagtaatttgtgtgactaatagcttatatattwtattaactagcaagccgttctgttttgttaattactaaataaaatagttgtcaa

SEQ ID NO: 465163 - DNA, 578 bp, Homo sapiens
ttatgacctttgttattttttttaaaaagccagcaatgaaactaagtcattttccatctctgattatttgctctaagaaatgtggacaagctctaccggaaaagtaagataagcaattcaaagagatctatcttgagtagtaactacctgctagaacaaacgtttcataatgtgtggcctctggtattgcttgtctgctcacaacctcacagtagccgcttttattaacattatattgttttgctctgcacttacacagcctacccctcaactaagaattgagggaaacccccayactgctttgctgtgtctcattcttcttttttctaagtgccctatctcccaaattgcaaatgcttcagcagccacgaattctgatccatgcctccttagctcaacagaagggcaaagttttgctgtgggaaattgttcacaggccattgactgaggtaatcgtagggttcatcttatgaatttactttcttttagcaattgccatcttaaaatgtcggtttcccatgactaaaaactgtgcctcatatattttgctatttttgtagttgctgctagtaggaaac

SEQ ID NO: 465164 - DNA, 578 bp, Homo sapiens
ttatgacctttgttattttttttaaaaagccagcaatgaaactaagtcattttccatctctgattatttgctctaagaaatgtggacaagctctaccggaaaagtaagataagcaattcaaagagatctatcttgagtagtaactacctgctagaacaaacgtttcataatgtgtggcctctggtattgcttgtctgctcacaacctcacagtagccgcttttattaacattatattgttttgctctgcacttacacagcctacccctcaactaagaattgagggaaacccccatactgctttgctgtgtctcattcttcttttttctaagtgccctatctcccaaattscaaatgcttcagcagccacgaattctgatccatgcctccttagctcaacagaagggcaaagttttgctgtgggaaattgttcacaggccattgactgaggtaatcgtagggttcatcttatgaatttactttcttttagcaattgccatcttaaaatgtcggtttcccatgactaaaaactgtgcctcatatattttgctatttttgtagttgctgctagtaggaaac

SEQ ID NO: 465165 - DNA, 614 bp, Homo sapiens
  misc_feature (1)...(614): n = A,T,C or G
gttctttggctttgtaacttgaactggcttccttgctgctcagcctgcagatggtctattgtgggacctcaccttgtgattgtgtgagttaatacaccttagtaaattcccctttatatatacatctatcctattagttctttccctctagagaacactgastaatatgcctgcccctatttaaaaaatattattttgacattgggcactttagcagtgattgccttcctgaccttatcaattagcgaactccaacacagttactcctgtaatcctctttttccgcttaatggagattcccttaggtttcccactggatttaagtgaaacattatgttttcactgggttgtgagagttttgagtggtaagctannnnnnnnnnnnnnnnnnnnnnnnnnnnnnnnnnnnnnnnnnnnnnnnnnnnnnnnnnnnnnnnnnnnnnnnnnnnnnnnnnnnnnnnnnnnnnnnnnnnataacagatagaatactacaaatacagatacaaatacagattagaaaaatgcagtagtagctaaaaatctgtagatatgttgaatactatttgaaagtgttaatataatcaataacaaaataaaataaaataatgtgaatg

SEQ ID NO: 465166 - DNA, 614 bp, Homo sapiens
  misc_feature (1)...(614): n = A,T,C or G
gttctttggctttgtaacttgaactggcttccttgctgctcagcctgcagatggtctattgtgggacctcaccttgtgattgtgtgagttaatacaccttagtaaattcccctttatatatacatctatcctattagttctttccctctagagaacactgagtaatatgcctgcccctatttaaaaaatattattttgacattgggcactttagcagtgattgccttcctgaccttatcaattagcgaactccaacacagttactcctgtaatcctctttttccgcttaatggagattcccttaggtttcccactggatttaagtgaaacattatgttttcactgggttgtgagagttttgagtggtaagctannnnnnnnnnnnnnnnnnnnnnnnnnnnnnnnnnnnnnnnnnnnnnnnnnnnnnnnnnnnnnnnnnnnnnnnnnnnnnnnnnnnnnnnnnnnnnnnnnnnataacagatagaatactacaaatacagatacaaatacagattagaaaaatgcagtagtagctaaaaatctgtagmtatgttgaatactatttgaaagtgttaatataatcaataacaaaataaaataaaataatgtgaatg

SEQ ID NO: 465167 - DNA, 555 bp, Homo sapiens
catttgccctggattaaatgtcatcgtattgccttgttaaaaatcaaaaccacccctagaaaagatatcatcttgttcccttatgaagtgatatatgggctgccttatttacatctaccactgatgctcctacatttgaaacaaaagatcagtccctcaaaaattatatactcgatctatcttccactttctcttaagtccaaaagtctcctagcacaggtgccacccctggagatcacgtccttatcaaagggtaaaaagaagaaaaactctaactagcttgggaaggacyttacctagtgctcctgaccactgaaagcacagtctgaacagtagagaaaggatggactcatcatatctgagtcaagaaagcgtcaccacctacagaataacgggccatcattccaggggaaagctctaccaaactaaagctaagaaaaacctaaccctcttatatctactatattattctgtcaccttttctcactttacagctagtcacctgattattaatgtaactagatcaagcctacttcaagttatcacttttgatgc

SEQ ID NO: 465168 - DNA, 579 bp, Homo sapiens
accacaacttttatcttctctttaaaaaatatttgatcaaagtgcttatccttatttaagtcaattgattagagcacttttttatagacatcacacacaygacacatgtataactacacagaaagatagaagaagattcagtagctgtaagatttttgtgttgccagtctactaatatgattattagcctttgggtggagccctttatgagcaaggctaggaaagcatgtagtttccagggcctaataaacaggtacagctgtaagacaaaaacagattttgtttgttttttttgttgttgttgttattttgagatggagttttgctcttgttgccgaggctggagtacaatggtgcagtctcagctcaccacagcctgcacctgtcgggttcaagcaattcttctgcctcagcctcccaagtagctgggattacagggatgtgccaccacacccaactgattttgtatttttagtagagacaagagtttctccatgttggtcaggctggtcttgaactcccgatctcaggtgatctgcctgcctcagccgcccaagagggatctaactgcctttaatt

SEQ ID NO: 465169 - DNA, 579 bp, Homo sapiens
accacaacttttatcttctctttaaaaaatatttgatcaaagtgcttatccttatttaagtcaattgattagagcacttttttatagacatcacacacatgacacatgtataactacacagaaagatagaagaagattcagtagctgtaagatttttgtgttgccagtctactaatatgattattagcctttgggtggagccctttatgagcaaggctaggaaagcatgtagtttccagggcctaataaacaggtacagctgtaagacaaaaacagattttgtttgttttttttkttgttgttgttattttgagatggagttttgctcttgttgccgaggctggagtacaatggtgcagtctcagctcaccacagcctgcacctgtcgggttcaagcaattcttctgcctcagcctcccaagtagctgggattacagggatgtgccaccacacccaactgattttgtatttttagtagagacaagagtttctccatgttggtcaggctggtcttgaactcccgatctcaggtgatctgcctgcctcagccgcccaagagggatctaactgcctttaatt

SEQ ID NO: 465170 - DNA, 579 bp, Homo sapiens
accacaacttttatcttctctttaaaaaatatttgatcaaagtgcttatccttatttaagtcaattgattagagcacttttttatagacatcacacacatgacacatgtataactacacagaaagatagaagaagattcagtagctgtaagatttttgtgttgccagtctactaatatgattattagcctttgggtggagccctttatgagcaaggctaggaaagcatgtagtttccagggcctaataaacaggtacagctgtaagacaaaaacagattttgtttgttttttttgttgttgttgttattttgagatggagttttgctcttgttgccgaggctggagtacaatggtgcagtctcagctcaccacagcctgcacctgtcgggttcaagcaattcttctgcctcagcctcccragtagctgggattacagggatgtgccaccacacccaactgattttgtatttttagtagagacaagagtttctccatgttggtcaggctggtcttgaactcccgatctcaggtgatctgcctgcctcagccgcccaagagggatctaactgcctttaatt

SEQ ID NO: 465171 - DNA, 579 bp, Homo sapiens
accacaacttttatcttctctttaaaaaatatttgatcaaagtgcttatccttatttaagtcaattgattagagcacttttttatagacatcacacacatgacacatgtataactacacagaaagatagaagaagattcagtagctgtaagatttttgtgttgccagtctactaatatgattattagcctttgggtggagccctttatgagcaaggctaggaaagcatgtagtttccagggcctaataaacaggtacagctgtaagacaaaaacagattttgtttgttttttttgttgttgttgttattttgagatggagttttgctcttgttgccgaggctggagtacaatggtgcagtctcagctcaccacagcctgcacctgtcgggttcaagcaattcttctgcctcagcctcccaagtagctgggattacagggatgtgccaccacacccarctgattttgtatttttagtagagacaagagtttctccatgttggtcaggctggtcttgaactcccgatctcaggtgatctgcctgcctcagccgcccaagagggatctaactgcctttaatt

SEQ ID NO: 465172 - DNA, 623 bp, Homo sapiens
tgtggtacctactttatcaaagctgtaaaagaggttttcttcattgatttttcactgttgttgcaggttgaatccactgggaagagtctctcagcaaagactgctgtacttattattatgtttatgtgggagcactcctggcatcagctctggtttggagcatggggaagtgagattgggctaaatgagaggtctagttcttgttcaggcaggcaccaataacagcctcagttgaccctacagaaagctcaagagctaaaacagcttattagaagcattccaagtacattgcaattaaaataagccctttatcctcttgtatctgtctctgtagatgtgagccatccccaatatgataatcccatgtaaagcatcttgctgaagttgaggcagtctctgaaggccaactgaaagttatttgccaactgyaagcccagaagataaggcaatgtgattttcttcaaagggtgtgctgtatggtctatttctatgcaagaaaacttattttaccttgatgtagaagaagaactgagagaagtgatttgaataaagtaataaagatatcaagatatagaatctgagataaaggaatattcttctaaactttttaaatctctctaaat

SEQ ID NO: 465173 - DNA, 624 bp, Homo sapiens
aacattctgtgtgtcttagtttcccaattttaaattaaaaatatatctttaatttycttttttttcaggtgtttccaaatagtttgattagttttttaggcaataaatctgattctggagctattataaattcctagacttaaaagagattttatcatgctgagactattcacattgaaattatcacagaaaagtcagctgtaagagttatataagtaggactaccatacagagccttaaatataaagcaactgaaataagagaatctttgaaactgatttaagggtatccaagctgtcaatggagatatgacctttttgtgcagagtgaatggcaggtaatactgatctcaaattttaatgatataatgacccatagtaatcaaagctcttgttacaaaggatctgaaatgatacacaggggtaattcaagaatgtgatagcctgcagcatttgactttaacaatcatcccagtgtataatgataattttaaaaatatatattgccccatagtcattaaatgatcctttaagtgaatgaaaatcctcaatcaaaatcttgatagtcaccagctttcttatgaaataattgtatcgtatatggtgttagttaatgctaataaaa

SEQ ID NO: 465174 - DNA, 595 bp, Homo sapiens
ataccagctgtagtctacagtcatctgcaacattcttattcttacagctcatattagctttttaagtaatagcactggaagcgtccacaaaactgtaacctctgtatgatatcaaattcataaaagaactccagtggcttacctttctctaccatttatatgtgaaagacacagaactgctcaatcaagtcaccttaatctactaaagttgttagaagagtaactcccatagttttctctcttttctattaaacttatttgaaaacataaccaatattaaagaartaatggctaacagtgagacacgtcaatgttcacaagataacaaaatttgaaatctattatttcatgtggtagagttcttgtaattatatattttatactaatccctatcatgtgacctggggtccccaacccccaggccacagactggtagttgtttgtgacctgttggaagccaggctgcacagcaggaggtgagcagtgggcaagcattatcacctgagctctgtctcctgtcagatcagcagtgccattacattttcataggagggcaaaccctattgtgaactgcacatgcaaaggatctaggatg

SEQ ID NO: 465175 - DNA, 531 bp, Homo sapiens
gtcccctgtgaggtatgatctggaatggcttccctctgtccctgctttagtctgggagtgaatgcaaagcacgccctgatgcmtctccttctcatatattcctcactgctcactaaatcacctccagcactgggtagggttaaggccttccctgtggcggggtttgcctggctcccctgtgggagtgtgcatcatgaaggcagtctctctcccactcatcctctagagatacagtgttctgtctgattcatcgtgtaggctactgcttgctgcttctttcgaaggtcggtggtttctgtaagttattctgttaagtttctgagttgcttcttggaaaacaattcacagagtaaatttctacatactattttctctttccaagtgagagaggcatgctaccgatgtctccaattcaccatctttgcaaggggtgggaggtggggaggaattacatcaacttttttaaatttgagattggctgctcttttctaatattttagcatcatgcaggacagcagacagattagttgc

SEQ ID NO: 465176 - DNA, 512 bp, Homo sapiens
gggaagacctccctgggcagctcatccagggtgaagatggtcaagaactggttcctcagcaggctctgccctgccagctccagcagtctggatggggcctggaggctcattctgacaaatctccgaggaaaaactctagaggacaatcaagtgaaaaggcaagtttctcgggccattccccagcaagccccacttctcctagggccaaagtcatttctctagcacgtgtgaaagagccctcagtttactccaattccgttctgcaataagtggctacagaggcatggttctgcccttctggtaccaagaagagtgtgtcccaacctctaaagagcaggcaagatccytcctagtccatgaattattagccactgttgcaataaactcatagcactgggaaatgttaccgaggatctctgaagctcggatctcatgcccagctaatcttttattttttgactttttgtaaagacagtgggtttcactatgttgtccaggctggtcttgaactc

SEQ ID NO: 465177 - DNA, 534 bp, Homo sapiens
ggggacttggggaacttccctgtcttacatgaggattgtaaaatgcaccaatcaacgctctataaaatgcaccaatcagcaggattctaaaagtagccaatcgtggggatgattgaaaaaaaggcactctgataggacagaaatggaacatgggaggggaccataagggaataaaagctggccaccccagtcagcagcgrcaacctactcaggtccccttccacgctgtggaagcttcgtccttctgctcttcaccataaaccttgctaccgctcactctttgggtccgtgccatctttaagaactgtaacactcactgcaaaggtctgtggcttcattcttgaagtcagcaagaccatgaacccaccggcaggaaccaattctggacacaatgttggccaggctggtcttgaactcctgacttcaggtgatccacctgcctcagcctcccaaaatgctgggattacaggtgtgagccactgtgcccagcctagttcccacttttagtggtgcctttcagtgccactagaagag

SEQ ID NO: 465178 - DNA, 492 bp, Homo sapiens
cagctacttggaaggctgaggagggaggatccgttgagcgtggggggcagaggttgcagtgaggtgaggagtttgagagcagtgtagccaacctggcaaaatcttatctctactaaaaatacaaaaattagctgcgcatggtggctggtgccttgtaatcccagctacttgggaggctgaggcgggagaattgcttgaagccgggaggcggaggttgcagtgagctgagatcgcgacactgcactccgacatgggygacagagtgagactccttggagaaaaaaaaaaaaaagaactttgaaatgtggcagggcccagtaactcatgcctattatcccagcactttgggaggccaaggcaggttgatcacttgagaggtcaggagttcaagaccagcctggccaacatggtaaaaacttacctctactaaaaatacaaaattaaggctgggcacggtgctcacacctgtaatcccagcactttgggagaccg

SEQ ID NO: 465179 - DNA, 453 bp, Homo sapiens
accatgccaggctaatttttgtatttttagtagagatggggtttcagcatgttggccaggctggtttcgaactcctgacctcaaatgatccrcccacctcggcctctcaaagtgctgagattacaggcgtgagccacagcgcccggcggactggccatgtatttgttagatgtatttaattgatgtctcatgttcccctaaactgtataaaaccaagctgcgccccaaccaccttgggcatgtgttctccagacctcttgagggctgtgtcatgggccatggtcattcatatttggctcagaataaatctcttcacatatattacagagttgaactgtttttgtcgacattagtattatatttttctactgcttacatattatatgtgtgtatttattatataccgtgttctgttggtatgtatcatttattttactacttattcattttaag

SEQ ID NO: 465180 - DNA, 453 bp, Homo sapiens
accatgccaggctaatttttgtatttttagtagagatggggtttcagcatgttggccaggctggtttcgaactcctgacctcaaatgatccacccacctcggcctctcaaagtgctgagattacaggcgtgagccacagcgcccggcggacyggccatgtatttgttagatgtatttaattgatgtctcatgttcccctaaactgtataaaaccaagctgcgccccaaccaccttgggcatgtgttctccagacctcttgagggctgtgtcatgggccatggtcattcatatttggctcagaataaatctcttcacatatattacagagttgaactgtttttgtcgacattagtattatatttttctactgcttacatattatatgtgtgtatttattatataccgtgttctgttggtatgtatcatttattttactacttattcattttaag

SEQ ID NO: 465181 - DNA, 456 bp, Homo sapiens
gtgtcacaaataagttcaagggatgrtactatgcccggatgtgcacataggccagatttatgcttttctccactcaaacatctcagtggagtaaagagtaacaaagcagcattgctgccaacatgtctcgcctcccaccacaggcagtttttctcctatctcagaatagaacaaatgtataatcaggttttatactgaggcattcagttcccaggggcaggcaggagacagaagccttcctcttatctcaactgcaagaggccttcctcttttactaatcctcctcagcacagacccttaatggatgtcaagctgggtggaaggtcaggtctttcccattcaatgaggtcatatttcagactatcacatggggagaaaccttggacaatacctggctttccagggcaggggtccctgaggtttttcacagtgtattgcacccctggttacttgaga

SEQ ID NO: 465182 - DNA, 456 bp, Homo sapiens
gtgtcacaaataagttcaagggatgatactatgccyggatgtgcacataggccagatttatgcttttctccactcaaacatctcagtggagtaaagagtaacaaagcagcattgctgccaacatgtctcgcctcccaccacaggcagtttttctcctatctcagaatagaacaaatgtataatcaggttttatactgaggcattcagttcccaggggcaggcaggagacagaagccttcctcttatctcaactgcaagaggccttcctcttttactaatcctcctcagcacagacccttaatggatgtcaagctgggtggaaggtcaggtctttcccattcaatgaggtcatatttcagactatcacatggggagaaaccttggacaatacctggctttccagggcaggggtccctgaggtttttcacagtgtattgcacccctggttacttgaga

SEQ ID NO: 465183 - DNA, 456 bp, Homo sapiens
gtgtcacaaataagttcaagggatgatactatgcccggatgtgcacataggccagatttatgcttttctccacycaaacatctcagtggagtaaagagtaacaaagcagcattgctgccaacatgtctcgcctcccaccacaggcagtttttctcctatctcagaatagaacaaatgtataatcaggttttatactgaggcattcagttcccaggggcaggcaggagacagaagccttcctcttatctcaactgcaagaggccttcctcttttactaatcctcctcagcacagacccttaatggatgtcaagctgggtggaaggtcaggtctttcccattcaatgaggtcatatttcagactatcacatggggagaaaccttggacaatacctggctttccagggcaggggtccctgaggtttttcacagtgtattgcacccctggttacttgaga

SEQ ID NO: 465184 - DNA, 456 bp, Homo sapiens
gtgtcacaaataagttcaagggatgatactatgcccggatgtgcacataggccagatttatgcttttctccactcaaacatctcagtggagtaaagagtaacaaagcagcattgctgccaacatgtctcgcctcccaccacaggcagtttttctcctatctcagaatagaacaaatgtataatcaggttttatactgaggcattcagttcccaggggcaggcaggagacagaagccttcctcttatctcaactgcaagaggccttcctcttttactaatcctcctcagcacagacccttaatggatgtcaagctgggtggaaggtcaggtctttcccatycaatgaggtcatatttcagactatcacatggggagaaaccttggacaatacctggctttccagggcaggggtccctgaggtttttcacagtgtattgcacccctggttacttgaga

SEQ ID NO: 465185 - DNA, 513 bp, Homo sapiens
ccagggctgctctgctcatctgaggatagtcagcacctggggtgtgggaatggagactctgttccttcagtgcagtcccaatcgaggctcagtccttcaccatcaccgaggtgattggatcaagtccatgaactctaagtctccctttcctcatctgtcaggtagaaaaccrcatctctgggccacaggagcccgatggagacacaggcataaatgacaaacccaggcaggatcctgcaacatcagctgggttggccaggttgcaggggaccctgacatgcctgtaccatcagcaaaccatctatcacttttaccattctttgctcctgctccctcaccctctattctatcatcatgtatttcccatacattaattacctgacctggagctcaaaacagggtgctgacagggaaacataggattttgcctgttcactaggcaggtgaggatagacctcatattttaaaatataggagtgggatgggcattctctttagtgccctcttcacctc

SEQ ID NO: 465186 - DNA, 552 bp, Homo sapiens
gaaggcccctctccctagtgacttgtctctgtttctgatctctgtagtctctgaaatgccacatggctggtctttttaaagatcctgccaacaaacagaatctagtaaggaggacacctggagcgtgctggctgccatgtctggtgctcccatgtgctgcttctgtgctgcataatcacctctaaaggtgagcgctgcccttctcaccaggctggggagaggctagggagcttgcctgagtggcygtgctggaatctgaacccacaactgtctgaccctagatctgtgtttgccgaacagggagacgcagggaccccaggagactctcataagtcctgtcggggcagaaaaacactgctgcagttgggccacagaggtttcaatgcaggcaccagatgcgtaactcagccctgatgtaccaggtgttaggctggttgggcttggggccagcacatgtagctaccctcaaggaacttccagcatgagaggcaacctcagagaagttttcaggaaactgcttttatggggtttagacccttgggagaggtggcc

SEQ ID NO: 465187 - DNA, 628 bp, Homo sapiens
ggggccagcacatgtagctaccctcaaggaacttccagcatgagaggcaacctcagagaagttttcaggaaactgcttttatggggtttagacccttgggagaggtggccccctaaacaaccttccagtcgctggtagaatgctgcttttgtgcagaaacatgccccaggcagatgctccgctctgtgacagcatctctgctgtttggccatgcacacatctgcccacccactctgccgctgacaacaggatatgacagatctatgctggagggaatgtgagaccgacaggtcccggaggagacgaggcactcacggtgggggctgctccgctcctcccgctggccccctagtgctgcagcttggggacttccatctgtggccggccgtgtcactcctttctaacccagcctggcaggtgcttttgctgaggggctgtaggatgagggtctgtgtgcaatgctgattcatttttgtggcakgagattgatgagatgtttgagggtgactggacgcactccctggctgccttcaggaaaggatcaagctggtgggaatgaattcaatcgctccgacttagcaaaaggtgtcttgaggcctttcccttcctttttgcatcactactggag

SEQ ID NO: 465188 - DNA, 544 bp, Homo sapiens
ttcaccgcctatcccaaaacctgtaagaactaatgataatccaccaccctttgctgactctctttttcagactcagcccacctgcacacaagtgaaataaacagccatgttgctcacacaaagcctgtttggtggtctcttcacatggacgcgcataaaatttggtgccatgactcggattggcggacctcccttgggagatcaatcccctgtcctcctgttctttgctccatgaaaaagatccacctatgacctcaggtcctcagacccaccagcccaaggaacatctcaccaattttaaatccrgtaagcggcctcttcttactctcttctccaacctctctcactatccctcaaccactttctcctttccactcttcaatctctcccttctcttaatttcaattgctttcattttctggcggagacaaaggagacacgttttatccatggacccaaaactccggcgccagtcacagactaggaaggcagccttcccttggtgtttaatcattgcagggacgcctctctgattatttaccca

SEQ ID NO: 465189 - DNA, 544 bp, Homo sapiens
ttcaccgcctatcccaaaacctgtaagaactaatgataatccaccaccctttgctgactctctttttcagactcagcccacctgcacacaagtgaaataaacagccatgttgctcacacaaagcctgtttggtggtctcttcacatggacgcgcataaaatttggtgccatgactcggattggcggacctcccttgggagatcaatcccctgtcctcctgttctttgctccatgaaaaagatccacctatgacctcaggtcctcagacccaccagcccaaggaacatctcaccaattttaaatccggtaagcggcctcttcttactctcttctccaacstctctcactatccctcaaccactttctcctttccactcttcaatctctcccttctcttaatttcaattgctttcattttctggcggagacaaaggagacacgttttatccatggacccaaaactccggcgccagtcacagactaggaaggcagccttcccttggtgtttaatcattgcagggacgcctctctgattatttaccca

SEQ ID NO: 465190 - DNA, 544 bp, Homo sapiens
ttcaccgcctatcccaaaacctgtaagaactaatgataatccaccaccctttgctgactctctttttcagactcagcccacctgcacacaagtgaaataaacagccatgttgctcacacaaagcctgtttggtggtctcttcacatggacgcgcataaaatttggtgccatgactcggattggcggacctcccttgggagatcaatcccctgtcctcctgttctttgctccatgaaaaagatccacctatgacctcaggtcctcagacccaccagcccaaggaacatctcaccaattttaaatccggtaagcggcctcttcttactctcttctccaacctctctcactatccctcaaccactttctcctttccactcttcaatctctcccttctcttaatttcaattgctttcattttctggcggagacaaaggagacacgttttatccatggacccaaaactccggygccagtcacagactaggaaggcagccttcccttggtgtttaatcattgcagggacgcctctctgattatttaccca

SEQ ID NO: 465191 - DNA, 544 bp, Homo sapiens
ttcaccgcctatcccaaaacctgtaagaactaatgataatccaccaccctttgctgactctctttttcagactcagcccacctgcacacaagtgaaataaacagccatgttgctcacacaaagcctgtttggtggtctcttcacatggacgcgcataaaatttggtgccatgactcggattggcggacctcccttgggagatcaatcccctgtcctcctgttctttgctccatgaaaaagatccacctatgacctcaggtcctcagacccaccagcccaaggaacatctcaccaattttaaatccggtaagcggcctcttcttactctcttctccaacctctctcactatccctcaaccactttctcctttccactcttcaatctctcccttctcttaatttcaattgctttcattttctggcggagacaaaggagacacgttttatccatggacccaaaactccggcgccrgtcacagactaggaaggcagccttcccttggtgtttaatcattgcagggacgcctctctgattatttaccca

SEQ ID NO: 465192 - DNA, 598 bp, Homo sapiens
aggcactgcccaggcacagtgtgtgtgtctctgggagcacacgtgtggaccagtctgcaccactcggcttgggctatggcctgtgcttttcagggcagtgggctgaaaggctctgagcgttcaggatgaccccttccttgactgatgctgatgctagaagggcccttcattttgctggactccagaaagggmatatcaccttcctgggaccacaaaatttagggcagagccaggaccagaggtaggctccctgcccacaggtatagcacacttgagactgcagagggctttcaggaggaggtggcatttgagcggagtcatgaaaaatacggaaaccttcccccaaacacttgacaccttaggaaatacctgttgaaagaatgaaatttaatccttttataagattaataaaggtcagtcgttagctggtattctctgtaagctgggaattttgagagcgagtgtgtaaagtcaggtcatccctgtggtgtgtactacgaggcaggtgtgattgagttttatggccttgattaccagctccttccagactaggatggctaaaagccccctctctccttaatgaaagtcattagctgca

SEQ ID NO: 465193 - DNA, 602 bp, Homo sapiens
gctcgtgggcggtgctgtggaagacagcaggcatatggtgtgtttggaagaccagaggtgccaggcctctctagctggggtaggggagcagatggagagactggagcagcagcaggaacccgtgtggtggggctgtgcctctgccccaggccactctgagggaaccagaccaggagctagagaatctgtccttcacaagctctgccactggggcactggatgatcctgggcactgaggcttttcaactataaaaggggcccccttactaggttactgtgagggtcgaagaaacttttggatgtgaaaatgttttgggttttcttttgagggcccttgcagctttaaagcttctaggacatttttcctttcagtcttmccctggggctcctatgatttggaaagaactgacaaactcaactaggcctttaaaatgactgtcagaccatcttatgagctagaggagtctggtggtatcaccattttactgaagaggaaactgaggcctgttgcacacttcctgtgtgtgcagtgcctagatccagtagctggagaggtggtttcatgtggctgaaaaccactggccccagtgctgggtggcctg

SEQ ID NO: 465194 - DNA, 585 bp, Homo sapiens
gcttcttggacagggttttctaggggtaatattttaattgagtatcactaactaaggtctagtcatctgcttaaatcatttagaaactcaataagatcagtgtgttatgagataatctgtatctcagggccgkgcttatgtgagcccacctcataagagttatacgagttatatttagtttctgtactccaggcactctgaacttttgccaggcatggcctcacctcacaacttttatactagatctttcctgtgtctgaaatgttctgtcttcagatctatgcttcatttagtataagctgaaacatcactgcctcagagaagccttccctgacgactttatgcagacaaacctctggcttgctttctccattatttttaaatcaatttacttttccacaaagcatttactgttacctgaaattatattttattttattttattttatttccaataattttcttttccccacaactatgtgagcaatttgaaaatcaattaatgcaatataccatattaacaaattcagaaagaaaaaccaaacaagcatttcaatagttatacaaaaaaaattgacaaaatcc

SEQ ID NO: 465195 - DNA, 585 bp, Homo sapiens
gcttcttggacagggttttctaggggtaatattttaattgagtatcactaactaaggtctagtcatctgcttaaatcatttagaaactcaataagatcagtgtgttatgagataatctgtatctcagggccgggcttatgtgagcccacctcataagagttatacgagttatatttagtttctgtactccaggcactctgaacttttgccaggcatggcctcacctcacaacttttatactagatctttcctgtgtctgaaatgttctgtcttcagatctatgcttcatttagtataagctgaaacatcactgcctcagagaagccttccctgacgactttatgcagacaaacctctggcttgctttctccattatttttaaatcaatttacttttccacaaagcatttactgttacctgaaattatattttattttattttattttatttmcaataattttcttttccccacaactatgtgagcaatttgaaaatcaattaatgcaatataccatattaacaaattcagaaagaaaaaccaaacaagcatttcaatagttatacaaaaaaaattgacaaaatcc

SEQ ID NO: 465196 - DNA, 401 bp, Homo sapiens
  misc_feature (1)...(401): n = A,T,C or G
taataccagttttaattctgacacaaaakcatgggagttctaatcaaaatccaacctttttatcataaaaactatgaagaaattatgagtagaacttaaaaaggaaaataggcctattaattagatttgtctttgtagcatttaactctataataaataacatattttatgcctatgagtaccccagcaaagcctccagcttctatttagatataaaatgtaaaagtcactactggatccacaagncagactatggtaaagaaatttctccacctaaccagcttcttttacatgatngtacatgtttcttttgttttttcattttggcaaatattgattgtcatcttcgtcatcttcgtgtttgtctatgtcctaagtgctgggatacagaatctgaaaag

SEQ ID NO: 465197 - DNA, 401 bp, Homo sapiens
  misc_feature (1)...(401): n = A,T,C or G
taataccagttttaattctgacacaaaagcatgggagttctaatcaaaatccaacctttttatcataaaaactatgaagaaattatgagtagaacttaaaaaggaaaataggcctattaattagatttgtctttgtagcatttaactctataataaataacatattttatgcctatgagtmccccagcaaagcctccagcttctatttagatataaaatgtaaaagtcactactggatccacaagncagactatggtaaagaaatttctccacctaaccagcttcttttacatgatngtacatgtttcttttgttttttcattttggcaaatattgattgtcatcttcgtcatcttcgtgtttgtctatgtcctaagtgctgggatacagaatctgaaaag

SEQ ID NO: 465198 - DNA, 627 bp, Homo sapiens
ttgatttcctttgtcatttctgacaagaagcagaggagttcccaaagttttgctctactgacagctgaggaggaaaacataaaaggcattaattaggaatataaatatggtctgtctctgagagtcttaatcataggtggaaagtagctctctgggattagaaagtgccagatacattttgtcctcaggtacatgtcaaagctcacaatgctttctcagaggcatartgttcttcctttcattcagcttatcttttagtagtttatcctttttattacaacaaggaatcaaaatttcatgacttaaactttcaggcttgctccgtctgttaaatctttaatatcttttaattatttgcataattaaacaggaaggaaaagagtgagtaaatttacatttgttgagcaactattgttccatgttgacaaaatactaagcatttaaattaatggagaaagttcctgaggagaggatcagaaaattaattataactcaaccccatacaaattcctagaagacagaataaaacacaattgacagagaaaaatatacaagacaatgaaaattacacaaaacaatatactgtttcttcaagatatttaataataatgtaaataataattgtct

SEQ ID NO: 465199 - DNA, 607 bp, Homo sapiens
aggatctccctatatcaacaaaggagccaaggaccaaccattcaaatgggccctgctgccaagccttttttttttttttacaatgccatctcttcatattgttccatttaacaaaactgcagcccttcatctatcyttaagtcccttggccaatggtacagagccagagtatgctacccccagcaggaaatcaacaggatgacctactaaacaccattcagaagatgctaagacccatgaattgcaacaggaaagaaaagacagagaattagtcagacaggtacatgctgtgccaaaaatgcactacagcccccacccaattctgcctaatcctagctgggctgacaccaacctgatgagacaggcctataagatctcaaactaaaacagaaactcctgaactgggttctttcgagcccaggaagcagcagtaaatcattaaagaacagataagttcttaaggtgagggagaatttcagataaatggaatgctggtagaacacaggcccaaagagcaaaattaacctaagcccaggtagaaccttgtttactagagtattaggcatgggtttgggcaactattctaaccagagaaactggcttcagt

SEQ ID NO: 465200 - DNA, 585 bp, Homo sapiens
atatagtcctctttcaataaacacttcacctttgtgaattctgattaaagtagaatctgtggacactgttaaccacaaattattactgactcagttgtggagtgttgtagtaggtttgcactaacattaagtgcagaaagtctctakgcacagatgactgagtcatccctcctcccttaattaggcctttacatgtgcttttctggcctatctacctctctggcctgtctacctctctgttcaaagtagagaggacattactcacatatgatgtttagcttttatctgacagaatcaaaagagccaagtaattctaacaaacacagagaccactatgtttgcattatgtttaaccattgtttgagtctatataaagagagttttctttgttagatgtaatttgagtttatatgctacactcttctgttcttatctatgattcatgtaactacagatggtcagtctgtggatcctttggagatacaggatctaagtgttactgagtactataagcttaatactgatgactgaggccttcctggttttgttaaagaataattttgggagacatatcaagggacagtt

SEQ ID NO: 465201 - DNA, 568 bp, Homo sapiens
tgtcttttttcctttcccttgccttgatttcccatccaatctggtgccccagactctcctttctaccactgattcagccccagttagtgcttacagaagcaggttttgtaatcattccactggaatacagtgataaacatccaactagtatttacatttcagtctctcacaactttaatgtattttacaactttcttccagattaggaatcctgaaacacaatctgttcacrtcactgtcctgtaacaatatcaaaccaaataaaagcaccaagagtgaacagctactgaaaacagaattaacacaaacttaaaccatacaactttatgatttggctcaaatcttatttcccagaaataattcccattaccactcacagagtttacgttccaaaaaaactgtctccatgaagttccctattgatgtaatttgatgtgattggcatttctgttgtttctgagaaagtttcagaaatggcttttcaactatatcttctcaaatctctgtaaaccaactcatacccatctctcaaggttaggctcaaatattaccacattcccaaagccca

SEQ ID NO: 465202 - DNA, 622 bp, Homo sapiens
aatttgatgtgattggcatttctgttgtttctgagaaagtttcagaaatggcttttcaactatatcttctcaaatctctgtaaaccaactcatacccatctctcaaggttaggctcaaatattaccacattcccaaagcccattataacactcacatctgaaaatactttcttcatttaatatttcgtagcatactcatatctctagatttctcttttggcatttagtgattgataggtagataaagacagaaaaatttatacatttttcatactaaatctgagtattattcttttcctaattatatattaccttaaaatattaattgctcataaatgtttgatgagtaaataatcacagacaatttatcatgaackcataccatattatgatcctgaataataaggaatagaactaggaaataaacgtcagaaggggtatattagaattcttggaagtgacatttgcaaaagcatattttaaattccattgttttattttgtggacataccattcaactaattttggaatttcaactaactctaaatgagttttgatatttttatccaaataatttatagcttaaaaaattgaggattgctgctttcatttgctggtaatg

SEQ ID NO: 465203 - DNA, 568 bp, Homo sapiens
actgcagctgctccctcactgcttggcttcaccatcactgcatgttgggaaagataatggctctaaaaataacctttggctggtgttatagctctttggtattagcagttctttagtgttatarctagtctgttacagctctggatgtcaatcactgattgctgtctcactgtcttttgctgtcatgccaattgctgtcttaccatgtcactacctctctttgctgtcttgccatcgttttcactgtctcactaccacactgtctcactgtgtctcaccatcttctcaagccccacattgggtgccagataatgcaggagaggtaagctccaaattgggcccagaagggttcttggcttcattcaagaaaaaaatttaagagtaagctggtggtggaagaaagcaggcgtattaaagtggcattgtacagcagagtggctgctcctagcagagcagggctaacccataatcagtgcacctggagtagcagcatatgggctattggctagctgtatttatacctacttttaattacatacaaattaagaggaaagttactcagaaattc

SEQ ID NO: 465204 - DNA, 586 bp, Homo sapiens
aatgtaatccaattcaactctttcattacattcctaataggtatgaagttaagtttcctattcctggtctcagctcctcatattttatgaaagaggaaaggggaatgggcaaaaaagaaggagaaggcatattgatgatggtaaaaccaccaccaattggccaattatcactctacgttaataggatgtgatttcagattaataattttgctagtatatatattattaatttcattataaccatgtacaagcctttaagcttatcaactaaaattaataaatttataaataatgaaaatgaacagacttacattctactttccttccattacatcagaataagaaggtraggctactgcaagtaatggggtgcttgaaatcagcaggcattttttgttgtatgtgaccttgaagaagtcatttatatttatggtgcctaatttctacatctttaaatcaagcaagagtgcaattaagtaatcataattttatttcaaacttactatgtaccaggcagtgtaccaagttctttaactacagtacataattaaaacttatcacgattatacaaatggtatcaccccca

SEQ ID NO: 465205 - DNA, 564 bp, Homo sapiens
atttatggtgcctaatttctacatctttaaatcaagcaagagtgcaattaagtaatcataattttatttcaaacttactatgtaccaggcagtgtaccaagttctttaactacagtacataattaaaacttatcacgattatacaaatggtatcacccccattttacagatgaagatattagtatgagaaacaataaggagtaaatttaycaagataaaaaactgagtctatggcaaagctaggattcgtgccgaggagtgtctaactcagagtgcaagctcccaaggctacgctaccttttcacagacttacccaggatccctttcagctacaacacctttaaaatttacattaaaaagggatgggaaacagagcttaattttgttatgtcacttggagtcaagtaatttttgtatccaatataagtttctcgttctcttcctcaacatgttttaagttctatttgtagattcctgtcctcccttgctcccaaatattcaaaactggttttaatctttgtgcatgtgtttcagcttcattcttttggctatctctcctgaaat

SEQ ID NO: 465206 - DNA, 446 bp, Homo sapiens
atacagtaaacctatatatactataataaaactttattcaatccaaactgcatttttatcattgttttttctgttttcttgtctactgcattcattacrtagaatatcccaaagcatgcaatattgggtggcagtttattgaaaatgattttaatatattttgttcagaagaattcctatctttttattagactagccaatgatgattaatatttagaactgaatgcttacagctagacaaaaatatgaaaagaaaaaatattgaaagagaatcaaactcaatgcatttctggaagaatatggttgctctacctgacgttagtgaaattttatctcctttagtagtacatacttcagaaatgctgtagaacaaacatgaatgaatgaaacacgtacgcaaccctcatctgatgtgttaaaaaataagtcccaacaaggaagtttta

SEQ ID NO: 465207 - DNA, 427 bp, Homo sapiens
tcaccatgtacgtatcttgaaggatatggcccattttctcaactgcaattatttcctgagataagattatgggtctaaagagtgaaggacatttttcacttatttaaaagtatttatyatttttataatttaataaaagattaaacagatcattgaattagtaaaagacaaagtaactctataaataaatggaaaagacacagataccccaggcatggtggctcatgcttataataccagtactttgggagggggtggcggggggattgcttgaggccaggagttccagaccagcctaagaaacaaagcaagacctcctctctagtaaaaataaaaaaataaaaataattggccaggcatagtggcatgtgcctatagtcccaactactgaggtggaaggatcacctgagcctaggaggtcaaggct

SEQ ID NO: 465208 - DNA, 611 bp, Homo sapiens
aaaaacaaaaagctaagttgatctttatcaaaatttcaaactgtttctataggcaccagtacataaacaataaggcaagtcatagaatgagagaaaatatttgcaaatgcatctatctgatataggatttatatccaaaatgtataagcaaactttacaactcagaattaaracaagtggtcaaatgaaaaataggcaatagatccaaacagacatcttaaaggaatagatatatgaatatacacgaagcacattttaaaaaatattgaacatcattagacaatccaaatgaagtagaatggctaaaattaaaaagactgacaaaactagtgctagtaagaatgtggggcaattagaattcttttatagtgctggttggttgtaaatctgtctgttccctaaaaaagttaaacaatataaatactatttgatctatccatttcccttttaggtatttttccaagaggaatgaaaacatatgtccacataaaatctatacataagtgtacatagtatctttatttactataccccaaaattggaaacaacccaaatctctataaataaatgaatgtataaacacaatttcgtatatccatataatggaattc

SEQ ID NO: 465209 - DNA, 511 bp, Homo sapiens
atgtccctgtaaattgggagaaggctggggaggcttgaagctgaaggttccttcagctctgggattcaatgaaatgagggagtggggtgtttctaagcaatgcagagaaagggggccccccacagaaaggtaaatggaaaacaggacacagccctgcttctgtttgtagtcctgagcatctaactctgtccccgccccaacactggggacccccattacccaggcctaagtgggagctccttaatcttcttccgcttcccaccccaatccttgaaccgggccccaccccagccaagaggcaggcaggtggcrggagctgcaagaccgagaccggtgtcttggccgggagcccggcagggcgtgggcaccgagcggcccacagccggcggagcggggcgggtggagcaagcggcgggctctgggcttcaggctccgcgcccaggggcgggcagcctgctccgcaccagcggcgtcggccggaagatgagcgggatctggctgcatcctgagg

SEQ ID NO: 465210 - DNA, 511 bp, Homo sapiens
atgtccctgtaaattgggagaaggctggggaggcttgaagctgaaggttccttcagctctgggattcaatgaaatgagggagtggggtgtttctaagcaatgcagagaaagggggccccccacagaaaggtaaatggaaaacaggacacagccctgcttctgtttgtagtcctgagcatctaactctgtccccgccccaacactggggacccccattacccaggcctaagtgggagctccttaatcttcttccgcttcccaccccaatccttgaaccgggccccaccccagccaagaggcaggcaggtggcgggagctgcaagaccgagaccggygtcttggccgggagcccggcagggcgtgggcaccgagcggcccacagccggcggagcggggcgggtggagcaagcggcgggctctgggcttcaggctccgcgcccaggggcgggcagcctgctccgcaccagcggcgtcggccggaagatgagcgggatctggctgcatcctgagg

SEQ ID NO: 465211 - DNA, 511 bp, Homo sapiens
atgtccctgtaaattgggagaaggctggggaggcttgaagctgaaggttccttcagctctgggattcaatgaaatgagggagtggggtgtttctaagcaatgcagagaaagggggccccccacagaaaggtaaatggaaaacaggacacagccctgcttctgtttgtagtcctgagcatctaactctgtccccgccccaacactggggacccccattacccaggcctaagtgggagctccttaatcttcttccgcttcccaccccaatccttgaaccgggccccaccccagccaagaggcaggcaggtggcgggagctgcaagaccgagaccggtgtcttggcygggagcccggcagggcgtgggcaccgagcggcccacagccggcggagcggggcgggtggagcaagcggcgggctctgggcttcaggctccgcgcccaggggcgggcagcctgctccgcaccagcggcgtcggccggaagatgagcgggatctggctgcatcctgagg

SEQ ID NO: 465212 - DNA, 590 bp, Homo sapiens
cccttccctcagagccaggtatctcatatcactgcgggctggaggtgagctggaagggacagggagggggcattggtgttgtctgggcactcttagccaagttctgatcacctccttctcctctagcacccctcagttaccccagaattccaggtccctatggctatgggcaaatgggctgagcacccccaggctaatgcctccaaaatctcccctytcgctatcttgaccaagttatgtaacacatgtgctaatatctttctttaaactaactcactctttttttcttttttgaactttgtcataagcatcagtattagagaaatactgagttttaagggctagctttattcaccacataaaacatacccagtgctaaaattaggaaagatgggagtaaacccaaatgaactggttgtcctacctggggaagccaaatggaaatgagaggactcggcagggtggtggagtcctggtcatccactctcacctaccccagaagaagcttcttatgaagtccagacccagccacgggcaaaatgatctgtgcaaatggtttgggagccccagtggatgcagaatcttctatc

SEQ ID NO: 465213 - DNA, 590 bp, Homo sapiens
cccttccctcagagccaggtatctcatatcactgcgggctggaggtgagctggaagggacagggagggggcattggtgttgtctgggcactcttagccaagttctgatcacctccttctcctctagcacccctcagttaccccagaattccaggtccctatggctatgggcaaatgggctgagcacccccaggctaatgcctccaaaatctcccctttcgctatcttgaccaagttatgtaacacatgtgctaatatctttctttaaactaactcactctttttttcttttttgaactttgtcataagcatcagtattagagaaatactgagttttaagggctagcyttattcaccacataaaacatacccagtgctaaaattaggaaagatgggagtaaacccaaatgaactggttgtcctacctggggaagccaaatggaaatgagaggactcggcagggtggtggagtcctggtcatccactctcacctaccccagaagaagcttcttatgaagtccagacccagccacgggcaaaatgatctgtgcaaatggtttgggagccccagtggatgcagaatcttctatc

SEQ ID NO: 465214 - DNA, 598 bp, Homo sapiens
gtgcacgcgctgtgtgccaggcacacagtagggaccattctcacagactctctgcttcccaaagacactgagccaccatgctaccccaagggtgggaaactgacagcctttctttggcaggcaggacsactgctaggaggtccgtgtcttctccactgctccccacactgctagcatctgatgaggccccaaggcagaggccaatacgaatgaccatcatgcccaagaacaaaaagtgagagcacatttcggcaagcaggattctagtcaggaaccaagaaggattttcctaagcaaacatttgttctgaggggcatgctctcacttgctcttgtcactgtcctcccttcctgggctcagtcagggagaggggacatgagggggcaggtagtcaaagtggacagtgactgacctaaaaacataatgtcactggtgctttttgcatttcagtttggatgtatgtctgggcagagcaggtgctcacaaagtttgttggattcgaatatctagactttccttatcctcccctagaccatgaggaacctgaaggctgggatcctggcatctaacccagtgctttcaacatagtatgtattca

SEQ ID NO: 465215 - DNA, 530 bp, Homo sapiens
tgagggctctgctcccacagcaggcttctgcctggaaatccaggcttttccatacatcctctgaatcttaggtggaagctctcaagcctcaactcttgcattctgtgcactggaaggcctaacaccatgtagaagccaccaagtcttacagcttgtactctctgaagcagcaacctaaactgtacctgggaccctttgagccaaggctgaagctggagtggctgggatgcagggaccagtgtcctaaggctgtgcagggaatcrgggccctgggcttggcccatgaaaccattcttccctcctaggcctcagggcctgtgatgggaggggctgccacaaaggtctctgaaatcccttcaaggccttttccccattgttttggttattagcacatggctcctttttacttatgcaaatttctgcagcctgcttgaattgctcccctgaaaacgggcttttcttttctaccacatgggaagttgcaaatttttccaaactttcactttctgcttcccttttaaatataagtt

SEQ ID NO: 465216 - DNA, 530 bp, Homo sapiens
tgagggctctgctcccacagcaggcttctgcctggaaatccaggcttttccatacatcctctgaatcttaggtggaagctctcaagcctcaactcttgcattctgtgcactggaaggcctaacaccatgtagaagccaccaagtcttacagcttgtactctctgaagcagcaacctaaactgtacctgggaccctttgagccaaggctgaagctggagtggctgggatgcagggaccagtgtcctaaggctgtgcagggaatcagggccctgggcttggcccatgaaaccattcttccctcctaggcctcagggcctgtgatgggaggggctgccacaaaggtctctgaaatcccttcaaggccttttccccattgttttggttattagcacatggctcctttttacttatgcaaatttctgcagcctgcttgaattsctcccctgaaaacgggcttttcttttctaccacatgggaagttgcaaatttttccaaactttcactttctgcttcccttttaaatataagtt

SEQ ID NO: 465217 - DNA, 530 bp, Homo sapiens
aaacatggtactattggtgatctttctttccctaagaaccattcttgaagctcaaaataggaaagtttaggacaaacagcaaagagttttcrcattttcctctattcgagaatttgaggggtagagtacttttgtgagggctttgtaattatccccagcttaaaattacagcttctgactctttgcttatgagtttcctgaggggaaattcttgacctctctgctttgcaccttctctgaagaagatagcaagaaaactgtggttactgaccttccttcccacatttataagggcttcagagtgtagggaggtctctgagcagcaaagcatccttaacgtgcttctagaggggctcccagggtctgtgggtgctcccgatctttgcccacagcagtgaccaacatgaaggactttccacagtttgtgtctcctatgagtgatagttctcaccagggtgctatgcagggccagcttccagttggagagccccctgtgatttttctcttgagttccttacagttttttctct

SEQ ID NO: 465218 - DNA, 530 bp, Homo sapiens
aaacatggtactattggtgatctttctttccctaagaaccattcttgaagctcaaaataggaaagtttaggacaaacagcaaagagttttcacattttcctctattcgagaatttgaggggtagagtacttttgtgagggctttgtaattakccccagcttaaaattacagcttctgactctttgcttatgagtttcctgaggggaaattcttgacctctctgctttgcaccttctctgaagaagatagcaagaaaactgtggttactgaccttccttcccacatttataagggcttcagagtgtagggaggtctctgagcagcaaagcatccttaacgtgcttctagaggggctcccagggtctgtgggtgctcccgatctttgcccacagcagtgaccaacatgaaggactttccacagtttgtgtctcctatgagtgatagttctcaccagggtgctatgcagggccagcttccagttggagagccccctgtgatttttctcttgagttccttacagttttttctct

SEQ ID NO: 465219 - DNA, 611 bp, Homo sapiens
agcccctacatgtgactatctggaatctgcaggaatggatgccctgggaacaagcctctaaagcttgagagcataggcgtactcatgctcttgggggctaacgatggtctttgggagatattagtacctgaagccatggaataaacttgatggtgcttgtcttgttgattttactcaaagatttggtagagrgaattattttttattttaatgcaaacatggagtgtgtgtgtgtgtgtgtgtgtgtgtgtgtgtgataaaaaatagctgcaacgattttaaagataaaacaaggaacttctaaaaattatatgcctgcctctgcctgcttcaagctctgacctcagaacttaagaggtattccttcactctcctttgccactagggaataattcagaagaaatatgtaaacactgcttccttaagaacataatttgcttttccccactataccagcgctctgttgtaccttccagcacccaccctaccccaaaattaataggtggtgagtcattgctgagttgttttaactttggggaccagcaggcttggtgtcttttccaggatgaatgggggagagggaaatgagataagggagggaagtctgcctc

SEQ ID NO: 465220 - DNA, 611 bp, Homo sapiens
agcccctacatgtgactatctggaatctgcaggaatggatgccctgggaacaagcctctaaagcttgagagcataggcgtactcatgctcttgggggctaacgatggtctttgggagatattagtacctgaagccatggaataaacttgatggtgcttgtcttgttgattttactcaaagatttggtagagggaattattttttattttaatgcaaacatggagtgtgtgtgtgtgtgtgtgtgtgtgtgtgtgtgataaaaaatagctgcaacgattttaaagataaaacaaggaacttctaaaaattatatgcctgcctctgcctgcttcaagctctgacctcagaacttaagaggtattccttcactctcctttgccactagggaataattcagaagaaatatgtaaacactgcttccttaagaacataatttgcttttccccactataccagcgctctgttgtaccttccagcayccaccctaccccaaaattaataggtggtgagtcattgctgagttgttttaactttggggaccagcaggcttggtgtcttttccaggatgaatgggggagagggaaatgagataagggagggaagtctgcctc

SEQ ID NO: 465221 - DNA, 607 bp, Homo sapiens
ttagtaggctcacttatcttgcaaatggaaattttcttttcttttctaagagacagggtctctctgtcacccaggctkgagtgcagtggttcactgcagcctcaacctcctaggctccagcaatctttgtgcctcagcctcctgagtcgctgggaccacaggtgtgtgccaccatggccagctaattttttattttattttaatttttttgtatagatggcgttgccatctcctcaaaatagggttgccatctctataagatggggttgatgaaaatgccaaaagcaattgcaacaaaagctaaaattgataaatgggatctaattaaactaaagagcttctgcacagcaaaagaaactatcagcagagtgaacaggcaacctgcagaatgggagaacatttttgcaatctacccatttaacaaaggtctgataaccagaatctacagggaatttaaacaaattttcaagaaaataacaaacaaccccatcaaaaagtgggcaaaggatatgaacagatacttctcaaaagaagacatctatgtggtcaacagattattaaaaagtcaggaaacaacagatgctggtgagggtgtggagaaatagga

SEQ ID NO: 465222 - DNA, 607 bp, Homo sapiens
ttagtaggctcacttatcttgcaaatggaaattttcttttcttttctaagagacagggtctctctgtcacccaggctggagtgcagtggttcactgcagcctcaacctcctaggctccagcaatctttgtgcctcagcctcctgagtcgctgggaccacaggtgtgtgccaccatggccagctaattttttattttattttwatttttttgtatagatggcgttgccatctcctcaaaatagggttgccatctctataagatggggttgatgaaaatgccaaaagcaattgcaacaaaagctaaaattgataaatgggatctaattaaactaaagagcttctgcacagcaaaagaaactatcagcagagtgaacaggcaacctgcagaatgggagaacatttttgcaatctacccatttaacaaaggtctgataaccagaatctacagggaatttaaacaaattttcaagaaaataacaaacaaccccatcaaaaagtgggcaaaggatatgaacagatacttctcaaaagaagacatctatgtggtcaacagattattaaaaagtcaggaaacaacagatgctggtgagggtgtggagaaatagga

SEQ ID NO: 465223 - DNA, 648 bp, Homo sapiens
tttcactgccccaaaaatcttctgtgctctgcctatttatccctctttccccacaacccctggcagctactgatcttcttactgtatccacaggtttgccttttccaaaatgtcatagttggaatcatacattatgtagcagtttcagattgacttctttcacttagcaataygcattttaagtttcctttgggtctttccatggaagaactgctttttgtttggttggttgctagaataggaagcttgtaagcacagggctggaagtagcagcttttaaaattatgaaatttctctctcaactttctcctctcttaactgcaagctctaaagcagaatggagacaccatgagaaaacagatgaaagctggtggcttcctggtacttgtaagggcaaaaccacagagatggatgttatattatgcggtatgtatttataaatgggtcatgtgagtcacccaaaattatcccatctcagggaacattattacaattactagttcttcgaattattcattattaaaattggaatgtgtcagagttcaggtagaggaaaagagcgcttgaattctaaaacagcaaagaaaagatatacattctattgactggttaataacattttagtttatgctatggtttgaatgtgtc

SEQ ID NO: 465224 - DNA, 591 bp, Homo sapiens
aatcatacattatgtagcagtttcagattgacttctttcacttagcaatatgcattttaagtttcctttgggtctttccatggaagaactgctttttgtttggttggttgctagaataggaagcttgtaagcacagggctggaagtagcagcttttaaaattatgaaatttctctctcaactttctcctctcttaactgcaagctctaaagcagaatggagacaccatgagaaaacagatgaaagctggtggcttcctggtacttgtaagggcaaaaccacagagatggatgttatattatgcggtatgtatttataaatgggtcatgtgagtcacccaaaattatcccatctcagggaacattattacaattactagttcttcgaattattcattattaaaattggaatgtgtcagagttcaggtagaggaaaagagcgcttgaattctaaaasagcaaagaaaagatatacattctattgactggttaataacattttagtttatgctatggtttgaatgtgtccctcagaaaacatgtgttggaaacttaatccccagtgcaacattattgggaggtggggcctaatg

SEQ ID NO: 465225 - DNA, 607 bp, Homo sapiens
tatgctatggtttgaatgtgtccctcagaaaacatgtgttggaaacttaatccccagtgcaacattattgggaggtggggcctaatgggaagttttgggttcataagggttccactctcatgaatggattaatatagatcatacaagggcttaaggctgagagtttgatttcttgctctctcttgccctctctttgcccttccaccatgggatgacaccacaagaagaccctctcccaatgctggcccctcagtcttggactttccagcagctagaaccatkagacaataaatttgtttataataaaatacccagcctcaggtattctgtcatagtagcacaaaacaaactaagaaagtgtacatacatgctgatggctcaagtgccagtcaatgggtgccatctgagaatctagcaatggctaggctttgtgcaatgcatttgggcatggggatgcctaagacacacactctgaacattgcagtatatgatctccaagaagagggtgatgcttgcaataattactacaaagttagacattatgtactgtggccaaggatatagatgatgagtatcatacgaactcagacaaggaagggaaatcttt

SEQ ID NO: 465226 - DNA, 587 bp, Homo sapiens
tagtagcacaaaacaaactaagaaagtgtacatacatgctgatggctcaagtgccagtcaatgggtgccatctgagaatctagcaatggctaggctttgtgcaatgcatttgggcatggggatgcctaagacacacactctgaacattgcagtatatgatctccaagaagagggtgatgcttgcaataattactacaaagttagacattatgtactgtggccaaggatatagatgatgagtatcatacgaactcagacaaggaagggaaatctttctggctgagtgacatgtgatgtggtatccctccacgaatggcagaaagtccttcataaacaatggcacagtaacagcacagcataaggtaaatggaggtgacrgtgagaatcaggtaccttatttgtttattgattaattggtacagaattctcaatactgtgatccatgggccaaacatagtttttattatttgtccgtgataagttttttggagaaaggagagttgttttggtttatttatttttatgttgctgaagtagtattttaatgagtttgaatatctttaggcagaatatgtgctctctaattt

SEQ ID NO: 465227 - DNA, 545 bp, Homo sapiens
ggaaggctagcaaatgtttacagaaaataatgcaactcaaacatgtctaaaacatgaagtatatgaagagaagtagaaatgctaggtgggatctagactgaaagactcaaatgccaacctgaagtgtgggcaatggagacaactggccattctcctatgtggaatgacatactatacgatatagagtagcacaaactgatttaatgacattaagtaatggtcatattctcccttcagttttttcatctgtaaaatgaacaaagagtagaaatggcttctgaagaagggtcagatatgtagttttgtagaaattttaatctggtgtcagtacataaagaagcttaaatggaagaggcaaagagggacatctgaagaattagtaagccactacaggtgttgtcaaayaaagataaaaaatgaggtgataacaatgaaaataaaaaggaagtgaagacagtgataggacagccagatataataatttcaacatggaggacaaggaagagggggaagtcccaagatagtgacaggaagaatggatggag

SEQ ID NO: 465228 - DNA, 572 bp, Homo sapiens
acctttttcctttttcttattttattgtgatgaataagcctcccagtacattgttgatttaaagctgtggttctgagtatccatgtcttagtcctgattttaaaagagtttgtaatgttttactattaaaaataatatgttatatgtttttggtggataatctttattaggttaaagaagyactcatctcctagtttgctaataattttttgtttactcctttgttttgctttcttgtttttcttttgtaaatcattaatgagtgttccattttattcaataattttcatgagtcaattgagagactgatgtagtttttctccttaaacctttagtatactaaattccacttttagatttttctaacattaacatcttacattctagaaataaaccaccctcaatcataacgcattcccttttgtatacactgctgggttcagtttgttatctcattcaaccttcacattatgaggtaggtgctttacaatctttttttacagcttgttatttagtaatgatatgaccatgaataaaggtaaaacttggcctcaggtctgtctgactttaaa

SEQ ID NO: 465229 - DNA, 517 bp, Homo sapiens
aaacactggtggaaagaggaatggaaacgtgaaaggacggttggaaagaggggaggccatctctcactatgcaatctagactgggaaatacttctcaccactgttggccactagagtaggccctaggctctcaaaatgtggagacacactacctcacctcagatacacatagggagtttctttggtactggaatcagcaataggagccacgcaattaagataaataactgcrtttaccttaaaacatcataacctactcagcaataaaaaggaatgaactgctgatacacacaccaacatggaggaatctgagaatcactgctcagtgaaagaagtcagatacacgaaagaaatgcatattgtatgctgtatttgcatacaatgcaaatagacaaaaagcatatcactgtttttctggggtcagaggaggaaggagagaaggactacaaaggcatgaggaatctttggtgaaggtgatagacatgttccatatcatgatggtggtttcactaatgct

SEQ ID NO: 465230 - DNA, 517 bp, Homo sapiens
aaacactggtggaaagaggaatggaaacgtgaaaggacggttggaaagaggggaggccatctctcactatgcaatctagactgggaaatacttctcaccactgttggccactagagtaggccctaggctctcaaaatgtggagacacactacctcacctcagatacacatagggagtttctttggtactggaatcagcaataggagccacgcaattaagataaataactgcatttaccttaaaacatcataacctactcagcaataaaaaggaatgaactgytgatacacacaccaacatggaggaatctgagaatcactgctcagtgaaagaagtcagatacacgaaagaaatgcatattgtatgctgtatttgcatacaatgcaaatagacaaaaagcatatcactgtttttctggggtcagaggaggaaggagagaaggactacaaaggcatgaggaatctttggtgaaggtgatagacatgttccatatcatgatggtggtttcactaatgct

SEQ ID NO: 465231 - DNA, 558 bp, Homo sapiens
atttttctgtatctctcataacactgaacacagggctgcacaataagtagattcctcataaatattaattaaccaactggttaaaatgcccaaccactargtagaacttcaggatgaaaggaagtcactaacactagattagaataacttccttttcttctttggggaaggagctttcactagaatgtgagctgtcactagagtgaagatcttgtgctgggactttctcacactcacttaccctgttggtcaacaggtaagtctagatcacccatcctatgcagcctgggtcaaaggagaccaagtcttttccttcctagagctctaattctactgggagtaacagacatgccacagataagaattaacatgctgaatgatgccaaactattatgaagaaaaataaagcaggataaggggtgcctgttgtaagttgagaagaagttagattttacataggatggttggggaaggcatttccaaaaagatgtgatttcagcagaaacctggagtgagaacttgaaccaagtggataatcatatcccaaacagtgcaaga

SEQ ID NO: 465232 - DNA, 558 bp, Homo sapiens
atttttctgtatctctcataacactgaacacagggctgcacaataagtagattcctcataaatattaattaaccaactggttaaaatgcccaaccactaggtagaacttcaggatgaaaggaagtcactaacactagattagaataacttccttttcttctttggggaaggagctttcactagaatgtgagctgtcactagagtgaagatcttgtgctgggactttctcacactcacttaccctgttggtcaacaggtaagtctagatcacccatcctatgcagcctgggtcaaaggagaccaagtcttttccttcctagagctctaattctacygggagtaacagacatgccacagataagaattaacatgctgaatgatgccaaactattatgaagaaaaataaagcaggataaggggtgcctgttgtaagttgagaagaagttagattttacataggatggttggggaaggcatttccaaaaagatgtgatttcagcagaaacctggagtgagaacttgaaccaagtggataatcatatcccaaacagtgcaaga

SEQ ID NO: 465233 - DNA, 583 bp, Homo sapiens
tccctttctatgcttacccatctgtttttttcccastttgctcgtctctgtactttgttccataggactttacctttaattaactattaacattccctctgagatgggagtggctgacaagaactgaaggagttaccccttccagcaaacatgtttttctgctcagaagaggcctgtagatgggtatttcataacaatggaagttgaggcattgtgattagtagtaatgaagatatcctggggcagatgatccagcttggaggcctggcatctgtctctttccatgccactagctcactatgtgactttggataactcccatatcatctgtgggactcagccaatggtcgctttgaaattggtggaataagccctattcctcttctttttcccagttggctggcaaaggatccatgagactatgcaaagcactcaccagtgttcccatgttttgagatttgcacgcctttgatattttgacgggaaaagagcatcaccacaaaacaagccgctagaggattaaaggagatttatcacccagaagggttctagggtaagcacaaattctactcaaacttttatt

SEQ ID NO: 465234 - DNA, 504 bp, Homo sapiens
ctcataaaacaggactttccaaataattaaaggcacataagtagcaccactccctccattcagggtccacaaaagcaacacagagtttacaaagctacttaaaaaatcacctaggccaaataccttaatttctgtctagtaatcaattgtttatacatacaagaatactaactttgttgagtcagccactacactagatgcagtatatccatcatctctcatctcacaataatctccttggtaaatattttatctctattttactagaattgaggcatatagaagtcccttgcccaaagtcatacaattgctaagtggtacagctggaatctgaacccagaactccagtgcttgtgtttataccattaaaactcaggaaaaagagagacasacccaagggaaggagaattttggctacatacctcatacaattcaataatgatgttccccattagacctctgctgctcttgatgttctccatggccagagtgaagtaaatccca

SEQ ID NO: 465235 - DNA, 613 bp, Homo sapiens
cttttttgactccacaacctggtggaatcacacctctaatacaagttagactgtgataattaccctaatagagtcacttgtatcattccagtaattatgaatctcatgcaccagtcctaacatcatcaaacaaaatacactccataaaagtgtgctaatttagctgaattgaatgtgaaaacttactgtttttctcagttgcattactcaagggcacttggagtccagaaaagttgtagtctctttgctaactggccrtatggtacataatcacagtttctgtgagaatttccagtaaagaaggttaaattctaatgacccctagagaccaattaaattgagctttatctccaaaccacagaatgtatctccaggtgcaaaacagcattaccctctaaaaatcttcagtatggtcatggtctagataacatcaggttccaatttattcacttggtattacatgttttctagaatctgaaattcagctatttatccagccctcattcttgtccctgacaagcatttattccacacaattagcctggctagcttactttctcacaaatcagcaccatccattcagtccttggctcattccattcctacgtttgga

SEQ ID NO: 465236 - DNA, 574 bp, Homo sapiens
ggtgttaggggctttggttgatatcatttcccatggctttcaaggattcatctactttcattttttattgttatacctaaaatttaagagttagtgccaacagagacagacacccttgctaaaggaagctcacacatgcaatgaagacagagcctatcttgtcattagatattcatttatgtttttaaattctgtagtatggtggtttacacagttttctttaaaatcttcagagtcatgaggattgccagaaatgtggcatggaggtataaccaatgagtggggctctagacctgcaatcctgtttcaatcagagcagaaaatatttgcatctgttgtatacagtggaattctgtgtaatattttaggagcaaaaggtaagggaggttctgctgccaatgaaattatgttgaagatcactgatatagagaaaaggatactcaacctggaatttaatgttctgggtcaaaatacaagcactgctgtgagtaagctgcatgatgctgaatgtgtcagtytctctgaacttcaattttctcacctagtgaagaggttggatttctttggggactat

SEQ ID NO: 465237 - DNA, 476 bp, Homo sapiens
ttttagctcctaagttttgtagtaatctgttacacagaattattaagagataaccaatatgcttttctctgatccttattctttgcttgtttattttataacataatgttctacttctgtctacaygtagcctcctgtctacatacaactacttctgtcttggactacttcctctgttttctcttcattgttatcaactttagatatttcattttgcccattgtttgggtgtgtccttgaaatagaaaattatcaccatgttctggtattcctgacacctatgcccagactctatgggatttgacagttgatcagcaaacctcagagccctatcctcaacctgagtgaggcttacttaatatcatgagattgcctgactttgttataccttattattttatagtttgatggcaggattgcattttctaagaatattgtttattgtaaatatctgtgtatgtacatatacacacaca

SEQ ID NO: 465238 - DNA, 588 bp, Homo sapiens
tataataaatgtcctattttgttgtggagaattgaaagaccatgatatcacaggttctacagtgaagtcatattctgaatttaaatcatcgtttaccttaagtgcaatggatgttcggacaagaaagaaagtatatgggcctggacaaatcaaggagaacttcaaagaggaggyagcccttgagtttaacctggatgtgaaattgtgctatgtgaaaggaaattcttgaatgagggagttaaaaatgcacatggacttttatgtaagcaaagctcatgaaatacgtgacatacttgcatgttaatgaattgactttgattaattcttattcttgaacttctattttctaacctctcctttgaaatatcctcaaatgaaaaactagaaagaacagacagtagaaagatctcatttggatatccctatgtaaaaattagagagtgatttcctaaataatcttcattcttaatatatttctaaatgtaaaatgtcttcctaatatatttctaagagctggtgtggtcactgctccacttacaaaaacgaaaagtcaaaggctttgttccctgcacgaggaatagaagatta

SEQ ID NO: 465239 - DNA, 554 bp, Homo sapiens
gtgaaaggaaattcttgaatgagggagttaaaaatgcacatggacttttatgtaagcaaagctcatgaaatacgtgacatacttgcatgttaatgaattgactttgattaattcttattcttgaacttctattttctaacctctcctttgaaatatcctcaaatgaaaaactagaaagaacagacagtagaaagatctcatttggatatccctatgtaaaaaytagagagtgatttcctaaataatcttcattcttaatatatttctaaatgtaaaatgtcttcctaatatatttctaagagctggtgtggtcactgctccacttacaaaaacgaaaagtcaaaggctttgttccctgcacgaggaatagaagattattctgctatttggaaatatgcacccctatttcaaactagctctacagctagcaggccctttagggagcgttgtaacatcatttaaatggagccagcatccatgtcttctcaccatacagacgtgggaccaaggatctcatatggtgagaagggctgccttacactgactgattcatt

SEQ ID NO: 465240 - DNA, 554 bp, Homo sapiens
gtgaaaggaaattcttgaatgagggagttaaaaatgcacatggacttttatgtaagcaaagctcatgaaatacgtgacatacttgcatgttaatgaattgactttgattaattcttattcttgaacttctattttctaacctctcctttgaaatatcctcaaatgaaaaactagaaagaacagacagtagaaagatctcatttggatatccctatgtaaaaattagagagtgatttcctaaataatcttcatkcttaatatatttctaaatgtaaaatgtcttcctaatatatttctaagagctggtgtggtcactgctccacttacaaaaacgaaaagtcaaaggctttgttccctgcacgaggaatagaagattattctgctatttggaaatatgcacccctatttcaaactagctctacagctagcaggccctttagggagcgttgtaacatcatttaaatggagccagcatccatgtcttctcaccatacagacgtgggaccaaggatctcatatggtgagaagggctgccttacactgactgattcatt

SEQ ID NO: 465241 - DNA, 554 bp, Homo sapiens
gtgaaaggaaattcttgaatgagggagttaaaaatgcacatggacttttatgtaagcaaagctcatgaaatacgtgacatacttgcatgttaatgaattgactttgattaattcttattcttgaacttctattttctaacctctcctttgaaatatcctcaaatgaaaaactagaaagaacagacagtagaaagatctcatttggatatccctatgtaaaaattagagagtgatttcctaaataatcttcattcttaatatatttctaaatgtaaaatgtcttcctaatatatttctaagagctggtgtggtcactgctccacttacaaaaacgaaaagtcaaaggctttgttccctgcacsaggaatagaagattattctgctatttggaaatatgcacccctatttcaaactagctctacagctagcaggccctttagggagcgttgtaacatcatttaaatggagccagcatccatgtcttctcaccatacagacgtgggaccaaggatctcatatggtgagaagggctgccttacactgactgattcatt

SEQ ID NO: 465242 - DNA, 554 bp, Homo sapiens
gtgaaaggaaattcttgaatgagggagttaaaaatgcacatggacttttatgtaagcaaagctcatgaaatacgtgacatacttgcatgttaatgaattgactttgattaattcttattcttgaacttctattttctaacctctcctttgaaatatcctcaaatgaaaaactagaaagaacagacagtagaaagatctcatttggatatccctatgtaaaaattagagagtgatttcctaaataatcttcattcttaatatatttctaaatgtaaaatgtcttcctaatatatttctaagagctggtgtggtcactgctccacttacaaaaacgaaaagtcaaaggctttgttccctgcacgaggaatagaagattattctgctatttggaaatatgcacccctatttcaaactagctctacagctagcaggccctttagggagcrttgtaacatcatttaaatggagccagcatccatgtcttctcaccatacagacgtgggaccaaggatctcatatggtgagaagggctgccttacactgactgattcatt

SEQ ID NO: 465243 - DNA, 456 bp, Homo sapiens
gggatgatgatgagaagaaaacaaaggacggtggcatatgttctatgggttttgattctgcacatttctagaatgtctagatgcttcgaatgttttgcccatgttcaggttcacttatcacagtgccccatgggacaccatacttgggaatttcatgcagaggagctcactacttcacaaagcagcccaggtcaggtcatctttgggtactctctgttgttactgctttgttcattgaactgaaatctcccttgttgacaattttactctataacaagatcatcattagtaaactgatgaaaaaaataaattataaaaatacttcttaygtttgttagtattttcaaataggtaaaacaccagatgagggatcacaggaaggctaagaaatttgtccaaggtctaaatgacagttagttctccaacttttatgtcatcgagttaatactctctcta

SEQ ID NO: 465244 - DNA, 617 bp, Homo sapiens
ggttatttggagtgttctttctacctagcttcaccaccaattttactcaccaatcaacaaacagaaagaattgttgttatagtggaaaacggaccttgcaattatttcacatcaaatttaygtccagcatgtgtgcattttattttatttaataaaactttaatcttcacaggatctcaatatgacagatattatctttatttttctatggaggaaaccaagtttcagtgaaatataggtaatcacccatggttgtatagctcaggaaatggcaaggtcaaggatatgacctcagggctgtctgggtttataaaggatgacacaagaggacaatgattgatttctcatttcgtttttctctgcattagcacctaataattggtattcccagatacttttctagatgactgtgaaagtgaaataagcagatgttgcccccatcttggtagatgttagtggctgcaaagacttgctccattccctattcagtggactctttctcaggatctgtttcaattttgtttcatatcagaaactttctgcatcattaaccaaagaaaggcttaatgggattcaatacaatgtattcatgcctgagcctctgagagctgtccctc

SEQ ID NO: 465245 - DNA, 575 bp, Homo sapiens
taaattttagtattatgtccaagagagtactgtttgagaaatctacctgatgcttagcaaaatgaatgcacattttgattgcaatatttttctggtcaggttttgtgcatcattttttgaacagtagtcaagttgcaaaaattgtaagtcatctaaacattttatggtagaaacttgtagatcattttagagctatgcacacaattttaaaaaggagtatgataactgtattttagraagagagacttatttataggaagccaggtttgtactgctggagtggaaaataaagaaaacaaagttgacctagtctactctttcatccatataaaaaagggagacacacaagctgacccagagtttaatggtcccataaaataataagatttatatgttggctgagatactgcgatcatagatatgtctgattttatagaataagctgcagcagcactattggtaataaaggaaaccagactttattaccaaagtaaccagaaacatcactgtgacgaacattccaacagtttcctaataaactcttttatctttgtgcataacatgccagtaaaaag

SEQ ID NO: 465246 - DNA, 574 bp, Homo sapiens
gtttccacagctatgcctttcatacccctttaggacttgatgtattcatttcatgcattacttgggtaaaatattccatcccatccctcatctccttataacttccctaaagaccttcttatctggattctttttctttcatgtatttaaatcaatactcactttctccccrtcttgatagtcaaaaacttctttaaccaaaacaaacaaaaaaaaacaaaaaacaaacaaacaaacaaaaaaccaaaaagacttgatgtaatataattgtttcttgcttttatttaggggaattactatgcttttcattggtaaaatgtaacatattataaaaaaggaaggacacattggtttagaactaagtgaccttaatatttgaaagttcatatgtatagaacatgcaaaaaagggattaataatacttttataaaaggattaatcatatgatgaatttaaattaacaagcttccttagtgcatttaacatttaacttgatttatacaaattcaatttatattgctggtcaggaataaatctattaagtaaagcaaggtgcacctgaaattatatttgg

SEQ ID NO: 465247 - DNA, 564 bp, Homo sapiens
ttatccactatcatgagaacagtatgaggaaaactgtccccatgattcaattatctcctttacacatcagttatgccctttacacataggagttattacaattcagggtgagatttgggtggggacacagccaaaccatatcaggggtataatttcctgagaagtggatggtgaggggtgaaaggatggaatctgatatttatattcttattatacagactttcaactaatccccaaggctacagtcccacctcttacccagtcttcagaggtacccagtatctccaattttcaagcttttctggggctctgcagagcaaactggctkagttatagttggcctccctttggcagacacatacttttttctttcgaaaatcagtcatcactcacatcccattcccacttgctataaactgaatatttctgtcccaaattcatatgttgacatataatccccagggtgatgatgtcaggagatggatcttcgggaggtgattaggtcataagagtggagccctcatgaataggactagtcctcttataaaaaaagccccagataac

SEQ ID NO: 465248 - DNA, 336 bp, Homo sapiens
aaacaatagtattacaactgatattagaaattgtggctattgttagagtatccaagcatagggactgagcctaataatgtggaatctagatatgacaagggcaatggtgggttctggcagatatatccatatgcaataaaggaacagggaawtaatgagtcccatggaaggagctgagaagacccaagcaatgttatcagaacccatttcactgggactaaggtataggacaggtgtcagttccacaaggtaggagtattagaaagaggataagcgctttgacttgaccagtaggtcacgtgtatactcagggatcagcattgcataattgagtcc

SEQ ID NO: 465249 - DNA, 609 bp, Homo sapiens
ttaagtatcattttgtcatttgtgggtacatggtagattggagacaaagtatagggccctactcaatgtgayaatggtatgggattttttttctaacaggaaaaacatgcaaaaggtcatcactccaaagaggtgtatcttcagtgtggcagtgaactaaaaataaatcttcaccaactagaaaacttgaaagatgttatcaagatagctgagtagaagagcctgcttccttcacacaaaaaggctaaagtgataagcagataactacatggtgaattgcatgcctagggagaacaacagaatacatgggagaatatgtgacagaggcatccctgaggcattggaacttgggaaggtagcatagagaaggaagagccctgggattgactcaaagccaagaggcactctgcactgtgagaaaaggcaggagatccctagcagtccacattcccaccacagacacctgcaattctagctgcaagggagccctacagtattcacaggctttgagactagtgtagggagggaactcatgctgagttcccacctcctcccagccattctctggaacccagactactgcattatggtgccattttgagaacagag

SEQ ID NO: 465250 - DNA, 609 bp, Homo sapiens
ttaagtatcattttgtcatttgtgggtacatggtagattggagacaaagtatagggccctactcaatgtgataatggtatgggattttttttctaacaggaaaaacatgcaaaaggtcatcactccaaagaggtgtatcttcagtgtggcagtgaactaaaaataaatcttcaccarctagaaaacttgaaagatgttatcaagatagctgagtagaagagcctgcttccttcacacaaaaaggctaaagtgataagcagataactacatggtgaattgcatgcctagggagaacaacagaatacatgggagaatatgtgacagaggcatccctgaggcattggaacttgggaaggtagcatagagaaggaagagccctgggattgactcaaagccaagaggcactctgcactgtgagaaaaggcaggagatccctagcagtccacattcccaccacagacacctgcaattctagctgcaagggagccctacagtattcacaggctttgagactagtgtagggagggaactcatgctgagttcccacctcctcccagccattctctggaacccagactactgcattatggtgccattttgagaacagag

SEQ ID NO: 465251 - DNA, 619 bp, Homo sapiens
tggcctggggtcaaagattattttggggctttaagatttaatgactgccctgctgggtttcagacttgcatgaggcctgtagccgctttgttttggccaatttctcccttttggaatgggagcatttacccaatgcctgtacccccactgtatcccagaagtgactaacttgttttttattttacaggcttataggtggaagagacttgccttgtctcagagtttgtactcagacatttgaattaatgctgaaatgaataaagacttgggggactgctgagaaagtatgattgtattttgcaatgtgagaaggacatgagatttgggaaggaccggggtagaataatatggtttggctctgtgtctccacccaaatctcatatcaaattgtaattgctagtattggaggaggggccttgtggaaggtgattgaataatgggggcaaacttcccccttgctgttctcatgagatttggttgtttgaaagtgtgtagcacttctctctctcttcttccttttccagccatgtatgaagtgcctgctttcccttygccttccaccatgactgtaagttttctgagtcctccaagccatgcctcctgtacagcctacagaact

SEQ ID NO: 465252 - DNA, 532 bp, Homo sapiens
tcaatagaatactatttggccatcaaaatgaataaaattctgtcattcgtggcaacatgagtgagcctggaggacattataataggtgagatagktcaggcacagaaggataaagaatgcatgttcacactcacatgtgggagctacaaaagttgagctcataaaaatagagagtagaattgtggatactagattctgggaagagtggatactaagggaataaagagaggctggttaacaaacacggaattacagctagataggataatttctagcgttttatagtactttagggagactatagttaacaataatttattgtgtattttcaagcaagttaggagaggatttcccaaaacaaagaattgtattgggatatgctaattaccttgattcagtcattacactttctaacaatgtactttctaacaatgccttgatctattccagcaaacaaagttcttaaactatacgcacacacataaaaatcaagacaacatatgtgagatccagctcaaacaaaagaaccagc

SEQ ID NO: 465253 - DNA, 532 bp, Homo sapiens
tcaatagaatactatttggccatcaaaatgaataaaattctgtcattcgtggcaacatgagtgagcctggaggacattataataggtgagatagttcaggcacagaaggataaagaatgcatgttcacactcacatgtgggagctacaaaagttgagctcataaaaatagagagtagaattgtggatactagattctgggaagagtggatrctaagggaataaagagaggctggttaacaaacacggaattacagctagataggataatttctagcgttttatagtactttagggagactatagttaacaataatttattgtgtattttcaagcaagttaggagaggatttcccaaaacaaagaattgtattgggatatgctaattaccttgattcagtcattacactttctaacaatgtactttctaacaatgccttgatctattccagcaaacaaagttcttaaactatacgcacacacataaaaatcaagacaacatatgtgagatccagctcaaacaaaagaaccagc

SEQ ID NO: 465254 - DNA, 532 bp, Homo sapiens
tcaatagaatactatttggccatcaaaatgaataaaattctgtcattcgtggcaacatgagtgagcctggaggacattataataggtgagatagttcaggcacagaaggataaagaatgcatgttcacactcacatgtgggagctacaaaagttgagctcataaaaatagagagtagaattgtggatactagattctgggaagagtggatastaagggaataaagagaggctggttaacaaacacggaattacagctagataggataatttctagcgttttatagtactttagggagactatagttaacaataatttattgtgtattttcaagcaagttaggagaggatttcccaaaacaaagaattgtattgggatatgctaattaccttgattcagtcattacactttctaacaatgtactttctaacaatgccttgatctattccagcaaacaaagttcttaaactatacgcacacacataaaaatcaagacaacatatgtgagatccagctcaaacaaaagaaccagc

SEQ ID NO: 465255 - DNA, 562 bp, Homo sapiens
aactgcttcttgctgaaacaactgtacagccaacttccagtcaaactcagaaactaatttaaaaagtcagtaattcatctgcggagtgaagagcaaaaatgatgatggctcaccctgtcaaatgcccttagcctctcatgagaaatgtcataggaacctatctgactgagcccattcctttctgcagacttcaccttttattgcatccctctttgttatctacrttccatttccatttttccaacatgccatctttcttcttaggtggtttccacacatctgtggtctaactactgtatgtgcctttaaccaatgcgtgctcctacttgtcctttataatttgcttaaaggcagtttctcttggaagcctttcctgactgcctataacttcccagaaggactaagttatatctgctcaaatacactcccataacactctgcacttctgtgatatcgtcacacttacaatcagtaaggattgccctcacctctacactgaagctcttgagggcaggaaccatgtctatcttgttcagggccatatccccactgcctggcacag

SEQ ID NO: 465256 - DNA, 499 bp, Homo sapiens
aatttcagcttggaggtatttgggagattatgtttacagatataagatcattatttataaaaatttaggtaaatttaggcaagtaaaaacttaataaggctagtatcttataaatcccttgaaagtgaaaatcatgttccctttatttttaaaattttttttaatttttgtgggtacacagtaggtgtatatatttgtggggtaaatgagatgttttgatacatgcatgcaatgtgaaataagcacattatggagaatggggtatccatagtctcaagcatttatcctttgtgttatgcacaattacacttttttagctttttaaaatgtacaaataagttattattgactatagtcaacctattgtgtgatcaaatagtatgtcttattgattctttctrttttttgtacccattatccatctccatctccccaaaaagcccaccactacccttcccagcctctctctggtaacgatccttctaatcactatctccat

SEQ ID NO: 465257 - DNA, 504 bp, Homo sapiens
atctattttaaaaaacagaaaaggaagaacaatgtggcatgaaatagacttaggaaagggcacctgtttgtggtatgagagctgaaacaagaagcagagcattgccttgttccactcagttgggaatgtgtgcatgtcaggggactcaaattttacattgctcagtgcatgtctgtgaacaaccctgaaggcaccatgagtattgattttggctacaaataaaktttagtaagtggacaaacgtacaaatgttgaatctgtgaataatggggattgactgtacatccaaataaaacattaaggaaatatactttcagcgtgaagactagaaaaatggtggtacagtaatgaattacagtcattggataagggacttgtcctgaaagggaaaatgctatttaagatattataggttgggaagcttgtcacagaaatgccttagacacatttggaaacccaggaattgatgaaggccaagtcagggtaggagacgaagttatggga

SEQ ID NO: 465258 - DNA, 575 bp, Homo sapiens
agagaagattatgagagatatgacaccaggtatccagttaggtaagccaggaatctgacagtcaggaatcctgggttatgatcctacactgttgtgttaactttggaataatgattaaaatttacttgcttcaatttcagcatttgtaaaatgaagttattgctacttcctcttatagtttctcaccwgcatatgccttgaattcctttatacatttataatagcatagcattattaaaattaagtgtgatcagatctactagcatgagtatcaaaagataagaaaatcttgccatctttacaaatatttcaaatgttgttccaaattttttaattccagaagaagtttgttttccagaacccttgagctctacagttctgagaatcttgtgcaatgtcccctggaactaagtctgctttccttcttcccccagcttctagaagtactagagaacttctcaaagtgtttgaatctcattgtcaaatactctatacaactttaaaaagaaacagcattgaggagtctagagcagattcctaaaagcaagggcaggcatctccaaggaaggttcttc

SEQ ID NO: 465259 - DNA, 575 bp, Homo sapiens
agagaagattatgagagatatgacaccaggtatccagttaggtaagccaggaatctgacagtcaggaatcctgggttatgatcctacactgttgtgttaactttggaataatgattaaaatttacttgcttcaatttcagcatttgtaaaatgaagttattgctacttcctcttatagtttctcacctgcatatgccttgaattcctttatacatttataatagcatagcattattaaaattaagtgtgatcagatctactagcatgagtatcaaaagataagaaaawcttgccatctttacaaatatttcaaatgttgttccaaattttttaattccagaagaagtttgttttccagaacccttgagctctacagttctgagaatcttgtgcaatgtcccctggaactaagtctgctttccttcttcccccagcttctagaagtactagagaacttctcaaagtgtttgaatctcattgtcaaatactctatacaactttaaaaagaaacagcattgaggagtctagagcagattcctaaaagcaagggcaggcatctccaaggaaggttcttc

SEQ ID NO: 465260 - DNA, 602 bp, Homo sapiens
ttataaagattctcatgtgtgtctctttgtatacataggtaagcaactgatgggttatagagaatgcaaatattcaacagctttacaagacaatatcaaattgtttttcaaagtggttgtattacttcacactcacaatgaggaatctcattgtaagttacactagcaataaggragttattgctagtaagttaccctagcaatgaggaatctcaaacacaaataaattttcccaaagtcctacaactataagtgatggagacagacttggatacaggtatatccctttaagagcctgctttgttcacaactactttaagagcagagaagatacacaattagctcgtaaggcctaaggaaaaataattgcgaaaagaggtgttgggttgacttcaggatataatagaaccctaagttaagttctaatgacaatatacagagcaatgttgatcaaacttgagggttgacctctgaagcttatcacaaaaagaacaggaactcaggatttgaggaaaaccttgacctggatatccagttaaagttgaaggaaaccaactacagagaacaaattatatgcttgctttgtaccttaactaccagtt

SEQ ID NO: 465261 - DNA, 554 bp, Homo sapiens
tctttccttctgctgcatactgtagctcttaaccccactctgactctttgtctagaccagcttcctctacttctgtggtctacttgtcagaaacsaccactgatgcctcctggatttatctgtcacaggtccagccacccaaattcccagggaaaggacttggaaaagtccactcgaactatcaatgggagaggtggtggattaatattctatgaacatagcaactgaagccagtcctgcaaccatgagaatggaagtcatggagagggagagcagggaatgaaaggtgaacaacatatatactcacgctgctgataaagacataccctagaccgggaagaaaagaggtttaattggacttatagttccacatggctggggaggcctcagaatcatagcagaaggtgaaaggcacttctttcatggcagcatcaagagaaaatgaggaagaagagaaagcagaaactcctgataaacccatcagacctcgtgagacttattcactgtcacgaaaacagcatgtgaaagacaggcccccatgattcaattacctc

SEQ ID NO: 465262 - DNA, 554 bp, Homo sapiens
tctttccttctgctgcatactgtagctcttaaccccactctgactctttgtctagaccagcttcctctacttctgtggtctacttgtcagaaacgaccactgatgcctcctggatttatctgtcacaggtccagccacccaaattcccagggaaaggacttggaaaagtccactcgaactatcaatgggagaggtggtggattaatattctatgaacatagcaactgaagccagtcctgcaaccatgagaatggaagtcatggagagggagagcagggaatgaaaggtgaacaacatatatactcacgctgctgataaagacataccctagaccgggaagaaaagaggtttaattggacttatagttccacatggctggggaggcctcagaatcatagcagaaggtgaaaggcacttctttcatggcagcatcaagagaaaatgaggaagaagagaaagcagaaactcctgataaacccatcagacctygtgagacttattcactgtcacgaaaacagcatgtgaaagacaggcccccatgattcaattacctc

SEQ ID NO: 465263 - DNA, 594 bp, Homo sapiens
aaaatcaatctaatagtctcatctgtaggcctaaggaagatgtcttttatgcctattttaccctactcataccttccagtttgaataaggaacagtggggaaggtatttctaaatcctggagctattcctcacaaactttgttgtattccttgttctactatccacataataaatagtttacatgtatgaatacactgtagtttcaaagctgctttcccctccattatcatgataaactctgttacaggaaggacaggtggtatttttactatttttcaggcaatcgagtagatgcactcacaaagttaggaagaaagagctagagcccacattttccctccataaaataaactgcccaaataacactgttggggagtttcagagaaatggaataatgcaatactgcagctcaaagaggccccagagaacctgtttgtcaaccacctcattctacagatgagaaaaatgagagtcccagagagaatgcccatggtcacagagctamtgtataaaccagaagtagaagccaagatgtttcagtccatttcatgccctcttcccctcatgttatctcaaggacaagaacgtcacac

SEQ ID NO: 465264 - DNA, 586 bp, Homo sapiens
ctgaggtgggaggatcacttgatcttaggagcttgagaccagcctgggcaacmtagtgagatcccatctctacaaaaaacacaaaaattagtcgggtgtggtggcacatgcctgcagtcccagcttctctggaggctgaggtgggaggattgcctgagccccaaaggcggaggttgcagtgagtccaagagtccagatcacactactgcactccagcccggtggacagagcgagactttgtcacaaagaaaaaaaaaataaggatgtagatttagattataaccacccacattttatttccttttccattttcttagtatggtgatagcataattctggcttaaagccgtagtcataagcatgacattatcgtgactaatccaagtagtatcctgtggttgcagctcgttttttagacaacccattgttttacccaaagggaatacttgccttgctttcacttatttagttactacatacccttcacttttctcccaaaagttcctacagattctcagatgtctaccaatattaatttccagctacgtcgggtagttctcgttcctctttggtttgattttggttg

SEQ ID NO: 465265 - DNA, 691 bp, Homo sapiens
gtctactctgcgagaatgcagtggagtaaacgtggcacatctcagaaggtcgctgatgaattacgaagtagaatrcaagatgggtgctcttgaagcttccggtaaatgctgtgtttgccatgggctgtggccagcactagctccacccccaggaagtattcggctgcccaataacaaaggctttgctggatcacttgtgactatgaggtagtgtggctgctttttaaattgcaaggtagtggccgggcgccatggctcacgcctgtaatcccaacactttgggaggccgaggtgggcagattgcgtgaggtcaggagtttgagaccagcctggccaacatggcaaaaccttgtctctactaaaaataaaacaattagccaggcgtggtggcgtgtgcttgtaattccagctactcgggaggctgaggcagagctcttgaacctgggaggtggaggttgcagtgagtagagatcacgtcactgcactccagccttggcaacagagcgagactgtctcaaaataaaaataaataagttgcaatatacatatgctcctcgaattatgatggggctacatcgtggtaagctcattggaagttgaaaatattgtaaatcgaaaatacatttaatacaccttacccaccaaacatcacagcttagcctagcctaccttaaaggtgctctaaacactg

SEQ ID NO: 465266 - DNA, 587 bp, Homo sapiens
gggggttgtttgtcattgcagcataacctagcctatcctgattgattcaggcactgagtctttyattttctgtacagttgatttaaaacaatttgtggcatcagctccttgatttcctgatcttgcaaatgaagacaatatcccccgctgatgtgacagtgattaatatactacattgttctgaaagtttcttaaactccttcagagaaagttgctgggcaagcagaaagcaatctgctcttatgtgctttgaagggatgtttacagaatcccgctgagtataatttgccaattactggtgctgtaaacatttgtggagctttgcagggatcggactgggagcaaggccagaaaggcagctagtagcccaatcgcattctattggacaatctgggcaggagcccagaggccacgtgagcaaggcagcctgtgctccctgggtttgtcagaattagcctcttgtgggccatcagccgtcctggccctaagaggtcattacatctaagactggctttctcttagcccataattagctttgttcaatcaaatagtttctctcttttctttttgtatctcaaaatcttttt

SEQ ID NO: 465267 - DNA, 587 bp, Homo sapiens
gggggttgtttgtcattgcagcataacctagcctatcctgattgattcaggcactgagtcttttattttctgtacagttgatttaaaacaatttgtggcatcagctccttgatttcctgatcttgcaaatgaagacaatatcccccgctgatgtgacagtgattaatatactacattgttctgaaagtttcttaaactccttcagagaaagttgctgggcaagcagaaagcaatctgctcttatgtgctttgaagggatgtttacagaatcccgctgagtataatttgccaattactggtgctgtaaacatttgtggagctttgcagggatcggactgggagcaaggccagaaaggcagctagtagcccaatcgcattctattggacaatctgggcaggagcccagaggccacgtgagcaaggcagcctgtgctccctgggtttgtcagaattagcctcttgtgggccatcagccgtcctggccctaagaggtcattacatctaagactggctttctcttagcccataattarctttgttcaatcaaatagtttctctcttttctttttgtatctcaaaatcttttt

SEQ ID NO: 465268 - DNA, 586 bp, Homo sapiens
agcatgggcagggagccctgagtaaacaaatgtcctgtcttactacaatcaaaactctgtttcaacagcagctggtggaccaaaaggaaatactgtgctttctgctagtgtttgaaggagatgacattataaagcctgcaagtaaatctctagcaggctttttatctttgcctttggcttccaaattgctgactgatcattgggactgctgttgtgttgctttttattatggactggaattgccttggttattggcttggcactaatcaatacccatcacaaaagggaatagacaatgagatcatcatcactcctccttctcccaggccttaaggggtccagaaacaatcactccctacagtaaaatctcaactatctggaccagtctggctgcaaataaccccagtgatgagattttcactgattcttctaggaatctgtgttcacagttggccagggcaggctgacaaatgttttccaatacacagcctcattttcycttctgttccatttcttcacatcacttctagttaatgcacaatatacagaagcagaaacaggtcaaaactgggttgaatatattccc

SEQ ID NO: 465269 - DNA, 640 bp, Homo sapiens
agttttgcagcattaatgctaagtctgctttctttttttaatcttttaactttagttttgaaatagacttaaagaagaattgcaaacatattagagttcctttatacccttcacccaacttcaacaaatgtcaacatcttgcaaacgacgtgactttcatcaaaactaagaaatgaacattggcattatattactaactaaactacagacttgattcagatttccccaattttttacgagtgctctcttctgtacargattcgtttgcatctggcctccttttatttttactaactctgtcctcagaaaaagagatacaggtggtcatctatataaattatctgaatcgtggtgatacatgcaaacaaagacattttggcaccctttaatacatcctgaaactaaccaagagccagttataaatccaatgttaaaataattattggccaggcgcggtggctcacacctgtaatcccagcactttgggaggccgaggtgggcggatcatgaggtcaggagatcgagaccatcctggctaacacggtgaaaccccacctctactaaaaatacaaaaaatcatccgggtatggtgtcacatgcctgtaatcccagctacttgggaggctgtggcaggagaatc

SEQ ID NO: 465270 - DNA, 640 bp, Homo sapiens
agttttgcagcattaatgctaagtctgctttctttttttaatcttttaactttagttttgaaatagacttaaagaagaattgcaaacatattagagttcctttatacccttcacccaacttcaacaaatgtcaacatcttgcaaacgacgtgactttcatcaaaactaagaaatgaacattggcattatattactaactaaactacagacttgattcagatttccccaattttttacgagtgctctcttctgtacaagattcgtttgcatctggcctccttttatttttactaactctgtcctcagaaaaagagatacaggtggtcatctatataaattatctgaatcgtggtgatacatgcaaacaaagacattttggcascctttaatacatcctgaaactaaccaagagccagttataaatccaatgttaaaataattattggccaggcgcggtggctcacacctgtaatcccagcactttgggaggccgaggtgggcggatcatgaggtcaggagatcgagaccatcctggctaacacggtgaaaccccacctctactaaaaatacaaaaaatcatccgggtatggtgtcacatgcctgtaatcccagctacttgggaggctgtggcaggagaatc

SEQ ID NO: 465271 - DNA, 584 bp, Homo sapiens
gtctcaaaaaaaaaaaattcttactaaggcaggaaaatagggtctggaggcagggaacataaagcggatgaacacttcagctatgacaggaaatgtcttttcatagggtgtacaccgagtaaatgactttgtaacttacttcatcctcttcgtttacatagggcatacaccaagtaaccaatggaatcrtctggaaggtatttaaatccccacaaattctgtaacgaggcccttgagcccctatgcttgggccgttcccacactgtggagtataatttcattttcaataaatcccttcattccttccttgcttgtttatgcgttttgtcccattgtttgttcaagatgccaagaacctggccaccctccaccagtaacattactacatttgaaagaatgaagggtttcaaaattttgtccgtgacaggggtcactctatcccactggcatagtgagtgtgtgaacaggggaacaagatgtgttttacagtcagtttcatccacattcaagcatttcttttccagattttcaacataagaagttttgttgtttttgttgatattttgggtagtggtggccaatgt

SEQ ID NO: 465272 - DNA, 584 bp, Homo sapiens
gtctcaaaaaaaaaaaattcttactaaggcaggaaaatagggtctggaggcagggaacataaagcggatgaacacttcagctatgacaggaaatgtcttttcatagggtgtacaccgagtaaatgactttgtaacttacttcatcctcttcgtttacatagggcatacaccaagtaaccaatggaatcgtctggaaggtatttaaatccccacaaattctgtaacgaggcccttgagcccctatgcttgggccgytcccacactgtggagtataatttcattttcaataaatcccttcattccttccttgcttgtttatgcgttttgtcccattgtttgttcaagatgccaagaacctggccaccctccaccagtaacattactacatttgaaagaatgaagggtttcaaaattttgtccgtgacaggggtcactctatcccactggcatagtgagtgtgtgaacaggggaacaagatgtgttttacagtcagtttcatccacattcaagcatttcttttccagattttcaacataagaagttttgttgtttttgttgatattttgggtagtggtggccaatgt

SEQ ID NO: 465273 - DNA, 584 bp, Homo sapiens
gtctcaaaaaaaaaaaattcttactaaggcaggaaaatagggtctggaggcagggaacataaagcggatgaacacttcagctatgacaggaaatgtcttttcatagggtgtacaccgagtaaatgactttgtaacttacttcatcctcttcgtttacatagggcatacaccaagtaaccaatggaatcgtctggaaggtatttaaatccccacaaattctgtaacgaggcccttgagcccctatgcttgggccgttcccacactgtggagtataatttcattttcaataaatcccttcattccttccttgcttgtttatgcgttttgtcccattgtttgttcaagatgccaagaacstggccaccctccaccagtaacattactacatttgaaagaatgaagggtttcaaaattttgtccgtgacaggggtcactctatcccactggcatagtgagtgtgtgaacaggggaacaagatgtgttttacagtcagtttcatccacattcaagcatttcttttccagattttcaacataagaagttttgttgtttttgttgatattttgggtagtggtggccaatgt

SEQ ID NO: 465274 - DNA, 584 bp, Homo sapiens
gtctcaaaaaaaaaaaattcttactaaggcaggaaaatagggtctggaggcagggaacataaagcggatgaacacttcagctatgacaggaaatgtcttttcatagggtgtacaccgagtaaatgactttgtaacttacttcatcctcttcgtttacatagggcatacaccaagtaaccaatggaatcgtctggaaggtatttaaatccccacaaattctgtaacgaggcccttgagcccctatgcttgggccgttcccacactgtggagtataatttcattttcaataaatcccttcattccttccttgcttgtttatgcgttttgtcccattgtttgttcaagatgccaagaacctggmcaccctccaccagtaacattactacatttgaaagaatgaagggtttcaaaattttgtccgtgacaggggtcactctatcccactggcatagtgagtgtgtgaacaggggaacaagatgtgttttacagtcagtttcatccacattcaagcatttcttttccagattttcaacataagaagttttgttgtttttgttgatattttgggtagtggtggccaatgt

SEQ ID NO: 465275 - DNA, 569 bp, Homo sapiens
agcacatttggatgcagaaagacgaygacatcattagattccagctgcatctgtgaggaaatgccagtcagtggagatggcctggagctcgggagagaggtcaggactggggcagaggacggagagtctccagcaaagagactgcagtggcagctgtggatgggggtgaaatcacaccaggggaaggtgcagggagagaagacaagcaagacacgacctcgtggacaccagggctcaagggacagcagagcagagcagggaacctgccccgagccagggacagaggggacaaagaggaggtggcccaggagagtgtagtgccacagagccgggggaactgaaagggagcatgttcgaatgagcccagagccacagaagccacatgggagcagggcagaagcacgcctgtggagctaggggcgagagacctccagtgaccagggggtacgatggcaccagaagctggacgaccacagaatgaggaacgagaggcctgtggggagggggtgacagcaagtgcagacccatctctcggcggttgctgtgagcagagcagaaggggtagcaga

SEQ ID NO: 465276 - DNA, 569 bp, Homo sapiens
agcacatttggatgcagaaagacgacgacatcattagattccagctgcatctgtgaggaaatgccagtcagtggagatggcctggagctcgggagagaggtcaggactggggcagaggacggagagtctccagcaaagagactgcagtggcagctgtggatgggggtgaaatcacaccaggggaaggtgcagggagagaagacaagcaagacacgacctcgtggacaccagggctcragggacagcagagcagagcagggaacctgccccgagccagggacagaggggacaaagaggaggtggcccaggagagtgtagtgccacagagccgggggaactgaaagggagcatgttcgaatgagcccagagccacagaagccacatgggagcagggcagaagcacgcctgtggagctaggggcgagagacctccagtgaccagggggtacgatggcaccagaagctggacgaccacagaatgaggaacgagaggcctgtggggagggggtgacagcaagtgcagacccatctctcggcggttgctgtgagcagagcagaaggggtagcaga

SEQ ID NO: 465277 - DNA, 569 bp, Homo sapiens
agcacatttggatgcagaaagacgacgacatcattagattccagctgcatctgtgaggaaatgccagtcagtggagatggcctggagctcgggagagaggtcaggactggggcagaggacggagagtctccagcaaagagactgcagtggcagctgtggatgggggtgaaatcacaccaggggaaggtgcagggagagaagacaagcaagacacgacctcgtggacaccagggctcaagggacagcagagcagagcagggaacctgccccgagccagggacagaggggacaaagaggaggtggcccaggagagtgtagtgccacagagcygggggaactgaaagggagcatgttcgaatgagcccagagccacagaagccacatgggagcagggcagaagcacgcctgtggagctaggggcgagagacctccagtgaccagggggtacgatggcaccagaagctggacgaccacagaatgaggaacgagaggcctgtggggagggggtgacagcaagtgcagacccatctctcggcggttgctgtgagcagagcagaaggggtagcaga

SEQ ID NO: 465278 - DNA, 650 bp, Homo sapiens
gtgcttgaccaatggggaacaggaatcatgtaataaaactttctccccttttttcattgaggagatatttctgagacacattttraaagccctctagaaatcttccaagtcaagcaacacattgactatagctgtggccaacttgaaaacatagctttgtattggctctttcacttccctaatctcagtctttttccctggcatcaaattctcaaatttcttaacaataactttgactcaggttttgcattcagggaaacccagactaagacacttacatttatctttttatgtagcttatgaaatgagttacattactttaaaatcactacctggttatatattaaaacaaacctagattttcaaaataatcagcttttttagaaacccatgtgcatagatttaaataataaagttttattctagctcaattttgccacagaatatttcataaaaagtggctatactgtgctatgtgaacagaagttgttctaagaaattcaagttaaaataattaaaatatccttttaattaaatgcttactctcttctttatccaattttatattgtttgattagttacattagtttttgtgttatacatttactcttggatgacaggaaaaggaaataaaatatgataacaactgt

SEQ ID NO: 465279 - DNA, 589 bp, Homo sapiens
cataggccctcaatatctaatacagtatgattaaaaaagtagtttcattaatttgagaaaagtaacctgcagtgaataaaaaacttttttttgaatgtttcttccatgcctatacctgtgctatgcatagtggaattagcaaaacttatgacataatccaaaacctgaggtttataatcccatttgtaaagtcaaggcatacaccactggaatgacaaaagaatatgaaggttgatgctgaactggaattaggggaagtttctcactayagtgaagtttctgctgggccttggaaaaaaaaatcttgatgtgtaaaaggataattaggttggaaaactggcacgactttcgtttaaaatgcaaatgaactttctctttcaaaagaaagtttgactttgaaatattaagtatgtaagatatcacaaaaagaaatatatgaaatattattggccttttccattggctaacacttaattgactctttggggaaaatattttaagttaatgttaagaagtcaactccactatttttgcatgcatcagacatttccaatcaaatgacattaattaatcatgaacttgttaaaat

SEQ ID NO: 465280 - DNA, 445 bp, Homo sapiens
taatcatttaaccatatgtacaagagacatcataaagccaactataaatggctttctagctatctaaggctctaatacattgcagcaagtasttcaaaaattcaaagtgactgaagatccagttgcattttttggttcgataatacatacttggaaatgtccaaaggaaactatgttgcacaatcataatctctttgttcaaacattgcttttgttgttcactatccatgtgtgcttggaaaggttacttaaatactcttagtttcttttattattttttattatttttgttttattattattttttttttttgagatggaatctcgctctgttgcccaggctggagtgcagtggcgcaatctcggctcacttcaaactccgcctcccaggttcacaccattctcctgcctcagcctcccaactagctgggactataggcgccag

SEQ ID NO: 465281 - DNA, 445 bp, Homo sapiens
taatcatttaaccatatgtacaagagacatcataaagccaactataaatggctttctagctatctaaggctctaatacattgcagcaagtagttcaaaaattcaaagtgactgaagatccagttgcattttttggttcgataatacatacttgraaatgtccaaaggaaactatgttgcacaatcataatctctttgttcaaacattgcttttgttgttcactatccatgtgtgcttggaaaggttacttaaatactcttagtttcttttattattttttattatttttgttttattattattttttttttttgagatggaatctcgctctgttgcccaggctggagtgcagtggcgcaatctcggctcacttcaaactccgcctcccaggttcacaccattctcctgcctcagcctcccaactagctgggactataggcgccag

SEQ ID NO: 465282 - DNA, 489 bp, Homo sapiens
aaattatagcagaactatcacaggctcctgttatcacatttacttatctactttatttgtgtccataagtgttacctgtcttccaattataatcatgaactggcagtgcctggattttaaagcatgtgtgtagaaatccatccattcttactggtttaagaagacactcttctaaacatttgctctcctttcctaaatattttcctctttaatttagccttcccaaattatacaaatatctgacatttaatatttaaaaaaattctctattgatttcacatttccctgacagcaggtgctctrgtttcctatgatgctttagaattaaaatactcaaataaatctctgtattcactgtgttcacatcctattctgacattttatcttgacagtctaagcagtctaagcaggattctctctccactattcagtggaaatggctctcatcaaggcttccagtgacttagatttctcaaaacagtggtcaac

SEQ ID NO: 465283 - DNA, 489 bp, Homo sapiens
aaattatagcagaactatcacaggctcctgttatcacatttacttatctactttatttgtgtccataagtgttacctgtcttccaattataatcatgaactggcagtgcctggattttaaagcatgtgtgtagaaatccatccattcttactggtttaagaagacactcttctaaacatttgctctcctttcctaaatattttcctctttaatttagccttcccaaattatacaaatatctgacatttaatatttaaaaaaattctctattgatttcacatttccctgacagcaggtgctctggtttcctatgatgctttagaattaaaatactcaaataaatctctgtattcactgtgttcacatcctattctgacattttatcttgacagtctaagcagtctaagcaggattctctctccactattcagtggaaatsgctctcatcaaggcttccagtgacttagatttctcaaaacagtggtcaac

SEQ ID NO: 465284 - DNA, 497 bp, Homo sapiens
attaaacttcttttcattgtaaattacccagtctcaggaattcctttagagcaatacagaaatggactaacacaagctgtacaatgaaatcaggcgggtataagcactgatttattttgagatttaggaaatactttgaggcttatattcataaaagattatcggtgaaagtagtatttaccaactaaaaactatcagagctataaagtgttcagttatragccaacttaattttataaataatttccttttgggatcacaaatgcactaggtaaaaaagagtaaaaataaaaaaatcaagtgtgctaattgtgaaattaaacataaataattcagctgcctatgactgcaaactacaggctcgaatgaacataagaaaatattcatactgaacacagaattctcacaaagtttcttacaaaattttcctgggcagatcagaagcagagtaaacaaaagacaagaaagaaaaagacaaagcaagggagaacatgctc

SEQ ID NO: 465285 - DNA, 606 bp, Homo sapiens
ttgaaattatttaaaaaaaaaaaccactttttacagtttttagaaaaaatggaaaatgtcaatatttccttaataccatcacatatccatgttcatagttctgtgattattttataaatgtatctcttttgtttgaattatatacaaattaaatccatatgttgcaaaataatatgacttctaatgtactgaatcaaagatrtaaacagtaaaagagaaggaatcaaatatacaaactgtaaaggataagtcacaattattgtataatagaaagataaacattgcataatttttattaatatagtaaagaactcaaaaactggtctactactaacgtaagctcctctactttctttttttttctacttctgatattaaatgaggcaatgagttatgaatgagtgatgtactgtcatactctgatgccctcccttcaataaacacataaaatgccatttgaaataatatactctccaaataattaaatgtaatttattttgtacttgctatgtgatttgcatagtattagttagactaattagctacactaattagtatactaatataactatataatagtaattaattagtataactaatagttat

SEQ ID NO: 465286 - DNA, 606 bp, Homo sapiens
ttgaaattatttaaaaaaaaaaaccactttttacagtttttagaaaaaatggaaaatgtcaatatttccttaataccatcacatatccatgttcatagttctgtgattattttataaatgtatctcttttgtttgaattatatacaaattaaatccatatgttgcaaaataatatgacttctaatgtactgaatcaaagatgtaaacagtaaaagagaaggaatcaaatatacaaactgtaaaggataagtcacaattattgtataatagaaagataaacattgcataatttttattaatatagtaaagaactcaaaaactggtctactactaacgtaagctcctctactttctttttttttctacttctgatattaaatgagrcaatgagttatgaatgagtgatgtactgtcatactctgatgccctcccttcaataaacacataaaatgccatttgaaataatatactctccaaataattaaatgtaatttattttgtacttgctatgtgatttgcatagtattagttagactaattagctacactaattagtatactaatataactatataatagtaattaattagtataactaatagttat

SEQ ID NO: 465287 - DNA, 606 bp, Homo sapiens
ttgaaattatttaaaaaaaaaaaccactttttacagtttttagaaaaaatggaaaatgtcaatatttccttaataccatcacatatccatgttcatagttctgtgattattttataaatgtatctcttttgtttgaattatatacaaattaaatccatatgttgcaaaataatatgacttctaatgtactgaatcaaagatgtaaacagtaaaagagaaggaatcaaatatacaaactgtaaaggataagtcacaattattgtataatagaaagataaacattgcataatttttattaatatagtaaagaactcaaaaactggtctactactaacgtaagctcctctactttctttttttttctacttctgatattaaatgaggcaatgarttatgaatgagtgatgtactgtcatactctgatgccctcccttcaataaacacataaaatgccatttgaaataatatactctccaaataattaaatgtaatttattttgtacttgctatgtgatttgcatagtattagttagactaattagctacactaattagtatactaatataactatataatagtaattaattagtataactaatagttat

SEQ ID NO: 465288 - DNA, 606 bp, Homo sapiens
ttgaaattatttaaaaaaaaaaaccactttttacagtttttagaaaaaatggaaaatgtcaatatttccttaataccatcacatatccatgttcatagttctgtgattattttataaatgtatctcttttgtttgaattatatacaaattaaatccatatgttgcaaaataatatgacttctaatgtactgaatcaaagatgtaaacagtaaaagagaaggaatcaaatatacaaactgtaaaggataagtcacaattattgtataatagaaagataaacattgcataatttttattaatatagtaaagaactcaaaaactggtctactactaacgtaagctcctctactttctttttttttctacttctgatattaaatgaggcaatgagttatkaatgagtgatgtactgtcatactctgatgccctcccttcaataaacacataaaatgccatttgaaataatatactctccaaataattaaatgtaatttattttgtacttgctatgtgatttgcatagtattagttagactaattagctacactaattagtatactaatataactatataatagtaattaattagtataactaatagttat

SEQ ID NO: 465289 - DNA, 607 bp, Homo sapiens
taatatactctccaaataattaaatgtaatttattttgtacttgctatgtgatttgcatagtattagttagactaattagctacactaattagtatactaatataactatataatagtaattaattagtataactaatagttatactaatagttatactaatgaggcagagaggtactgtcttcaaggaactggttattttgtttcttaacaaataagaggagaataattaaaagtatataaaataacwtaaaataaaaatatgaaaattaacataatttataatagaatattggcacattatataaacagataattcataaaagaaataatacataaaagagaaatatgacaaataacattcagtgatagtgaaacttcatgaaataatactttcattctattgctggtgaaataaaaattagtaagctttcagtggtgattttttataatagtcatatcctttgacctggtcattctactcttaggacagaaattaactagggagatgctcagagatgtaagttataaggtcgaaagctgtagcattatttatattgttaatataatgtatttatccaagggagttgtatgcaggagtgaaaaaa

SEQ ID NO: 465290 - DNA, 654 bp, Homo sapiens
attaaataaaagttgcataaccacatatggagtaggaactcaattttataaatattggaaaaggaaacaataattctgtttatttcatttccccaagtttctaatttgaaagtcaatgctggaaaaggggttgtaaatcccatttgaatttagaggttcttgctctccactaatgtgcaggggggcttttagcaaaccacayaagcattcatttccttcattagtgaaatggaatcagtaccatctgactcaatcccaccccatacccaggacactatgaggactgtacacaacaatgcatatgaagagaatggctatagacattaatttaccatttacattatttctcttttttctcttcctatatctttattgttcattctctttccttcattatactaaaatgattaccaaatgaaagattaaattaagataattcaatactttcattcaccctttactagaaagatgagacaagaccaaacttttcagaatatacaattccctgattagagaaagaaaagtcctcctacttttcctactctaatttcttatctaaaccccaggataaagagagtaaaccgttttgatgattccttaaaaaacaatgcccatcagtaccccaggtagaagagagggtgtttaaacatatgt

SEQ ID NO: 465291 - DNA, 665 bp, Homo sapiens
taattatccatgtttgctacctacagcccagatttactatttaattgtcacattctcaatttatttctctcatgggaacccaattcaatgttatttttccttctagaattctaatgccataaaatttataatcatacaaacracatatgttatctgtagtagtcacaaatttaaaaaaattctggatattttaatatgtattataagaaatactttactgcatgtacttcaaatcttagaattttgttgagttttcctgctaattacatgaaacatttttgaccacctgttatgctagatatgaaggaagctaagtgataaatttatgatcccctgtttccatctaggaaattgttggagacacaagtaaagctagatcccttaagtaaatggtggcttaattccatctttactttcctcggggaaaggcattctatcaaaagagttggtaaaagcttggataatactagtctttctaccttacatgtacttcacaaacactaaagacaataattacaagcaaatgttctttttcttctcctcctttttctttctaatggctttaaatcgttaaagtgagactcacacactttaccaagatcacattaaacctagaaacctaggtctcttgagcctccctaagagctgagcccataaaacaacag

SEQ ID NO: 465292 - DNA, 585 bp, Homo sapiens
tatcttactatctttcttgtaatctaagataaatacatatataaaaataggttatatgtgtatgtgttttccccctgaactactgaggaataatttgcagacaggatattcctttacttttccccacaaagtacttatgtatatttcctataaagamggatttattttacacaatgtttacaatggctaaataaacaacattgattaaatatcaacatttatttctaggagtagtaaattattctgttaagggccagaagctaattattttagtttttgcaaaccatatggttttggttgcaactactcaattctgctgttgcagtgcaaaggcagccagagtaaatatataaatgaaaggcatggctgtgctcaatataaatttattttcaaaaacaagtagtaggattgcttggctcatgagtcatatttgctgaccccgatctaatatataacccttcttcagaagttcctagataatgtcatttatagcaaaagaaaatctaaggtcatgtgttgcattcagttgtcatgtagtcttatttaatcttgaactgtttattttttaatacttttgaagacaac

SEQ ID NO: 465293 - DNA, 577 bp, Homo sapiens
aaatgccagtgtaaattttatttacctaccttacatagtagatattttaagttataagaaaatacaatatcttccccatrctaatacatgtatatgtttttaaagagaagtaaaataaaactgtagtatttttttgtcttttgaattggcctattgcatagtttaaaattttaaaaagtgaacactgttaaaaagagcaccacacaaagtctgggctacactgaagacttcagcggcttcatgtctgtgaatgcaaagaaatacttagaagtctgtcctaaaatatgtcacatttcaatttaagtacttaccctaaatatgcctttaatgtagagtaattgctgaattaacactggctcttttggatttgttgtgaaacaggctaggtttatttcaaaatctaggccgtgtttacctattatttctctctaatcccagcagaattatttacacaaataagcctacggacaaaagctgattttaaaatatcaatatctgtaactctgtatgtatcccctttgtttcctattccccatcaaatttctttaccttgccatcttctataaaggattctgaa

SEQ ID NO: 465294 - DNA, 385 bp, Homo sapiens
aattcatagaaataaaacagtatatcaatatcaacatattgattttatggactcttacatgtcgtattttatttatcccgttgaattaacatcaatattagatgccacagcttttctccagaggtacaagcactcattcacataatattaagacattttggggtctttctgagtgatgatggctaaatacatagcctaaaggtatatattctgatggaacaaatgtttgccttttaaaagtaaatcacacatactatatgactgttaaaattaatatgtaaagccttatttacactaacatgtatagttgaactatcrtaactataacttagattgtggagtaatagtataggctaaaaataagcatctatactgcatcattagg

SEQ ID NO: 465295 - DNA, 547 bp, Homo sapiens
atataggcacacacattcacagaatttttaaaatttactttagtatagatgttttaagttacttgtggggacattcttttgaatagacatgcctgtctacctatctctgtcccacagtggaaaatggtttatggctacacaaactttctcagatcaataatacgtggctctgtgtgttgaacccacagttaaggtccaaaaattgaatcttgtttgtcaatcacttgctctgtaacttaagataagtcatttcatgcttttatattctatgyaaaagtataattttccagtttgacaaataatgaccttgctacttactaatgaagtaactatattaaatgtctctgagcctcagtgtcttactatccctgttcaatgggaataaggatataccttcagcacatttgtcaagtagtgtaagatgtgagtacaagagcctgacacacaataggtgttaagtaaatggcaacttctgtagcattacacacatataacataatatacacacagaacacacacactttaaaagacaaaaatatcccataac

SEQ ID NO: 465296 - DNA, 595 bp, Homo sapiens
agataggagaacatttgagagattttgctcagtctttagttgggcaatcataatttctattaattaaaaaagattttgccttagaaatttctagtctcaaattctcatcaagaattgaagtttctcatgcctagcgtgctgcgtagaagcagaaaaatttcatttaagccaaagacycctgtaggccaggatcatagataactcagtggtattaaattgataatgcaatgatcaaagcatccttcactttcatacttgcatttgacaaaattaaaaaatctccacagcctctgtgttctcagggttggcactgcaggttgcaaggaagagaatatacattgggaaaaggaggttaaaaaagagacctctgggccacgacacttgaaagagtttgaaggtataccaggcatgaggtggcatccacccagggggaccaaaaaagccttttaagccccagccatctttctgaggctaatctccccctccaccaaccaaccctcattcagtagcctctgcttatattcttcttgctaagccagggcatagcatattatcttggcaactatttcagccccctgatacaaggggcatataa

SEQ ID NO: 465297 - DNA, 627 bp, Homo sapiens
agagtaggaggaaaagaggaggtggtggaggtgctatacatttttaaacaatcagatcgcacaataactcacccactatcaygagaacagcaccaaggagatggtgataaaccattcatgaagtattcacctccatgatccaatcaccacctcccaccaggctccacctccaaaaatggggaatacaattcgacatgagattacaatttgacacaaatccaaaccgtatcaaagaccaataaagaaaaaaaaaatcatgtagcagaaacaaccaatctctggaataggaaagaacattatagtttctataaacatcaaaatgataattaaaaggataatgaaaatttcttgtgaatacatttgaaaatcagatgaaataattttgtgcacaacaatagtatttaaaatctagtatttaaaatctaataactggttctgatacctggtggtgagttgctgccataacaaattcctataatatgtgtcactgttcttggtaccacatgacagtcagaagatggaatagctttgtggaggcatctggaggaagtctagtgagcctgaacaaagatggccatgagaacacagtgcaaaaacaatgttattggagggtggacaaaaggattc

SEQ ID NO: 465298 - DNA, 620 bp, Homo sapiens
gatctcagctcactgcaacctctgcctcctaggttcaagtgattctctcgtctcagtctgccaagcagctgggattacaggtacccaccactatgcccggttaattttgtatttttagtagagacagggttttgccatgttggtcaggttgatcttgaactgctgacctcaggtgatccacccacctcggcctcccaaggtgctgggattacaggtgtgagccaatgtgtctggccagacatttttatttttacttttaaaagtgaaaaagagaaaacaattcaaatgttcaatcaaagarcaaatatattgggatttacaaaacaattgaatactatgtaatacgttattaaaatgatagcatagatagagcagggtttagcccgctggccaaatccaatcttctgccagtttctgtaaattcagttttattggaatgcagacatgctccttcacttgcatattgtctatagctgcttttgctgtataacagttataaaacagtctaaatgccccacaaagcctaaaatatttactattaggccctttacagcaaaagtgtgcccatccctggcatagaggaataattaataatatgaaaaattttaactatcaattgg

SEQ ID NO: 465299 - DNA, 548 bp, Homo sapiens
gtttttgctttatatacccaataaataagaatagtaaaacattcaaagttttgttctgttaagagtagaaacagagaatgattggcagtgtgtatattgttgctatggaaacacactgtaaactttgaagatgctatatattttactagattaaatrataaagtcccagcagtatgccatttttaaaaatagcacacacaggatttgaaggaatccactaatagaatcaaggggtcatatatgtttgacattaaggaagtttgacattaagccagtgttaaagtgttaaaaattataaggtaaatttgatatttgtttgacatgtaagccaattttagattaatagactctcagcacaggcagaaaatttaaaagccatcccagtcaagcacctagcgtatgcttttctacttaccattatacctgtaacaaatagctgttggatgtggtttggatgcctcaaagtctagaaattcattcctcctgaggcaaatctgtttttgaacaactaatttctgagaagttttttctactaatgagagaaaact

SEQ ID NO: 465300 - DNA, 531 bp, Homo sapiens
tttactctccctccttttatttttctgtcccctccatcttgctctctcccctttaaatattgaagttcccaaaaccctctctttggaaaacacacaggacgcaggtcctactgtgacttgtgtttattttctctgggcacagcctcaaccttggcaaaaatcatcctctaaatcgatggagatctgcctccatcactttttggtttacagaacctttgagcaaaagcagaaagactagttaggagattgttatgctagtcccagcaaagttgatggtttgacatggattaaagtagaagctatgcagtgccacggacacacagatttattgcatgcgaagacccaactattgattaattattaaagacatttttattccttgagcaaataaaatgttttaacaacacaggaacaaactggggaaatyagagtgtactaagaagcgtcggatggccaagggcacattttcagtccccttagcaaacttgtaccctagtagtatccgttattactgggccattgtttaaaggg

SEQ ID NO: 465301 - DNA, 621 bp, Homo sapiens
gactcagttaattttcatatatgcttttaaatcagcagcaactatatgccacttattcaatgctgggtttttccaggtctgtggaagtgattctctgaatatatccaaacttctggagctagtcacccttcatgatctttaaaaagttacaaaacatagtcagttttgaggatgaaaccatgtcagagtctaacaaatgcttagttcaatcagaagatggtctctaaaacttttaagaccttcccatataaactagtggttattacacgagaacttcctccagtacacatttgatgagttgatgctaaacagatagattctaaatcaggtctctmatatgagaaggttttctgggtattttgcagtccctctgaatcatttatccagttaatgctcaaattatccattaactgcttttatctgaacaggttaattcagctttaacttctgctttaaaacttaaaaattgaaacattcattcaaagatgtcagttcactcacagtttttccttaataattaaactttccaactgatcaaaaaacttggtaaaaaagtctccctttacaaataaaaagacaatatagagaaaagcatgaaaggagtatgagatgccacattgt

SEQ ID NO: 465302 - DNA, 574 bp, Homo sapiens
tggtagatgagccaagacaaaaacccctctactgttttgttaacacagctcccttagtaactgctgcttagggaagtctattaaagagtcaagtggaattayttaaaacaatcagtcttcctttgtgctcaaacttgcttcataatccagacagtcactgattcagaatggttttttctacctagtgtacctaaatcagtgaggtttttttttgtaaaagtcaccctgataatatacattaataaacatgattaagtttaggaaataaccgacagaagagcacatacaatcctttttacccaactcaaattctgttttgaaatgaactccaccataagccagtccacaaagcaagcaagcccttctgatatggatggtgagggcagtgttcacctgtgcgtgaactttctgggctgaacattccacagactgatatattcttatgattcatgttgcctgaaccatgcttttcaaacatcgtgagctgagaagtcactgcaccacaagggcacagctacaatggcaattgtcccaggggcttgggtttcccagaaagtcagcatccagcaatctc

SEQ ID NO: 465303 - DNA, 546 bp, Homo sapiens
atctaggtttttggtaaggcatttttgttgactttcagttaatcaagggattcaaggaaccagtaaggtcaggctygcctagactgtactttgtaaaatgcaaatccttcaggaatctgttgtcaaagatatacatacatcctgagtgacaggctctgaaatccataccataagtgtgcttttatctgacataaactgtctgttccataagactctgttggaatgaagaaatctctctgctttgctggcctaatcaaaataattagtaggaggagagaaatgggcagattcccagaattggtcatttccacatgattaacatcagaggggctggcagggagaaaatggtcccctcagtattctaattgaggactggtctttagggtggtggttcataactgggggaagtgaggtcaattttgcccctcatgggatatttggcaatgtctggagacattttttattatcttaacttgggaaggggagtgttactgatatcttgagggtaaaacccagggctgtggctaaacttcctttgatgcacag

SEQ ID NO: 465304 - DNA, 546 bp, Homo sapiens
atctaggtttttggtaaggcatttttgttgactttcagttaatcaagggattcaaggaaccagtaaggtcaggcttgcctagactgtactttgtaaaatgcaaatccttcaggaatctgttgtcaaagatatacatacatcctgagtgacaggctctgaaatccataccataagtgtgcttttatctgacataaactgtctgttccataagactctgttggaatgaagaaatctctctgctttgctggcctaatcaaaataattagtaggaggagagaaatgggcagattcccagaattggtcwtttccacatgattaacatcagaggggctggcagggagaaaatggtcccctcagtattctaattgaggactggtctttagggtggtggttcataactgggggaagtgaggtcaattttgcccctcatgggatatttggcaatgtctggagacattttttattatcttaacttgggaaggggagtgttactgatatcttgagggtaaaacccagggctgtggctaaacttcctttgatgcacag

SEQ ID NO: 465305 - DNA, 546 bp, Homo sapiens
atctaggtttttggtaaggcatttttgttgactttcagttaatcaagggattcaaggaaccagtaaggtcaggcttgcctagactgtactttgtaaaatgcaaatccttcaggaatctgttgtcaaagatatacatacatcctgagtgacaggctctgaaatccataccataagtgtgcttttatctgacataaactgtctgttccataagactctgttggaatgaagaaatctctctgctttgctggcctaatcaaaataattagtaggaggagagaaatgggcagattcccagaattggtcatttccacatgattaacatcagagggrctggcagggagaaaatggtcccctcagtattctaattgaggactggtctttagggtggtggttcataactgggggaagtgaggtcaattttgcccctcatgggatatttggcaatgtctggagacattttttattatcttaacttgggaaggggagtgttactgatatcttgagggtaaaacccagggctgtggctaaacttcctttgatgcacag

SEQ ID NO: 465306 - DNA, 542 bp, Homo sapiens
gaacatgtaaaactgtgcaacacacaaatgtaataaaagagtcgctgtccatgttgccataggagggaggcaggacaaatgcggcaccttgaataagttttaccttttttcaccttatctcttaaagtgttactgaataacgaatagtttgaggaccatgtttatttcagctctggaagtaggatctgccactcaggagaaacaagatagatgtttcaaaccaacagcagtgataagyggccctgtgcaaataaatttgcatgagggatgctctacaaaccctctccataggcaccatgacaccttgcaagggaaaacttgtgctggagaaaagttggaagcagtatgacacatagaagagaaaaaaaccctgaccaacttcccccaccccttataagcaacagaagcagaggccccatttggctcagggtctctaagttctgttcaacataaaagccagacagctgtgaaagtccagcctgtaggacagagtcccggagagccataagaaatagcacccattggacaaagatattggagtc

SEQ ID NO: 465307 - DNA, 469 bp, Homo sapiens
tcattattctgggtaacattctcaggtacatagcatgctttttcaacatgtgttttcagatcattttctttctgatttttgaaaacattgcttgaagcagagtttttagtagttgttctgtttccttgcattagatttcctcttcggtacttctgttatctatattttgtcttctttttttttttttgaaatttttctycttttccttccctatttctcttaaaatattacttgccatttatttcctctttgttccttctggattactcttcttctaaaattatttttctctgtagtttttttcttgcattctgtcgcctcattcctgagtttttctaattctgatttatgctgttctttcacagcccatgtcattttctaatgtcttttagcctgttttgaaggggtgcattataatttctgtgagctttatatttttttcactgcctgtaggaatgtcatttggctt

SEQ ID NO: 465308 - DNA, 543 bp, Homo sapiens
atagataatcctgggcagccagttcagtgtctttccgtctatcccataggtaggctctagatgagagtgccccagcaagtaggtctgtactggggtgtgactcactttcagattgtccctgactcaccatcccccccagcactcatcatattcctcagcrgcaagcattgacactctgaaagttccttcagtgcaaagactatgtcctcttctatatctttgtttccatggccttagcacatattaggtgttcaagaaatgcttgttgaaccaactccacattaggtatgaatactcccagacaaataaatacattgatactctgaccaatgtgtcagaacagatggcctattcatttagtaattgagtttgtcaccactggacatactaatgatagctagtttctggatctgccaggttcccaaatgaggcattgtccagagaggaccttgcttgcaatcctctggatattgacatcctctcggttctcctcctttacccctaaactaccacacctacctccatagggatattgtgggtgaa

SEQ ID NO: 465309 - DNA, 472 bp, Homo sapiens
agctcaggagacttaggctttttctctagccatttaaaccacctatgaattaagacaatgaaaggaatcgagtatttctctttaaacaagatacactgttgtcagctgcagaataaagtcaggagttagattttgcctggatgctgaattctcccagagcacaaagggcgtgtagaggacaaatgggtgtggggacattaatggaacatagagttccacagttccttctcagagacgtgactmcagagaggcgaagaaaggaaacgccaagagtgagaggtcaccccgataagtacaaagaagtcgcttccagcactttctcccattgtgcctgttacacttattggtgtgaataatgttgttttgttttcagaaagacagtcatgagcaaaaaaaaaaaaaaaaaagaacggtgagtgataagccaagctcaggaaatttgagaatgacacatttgtgataatatatgtta

SEQ ID NO: 465310 - DNA, 544 bp, Homo sapiens
aggggaaaggatgaatgaatgaagacgtttgcagaggggcctakaaagaaagcactctgcaagattctccctcctggtggcatcaactctcagttcaaggtctatgtcagccctttccttgcccagacgcattggcctacagcagggaatgaagaaagaacaaagtctttaaaaatgttcagaagaaagagaaaacggcaagataaaagagagaaaaaaaagaaagaaaggaaccacctccttcgggcggactaaaaagggaagccccaggaggccggttgctaaggcgaccctagggccagaacggccccagcccattggttgagacgcaggagccaatgagaaggcgcgatgttgacggggtcctaagatggctgctgggcgaccacttcctgacaggtgagtacggcttatggagggttggttacccgccggttcgggctccggcatgatgagtctgggagggcctcttgtgggcagccgagggaggcggcatgggcggcctcatagctcctcggccgagcctcccggagcaggctagaaa

SEQ ID NO: 465311 - DNA, 516 bp, Homo sapiens
tcagtctgctttccagccaacttttcttcccacctcactttctcctccagataatagaaataccctggaggggttccttttctccctggcaagctgagggaggcaggggccctgccattggccactccctgggcctsggccaactccccacccccgcaacaaggggtgcaattacatcagctgctctctctcaggctctggctgttgctgggggaggtccttgccctactctgatgctggcctcctgacttttgactttctctgaccccttccaggccttgaaatcatggcagcagcaagacccaactggggcagcatcatgtctgggtttgaatcccggttcagccactttccagctgtgtgatgtggggcaagtcaggtaacctccttgggcctcagtttccctatctgcaactggggatgacaatagtgctctcttcctaggtttgttctgggtaatcactgaattaatatttgttaggtatttgtgttttaccttgcactatgtacgtgttg

SEQ ID NO: 465312 - DNA, 565 bp, Homo sapiens
atcttctgcctggctcttttgggatactcactctgggagaagccagctgccatgtaagrcatccaactaccctgaggctgctatgtgaaagaggtcacgtataggtgctctggttaacaacattagctgagctcataaccaacaactggcaccaactgccagacacataaggaagctctcttggatatctagccctagctgatatctgacagcaactgcatgagagactgtgagtgagaactgcccagtcaagtccttcctcaatttctgacccagcaaattatgagtaaacaaaattgttgtttacaccattaagttctggggggtaatttgttatgcagcaatagtaaccacaacaatctccttgaacctagtaagcatagtttctttaaatctttgctgattactctaaaacatgtggcctctatgggtctgtttctgttgtctattatttctgatgtttttaatagtgtgttatctgacttcttatgtatatggttatttttgattatgtgttggacactgtatttataccatcatttgtaaaaataaaatgaagcctaga

SEQ ID NO: 465313 - DNA, 565 bp, Homo sapiens
atcttctgcctggctcttttgggatactcactctgggagaagccagctgccatgtaaggcatccaactaccctgaggctgctatgtgaaagaggtcacgtataggtgctctggttaacaacattagctgagctcataaccaacaactggcaccaactgccagacacataaggaagctctcttggatatctagccctagctgatatctgacagcaactgcatgagagactgtgagtgagaactgcccagtcaagtccttcctcaatttctgacccagcaaattatgagtaaacaaaattgttgtttacaccattaagttctggggggtaatttgttatgcagcaatagtaaccacaacaatctccttgaacctagtaagcatagtttctttaaatctttgctgattactctaaaacatgtggcctctatgggtctgtttctgttgtctattatttctgatgtttttaatagtgtgttatctgacttcttatgtatatggttatttttgattatgtgttggacactrtatttataccatcatttgtaaaaataaaatgaagcctaga

SEQ ID NO: 465314 - DNA, 585 bp, Homo sapiens
gcaaacaggggcttctcccaattcaccccctgcattctcctctccctctgcatctgcatgcccatgccaccccttcccttcaagggcctgtcctggaacccaacagctggatgatgcccacttccttctgaacgtggaatgccgggaaccatacctctcacatggccacagctcgccttcctcttgatttctagtcaatcatgcacaggttggactgctaaacatggagacaagcctggggggacaagactgatgagatatgagtccactcagcaacagggcttgatatagagccctgttcttcctactgcctcttctttctagaaaacagtgagatagaagtaggtgaggagtaarggagtgagaccggggctgagggcttggggaacaatagaaagaacctgggctgggagaacacagacctggggttgtgccctggctctccctaactgctcctacccccatgcccctcccgtttaaacatttgagaaaagaagtgatgcctctagggtctcaggcttagtctacccatcagacaaaggctccactcatctcagaacccagagctggcaggatgggagccag

SEQ ID NO: 465315 - DNA, 585 bp, Homo sapiens
gcaaacaggggcttctcccaattcaccccctgcattctcctctccctctgcatctgcatgcccatgccaccccttcccttcaagggcctgtcctggaacccaacagctggatgatgcccacttccttctgaacgtggaatgccgggaaccatacctctcacatggccacagctcgccttcctcttgatttctagtcaatcatgcacaggttggactgctaaacatggagacaagcctggggggacaagactgatgagatatgagtccactcagcaacagggcttgatatagagccctgttcttcctactgcctcttctttctagaaaacagtgagatagaagtaggtgaggagtaagggagtgagaccggggctgarggcttggggaacaatagaaagaacctgggctgggagaacacagacctggggttgtgccctggctctccctaactgctcctacccccatgcccctcccgtttaaacatttgagaaaagaagtgatgcctctagggtctcaggcttagtctacccatcagacaaaggctccactcatctcagaacccagagctggcaggatgggagccag

SEQ ID NO: 465316 - DNA, 539 bp, Homo sapiens
cctgcactcactgtcaaagcaacattgagaatggccagaggagaagggttaatggctgagggctcccacatcagccctctccaagttcctgacacatttctgccctgtcaggatcaaggtgagctgagtccctgctcagactcatatagacttattttcacctctcagagcgaatatcaggaaagcctggggtttctttcacctcttggaagattttttgtggatgaactgagccccatgcctggcacaactagatgtgtcactggcagccaattgactctccgtcttctttcagctgagcttacctcagccatatgccttgatgcatccctgttttatagatgaggaaactgagactcagaaactcgagtggatgcccaaatgccatagctacaaaatgacagaggtycatttccgcttggcttcaaattatgctttccttcaggcctgagctcaggagggggtggcctctctgttttcttggggttggagccccatctggccccccacaccttggcttatacagggctcatgagtga

SEQ ID NO: 465317 - DNA, 439 bp, Homo sapiens
caatcttgatctttaataaggctatagcaggaaaactatgaaggaccttaagaaaactcattctgaaaataaatcagacccctgatttccagtctggtatataagaacctcagaagtcataccgtaaccccattctataccaagtaaaaagctgaacaaactgagaatcaacagctcttcacagaaccttcagacaagggaggacatagggcaagcctctgcatcctagattggagggacagacaggcmaatacagagaattacaacatgccaaagtggagagccacaagcagaaacctccggggaaacaagcgcgagggcatggaaacctgaactgtaattagtgaattgctgaaggctcagtgtggacaagtctgagggttaagaactccaggggggccagtcgtaggggcaccctcctatccttgcaattttgtga

SEQ ID NO: 465318 - DNA, 565 bp, Homo sapiens
agggcatggaaacctgaactgtaattagtgaattgctgaaggctcagtgtggacaagtctgagggttaagaactccaggggggccagtcgtaggggcaccctcctatccttgcaattttgtgagtttcacctctaggatctcatctcttctaacttctcacagtgcctatctgagaaaaatcctctcatgcttccagcacagaataaaaagtaaccattttgaaatatgtcagaaatgtctgttcttgaaaaggcctgcccacaggagaaactatcttcccagtgcctaaccaacctgagggaaggcaaattcctatttccagccccttctagcaatcctgtctcatgtaagtggggagaaaactgagaagcactggtaaagtccacrgtccaaaggcacaggctcaccaagacctaatcataaaactatagagcacttgccttccctctgccccttactactacatcactacatgtctcattaccagacttccttaaaaaaagaaaaaaaaaaaccacatagggtcttgctttgtcctccaggctggagtgcaatggcacaatc

SEQ ID NO: 465319 - DNA, 509 bp, Homo sapiens
tctacataaaggaaggcacgacattrgagaagcaataagtgaggataaaataaaaatttttactttttaaaattctcagttgatctaacagataatggtttgttcaaaatagtgatagcaacattgtatttgatgattatagcttatgtataagtgcagtgaattacaacaatggtacaagggacaggagagaggaattaataatatgttgttatacccctgaacctaaaatcaaagtttttaaaaaaagatatctgccctagttgtgaagtgatatagtactattgaaagtggatttgggttagttataagtgtatattggaaactgcaaggtagccacaaaaaatgtaaaaaagaagaagtataactgatatgctaaaaaaaacagagagaaaatggaatcatagaaaatgctcagttcaagccacaaaaggaagaaagagtggaaagcaaagatagaaacaaagtacaaaggcaatgaatagaaaacaataacaaatatagtagat

SEQ ID NO: 465320 - DNA, 583 bp, Homo sapiens
gtatattggaaactgcaaggtagccacaaaaaatgtaaaaaagaagaagtataactgatatgctaaaaaaaacagagagaaaatggaatcatagaaaatgctcagttcaagccacaaaaggaagaaagagtggaaagcaaagatagaaacaaagtacaaaggcaatgaatagaaaacaataacaaatrtagtagatataaattcaactatatcaataatccccaaatatttggagattaaacaacataattctaaataatacatggttcaaagaagacatttcaaaagaaattaaaaaaaattgaactccatgaacatacacctgattgaaatttgtggaatatagcaaaaacagtgtttagaggaaaatttatagcattgaatgcttatatttataagagaagaaagatctaaaatcaataatctaagcttccactttagaaactagaaaaacaagagcaaattaaatccaaaataagctgaagaaaataaataataaaaattagagcagaagtcaatgaaattgaaaacagaaaatcaatagagaaaaatcaatgaaatgaaaagctgttttttttaaaga

SEQ ID NO: 465321 - DNA, 577 bp, Homo sapiens
catgaaatattctcttgtgttttaaaatttctaaatatatatgtgtgtatgtataaatttttatgttatatttttgataatgagttttatcctaatcatgttccaggcagatcgaaaatgcaatctgtatgataccaattctttgaaatttgagactttattatggtttattacagactcaactttcataaatgtttcatagctgcttgaaaagaatatatactctttatttattgagtgtacttgtcatgtacatatacatgaactcaaacttattaattttgttaattattttttgttgttctttakcttttctgattttttcttgcttgatttatcaagtcctaagagggatatcctgaaacttctcatgtgatagaggatttctctacattctcataatttttgctttatatattgtgaatgttattatgtgtatagaagtttaggctttttatatatttctggtgagttgaaactttggtaagcataaaatgacttttatcaaatgacttggacccacctgagggtattctctttaaggactcctggctatttgaaaaattcctgacctagc

SEQ ID NO: 465322 - DNA, 538 bp, Homo sapiens
aaggcatgttagtctgagtatgatggggcagcatgagctggtagggaagagagctctcatgcagggaagaggagcatgaaggaaaatcaacaagaggcagaaaatcgagagtcacagcaaggccatagcatggctttaaaagaactagactttattttcttggcaagaggaaggccctgaaggttgatggaagtacagttagcctggcagtggaaggaacatggactggtgtgttgaaatcagaccaccggragggagacccatcaggaggctcttgaaataattttcaaacactgtaagaaacgtctttcactctgctaccctcctctcccatgacctgccccagctcctccaaaatgtcacatagtgcctctcctgtctgttccagcactttctggtctctggagccatgacattctcttaataactcatgttttctcatgctggggacccagttatggggaaaacttcccagcagctttctgctgaattggtgggctcattccatcaccaagcccaccgacagcggcttcccggt

SEQ ID NO: 465323 - DNA, 538 bp, Homo sapiens
aaggcatgttagtctgagtatgatggggcagcatgagctggtagggaagagagctctcatgcagggaagaggagcatgaaggaaaatcaacaagaggcagaaaatcgagagtcacagcaaggccatagcatggctttaaaagaactagactttattttcttggcaagaggaaggccctgaaggttgatggaagtacagttagcctggcagtggaaggaacatggactggtgtgttgaaatcagaccaccggaagggagacccatcaggaggctcttgaaataattttcaaacactgtaagaaacgtctttcactctgctaccctcctctcccatgacctgccccagctcctccaaaatgtcacatagtgcctctcctgtctgttccagcactttctggtctctggagccatgacattctcttaataactcaygttttctcatgctggggacccagttatggggaaaacttcccagcagctttctgctgaattggtgggctcattccatcaccaagcccaccgacagcggcttcccggt

SEQ ID NO: 465324 - DNA, 597 bp, Homo sapiens
gtaagacaccacccagcctaaatgtgatcttttgctgctgtttaatgaaatgtgtcagggttaggaagatctgcacaactcagtgaacaaatattttccaaatggccaatgyatggtgttacaaaatcacacacaggtaaagatctatccacactgcgtgatgggccaggggattacaacacagcagagtatgaagatttaatgataaagtttcagattccacattgtaaccaatgtttaagaaatcgcttcatgcaaattctaggatagtatcaaagaatattcacgacaatttggaaagtactgttaaaccacctctcccctttctaaccacatatctttgtgaggccagatttcattcagctcttacaaccaaaacaacatattgcaacagattaaatgcagaagcgaataaaacaagccagctgtcttctattaagattttcaaaaacaataccagccttcttgctaaaaacttttttgtttttgaaaatagagttatttttcctaaaactatgttacttattttaactacaaatccagtaaataccaatacaaattacccacatacacacaaaaatatttgatgtgttcagt

SEQ ID NO: 465325 - DNA, 597 bp, Homo sapiens
gtaagacaccacccagcctaaatgtgatcttttgctgctgtttaatgaaatgtgtcagggttaggaagatctgcacaactcagtgaacaaatattttccaaatggccaatgcatggtgttacaaaatcacacacaggtaaagatctatccacactgcgtgatgggccaggggattacaacacagcagagtatgaagatttaatgataaagtttcagattccacattgtaaccaatgtttaagaaatcgcttcatgcaaattctaggatagtatcaaagaatattcacgacaatttggaaagtactgttaaaccacctctcccctttctaaccacatatctttgtgaggccagatttcattcagctcttacaaccaaaacaacatattgcaacagattaaatgcagaagcgaataaaacaagccagctgtcttctattaagattttcaaaaacaataccagccttcttgctaaaaacttttttgtttttgaaaatagagttatttttcctaaaactatgttacttattttaactacaaatccagtaaataccaatamaaattacccacatacacacaaaaatatttgatgtgttcagt

SEQ ID NO: 465326 - DNA, 647 bp, Homo sapiens
tcactaatatgaaattccaccaaatgaatatcctgaaaaacattctcaaactccaagaataacatgagtatgagtttaccgtcaggctatctaaggagattcagtctattgacctctttatccccagacactacgaggaccatataattaattatccacactaggctgggcgtactagaacaggtttgagagtgaaaggagctttattaaacacaccaggccaacagacaaaacaggattgccttaaaaacaaggaatgcctcccatcagagataagtacactaactgcagaactcagtccctacataaattgcttgtctcactgcatattgtggttcgagggattaatcaatcctatttgctcttagggaggaacagttattccccacacttcatgtttccatggggaggcacytgagtgtaacatgcccttctggcccctctatcatcaggtgatgagtgacttgtctaacaaaaagagttagtagaggaaactgattacagtatattctgcaaaccacaatggttctctctctgcctagcaggctgggcctgccccattgtggcacctggagatgcccagagctgtccatgactgggggtatgaatccatctaatccagtcagggcgtttgagcaagccatttg

SEQ ID NO: 465327 - DNA, 576 bp, Homo sapiens
tgttacatgtttactcctaagaccctcacccttgctgttccaactggctggaaacagaggctaaagtaatctagggacacacaagaaagaaagcaagaaattcggtggacaaacatctctcactttttatgacaaaatactttttaaagtatgataaaatactttttacttttaaagttgtttgaataaaagattttttaaaggattgagcatcatataaattttcacacatacatacagaaatcctgaatagattcagctgtaggaatttattcctgtttaaggataaaaagattggcaggatggttggagagaataaataaatatcttaaagtggctctaagaagtgggagattccagaagcaccaatcccagagacacaccaccacrgggaatgtggtgatacctaccctgcacacacacgcacacacacacacacaccacatatatatatatatatatatatatatatacacacacaccacatacacatatacagacacacacaccacatacacatccatgcttacacatacaaacactattctgaacatcattgatcttctaagtaaaaaa

SEQ ID NO: 465328 - DNA, 596 bp, Homo sapiens
gtagaatgtgtaacagaggaaccttgtgttttattctggagtccgtgccctttgttgtccccatacgcacaactgaaggagttcatgccagatactgtcattgatgccctttgaccttgcccaaattgcttcacccctgggcccccatttccatattttgaaaaattaaaaggttgaactgtataagtctgtaaagtcatttccatattgaaacatgttgtagaaagaaractttttttggatcatttaaaaattttgtaactatctacaagatagttttgggtgattattttcaccctttttcacttggacatcattcctaaattttcgatgaaatgtttttcatgattaattcttccctcaccaaacaacatgtaagtttactctttggttgatggaaaaacacatatttaattttatttttcaccttatgtacttgttcatttgtcccttattaggggacaaatgaggaggcttgtcttccttagacagaagtttttagggcagtagtttttaaacatttttgattcaagtgtcatactactgccactaaagactcaagagaatcaactcattaagtatttgggagtcagaaa

SEQ ID NO: 465329 - DNA, 603 bp, Homo sapiens
aacaatattgagatcaataaaaagatgcttttagtttgaaaaccttctcttaaacttttcgaagactctttttaatttactaaagcagacagttgaagacagttgaagagtaaaaattaaattatttaatttaaattaacaattaacaattaaatcatttctttgtctctataagacattttccctgcaataattgttttggtaccatgaataataaattgagaaaatcaaaccactctttttagagcctgttatgggccagtcactttcaaatgcatcctgtgggctatgtagtattatttttattttttaaacgggaaaggttaggctcaatgtggttaaaytgtttgcccagactcttaccactaacaagtcctggtgtttgcacccacatttgcctgactgtgaagcctaactctttggacatgccattcagacagggcatgagaaacatctcctctgtcaccaacactctgaaagaaagtcagctatttaagtccaacataagctactgtgtattacttttcttccaggagtctcaaattacagatggacaatctggtgtgattgttactatctcatgcttattaaacagagtcacaa

SEQ ID NO: 465330 - DNA, 470 bp, Homo sapiens
gagtctcaaattacagatggacaatctggtgtgattgttactatctcatgcttattaaacagagtcacaaagtcttgggaccagtggagagaggaacagtgtagcactaaaggacattaccaaagcgcattagagacattcttagaagcctgttgaaaggaagattatgcagcctcccccacttcccagcagcaamagtacaatttctaagtctaacaatcacccctttcagacttttctgaagttgtggtctctcccaaaatattaaaaattatatgatatagtgagaaatagtttaatctttcattacggactgtgaaagtttcttttcaaagcatgataggatctgacagagtaatgcccagctgtctaagttcagcacatgtgaaaatccaggaaagtaacaaagacagtgtttgtcacatgtagattaaaccacaagcaatagcaagctatagcaaggttaatgt

SEQ ID NO: 465331 - DNA, 588 bp, Homo sapiens
aaattatatttatcattgaagtatgtaatatttgtagatattagtaatataaatgtaatattagtacaattttctaaacaagaactcaggtttaactttaaatgttggttcaaaaatagaatcaaaatagggaaagttaatacagttcagaatacagcaatacagcaatataaatacatctttttgaaaccatagataaaaacctgctacatgacttttcttatcttcattcttagagacctatttattagttcactttcataatttttcttacattataatgtactatgtctacatcaactccctaagcacagaaaacatttgaatccatttgtttacagtgtacctataacaaacctgaacatatgccctgaactaaaaataaaagctaagtaaaataaaataaaaaattacaaaaggaatcttaccaaagactacacagaaaacagcaaagaagtatacagaaagattatcaatatcatttgtcattaggaaattgcaagttaaatcagtgagataatactatatamctgttagaatgactaaaatctaataaccgataattccaaatgtttttgagaacttaga

SEQ ID NO: 465332 - DNA, 500 bp, Homo sapiens
ttggccggcagtggttggaggaagagctggccactgagcggsccagctccaggagaagaccacctttctactccatgtcccttctggctaccatccatctgctgagagctacttctaccacacaataataccttgcactcattcactaagcccatgtgtgatttgattattctggtacactaaggcaagaactctgggatacagaaaaccctctgcccttgggattaggagaggatctaattgagctaattaacccaagccacctgtggacagctgaactgaaagcacacattggtacatacacccactggggcttcaggagctgtaaacactcaaccctagacattgctgtggggtaggagcccacattccccacaacctgcctgtctgcatgctacccttaggggtttgagctgcaggacacctaagaagtgagccacagccacatggcacactctgtgagggggataagggaacttttcccatttcagtgtgatacc

SEQ ID NO: 465333 - DNA, 634 bp, Homo sapiens
acttcgtttgaaaactcacactgaagtcttagcacatcagtttggtctgacaaaaacagtgcagattttcaaactagacaaacctagatttagtagcttgataaatatctataagcaagtaagtgatttaagcaatttaatctctctgagcataaatttagaaagaaattaattaagccaatatttattaaaattttttattggatggccttatgctcatttacagaatttacttgtgagaacgcacatagactttgctttgatcaggtttatagtcttattcaataattaatgtgataaatataattagaagtccactgctagtcattgaggaaaaacaaggttcaggcttaacctcccyttataaacaactagaaatctctgcaaaatatataaaataatacttttaaaaatattaaacaaaaagcatacaactctaagtacaaatagaagagaaacatagtgaatattaagtcaagcactatgtgtgtatatttttattaattaaggcaattttaagactgtacacacaagaaatgaaaaagaaaacagagcttggcagaccttctaacttgaggtgtcagagttagtagtgtcaggatgctcaggtaattgaaaattgcaggctagagtt

SEQ ID NO: 465334 - DNA, 571 bp, Homo sapiens
accttttttgccaagttattatcatcatgagatttttccaggctctgtctttgccacttgctagagatgcacctatttccttttaggacctcccatgrctatcttttgtgtttggattctataatcttttatcatactctgtaacttattttatagttaaaatattaaaggcagaagacctctggacttaagtgagtgaacttattagtcccagatctataattgttctatttaacaggcaattaaattcagtttcatattcaacagatagaggttgattaattgttgacccaaaatgaaattattcagttattaaatatcagtaatatttgttaaaagaatatgcagtcgacccttgaagctatcaaaaaccagtcatgtaaccactgactccccaaaacttaacaactagttacctactgttaacaaaaagacttactgataacctctcttttaacacatattttgtgtatgtattacaaactgtattcttacagttgagttagcaagataaaaggaatatcattaagaaaatcagtaggaagagaaaatatatatttttatttattaa

SEQ ID NO: 465335 - DNA, 615 bp, Homo sapiens
taaattcaaatttaactgggcattctgaattttatctggcatcttatccctgaacctatcaataagaaatttctctcttggaactaaatattagcccaggtggaagagaatataggaatgtggaaactaaactttttaatgtgtacagggtccttactttacaactttcctgtgaggtaggaccaaagtctttaatcctcactttacaagtgtagactctgtgttaaagagttgcgaaataaaagagctgggattcaaatcaagatcctctgacaktttgcagaggactctgtcaatcactacactaaacaaacttaaaaaaggaagaattaaagagactggctagaaagggctgctttagcaagtagaaatacctggtacaagcatggacactcttttctgttttcacgcctaagtaagcaatcatcagtctatgttcttcacaggctaagagtggccattaagaaaaaaaaacaagtttagatttcaacagcatgtttggatttgacattttgcatttcaagaaaccaaggtcagctcaatccttttagcactgggacccagataccaccatgatttaagtaaacaacaaccctactgaatttaagggtaagt

SEQ ID NO: 465336 - DNA, 615 bp, Homo sapiens
taaattcaaatttaactgggcattctgaattttatctggcatcttatccctgaacctatcaataagaaatttctctcttggaactaaatattagcccaggtggaagagaatataggaatgtggaaactaaactttttaatgtgtacagggtccttactttacaactttcctgtgaggtaggaccaaagtctttaatcctcactttacaagtgtagactctgtgttaaagagttgcgaaataaaagagctgggattcaaatcaagatcctctgacattttgcagaggactctgtcaatcactacactaaacaaacttaaaaaaggaagaattaaagagaytggctagaaagggctgctttagcaagtagaaatacctggtacaagcatggacactcttttctgttttcacgcctaagtaagcaatcatcagtctatgttcttcacaggctaagagtggccattaagaaaaaaaaacaagtttagatttcaacagcatgtttggatttgacattttgcatttcaagaaaccaaggtcagctcaatccttttagcactgggacccagataccaccatgatttaagtaaacaacaaccctactgaatttaagggtaagt

SEQ ID NO: 465337 - DNA, 615 bp, Homo sapiens
taaattcaaatttaactgggcattctgaattttatctggcatcttatccctgaacctatcaataagaaatttctctcttggaactaaatattagcccaggtggaagagaatataggaatgtggaaactaaactttttaatgtgtacagggtccttactttacaactttcctgtgaggtaggaccaaagtctttaatcctcactttacaagtgtagactctgtgttaaagagttgcgaaataaaagagctgggattcaaatcaagatcctctgacattttgcagaggactctgtcaatcactacactaaacaaacttaaaaaaggaagaattaaagagactggctagaaagggctgctttagcaagtagaaatacctggtrcaagcatggacactcttttctgttttcacgcctaagtaagcaatcatcagtctatgttcttcacaggctaagagtggccattaagaaaaaaaaacaagtttagatttcaacagcatgtttggatttgacattttgcatttcaagaaaccaaggtcagctcaatccttttagcactgggacccagataccaccatgatttaagtaaacaacaaccctactgaatttaagggtaagt

SEQ ID NO: 465338 - DNA, 570 bp, Homo sapiens
tttcaccatgttggccagactggtcttgaacttctggtctcaagtgatctgccctcttaggcctcccaaagtgctaggattacaggtgtgagcacacatgcccagcctaggtgctcattgtttctttacaatgttttatgttaaatattaacaaaaaaagactaaataatgcacacctatgtatctgcaaatacgcattcagttgtctttaataatcctttgctaatcttgcttcagatggattaagtgtgygtgcctgtgtgtggtgtgtgttttacattacagattagaacttaggtcctctggattcacaaccccgaatcccatttgtttttcttcctttccaaagttgtcattatcgtgaatttggtgtttagctatcccatgcatatttttacactactgctataacatatgtagttataaaatagcattgttttgtatgctttaaaactttatttaaatgggaccaactgtttatattatcctgatcttctttcccttatcaacagtatgcttttgtgatttatctgtgatgttccatataggtcaaattctttcatttttatt

SEQ ID NO: 465339 - DNA, 570 bp, Homo sapiens
tttcaccatgttggccagactggtcttgaacttctggtctcaagtgatctgccctcttaggcctcccaaagtgctaggattacaggtgtgagcacacatgcccagcctaggtgctcattgtttctttacaatgttttatgttaaatattaacaaaaaaagactaaataatgcacacctatgtatctgcaaatacgcattcagttgtctttaataatcctttgctaatcttgcttcagatggattaagtgtgcgtgcctgtgtgtggtgtgtgttttacattacagattagaacttaggtcctctggattcacaaccccgaatcccatttgtttttcttcctttccaaagttgtcattatcgtgartttggtgtttagctatcccatgcatatttttacactactgctataacatatgtagttataaaatagcattgttttgtatgctttaaaactttatttaaatgggaccaactgtttatattatcctgatcttctttcccttatcaacagtatgcttttgtgatttatctgtgatgttccatataggtcaaattctttcatttttatt

SEQ ID NO: 465340 - DNA, 553 bp, Homo sapiens
gattccttggtggcagtctgcctagcaggcacagggtagatgaggggagtctgttcccaggcgagttgttggctgcttttgcatgaagtaagatcaagtaagatcagagtggttgtcatttgacaaattcctttcaagcaattgcttccatgtgtcagaaatggttacaacaattgctaccattatgcattaatgataatgcattaacaataatgcttatagcatttgatttcctataaagtatttttcaaatatttgttatatcatttgatactaacaatgacattgagaagcaaggattcctttttattacattttgcaggtgagaaaactgatcctggaatggattcattcattcaacaaaattttgagtgyatactatgagctaggctctgaggcatgggaaagtaaataagacaaatatggtcccaatctacacagagcttacattttaatgggaaagacagaccctaaaaattaattacacaattaattgtttaattacagccctgattagtgctgtgaagaattaagtacgtgtttgtacacataa

SEQ ID NO: 465341 - DNA, 553 bp, Homo sapiens
gattccttggtggcagtctgcctagcaggcacagggtagatgaggggagtctgttcccaggcgagttgttggctgcttttgcatgaagtaagatcaagtaagatcagagtggttgtcatttgacaaattcctttcaagcaattgcttccatgtgtcagaaatggttacaacaattgctaccattatgcattaatgataatgcattaacaataatgcttatagcatttgatttcctataaagtatttttcaaatatttgttatatcatttgatactaacaatgacattgagaagcaaggattcctttttattacattttgcaggtgagaaaactgatcctggaatggattcattcattcaacaaaattttgagtgtatactatgagctaggctctgaggcaygggaaagtaaataagacaaatatggtcccaatctacacagagcttacattttaatgggaaagacagaccctaaaaattaattacacaattaattgtttaattacagccctgattagtgctgtgaagaattaagtacgtgtttgtacacataa

SEQ ID NO: 465342 - DNA, 551 bp, Homo sapiens
tttattcatgaacattgatgctattgcagccaaagttccttgacttctctgaaaatgctttttatctggaaccaaaaagcatccaggtaaatccaaatctccagaagcttcacccaaatgtgcttctagagtggagctgagatctgaggcaaaatcacggtcatctttgtactaagagccaactggggcccaaaggtttctttcccaacatccaaccaccctgatcaagtgagaagggagtggccatgagaacagggatgagtgcctcctcccctygacccacacactctcagaacattgcacagcctttggacataggggcaatagctcttttaaagcacaaagtttcaggctaccttagatttgtctattaatatattctaggccaactgtgaagccttctgcaagccacaaaatcctcccactgtcaatatttccatacataaaataaaggaggctgctaccatacctacctcattatattgttgaatggtttataaagatgctcagtgggatttctttagtacagtactcctaccacaaaataagtg

SEQ ID NO: 465343 - DNA, 612 bp, Homo sapiens
tcagaattagtgacattttgccatcaaatttatatttcctgttcagagtggtggctatacggcagcatactgataccactagaaaaataaatgcaataatactgtaataatagccactaccatttattaagtactagctttgtgtcaggaaccgaacacagttcggactgaaatagaaatttttatcttcacgtgaactttatatataaacagactcctgagccccagagcaagagatgggctatactagcctctttacttcctgctcacactagtgaaggaggtggcttcccttttggtccctcacctttcctgcccattcccctgccccagtactgcctcctcaaacttctccttagctcctattttatttctcctttgcttctgcaagaaggagccaagccctgctgcttactttaggacagcccctccatcttctcaacgatatagaacattgaccagacctgtaagagtatttatttattgtatycaacacagagtaggctcttcataaaaatttgctattttgaattgccttaatcaaattgttcccatagataattggttccagcttcaacttaaagagttagctataataataagacacaacaa

SEQ ID NO: 465344 - DNA, 560 bp, Homo sapiens
gagctgtgggatttagtgcctgtcattctctcacacttgacctgctacctgtgttaactcactttgcatttcatgcctctgtggttttaaaaatgatgttccagcaggaacacctgcttctcctgtggttgcctaggcatttattttctaaatgaattcaggagatcatcttagaagccttccctgaccacctctttcttacctgctgatgtctttagccctctctgtctttcttaggtgctttatrtactcttctaactgtgactcaaaaaagtataattccagttataatgtttgtctttctaattgactatgacctccagtgagggcacagacattacaaaaaactcattttgccccaagaaacagcccagtgcctggcagttagtgattttgttgattaaagataaaatagatgaaggcataatctctgcctttagagtaagtcgtaaacttctggggccaggcaggtaacatcaacatagacaatatgagcataaacggtagagaatggaggagcatggggagaattctatggtgactgcggaaagtttggctcc

SEQ ID NO: 465345 - DNA, 498 bp, Homo sapiens
  misc_feature (1)...(498): n = A,T,C or G
cgaaggaggcatacgagcctatctacagcacatcccctgcacttaccctcctcccagatacttgtgaaacattagtgctgggtgcagcttgagatggtgtcatccagggtggaggtrggcacaggggtaaggtggaggaagccagagcaagtttgctcattgtggaaaaagatttgagttttgcatgtcaacctgaagtcaagccctcaccaaaaaaagtgaagggtgnnaaaaaaaagggcttctttctgagtccaagaaaagaccaagtttgctggaattttaacctttaacttcttacaatgtaatttccttcattgtcctgagccttcaaaaaaaaaaaaaaaaaaaggttttattgaaaatggaattggccgggcaccgtggctcacgtgtgtaatcccagcactttgggagaccaaggcaggcagatcacttgagttcagaagtttgagatctacctaggcaatataatgagacctcatcactactaaaata

SEQ ID NO: 465346 - DNA, 290 bp, Homo sapiens
gaaagttatttttcaggttattttgacattatatttcaaaatagtttgagagttttagggggaaaatcttttaatattgcgccattaaaaacattttctatttaatgtttaccattatagttttgttttgtttttttgaggtggagtcccactctgtcacccaggctggagttcagtggtgcaatcttgagtcactgcaacctctgcctcccgkgttcaagtgattctcctgcttcagcctcccgagtagctgggattaaggcatacaccaccatgcccggctaattttt

SEQ ID NO: 465347 - DNA, 603 bp, Homo sapiens
ataagagtttttgtgtcctctcctttattttttgacatcagagggctgaaaactccaccctcagatcaccrctagtttttgaacatggagactcgtgaagctgtattgcacatgtgtgcacatgtggacacacacacacacaatttctcctttcataaatatttatgactcctcctactgcttattgaatatgtatatgtggccaccctactcagcataaatccctgttccctttgacccttcctcaaagtatctgtttctggcttctggctggaggctatgcttcccagtctttcagaatggctacctgcaagctataatcctctataagaaacaaagtctcctcttctcgttttctacatttataagttgtgtttttcttttaagctaacacatgggagatactaggagaaaatgaggtggcttagaattcaggcttgaaaccattttcagctaaagacaaatggaattgtcacaatataccccaacagacagaccaaatggactttctgtggctacaatgagacaaagcaaaacaacaacaacaaaaaaaaccctaaaacaaacaaacaaacaaaaaactccagaatttcatggctagta

SEQ ID NO: 465348 - DNA, 603 bp, Homo sapiens
ataagagtttttgtgtcctctcctttattttttgacatcagagggctgaaaactccaccctcagatcaccgctagtttttgaacatggagactcgtgaagctgtattgcacatgtgtgcacatgtggacacacacacacacaatttctcctttcataaatatttatgactcctcctactgcttattgaatatgtatatgtggccaccctactcagmataaatccctgttccctttgacccttcctcaaagtatctgtttctggcttctggctggaggctatgcttcccagtctttcagaatggctacctgcaagctataatcctctataagaaacaaagtctcctcttctcgttttctacatttataagttgtgtttttcttttaagctaacacatgggagatactaggagaaaatgaggtggcttagaattcaggcttgaaaccattttcagctaaagacaaatggaattgtcacaatataccccaacagacagaccaaatggactttctgtggctacaatgagacaaagcaaaacaacaacaacaaaaaaaaccctaaaacaaacaaacaaacaaaaaactccagaatttcatggctagta

SEQ ID NO: 465349 - DNA, 603 bp, Homo sapiens
ataagagtttttgtgtcctctcctttattttttgacatcagagggctgaaaactccaccctcagatcaccgctagtttttgaacatggagactcgtgaagctgtattgcacatgtgtgcacatgtggacacacacacacacaatttctcctttcataaatatttatgactcctcctactgcttattgaatatgtatatgtggccaccctactcagcataaatccctgttccctttgacccttcctcaaagtatctgtttctggcttctggctggaggctatgcttcccagtctwtcagaatggctacctgcaagctataatcctctataagaaacaaagtctcctcttctcgttttctacatttataagttgtgtttttcttttaagctaacacatgggagatactaggagaaaatgaggtggcttagaattcaggcttgaaaccattttcagctaaagacaaatggaattgtcacaatataccccaacagacagaccaaatggactttctgtggctacaatgagacaaagcaaaacaacaacaacaaaaaaaaccctaaaacaaacaaacaaacaaaaaactccagaatttcatggctagta

SEQ ID NO: 465350 - DNA, 603 bp, Homo sapiens
ataagagtttttgtgtcctctcctttattttttgacatcagagggctgaaaactccaccctcagatcaccgctagtttttgaacatggagactcgtgaagctgtattgcacatgtgtgcacatgtggacacacacacacacaatttctcctttcataaatatttatgactcctcctactgcttattgaatatgtatatgtggccaccctactcagcataaatccctgttccctttgacccttcctcaaagtatctgtttctggcttctggctggaggctatgcttcccagtctttcagaatggctacctgcaagctataatcctctataagaaacaaagtctcctcttctcgttttctacatttataagttgtgtttttcttttaagctaacacatgggagatactaggagaaaatgaggtggcttagaattcaggcttgaaaccattttcagctaaagacaaatggaattgtcacaatataccccaacagacagaccaaatggactttctgtggctacaatgagamaaagcaaaacaacaacaacaaaaaaaaccctaaaacaaacaaacaaacaaaaaactccagaatttcatggctagta

SEQ ID NO: 465351 - DNA, 633 bp, Homo sapiens
attatgtatttcagaaataacaaaaacatcagataatgactttccaatgttttttcatgatgaaaaatgtctggatatatggaactcactttagtttccatatgtacatatctagctatgtaacaaaaatgtgtcacacacatatgacacagaaattagatgtgttaaatatgagactgctttctggtttgctattttatcttaatagtatatagacatactctcatgaatctttaaattttatttttgtttatttacttatttattttgagacagggtccagctctgttacccatgctagagtgcattgcacaatcatggctcactgtggcctcgaactcctgggttcaaatgatcctcccacttcagcctctggatcagctaggactataggtatgtgtcaccatgcccagctaaattttgtattaattttgtagagacagggtctcgctatgttgcccaggccagtttccaactcctagccataagttttcctcctaccttggcctcccaaagtgctaggattacaggcagaagtcacggtgcctgrcccacttataatttcttcaggtgagttatgggggaaagtgttattgtctcagttgatgtagggaaatccacatgcaatctaag

SEQ ID NO: 465352 - DNA, 633 bp, Homo sapiens
attatgtatttcagaaataacaaaaacatcagataatgactttccaatgttttttcatgatgaaaaatgtctggatatatggaactcactttagtttccatatgtacatatctagctatgtaacaaaaatgtgtcacacacatatgacacagaaattagatgtgttaaatatgagactgctttctggtttgctattttatcttaatagtatatagacatactctcatgaatctttaaattttatttttgtttatttacttatttattttgagacagggtccagctctgttacccatgctagagtgcattgcacaatcatggctcactgtggcctcgaactcctgggttcaaatgatcctcccacttcagcctctggatcagctaggactataggtatgtgtcaccatgcccagctaaattttgtattaattttgtagagacagggtctcgctatgttgcccaggccagtttccaactcctagccataagttttcctcctaccttggcctcccaaagtgctaggattacaggcagaagtcacggtgcctgacccacttataawttcttcaggtgagttatgggggaaagtgttattgtctcagttgatgtagggaaatccacatgcaatctaag

SEQ ID NO: 465353 - DNA, 554 bp, Homo sapiens
tgcaatctcagctcactgcaacctctgcagccagggctcgagtgatcctcccacctcagcctctcgagtagctgggactataggcatgcaccaccacrcctggctaattttttttttttcttttttttgtagagagcgggtttcactgtgttgcccaggctggtcacaaactcctgggctcacgtgatcttccagccttggcctcccaaggtgctagattataggaatgcaccactgtgttcaacctccaaccatttttttaaaattaatgattgacatttgaatgggtgtgaaatggtatctcggtatggttttgatttgtattttgctattgattagtgatgttgagcatcttttaatgtgctttctgccatttgtgtatcgtttttggaaaaatgtttatttgcccactttttagttaggtttgttgttaattttttgagatgtttcaaagtcacatatttagatctgttattgcaacttttatttcagctaaaatttaaacatataaatatatatagttttgctattttctatcctctccacctcctatg

SEQ ID NO: 465354 - DNA, 554 bp, Homo sapiens
tgcaatctcagctcactgcaacctctgcagccagggctcgagtgatcctcccacctcagcctctcgagtagctgggactataggcatgcaccaccacacctggctaattttttttttttcttttttttgtagagagcgggtttcactgkgttgcccaggctggtcacaaactcctgggctcacgtgatcttccagccttggcctcccaaggtgctagattataggaatgcaccactgtgttcaacctccaaccatttttttaaaattaatgattgacatttgaatgggtgtgaaatggtatctcggtatggttttgatttgtattttgctattgattagtgatgttgagcatcttttaatgtgctttctgccatttgtgtatcgtttttggaaaaatgtttatttgcccactttttagttaggtttgttgttaattttttgagatgtttcaaagtcacatatttagatctgttattgcaacttttatttcagctaaaatttaaacatataaatatatatagttttgctattttctatcctctccacctcctatg

SEQ ID NO: 465355 - DNA, 484 bp, Homo sapiens
ttacttataattgataggaattgatatgaacatttsacattactatatggtatcaataattgtcatttttaatggttgtactaacattctattgaaagaaaatgccaaaatgtaaacagcatttacttattgttatatacttggattatttgaatttttcggcatgtaagttatattttgacaaacaactttttggaattaatttttttttaatatttgatttggagttaatgaaagaaaactcttatcctttagtacaaagttgcctttctagtgtgttatactatttttatatgcccacagcagtgtgtcagagtcattaaaacttaatcattggaaacttgtaaacatagaaatgacataatgttattcacaatttagatgaaaaaatagtgggcagaagtagttagaaactgagtgcagcaaataaggcaagaaaaattatgtgaaaacctaaaaatatttaatagcacaagcaattatt

SEQ ID NO: 465356 - DNA, 546 bp, Homo sapiens
aggctttataacctaatcaatacctacctatatattacttttagcatgaagcaatgagacaaaattcaaagttgtcatctatttaaattttatgtagaactgagcattttcttctactttttttctgaaagtatataaacttactctacacaacattttcttctctcctaaaataatgatggagaagatcaaagccagccttttcaattcatgacgttcataaaatctgcaactaagttagttcaacaactgtgaaaagcagtgtggtgatttgtgtggtgattcctcaaagaactacaaatagaatgaccattcaactcagcaatccaatactgggtatatactcmaaggcatattaattgttctaccataaggacacatgcactggtatgttcactataatagcaaagaaatggaatcaacctaaaagcccatcaacggtagactcattcaagaaaatgtggtacacatacaccttggaatactatgcagccataaaaaaaaccacaggaccatgtcctttgtaggaacatggatggagctgat

SEQ ID NO: 465357 - DNA, 580 bp, Homo sapiens
gaagacctgaggatataaagaaggtaactcagcaaaaatttagctgtttttctcaaccctttaaaggtgttgactgcataaaaagtatcaccagtgtaaaaaccttgtacaaaaagtagggacaagaaaaaaatgcatcaaaaagtgctgcttttcttcttgatctatgtgcccacctcaagtatgttgcattaggtataattgactactcacaccaaataagttaaactgtatgcttaaatgtgtggtygcttaccgtcaacccattgcccagctgaaatctgttattcttctttttccaaccttccgttagaatgtttattttttcctcattatttattatttatctttatttattattgttaatgtttaaaactgagttttcctctgagtacaactttatctcaaaaatgttgctatgtactgtttcactatttttatttctaaatattttataatttcattttttcaatgtgtaattttgaaaattttaaaatgatgatattttacttgtttttattctcaacttatagttttattacaatattatcaggaaagacagtattatggggtttcaatg

SEQ ID NO: 465358 - DNA, 413 bp, Homo sapiens
ggtggcaagtgagcatgctacccagctgagggaactgtgctttttctgcagaactgtgcaacccatggactggaagatcccacttgcaaacccatgccaccggggcctagtgtcccagacccagaatgcacaaatgcttagtgcctcttggctggaatgtgcttaagcctaccaaactcctgaggtgaggggygaccagcactggctgtggctgcctactgtctaagccctttgagctccttgtgagaggagcagcagccaacactgggactcgcaactgcctaatgcactaagctcactgggttgggaaatggtggcacccatctccatagctccaggctgtgctttttccctgctagagctgggggggctggacggcttggtcccaagacttgtccccacagcccaacaca

SEQ ID NO: 465359 - DNA, 427 bp, Homo sapiens
gcctactgtctaagccctttgagctccttgtgagaggagcagcagccaacactgggactcgcaactgcctaatgcactaagctcactgggttgggaaayggtggcacccatctccatagctccaggctgtgctttttccctgctagagctgggggggctggacggcttggtcccaagacttgtccccacagcccaacacaccagctgtggtagtctgtggccagagtgcctcttcaggcctaaatttcactcatccttcttcagtgggtggggtttccctgcaggaactccaataactccactcagaggctccatgacaaaatccagatctccctgggcctgagcccctagggggaggggtgaccacagtctctgtggaccagcagacttagcttcacctcctggtagttctgaggaatctggttag

SEQ ID NO: 465360 - DNA, 644 bp, Homo sapiens
ctgctttcttatccctccttaattcttgttttcccacttccccactatataaaccccccaagttgagctggtttgggagatgaatttgagacgttatctccctttckcctcagctacggcacctgattaaagccttccctggcagtacttgtctccgtaactgtcattctgtgtggtgagcctgatattctgataacaataactcacgtctatttcaatatttaatattagacgtgctttggatctttatttagatatttggtggtgtttttgtgaccaggaatatgccataagaagttaaatgttgtttatatcaatgaacctatggtaacattgctttcatcatacattatttcatttaaagtcacattttccaggaacctatggatgatgttaagtgagaacttactgtattacaaagtttgtgcctcgtaggcttcagtgccaagtgacaatctatttcttatatccattaaatacacaagtacattaggcaaaattaggtgatcttataacaaactgttttattaagtttcaccaataaattaaatattgaaggataactgttcttcaaacacaatcttaatttaataatttactatttactaatttggaaagtgatacatagcaaggagttgctggcc

SEQ ID NO: 465361 - DNA, 644 bp, Homo sapiens
ctgctttcttatccctccttaattcttgttttcccacttccccactatataaaccccccaagttgagctggtttgggagatgaatttgagacgttatctccctttctcctcagctacggcacctgattaaagccttccctggcagtacttgtctccgtaactgtcattctgtgtggtgagcctgatattctgataacaataactcacgtctatttcaatrtttaatattagacgtgctttggatctttatttagatatttggtggtgtttttgtgaccaggaatatgccataagaagttaaatgttgtttatatcaatgaacctatggtaacattgctttcatcatacattatttcatttaaagtcacattttccaggaacctatggatgatgttaagtgagaacttactgtattacaaagtttgtgcctcgtaggcttcagtgccaagtgacaatctatttcttatatccattaaatacacaagtacattaggcaaaattaggtgatcttataacaaactgttttattaagtttcaccaataaattaaatattgaaggataactgttcttcaaacacaatcttaatttaataatttactatttactaatttggaaagtgatacatagcaaggagttgctggcc

SEQ ID NO: 465362 - DNA, 554 bp, Homo sapiens
attccaaatagagaggacaataatgtatagggacaaagatgggaagaaatttgaaatgtggaagracacaaagaagaccatgggacatagtgagcatggtggtggggggcaggtaagagaagagttcaggaagagaggcagggacagtcctgcacccctgaaatccaagatgaaaactgtagatttttatgctaagtgcactgaaaagtatttggaggtatttaagcggtgggagaatatgagttgatttacaattttaagagataactttggcgatttgtagtgaataggctgtaaggcggcagaagtagacagaggcaggcaagtttagaggctttttctctaggaaagaaaggatggtacagtaattgtatcaggactgtagtaaggatgcaagttaatgacttaaaagtgcaatcaacaaaacttcatggattacacaggagaaggcaggtggtgagggatagagatgaatggacgaatgcttggggaggaatcatgaattctactttggctattaaaagtttgatttgtctctatcaaaatagacatgt

SEQ ID NO: 465363 - DNA, 554 bp, Homo sapiens
attccaaatagagaggacaataatgtatagggacaaagatgggaagaaatttgaaatgtggaaggacacaaagaagaccatgggacatagtgagcatggtggtggggggcaggtaagagaagagttcaggaagagaggcagggacagtcctgcacccctgaaatccaagatgaaaactgtagatttttatgctaagtgcactgaaaagtatttggaggtatttaagcggtgggagaatatgagttgatttacaattttaagagataactttggygatttgtagtgaataggctgtaaggcggcagaagtagacagaggcaggcaagtttagaggctttttctctaggaaagaaaggatggtacagtaattgtatcaggactgtagtaaggatgcaagttaatgacttaaaagtgcaatcaacaaaacttcatggattacacaggagaaggcaggtggtgagggatagagatgaatggacgaatgcttggggaggaatcatgaattctactttggctattaaaagtttgatttgtctctatcaaaatagacatgt

SEQ ID NO: 465364 - DNA, 479 bp, Homo sapiens
tttttccagaatgatctatttaaattgtcaaagaagtcaatacctgctccctgtgtccactctcagcttgcatttagaagttccaagatcaatatttctttaagcatcaaaatggcccagagccaactggtgagacaacaatctttcttttccagattcagctcatcagcattaagctatgccaacagagcacaaatgtaccctggatgcaaagcaaaacattcaatccaaaaccacagggttttcatcaacatgataccaagtaaccagtgcaattgtctccacaccagcctgctagtcccccatggaattktctagctgctatgacttaagtaaatgcagccttgtgagcttggacattcaggtgcaaacaagctctgtaaatcataaaacatgttgccagccctctgtagaataaatggcatactaacaaataccaagagaaattatgatgttcccttcccctcgtgtcacttgtc

SEQ ID NO: 465365 - DNA, 515 bp, Homo sapiens
cataggtatttcttttatgactatgtcttatcatttctcatgagagtcacatttcatatccacagaaactcaacatgaagtggcttccccaggttctctcagcttgtaggtggcaatgtcagggcctgcgctaaatcttccatcatcaaatcttttgcttttcctwctgaggcgcagaggctcagagactcccagcctcactgtgttcacactttgggaggaaaggaaaagacctctggactcaggagatctcacttagctattctctgactccccgtctattccaccaaaaatgagaatggccagaggatgttcccctggagcatgtcagtgtccttcaactttcctccctgtttcctgtcttgtcactgcagttcactcttcaaggagtggccaggacaatatttttaaaacataaataccctttgctctcctactcacaccttccagtactttcactttgtacctccaattaaacaatgaaaaggtttttattacaatttgcaagaccccac

SEQ ID NO: 465366 - DNA, 515 bp, Homo sapiens
cataggtatttcttttatgactatgtcttatcatttctcatgagagtcacatttcatatccacagaaactcaacatgaagtggcttccccaggttctctcagcttgtaggtggcaatgtcagggcctgcgctaaatcttccatcatcaaatcttttgcttttccttctgaggcgcagaggctcagagactcccagcctcactgtgttcacactttgggaggaaaggaaaagaccwctggactcaggagatctcacttagctattctctgactccccgtctattccaccaaaaatgagaatggccagaggatgttcccctggagcatgtcagtgtccttcaactttcctccctgtttcctgtcttgtcactgcagttcactcttcaaggagtggccaggacaatatttttaaaacataaataccctttgctctcctactcacaccttccagtactttcactttgtacctccaattaaacaatgaaaaggtttttattacaatttgcaagaccccac

SEQ ID NO: 465367 - DNA, 609 bp, Homo sapiens
accactaatctgctttctgtctctatggttttatcttctttagatgtcatataaatacaattgtacaatatttgatttgtttgtggcctctttcaggtagcacgtttttgagatacatctacattgtagcatgcatcagaactttctttttattgctgaataatactccattttatagatacaccttattttgtttatttrggttgttttcaccttttacctcctgtgaatagtgctgctatgaacatttgtgtacaaatgtgtgagaacctgttttctattctattgattataaactgggaatataattgctgagtcatgtggcaattctgtggctttttgagaaaccatgtaactgtcttccacaatggttgtaccactttacatttctaccaacagtgtatgaaggttccagtttccccgcatccttgccaatactcactgttcaccttttattttttaattctaggctttccagtgggtgtgatatagcatctcattgtggttttggtttgcacttttctaacaattaacaaggttaaacatctttttatgtgcttgtgtgccatttttatgtctaggaaaatatctattccagttctttgccca

SEQ ID NO: 465368 - DNA, 593 bp, Homo sapiens
cctagttgtatatatctgatttatgctctggaaaggggtgcatacttttttatgtgtctttttttaaacccaaacataataatcttggtctaatttccattaaaactaactctattccttgttatcaggtgagtcataaagaagatattcccaaggattccccatcataataagaaaagagttgctaataattagggctgatgaacaattagatccaccaggtttctcctggttcaaatattcaaatagtgactgtatagaaggcacctggcaccaggtaagggcttggactcgatgacctctaaactacaatcaaaagctgagagtctgtggttgtatttgcctaaatatctcccgtctcttctrttttcataggcactttttatcacaagctattgacagcacagatttttatctaatgcatataaatgaatgtttatgagaaattccagaatgttttataagacactactttttaataatacaaggctgtaagggtaaaagtctaaattttcaacaaaataaccaaatttgcatataaccggtctatgcaaaggcaaagtggaattgaaaaattcaagaaaatgccaggt

SEQ ID NO: 465369 - DNA, 565 bp, Homo sapiens
tatctaatgcatataaatgaatgtttatgagaaattccagaatgttttataagacactactttttaataatacaaggctgtaagggtaaaagtctaaattttcaacaaaataaccaaatttgcatataaccggtctatgcaaaggcaaagtggaattgaaaaattcaagaaaatgccaggtagccttttttaagtggtgggagtcagtaccarttcaagagccagcatcttttaacatttttatatccaggatactagaccaagtctcttgacattcaaaagaataattcttcatgacttaatcttagcaacaagaagtgatttcacagcatcccctccattttgacccccggtcagtatcctctgaccattttatggcttgttttatttgtcttttaaaataaatatgaatcaacatacccaagaaaatgaatcttgcactactgaatggcattcctgaggaagtgaatttagcattactgaatgttggctatcaccattgttatgacttttaggggattttttgttgttgttgtttcaggtttagataggagcatgcattatt

SEQ ID NO: 465370 - DNA, 565 bp, Homo sapiens
tatctaatgcatataaatgaatgtttatgagaaattccagaatgttttataagacactactttttaataatacaaggctgtaagggtaaaagtctaaattttcaacaaaataaccaaatttgcatataaccggtctatgcaaaggcaaagtggaattgaaaaattcaagaaaatgccaggtagccttttttaagtggtgggagtcagtaccaattcaagagccagcatcttttaacatttttatatccaggatactagaccawgtctcttgacattcaaaagaataattcttcatgacttaatcttagcaacaagaagtgatttcacagcatcccctccattttgacccccggtcagtatcctctgaccattttatggcttgttttatttgtcttttaaaataaatatgaatcaacatacccaagaaaatgaatcttgcactactgaatggcattcctgaggaagtgaatttagcattactgaatgttggctatcaccattgttatgacttttaggggattttttgttgttgttgtttcaggtttagataggagcatgcattatt

SEQ ID NO: 465371 - DNA, 602 bp, Homo sapiens
gtaattgagttgctcttccttttactcatcactgttaagccaggtatgcaaataacactgaggcattttggaaggttatttgagtcctgctgtttgttcaagcaacatttgagaaacactattaggaaaatgtgtgcatgttctacatcatttgagatataatgaatcttgattattagattaatcatattatgtgtgtcaactagaaaaatgtgccttatttgaggggtgatatttttgtcagcaggtactagtgaggatgttttttggtaatctattgaaagatgaagtcacagatttttttaaggaggttttagcttatatttgactgaggttgaagaagccaatttggaaggcagctacttgtgaagctctctagatattaagtgttatttctaaaacaaataatcactccaggaaattgtaaagaccatgatcccaggaaaatcttaggagacagtagagcatagaaggaagaacaatgaactaggaatragaaactgctatgccagtaactaactgtatgtgtgtcttaggacaagttacttaactagtgtcaagctcacgttctgcgtttgagaagtaaatgtggttgcgtgttt

SEQ ID NO: 465372 - DNA, 609 bp, Homo sapiens
ggcatgcatttacagacagatgcaaaatgttctctttcacagagggagtgaggttgtccctccattgaaccaggttatttgctttactatagataacaattatttacatttccatctaaaacttgaagagttgtaaaatagctcacaacaatgaaaaaaatgcagcctccatataatcagaatcacgtaactggaaaatgtgtactataaaaagtgcatagaattcttaaaagcacacattttyccccggaatcaaaggcgaaacatggacatatatatatatatgtatatttcactcagccaacaggacaagacagtggaatttctgaaatgctaagttgaatattcctttgaggtatatagtttataccattgcttctaactacattagaaagcaccagccacattcagtgataagattgcaattaaataaatatcctgctctatgatctcaatttaactgatatttccttctgattgaaagaaatctgaaggattgagtgagaggaggtaaaaatacatctcctcctaatacaaggataacatcaggaaatctgcatggagaagaaggtattacattactttcatggtatatgaacattatcgtca

SEQ ID NO: 465373 - DNA, 515 bp, Homo sapiens
aagatgtttccattttttaaatgtcatcttcaatttatttcatcraagtattacagttttcattgtagaggtctttcacttctttggttaagtttattcttagatactttattttactttttgtagctattacaaatggcatttttttcttgatttctctttcagattatttgctttggtatataaaaatgctactgaatttgcatgttgattttatattctgtgacttcacactgaactcatttatcagttctaacagttttttgacagagtttttaggtgtttctcaatataagatcatgtcatcttcaaacaagaacaatttgatttcttcctttccaatttagatacctttctttctttctcttgcctaattgctctggttaggattccagtactacattgcataaaattggtgaacgtgagcatctttgtcttgttcaagatcttagaggaaaagctttccatttttcccctttcagtatgatattggctgtgattttgttatatatgga

SEQ ID NO: 465374 - DNA, 561 bp, Homo sapiens
ttgtccaaatccagcccaccacctgtttttctaaataaagtgttacaggaacacaatcatgctcatgcacttacatattgctgatttcacatccagtgtaaaggtggaacggttacaacaaaaccatatcatccccaaaacccttaataactagccctttacagaaactgtacagatccctgttgtagatgatacaaaggaagaagttggcaccctcaacttcagagaagtcagaggtcaatattagctaaacagtttgggaagaaattcatagagaatatattgttgagctaggtgctgaayatattttaagaaaattttacaaaacaaatattgtacatttttccaatgtccctaggtttgaaagtgcctgtaaaacaactctcacctagaaacaaagaaaaattaataatgttaattatatttctgtgaacatttatagagcaagatgacattgttaagttaaaaaacacagaagctagaaaaaagtgagtttttattttaaagaatttttacatttttacttttgtatttcctaacagaatgtgaattcacatattt

SEQ ID NO: 465375 - DNA, 549 bp, Homo sapiens
atagaattcgcttggaactggaggtaagctgcatgtgaatgcaatgatgtttataagtgtttgggaaagggtagggaatttatgcatttagtctatagttcacattttcccagcttctgttatatgccagacactggatatgatggagcaaaagatcaccccctctcttcaacctgatccttctgtgatgtccccatttcagggaataatgccatcattaccagctgccccactcaaagcccagaaatcgttttgttcttctcatgtactctctcgcaccacacctaggatttagcatggatcaaccacrcttcttgctcagtcaccttctaactggttttcctgtctctagtcttgcccctgctctaattcattccccatctgttgcctgaacagtggttcaaaatgatgttaccctcttgaaaactttcaatggctactgttatattttagggtaataaaataatgcccaaacttacatgatgcgttatgaactagcattcgcccctccttttttcctcaggcacacaaactattctacccttcctc

SEQ ID NO: 465376 - DNA, 554 bp, Homo sapiens
agatgacaaaagaaattgggcaaaaatggtctttaaaaaaaagtcatcagccgggtgcagtggctcatgcctgtagtcccagcattttgagaggccaagacatgcagatcacttgaggtcaggagttcgagaccagcctggctaacacggtgaaaccccgtaaaagtacaaaaattagccaggcgtggtggcgtgcacctgtagtcccagctattcgggaggctgagacaggagaatcacttgaacctgggaggcagaggttgcagtgagctgagatcgtgycattgcactccagcctgggtgacagtgagacttcatctcaaaaaaaaaaaaaaaatcaagtttgagaaataacattttaaaaaatattgacttggctaattcattgacttgtctccttgttctcctctcagaatacctctgaaaacttgcaaaccctgtaacccacaatgaacgcagtaatttcatctaagtagtaacctgggcactgagggggtggggaatctagctcattatttaacatttattaagtatgctgtgtcctaaacattatg

SEQ ID NO: 465377 - DNA, 554 bp, Homo sapiens
agatgacaaaagaaattgggcaaaaatggtctttaaaaaaaagtcatcagccgggtgcagtggctcatgcctgtagtcccagcattttgagaggccaagacatgcagatcacttgaggtcaggagttcgagaccagcctggctaacacggtgaaaccccgtaaaagtacaaaaattagccaggcgtggtggcgtgcacctgtagtcccagctattcgggaggctgagacaggagaatcacttgaacctgggaggcagaggttgcagtgagctgagatcgtgtcattgcactccagcctgsgtgacagtgagacttcatctcaaaaaaaaaaaaaaaatcaagtttgagaaataacattttaaaaaatattgacttggctaattcattgacttgtctccttgttctcctctcagaatacctctgaaaacttgcaaaccctgtaacccacaatgaacgcagtaatttcatctaagtagtaacctgggcactgagggggtggggaatctagctcattatttaacatttattaagtatgctgtgtcctaaacattatg

SEQ ID NO: 465378 - DNA, 511 bp, Homo sapiens
ggttaacagtggttaccatgaagaggtagggtaatgagtgttgctttctccttttgttttcagcattcttgaatttttctatgtaaacaagaaytgtttgattaaattagaattttgaattagttactgtcttcaatcagtaatcgatcattttattatttttattattaacttgaaaaaataaattctagatgtgtgtgtatatgtatatatgtatacatgtgtatataaaatctaaaatatggatggttttgtcatcatgttatattctaatttctgatattaaaaaaagattacaagaggtaattgtgagattatttcttgttactaaggttaatcacatttaagtctagttagcaactgggtcactggaaataaataatttggtgatttgttgtgatgaaatactaacatttggctatgtttgttacttgttaaaataaccaaactgcttttaattacactaatttttaaaacaaatatgaatttttaacttttcatattaaagtca

SEQ ID NO: 465379 - DNA, 511 bp, Homo sapiens
ggttaacagtggttaccatgaagaggtagggtaatgagtgttgctttctccttttgttttcagcattcttgaatttttctatgtaaacaagaattgtttgattaaattagaattttgaattagttactgtcttcaatcagtaatcgatcattttattatttttattattaacttgaaaaaataaattctagatgtgtgtgtatatgtatatatgtatacatgtgtatataaaatctaaaatrtggatggttttgtcatcatgttatattctaatttctgatattaaaaaaagattacaagaggtaattgtgagattatttcttgttactaaggttaatcacatttaagtctagttagcaactgggtcactggaaataaataatttggtgatttgttgtgatgaaatactaacatttggctatgtttgttacttgttaaaataaccaaactgcttttaattacactaatttttaaaacaaatatgaatttttaacttttcatattaaagtca

SEQ ID NO: 465380 - DNA, 604 bp, Homo sapiens
aggtactacgcttttcccaccatcttcgcaacccagagactaggagattcccttgggtgcctacaccacaaggtttcaagcacaaaactgtgcagccatttggacagacaccaagctaggtgcaggaggttttttttttttttttgtaccctagtgtctcctggaatgccatcaagacagaaccattcacttccctggaaagggggctgaagccagggatccaagtggtcttgcccagcagatcctacccccatggagcccagcaagctaagatctactggcttgaaattctcactgacagtacagcagtctgaagtcgacctggtatacgcaagcttggtggygggaggggcatccaccttattaaggcttgagtggtggttttcccctcacaatgtaaaacaagccacctggatattaggactgggtggagcccacctcagtgcctcaaagcccctgtagccacactgcctctctagattcctcctctccgggcagggcatctctgaaagaaaggcagcagccccagtcaggggcttatagataaaactcgcatctccatgggacagagccccagggggaaggggcggttgtgggtgcagct

SEQ ID NO: 465381 - DNA, 609 bp, Homo sapiens
tcaaataactaacatcaattattctcaaactattccagaaaattgaagaagaaagtactcctaaaattattctacaagcgcactgttaccctgatgccaaaaccagagaaggacacacacacaaaaagagagctataggccagtattactaatgaacatagatgcaaaaatcttcaacaagttgctagcaaaccaagttcaacagcacatttaaaggatcatccaccatgataagatggaattcatcccaaggatgcaaggatggtttagaacatgcaaatcaagaaatgtgatataccatatttacagaaaggaggacaaaaatcatatgatcatttcaatagatgcagaaaaatgcatgtgataaaatccaacatctcttcataatagaaactcagcaaattaggtatagaaggcacatacctcaacaccataaaggctatatatgaaaaatccacagctaaatcatagtaatcagggaaaaattgaaagcttttcctctaagatctggaagaaggcaagyatgcccactttcaccacttctattctacacagtactggaagtcttagagcaattagaccagagaaaaaaaatagaggcatttgaat

SEQ ID NO: 465382 - DNA, 594 bp, Homo sapiens
acaattacagtcctcttttctgtagctggtcacgtggtcgtaactggtattgatgactaccttctcctactacccattctgtattccctttgccttcagtacctcaggaggtcatggtttttttcttggtgaagtgacccaaaccttcattcctgaggggtctggaccatttgtagtcctgcctggattgggctgttgtagtttcccattgaccttaatcacagggcatggtaatactaagagatgccctaatggatctcctgtattccgtacatactcttccttacattcattatggagtagtagactgatttcgtcttgatagtctgggtcagtcaccccagtgaacactgtaactcccttcttagtctgttgacttaaatgtaggagaaacccaaagtatccaggtggcaaccttaacttccagtttaatggaatcrttgttttgtctcctggtggcaatgttcctccctctggaactaagacctctaggccaagagaatgtaatcttgtgggaacaggaggcaaacattttgctaatggatcactaggggtgatggtgagtggtgctacctccacttctactccttaatt

SEQ ID NO: 465383 - DNA, 604 bp, Homo sapiens
aggttgggaatagattggggataagcaatagaggagacattatcagtcagtgctaatcatgtgtgatctggtaccagaccactagagtttgaaacttgaatttataatagatatttataaaaakatttttattagttctgtggacctggacaaacttcagttttgtcacttacttaaagagggataatttagggttgttgtgaagattaggtgttacagtactttaaagtgcttagtccagtggcatgtggtaaacatgagatacacaacagctattattattgttgttgttagaaagctcctaaacagaaatcatagatgaaggtattggtgtcaaaaagtaaataagcatcaccttttcttactgaggaagatagtactgatgatgttatagtttacatgtacgaggtaaaataaaggagaaaatatcagatggactcaagttttgtttgtttgtttgtttttttttcaaagaagggagttagattatcaattgggaacaaatgcttaatcatactagatttggtttgaaacaactttgttccgttgacaaagagaattatgcaataatgataagtaaaataatgggtggaaaacattgaag

SEQ ID NO: 465384 - DNA, 604 bp, Homo sapiens
aggttgggaatagattggggataagcaatagaggagacattatcagtcagtgctaatcatgtgtgatctggtaccagaccactagagtttgaaacttgaatttataatagatatttataaaaatatttttattagttctgtggacctggacaaacttcagttttgtcacttacttaaagagggataatttagrgttgttgtgaagattaggtgttacagtactttaaagtgcttagtccagtggcatgtggtaaacatgagatacacaacagctattattattgttgttgttagaaagctcctaaacagaaatcatagatgaaggtattggtgtcaaaaagtaaataagcatcaccttttcttactgaggaagatagtactgatgatgttatagtttacatgtacgaggtaaaataaaggagaaaatatcagatggactcaagttttgtttgtttgtttgtttttttttcaaagaagggagttagattatcaattgggaacaaatgcttaatcatactagatttggtttgaaacaactttgttccgttgacaaagagaattatgcaataatgataagtaaaataatgggtggaaaacattgaag

SEQ ID NO: 465385 - DNA, 553 bp, Homo sapiens
agggaaattaaaaccaaggacaggtagttttcagataaaatacttgagcctgtttagagatgaaacagaaggaataagaggttgggaatagattggggataagcaatagaggagacattatcagtcagtgctaatcatgtgtgatctggtaccagaccactagagtttgaaacttgaatttataatagatatttataaaaatatttttattagttctgtggacctggacaaacttcagttttgtcacttacttaaagagggataatttagggttgttgtgaagattaggtgttacagtactttaaagtgcttagtccagtggcatgtggtaaacatgagatacacaacagctattattattgttgttgttagaaagctcctaaacagaaatcayagatgaaggtattggtgtcaaaaagtaaataagcatcaccttttcttactgaggaagatagtactgatgatgttatagtttacatgtacgaggtaaaataaaggagaaaatatcagatggactcaagttttgtttgtttgtttgtttttttttcaaaga

SEQ ID NO: 465386 - DNA, 529 bp, Homo sapiens
ttacaccggaagaaactgaggcctacaaacattcaggtgctaagatgaaaaggttagttcacagtagcaagactagaatacacatttattgacattttgtcttagtgttcttctctgcactatctaacatgattaaacctgaaaggagattaaagttgagtaagcctctaaactgcagaatgtaagaccggggtgaaatggaaggagacccgaaagaactcaattggttcctaagggaaaattaagggcaaataaagagaaggtaggtgggtgatgaagaaggggtactgataaattcctaacagagcrgttttgtcagggccatcacagcagctacacagcattttaaaacagcattaaacctattgtcaagatcctctcacacagtaaaactagtatggatgggggcctttcaaggttatatcctttcatctactctctaaagctgttttataatagtcaagaggattctgtacagtgctttatttcagctttgctctcattaaggactcataaacttaattactaa

SEQ ID NO: 465387 - DNA, 450 bp, Homo sapiens
aaatgcttttaacagcacccaagtcacctcttgaatgttttgctgcttagaaatttcttccaccagataccctaaatcatctctctcaatgcaaagttccacaaatctctagggcaggggcaaaatgccaccagtctgtttgctaaaacgtaacaagagtcatataacttacagttccacgtggctgaggaagcctcacaatcatggtggaaggcaaggaggagcaagccccatcttacatgtatggcagcaaagaaagaatgaggaagatgcaaaagcagaaaccccagataaaaccatcagatctcatgagacttactcactaccatgagaacagtatgggagaaactgcccccatgattcarttatctcccactgggttcccaacaagttgcttcagttcccaacaagttcctcatctccatctgagaccacttcagcctggaactt

SEQ ID NO: 465388 - DNA, 549 bp, Homo sapiens
cacaactaatagctgatcttagctaggagaaggggtgtggtggtctaggaaggcttccctgagaacataaactgaagttaacaaccaggtaaaaagaggctggtagctaggagagtgtgttccagacagagggactagcacatacaaagggcctgargcagagaggagtttggacctgtgaggtgttcatgcagaatctaaagacatctcaaggttcaggggtgctgtgagaatgggcatttaaatgagggactaaggggagtgtacttaggtctttctcaaagaccaaagtaccagagagaactcatcaaaggtgaaggacgatgggtaaaaggctgatagacagctgaaaagtaacaataaaaacctagcaagccaagaaataacaggagtagttaactgtcttgcacacagttcatactctgggattccccatcacaatagtaaaatcagctataaacttgaaatgttaaaacaaatcggtagattgagttgcagaggacacagtggagaaggaacattggaaactcctccaaggaaggaatagga

SEQ ID NO: 465389 - DNA, 353 bp, Homo sapiens
tgccacaaagaaagtgtttagcgtcggttgtttcttcttactttattggacaaagaaggtggggtagggaaaaaaacctagttcttctcacccgtgcctctcaaaatgattttttgaatcytgtcatattttgtgtttctgaaaaggtgtttggcagttaaccttttttaaaaaaaattcattgacaagattcttgaggtttattgactatttttcataattactattcatgcttttaaaattctcgtcaggtatacattatcttggttttccgttccttgcatcagaccgttaatcttacatttcttagggttattaaattacagtggctcacacacagacacctccctgta

SEQ ID NO: 465390 - DNA, 575 bp, Homo sapiens
tattgctttagacttggaaagcccctccccactattagaaaagttaaatattcaccttcattttattttacttttttatatgaatgattttattttaacatttagctattaattcttctgaatttttttaatgtatatgtgcataaggtgaagttcttacttgatatttttccaaataastagccaatttccccatgtcattgtttaataatctatccctttccaattgccttgtcctatatcatcatgtattacatccatgcgtattgtatatatccagttatgtgtgtatttggatcaactttttgattattttgttcggtttattcttgcgatcatatcatatgttttttgtttttgtagaattgtgcaagttttcaaacatatagcaaaatacagaaagtaatgaacactatgtgcctaactcccagaattaacaaataattagcatatgtacctcagatatttttaaattaataaactttatcttttaataaagtgtaaaatagaatagtctttggttcatagcaaaattgagcagaaggtacagagatttctcatatactgcctgcccc

SEQ ID NO: 465391 - DNA, 623 bp, Homo sapiens
tttgtattgctgaaggctgaggaggttttctgctgagctttctcagggtttgaggagtgatggcctaaataagaaggaagggtttggggttccttgtaagggactgagccttggggttaggggttcagggttctggtgcctgagctctagaagacctatatttaatgtgaagctctgaatgtgtttaagcaagccactagaataaagaaccactgaaaggggcaccatttggttgtcatggtgccagaaaataagccyagcaccgctgtctaagaacagcttttgagagagggcgctgtctgagccaccagttagtctagtcgtgggggtcagtgggtgcacctccccccactgatgcttcaaatccttgaatgctgaatcatttgatcaacagggtggaaacctcctctctaaccccaggactcccttaagctcagaaggggccacttctatgactcgtgacttttcagaggtcattcaaagggcagcttgagtctctggtctgcaaaatacaggttgtggagcagatcagggtttcaccagatggttttatccttgcccactggatctaattcttttcaggccacatactaccacggcccattttcagggatggggcctct

SEQ ID NO: 465392 - DNA, 467 bp, Homo sapiens
acccactcagtgctgctttggggagcttcagtttcactcctcactttcgagaagtgcaaacaattctgttgacactttcccatccttgcattctctctccttcctcttcttctcactctgtatgccctcaaataagaataaatcttgtctggatggcaataagaagcaaatctaatcagatttgggagatgtggtcaaagctcagagaataaacggttatacagatcctttcccgttccgtttctgtttccagcctgccatttttacctcactgcaaagagaaaatggaattgatggagatataggaaaaatatgtatgtatgtgtgtatagatacamaccaatatatctatatatatttacattggtacccagtaagagtgaaaactctaaatggttgttgtcagggacaatgtgtgttttcccagattttgttctgtgaattgaaaccgactttgctattataaa

SEQ ID NO: 465393 - DNA, 542 bp, Homo sapiens
aaatgtctcccagccaagacccagtgagcttgccaaattgtttcacctcttttattgtcagaactcatcgcccctcctcacaytgttgtgcttttctataatattttaggtatattaatcataaatcctggaattgtttatctacaaaaaattgaagtcagggagtcatggaatagtcatttatcatgggctttggctcagtgacttgaaactaaaagtagaagaaaaacaaaagcactgattgtgtagaggtggccaaatgcctggaggttaagtgaaatgaaattaaagaaaaaagaagtcctctctgatccttagcagaaattattcactttctgaaagaagctttttctctattgagacttctatttggaaatgtatattatagatttttttttgcctgttaatctgctaaatgttcatttaacaatagaaaatgtttgataataaaaccattgctttttctgatagaggtacttcaattatgaggattttataaacgtgttctaagtattcaatgcttaatagtggggttgctatac

SEQ ID NO: 465394 - DNA, 542 bp, Homo sapiens
aaatgtctcccagccaagacccagtgagcttgccaaattgtttcacctcttttattgtcagaactcatcgcccctcctcacactgttgtgcttttctataatattttaggtatattaatcataaatcctggaattgtttatctacaaaaaattgaagtcaggragtcatggaatagtcatttatcatgggctttggctcagtgacttgaaactaaaagtagaagaaaaacaaaagcactgattgtgtagaggtggccaaatgcctggaggttaagtgaaatgaaattaaagaaaaaagaagtcctctctgatccttagcagaaattattcactttctgaaagaagctttttctctattgagacttctatttggaaatgtatattatagatttttttttgcctgttaatctgctaaatgttcatttaacaatagaaaatgtttgataataaaaccattgctttttctgatagaggtacttcaattatgaggattttataaacgtgttctaagtattcaatgcttaatagtggggttgctatac

SEQ ID NO: 465395 - DNA, 623 bp, Homo sapiens
gtgctgcaataaacatatctgtgcatgtgtctttatagtagaatgatttataatcctttgagtatatacccagtaatgggattgctgggtcaaatggtatttctggttctagatccttcaggaatcaccacactttcttccataatggttgaactaatttacactcccaccaactctttatccattcgtctgttgatggacacttaggttgtttctgaatcttggctattgtgaatagygctgcaataaacatgggaatgcagacatctctttgatatactgatttccttattgggggttatatacctagcagtgcaattgctggattatgtggtagctctatttttagttttttgaggaagctctctactgttctttgcagtggttgtactaatttacattcccaccaacagcgtatgagggttcccttttctccacatcctctctggcatttgttattgtctgtcttttggaaaaagcaatttttagctgggatgagctgatatctcattggagtttggatttgcatttctctgatgttcagtgatgtcgagcaccttttcatatctccatttgccatttgtatgcctgctttagaagaatgtctattcagatcttttgcc

SEQ ID NO: 465396 - DNA, 623 bp, Homo sapiens
gtgctgcaataaacatatctgtgcatgtgtctttatagtagaatgatttataatcctttgagtatatacccagtaatgggattgctgggtcaaatggtatttctggttctagatccttcaggaatcaccacactttcttccataatggttgaactaatttacactcccaccaactctttatccattcgtctgttgatggacacttaggttgtttctgaatcttggctattgtgaatagtgctgcaataaacatgggaatgcagacatctctttgatatactgatttccttattgggggttatatacctagcagtgcaattgctggattatgtggtagctctatttttagttttttgaggaagctctctactgttctttgcagtggttgtactaatttacattcccaccaacagcgtatgagggttcccttttctccacatcctctctggcatttgttattgtctgtcttttggaaaaagcaatttttagctgggatgagctgatatctcattggagtttggatttgcatttctctgatgttcagtgatgtcgagcaccttttcatatctccatttgccatttgtatgccygctttagaagaatgtctattcagatcttttgcc

SEQ ID NO: 465397 - DNA, 497 bp, Homo sapiens
acatgaacagtcacttctcaaaagaagacacacaagtggtcaattaaagtatgaaacaatgttccacatcactaataatcagaaacatgcaaatcaaaaccacaatgagacaccatctcacaacagtcagaatgtcaattattaaaagtcaaaaaacagcagatgctgatttggctgcaaagcaaagggaagggaatgcatacactgttgataggaatgtaaattagttcagccactgtggagagcagtttggagatttctcaaagaacttagaactaccatttgacccggcaaccccattactgggtgtatatccaaaagaaagtaaattgttctactgaaaagacacatgcacttatatgttcattgcagcactattcacgatagcaaagacatggaatcaacctagttgccgattaacggtggattgrataaagaaactgtggtatatatgctatctgtggaatactatgcaggcataaaaagaaatgaagtaa

SEQ ID NO: 465398 - DNA, 651 bp, Homo sapiens
gtgagcagtgtgtcataacctcatttattgcctcttcaatgactttgggaattatttgatgagatttaaagggaaatttgattgtaggatatggagagtgacaggtgcaatacatacagggctttggaaattattcttgttaataataaaaacaagcatgtaatttgattttccataatgtgatcttcaaaagcaaatatttattttcaagctggaaatcatttttatctattgaatgagataattgaatatgctattttgctaaaaaggaaagattgcttttaacataaaaagtgacacacatgtttttattwcactccatatatttaatcacaatgaacggccaattgctgagggagccttatgtgtggatatcttaaatagaggttcataaagaatgtttctgctacttgttttcaatcaactgaaatgtattcattagtagaatgtggttaaactcatttgagcatgcttaaagatggggtatccaacccaacaaatgggaaaatcatcccaacaaacctctttctcttccccttctagtgttttcctctcaaatttttatttactttattttttttgatctacttttctatttaactctacctccaatttccaagttcaaagtgatcactgataggtagtaaatgt

SEQ ID NO: 465399 - DNA, 640 bp, Homo sapiens
gaattcctaaccctcagaaacgatcaggagtaatatgtgcttgttttaagctgctgagttttggggtaatttgttttgtgacaagataccttattgtccattacaaactgcaccctatctttgctcttgacattcccagcccttttatactgcttgcttttttgggggcggggcaggtctggctctgttgtacaggctggagtgcagtggcacaatctcagctcactgcaacttccacttcccgggctcaagacatcctcccaccttagcctcccaagtagttgggactacaggtgtgcccccactacactcggccaatttttttgtattgttttgtagagatggggtttcacyatgttgcccaggctggtcttgaactcctgggctaaagtgatccacctgccttggcctctcaaagtgctgggattacatgtatgagccaccgagcccagccgcttactttcttaatatcctcctccctcccttccttccttccttttccccctttctttctctctctctttcttgttctgtagcagttggcactttctaactttttaaattcacttattatatttattgtctacatcctcctaaaatacacgttttataaaagtaaaggttttggcccatgatgtta

SEQ ID NO: 465400 - DNA, 553 bp, Homo sapiens
ttcctgtccatagaacagcaaattgagtttggaaaaatggaattgattattgctgtgtggatattgactgcttttgctagttctgcaatcgtttgtaaattcatttctgctttccttatctgactataaagattctttttgaaccatgtcaaaactagtcgttctctcattaggtaatacgttacataattttttgacattttatcttttatttgtgtgtcatgattatgtcctcttataaaagttatccttgaatactagcgtgtactcttaagtctagttgcctgagttcaaagtcaattgyctggctctgccacttacttgaagggacttacttactttgctccagtttacctaaatctgagcctttgttgacaggcttattttgtagaatgagaataattgtagtattgtcagaggcatttgaaccagagctactccatcttgaataggggctgcgtaaaataaggctaagacctactggggctgtattcccaggaggttaggcgttttagtcacagggtgaggtaggaggttggcacaagatacaggt

SEQ ID NO: 465401 - DNA, 623 bp, Homo sapiens
gtgctgcaataaacatatctgtgcatgtgtctttatagtagaatgatttataatcctttgagtatatacccagtaatgggattgctgggtcaaatggtatttctggttctagatccttsaggaatcaccacactttcttccataatggttgaactaatttacactcccaccaactctttatccattcgtctgttgatggacacttaggttgtttctgaatcttggctattgtgaatagtgctgcaataaacatgggaatgcagacatctctttgatatactgatttccttattgggggttatatacctagcagtgcaattgctggattatgtggtagctctatttttagttttttgaggaagctctctactgttctttgcagtggttgtactaatttacattcccaccaacagcgtatgagggttcccttttctccacatcctctctggcatttgttattgtctgtcttttggaaaaagcaatttttagctgggatgagctgatatctcattggagtttggatttgcatttctctgatgttcagtgatgtcgagcaccttttcatatctccatttgccatttgtatgcctgctttagaagaatgtctattcagatcttttgcc

SEQ ID NO: 465402 - DNA, 566 bp, Homo sapiens
acttctttaaaaacacaatttacctcactggattcctatccacagattttcaagtcattgtgaaatattttgatttctagaatcaagacactgatcccaggcgattcttctgaactaatttttgtctttgtctcttaacagctttaattcatagcagaagtaaactcccatggtatgaacaacactcctctgtaattttgatttgtaagcggtgctcttttttttttttttaaacaagacttccctgagctggtagggttttcttaatccttaagaattctgaatttaacatctaattcaacatgaaggagaccaagttagcacatgttktactctttttctccccctctgatactcttaaagccatgtcctgctctatgtaaggacaacccctctcattttagcctatctactcattgactttgttcccgtgggtatccttttatctcttgaattctttctcctgaatcatttcaatcaggctgtgaacatactgtttcatatcttatcttaaaaacaaaaatctagtagacaaacagaatagaacccttgactccactgcatct

SEQ ID NO: 465403 - DNA, 566 bp, Homo sapiens
acttctttaaaaacacaatttacctcactggattcctatccacagattttcaagtcattgtgaaatattttgatttctagaatcaagacactgatcccaggcgattcttctgaactaatttttgtctttgtctcttaacagctttaattcatagcagaagtaaactcccatggtatgaacaacactcctctgtaattttgatttgtaagcggtgctcttttttttttttttaaacaagacttccctgagctggtagggttttcttaatccttaagaattctgaatttaacatctaattcaacatgaaggagaccaagttagcacatgttttactctttttctccccctctgatactcttaaagccatgtcctgctctrtgtaaggacaacccctctcattttagcctatctactcattgactttgttcccgtgggtatccttttatctcttgaattctttctcctgaatcatttcaatcaggctgtgaacatactgtttcatatcttatcttaaaaacaaaaatctagtagacaaacagaatagaacccttgactccactgcatct

SEQ ID NO: 465404 - DNA, 597 bp, Homo sapiens
aatattcctcttgctaaattttgtcccttgttaactttaaggaagaaaacacctttggttgagtggcaagacactagtctccagctgatagccagcaagaaactgaagtcctcggtccagctacccactaggaatgaatgctgccagtaatcctgtgcacttagaagcagattgttccgcaactggacatcargtgagactgtagcctcaaccaaaattgagaatttaatgctgggagaccgtagagcaggggacccagctaagccactcctagatttcctagatcccacagaaagcatgaggtaacaaatgtgtgtcattttaagcctccaaatttgtggtaatacttgaacacagcagcagaaaactaacacagtaacccattagatcatgcttcttcctaagatgaaagatagggcattatctgtgcattcagttccatactgctggatgacttgttttagttgtgtgtggaccttctgatggtaatcattccaacaccagttaagggtcaggtttgcttattcttttggtggaaaatgcatttattggatcatttgatgggacagtgacccccccacacacacacacagcatt

SEQ ID NO: 465405 - DNA, 473 bp, Homo sapiens
tgcgccaggtgatgaaatttgtcatacagcaaacatcaggtagatctaaagcagaaaacttagggttgtataagtggcatgcttttcttataagatctgaaaawgcgaaacagcctctgaacatataccatctgctctctagctcttttccaacctataactctaggaaagttctatggcaaagtctagcttctgtgaagggccccagttgtagtctctttggggaaaagaacctgcatttgtaggtataatggacatagggactgttaacagcaattacctctacgaagtcagaccagatgagagaaaacagtacagtcaagaaaacttttctaatatgcacaaatctgcatcatttatgatatgatattttagctgaaacaaattcagaaaccaataagtgtaagatattacctctttaaaatgtgacatttccttattcatgactaagtaaaactataccttataggtga

SEQ ID NO: 465406 - DNA, 578 bp, Homo sapiens
ccacaatgcatttcctcgactctcatctgttggttctgctccaggctttttgtcatgcatttttagtatgtctggttgcctcaccctcttcctataactgtcctagattttccaccccaagtcacctctttttttttatttcacaaagtaccattctgcaatgttactttgtaacagactttagctaaaaactttggttcatagagcagccttacagcacaaaaccgaaagatataatcaaacatcaaaaaagcaatattcttggagtcaatctgcccatcatcatgtttttggacrtggttttcttgtttctttcctgagttccacaaccccaatttctagcttttggactaccatcaaatcaaagccaactttctactcctttgtccaactttatttcttttattcatttgctccttatttcatataatatcctggatccactttttataacttttcgaaatttattttcctaaagaagaaagccttctcttcagggttccatctttattcaaataaccatctaaagacttcacaaatctccaatcaaattttaaaaggggcttgctatagtttga

SEQ ID NO: 465407 - DNA, 578 bp, Homo sapiens
ccacaatgcatttcctcgactctcatctgttggttctgctccaggctttttgtcatgcatttttagtatgtctggttgcctcaccctcttcctataactgtcctagattttccaccccaagtcacctctttttttttatttcacaaagtaccattctgcaatgttactttgtaacagactttagctaaaaactttggttcatagagcagccttacagcacaaaaccgaaagatataatcaaacatcaaaaaagcaatattcttggagtcaatctgcccatcatcatgtttttggacatggttttcttgtttctttcctgagttccacaaccccaatttctagcttttggactaccatcaaatcaaagccaactttctactcctttgtccaactttatttcttttattcatttgctccttatttcatataatatcctggatccactttttataacttttcgaaatttattttcctaaagaagaaagccttctcttcagggttccatctttattcaaakaaccatctaaagacttcacaaatctccaatcaaattttaaaaggggcttgctatagtttga

SEQ ID NO: 465408 - DNA, 572 bp, Homo sapiens
acagaacttataagtgacaaagacaggattctaaccaggtctgtaaaatcctgactcgtctgctattcccagtagatcttaaggtcctctcttttcaagcattataacataatcttattatccataagcatatgcccacctgcattgaaaaggctcagagacatacccttggggccaattgctactttccctgtggcacctgtcaccaattcctatttctttatatacctagaacataactggartaccaaaaataaaagccccaaaacatgccctcaattaggtagaaattttaatcctatcataaatcatcattctaggctacttgagaagcacaggggaagaaaaccctagttgctagatttctatttccatcacagactcacaagcacttcagtaatctttaatctgagaagtcactatttttggatttgaaaataattacattctttttattttttagttctattaatctttgtaaatttcagactatatgtccactagtgaagagtaatttttacagaatatactcaatattgacagatttttgtgagaaagatattttatacagt

SEQ ID NO: 465409 - DNA, 534 bp, Homo sapiens
ctgtggttttctcaccttctttctgcttaaaatatccaatgtgcccaggggccatattctgtggtagcatatcctgaaccccattatgtccaatcttttttgtagatcagaatatagtgttaaaatctcagctgtcctcagcctgagcaacatagtgagatcctgtctctaaaaaaaaaaaaatamaaatacaaaaattaagccaagcatggtggcatgtgcctatagtcccagctactcaggaggctgaggtaggaggatcgcttgggcctgggaggtagaggctgcggcgaataagccatgatcatgccactgtactccaacctggggacagcaagaccctgcctcaaaaaaagaaatctcatctgtcccttgaacttcatctattttttttctcatagtatgtaattaagcacttctacatgaatttccttagactagtgtggaagctccaggaggggacaaggcattgtcactatcttcaaattaaagtctattggatataatatacaaggaaatatgtatttacagtac

SEQ ID NO: 465410 - DNA, 618 bp, Homo sapiens
ggggtagaaagcttattcaaagagaaaaaaacaataacagaaaactttctaaatgtgagaaagagataaatatccaggaacaggaaggtcagaaaacaccaaacagattcaacccaaattagactaccacaagacctataacaattcaactttctaaagctaaagtgatagaaagcatcctaaaagcagaaagaggaagaaaagcaaataatatataaacaaagctccaattcatctggtgacacaattctcagtggaaaccatacaggccaggaagtagtgggacaatattttcaaagtaatgaaagaaaaaactaccctccaagaatactgtattcatcaaatctatcttcaaatatgaaaggtttttcctcaacaatcaaaagctgagagaatttaccaccaccagacccrtcttacaaaaaatgctacagacagtccttcaatctggaagggaaaaaaaaaaacattaacatgcaaacagataatttttcaaagtataaaacccaccggtataattaagtacatagaaaatcacagaatactctactactgcaacaggtgtacaatctattcataactctagtgtgaagccccaaaggcaaatctacaaaaaac

SEQ ID NO: 465411 - DNA, 592 bp, Homo sapiens
aggttaggttttctctttgatattccaccaattaggcagaaagatttcttatacttgcccagctctctcttacacatataagccaaaggcaatgtctgctgcctcattaccagttgaacagcctgttccacagaccaattcatgcattacaaatcatcctaatgatagtctattatagtgcggtcattttcacccatttctacagtagtgtctgcattaattgactaaaacattcatcctcttcattgagaatccctaaatattctcaccagatattcctgaaataaattaccaaaaattatatacatccccagtgagaataattttagattattgtatttcagcatgtcctctttaacaataagaagcatctttggggaaaagattatgaatatggctttagagtatgatcataacgctgctctatgcttctgccttcttaggtaacttcacttgcattatcagtgcaccagatccaatattaaatagtaaatcaactgggctcaacaacaaaatctggatttattccaacccatcaaaaatgaagcaatrttcattacaatttccctactgcttcaaaaaggctgtaata

SEQ ID NO: 465412 - DNA, 620 bp, Homo sapiens
ctggggttcaaaaccagattttttcattaactggcaytttgattttgagaagttcacttaaatcattgggtcttgttttatcactaacaaaatgggagctataacaattgcccatgaaatcattaagaggtttattttaaacatacataaaatacctggcatgtattaggcattactatcgctctcagtatcaggattctgaagcaactgctctattgtgaacctgtaaagaacttataagccaagtagaaaacacatttttaaagacaatgggaaagaacagaaaatcgtctcatgtgcctccattaaggaatgagttgactccattttagcagccttcgggagcatcagctatagaaaataagtgttttcagtgaactgattacaactgcaaataaaagccattcttcacgcttgcaaaatatggacataaatattgttgcagctatgtttatagttgcatcattctttaattagaagagattacaagatacattatatatgtgatgtcttgtgatgtaaccatgaataataaaatgacatccatgattttacaaaatatagcctttttccaagtaactattgatgctactaagtgatcctccagattcaccaaatac

SEQ ID NO: 465413 - DNA, 620 bp, Homo sapiens
ctggggttcaaaaccagattttttcattaactggcattttgattttgagaagttcacttaaatcattgggtcttgttttatcactaacaaaatgggagctataacaattgcccatkaaatcattaagaggtttattttaaacatacataaaatacctggcatgtattaggcattactatcgctctcagtatcaggattctgaagcaactgctctattgtgaacctgtaaagaacttataagccaagtagaaaacacatttttaaagacaatgggaaagaacagaaaatcgtctcatgtgcctccattaaggaatgagttgactccattttagcagccttcgggagcatcagctatagaaaataagtgttttcagtgaactgattacaactgcaaataaaagccattcttcacgcttgcaaaatatggacataaatattgttgcagctatgtttatagttgcatcattctttaattagaagagattacaagatacattatatatgtgatgtcttgtgatgtaaccatgaataataaaatgacatccatgattttacaaaatatagcctttttccaagtaactattgatgctactaagtgatcctccagattcaccaaatac

SEQ ID NO: 465414 - DNA, 620 bp, Homo sapiens
ctggggttcaaaaccagattttttcattaactggcattttgattttgagaagttcacttaaatcattgggtcttgttttatcactaacaaaatgggagctataacaattgcccatgaaatcattaagaggtttattttaaacatacataaaatacctggcatgtattaggcattactatcgctctcagtatcaggattctgaagcarctgctctattgtgaacctgtaaagaacttataagccaagtagaaaacacatttttaaagacaatgggaaagaacagaaaatcgtctcatgtgcctccattaaggaatgagttgactccattttagcagccttcgggagcatcagctatagaaaataagtgttttcagtgaactgattacaactgcaaataaaagccattcttcacgcttgcaaaatatggacataaatattgttgcagctatgtttatagttgcatcattctttaattagaagagattacaagatacattatatatgtgatgtcttgtgatgtaaccatgaataataaaatgacatccatgattttacaaaatatagcctttttccaagtaactattgatgctactaagtgatcctccagattcaccaaatac

SEQ ID NO: 465415 - DNA, 620 bp, Homo sapiens
ctggggttcaaaaccagattttttcattaactggcattttgattttgagaagttcacttaaatcattgggtcttgttttatcactaacaaaatgggagctataacaattgcccatgaaatcattaagaggtttattttaaacatacataaaatacctggcatgtattaggcattactatcgctctcagtatcaggattctgaagcaactgctctattgtgaacctgtaaagaacttataagccaagtagaaaacacatttttaaagacaatgggaaagaacagaaaatcrtctcatgtgcctccattaaggaatgagttgactccattttagcagccttcgggagcatcagctatagaaaataagtgttttcagtgaactgattacaactgcaaataaaagccattcttcacgcttgcaaaatatggacataaatattgttgcagctatgtttatagttgcatcattctttaattagaagagattacaagatacattatatatgtgatgtcttgtgatgtaaccatgaataataaaatgacatccatgattttacaaaatatagcctttttccaagtaactattgatgctactaagtgatcctccagattcaccaaatac

SEQ ID NO: 465416 - DNA, 613 bp, Homo sapiens
atctgcttgctttctcatgagagccttgaagccagaacaatcaagccaagctgctcccaaattcctagcctcaggaacagtgatatgtttatgttgtttttaagcctctacatacggtgatagataactaacacacacagaatcacacatatactcacataacttcatagtttcaaccactggctaatttccacagggaaatacatcaaccagcatgtcccttcaaatactcctttaaaatacatgcacacacacacacacacacacacacacacacactcaagtgtaatcagactgatcatttgacaatagtgaattaaattggattgggcactccagcaatgctagtatgagactaatctgtcctgactggaaagacattgtcatgcctttctcccctctcatagatccagaaaatatctccataatgtcactttttaaaatagtcacgttggtccaatgaatcaaggagacaatayaaagtttgggaagaagtagcttcctccagctgactttaaagttatcagtctgtaaaaaatgtctctcatttgcttagatgtctttatatatctgccacatctgagccactttgttagatattgtttgggaaaag

SEQ ID NO: 465417 - DNA, 571 bp, Homo sapiens
tgtgtctttagtccggcagccatactattcgcttttaactggccgacaggtgcccaatgtttagtccctaaattctaaggaaacacaggacagaattgcaagtcaaaggggtccagtggtactcaccacgtggtgatattccggatgagcccccaagatgtgtctggagtttattccttccagtgggttcgtggtctcactgacttcaagaatggagctgcataccttctcagtgagtgttacagctcttaaagatgacatggacccatagagtgggtggtagcaagatttattgtgaagagcaaaagaagaaagcttccacagcatggaagaggacctgaacaggttgctgctgctggctggggtagccagcttttattcccttatttgtccctgcccatgtccttctgattgatccattttacagagtgctgcatagtctattttacagagtgctgwtcagtccattttacaaacctctagctagctacagagtgctaattgatgcatttttacagagcactgattggtgcattttacaaacctcttgtaagacagaaaagttctctaa

SEQ ID NO: 465418 - DNA, 578 bp, Homo sapiens
tttttgtaagaccaaggaatccctcgaaggcatgttttctatgcacattctcaaatatgacattccagtcaaaatgttgttattataatcaatatttccaactracttatttaaaaagaacagatttttgttaaacatagcaaataactatgtttccataaaaataagaatattcacaaattctggagagatcaggcaggggcaaaagtacttgttttgtctctgtttacaaagatatactttaccaaattgctataagctatggacagcttaaaagaaaacactttcttaattctggaaaataaaatattaaaataaaaaactgcaaaatttcaaatgaaaaatcataaaaatttatcctcatcagtgcattcaatcacatgtaattaattctttttctgtttgatcctggttagcagtttcatcaactcatcagtttcttcattagatttctggaaattcttactcagtccagtggtgtaatcttaaagttatcagaaaactatacttcttaaagtcctttccatgaatctcctttaagacaaaacacattcaagttatagttttataaaaatatc

SEQ ID NO: 465419 - DNA, 578 bp, Homo sapiens
tttttgtaagaccaaggaatccctcgaaggcatgttttctatgcacattctcaaatatgacattccagtcaaaatgttgttattataatcaatatttccaactaacttatttaaaaagaacagatttttgttaaacatagcaaataactatgtttccataaaaataagaatattcacaaattctggagagatcaggcaggggcaaaagtacttgttttgtctctgtttacaaagatatactttaccaaattgctataagctatggacarcttaaaagaaaacactttcttaattctggaaaataaaatattaaaataaaaaactgcaaaatttcaaatgaaaaatcataaaaatttatcctcatcagtgcattcaatcacatgtaattaattctttttctgtttgatcctggttagcagtttcatcaactcatcagtttcttcattagatttctggaaattcttactcagtccagtggtgtaatcttaaagttatcagaaaactatacttcttaaagtcctttccatgaatctcctttaagacaaaacacattcaagttatagttttataaaaatatc

SEQ ID NO: 465420 - DNA, 421 bp, Homo sapiens
tgcttgcttcatgcttcctgtttttccctccagttcttgttcagcctccgtttttacccagcagcagcagtgcactacagcgcattccagcttcagcagtcaattctatttgggagttctttcagcactcacatatccatcatcayaggcaggccctcatcaaaggactgagtttcagctccaggaggcctctcttccaaccatctaagttttcataattccaactgcttcctctgctcttctaactgttacctgtatctactatctctgtggtactttagtgttccatgtttgactttttgattcttcaaaacctaattaactactctttatataaaattctctcttttaaaacaatgaacatggtctgagagatagctatcttctgcacttgcttcctgccatgttgctttagcaagac

SEQ ID NO: 465421 - DNA, 585 bp, Homo sapiens
gttagctgactttcagagattctgtccatcatgtttaatttaacataaactgttttctaattaaacagtaatattttttcagtgtccagatagagattactctgtttacatggtaggagacctggagcacccaggaagtcctggtatttccaatataacttgatgctttcatttaagaaatcagagtaaacaactcaatttattccagaattcattggttattatctttgtttttcactaaaatagatggttctctcctagagattcagtaaagatattataatgtgcagcggctttggaaaatatcagagttcaaatcctgcttctgtcacttgctggccactgttcatttagcaagtttcttaaacttcttcaacttcattgtgtgatagttgaatttaatttgtgtaaaatgcttcacaaagagctactcagtaaatgataactcaatactattagtaataatattactagcatcaacacaaaatcatttttattatttattatacatagaattatagggcatawcctttaaagaaaatgataaataacccagtaaagggaaggtgaaaccaacagtttaag

SEQ ID NO: 465422 - DNA, 580 bp, Homo sapiens
gaatttattgaatttaaatatttaaacttgtttaatagaatggcaatgtccagtctcaaaatgtgtgatcagaatacactgtctcttatcacctcttatctctaccgtgttggtttcattctcaggaacacccttcccatgcagtagcaaaatggcccccagtaaccccagaccttattctacccatttagcatgctctagggacctctttcagatgcttttagtaaattccattgaaacagcttccaatggtcacagtaataagatgcccacgcttgagccaagcatcgtggccaagggratgcaatactatgacaagccacactttgggcgatatgttctcacctagaaccagaagtcatagccatctaaaacatatgaactaagaattaaaaagaggcagtaggttcccaaagagaaataaaactactgttaggagaaacaagactgctttgaaggtaaaaatatcagatatctattagaaacaagggaatcaattaatctggctggtgaattaggaataaggaaaaatcccttcttcctctaaaaaaatgtccttgggaattattcataaatgtgc

SEQ ID NO: 465423 - DNA, 618 bp, Homo sapiens
aaactctcttctgtcagcccctcttgcaccaaccaacatggttcagctcatttttccaagggatgagggctagagaggaaacaaagaaagactgccctgcaagacaaggatctgttataacaacaacatttttagtcttacaaataaatcaactaattaaaagaaaaaatttcccattggatttcattatcatgacaataataacaacaacaaaaatataagatttattgaccactcattatgttcaaggccctatgccaggtgttttcatatacatatgaattctaaaagacaagcattcttgttgtcatttgacagagaagaaaatagacccagagagtttaagaaaagtgcctaatgtcacagtgatgataaatagcagagcaaatayctgcacacagtttggtacgactccaaagcttatactctttccatgttacctgacaattctattttctccatcatgtgaagaattgtctctcataaaaaaagctaattgttccagtttaaaaaaaagagtaagaaaattatttgaagtggtatttgtacaatatttttttaaaatgtaatagccagacggtaatagcactagcaatccaggatgtattttatagggct

SEQ ID NO: 465424 - DNA, 618 bp, Homo sapiens
aaactctcttctgtcagcccctcttgcaccaaccaacatggttcagctcatttttccaagggatgagggctagagaggaaacaaagaaagactgccctgcaagacaaggatctgttataacaacaacatttttagtcttacaaataaatcaactaattaaaagaaaaaatttcccattggatttcattatcatgacaataataacaacaacaaaaatataagatttattgaccactcattatgttcaaggccctatgccaggtgttttcatatacatatgaattctaaaagacaagcattcttgttgtcatttgacagagaagaaaatagacccagagagtttaagaaaagtgcctaatgtcacagtgatgataaatagcagagcaaatatctgcacacagtttggtacgactccaaagcttatactctttccatgttacctgacaattctattttctccatcatgtgaagaattgtctctcataaaaaaagctaatygttccagtttaaaaaaaagagtaagaaaattatttgaagtggtatttgtacaatatttttttaaaatgtaatagccagacggtaatagcactagcaatccaggatgtattttatagggct

SEQ ID NO: 465425 - DNA, 580 bp, Homo sapiens
gcaaattcaaaatgttaaatagttgtaggaaaaaaccttagttattttagtagagagaagtcagttttcttaagtaatcaaagacatgataaaggctgcagtgagccatgattgcgccactgcactcctacctgtgtgacagagcaagacactatctcaaaaaaaagggatgaagcacaagaaattatcttaacatgaaacataagaaattatcttaatacaatgcagaatttttgttttctaggcatatcactcaagaaataaaaacctttcattaaaaaaaactttgttcctttaacaggaggaaaatcagtttctagttttttgccaatayaattttgatattaaggctcatttttaaaacacaataattcatttaattttagctaatttgaccacacattaaaatttgtctttcaaatttttttttccttaaacaaaacacatcctcatactttactactttctttactaaaaatacatcttactttcctcacatatagttgttttctttattatagctaatagttggtaattaaatataccaattacaattacttgcagtatctttcatttctaa

SEQ ID NO: 465426 - DNA, 561 bp, Homo sapiens
ttgtctttcaaatttttttttccttaaacaaaacacatcctcatactttactactttctttactaaaaatacatcttactttcctcacatatagttgttttctttattatagctaatagttggtaattaaatataccaattacaattacttgcagtatctttcatttctaaaagcatgcatgtttttatagtataatttttatgtttattaacaaacccaaattgttccagcttctctatagctgtgaaatgacaagatgccaaaagtatataaactaaacatatattcagtaattactgcttcaatattttaacttacttagaaataacttagacatttaatgaatatatattatctaatataacataactttaatgtttcaagttactaaaaaraacttttgaaactacttttaaatagacatgttgcataaaacgtaattatttttgaaattttgtaaacttttatttcacatacatttacctcattcactcattttttaacaattattcttgaactcctcatgaaaaatttcctaaaacattaaacagtctgggcac

SEQ ID NO: 465427 - DNA, 663 bp, Homo sapiens
ctcatgaaaaatttcctaaaacattaaacagtctgggcacagtgattcacacctataatcccagcactttgggaggtcaagaagggtggatcacttgaggtcaggagtttgagaccagcctggtcagcatgcagaaacctcatctctactaaaaatacaaaaattagccagacgtggtggtgtgtgcctgtaatcccagctacctgggaagctgaggcacaagaatcacttgaacctgggatgtggaggctgcagtgagccaagatcgtaccactgcactccatcctgggcaacagagcaagactctgtaataaataaataaataaataaataaataaataaataaataaataaataaagctagctagctattgacgagtctgggaagtgtcaccccaaaatatgctactttggtacattagtttaagctgaagacagttgaaaagcagcaaatgcagggttaggctttttctgaccctccttagcctagagataatactccaaggaacttggtcatcaatcccctccccsaagagttttattaaccaggaaagaccaactcctattccaggagaagagactagaagtcgatctcagataagtgtcattacaaactatcatctattctaataaggacccattcatctttcccaggaattattt

SEQ ID NO: 465428 - DNA, 571 bp, Homo sapiens
tcggtaatagggtaaattattcagcacctcactcccacatataacatgcatttattcaatatgcatatgtctaccaagaaagtgcctctttaatagtagttatggtgtataaagtgcaaaacttgtatttcgctttgaagagaatatcctggaaagtcccttaacagtaaattccttataaagtaaacagaccagcctattttcatgcacttygtctgcctccctctagcattgcacacaaaggcactagaacacttgctgttccctgaccctctagtcctttcagcatggcagcatcaatgttgtagaatacacgatgtcctgtggaatcgtaagaatgccagggtgcctgaagacatgcattttttttcatgaatctaaagagttaacatggctctgagataaaatgagaaaaatgtattactttccctgtaagataaaagcaaactgctttccttgttctccgcatattggaatagataaaaagtaagaggtgtatagtagatgccagagactgtgttaatttgtttcaataaagagatgacatctggaacagcaacttaaaattagt

SEQ ID NO: 465429 - DNA, 388 bp, Homo sapiens
gaattctaattacagatattatactatcatcaggaaagtctaacaagttttgtcaactggaaatatatatttggtattttgtctttttaacttcatatttcattgtgacaacaaacttaaaaaaatattttctataatgttaatgtcacaagtgattccttgaacaaatgtatgctcaaacaccactaaggatctacctttgaattttacagtcaccagaaacaccctgtgtgacagtagcgggyattttgcccctgtttatactcagagacacattttggcatcaataagcagactcatctaaaatccatttcaaatagatgttgttgtggatgatctgggaacatggagggtaagagagagtataacaagtttcagagaccctagc

SEQ ID NO: 465430 - DNA, 639 bp, Homo sapiens
tcttgaaaatttagcatcaccgggagaaaaatgaaatgcaataaaaattagagtcagttaagaatggaggaatttttactatgacacagcaccattgtaaaaaatctcccgcctcgtgccaaggggtccgtgctgctaaactcctcccctgagtyagtgcatttgagtgctctcagtgcagtcggcacagccagagcagctgggagcaaggccttctccaggcttacataaagcataggtcttgaccaaatgtgaaaaacctttagggacatgaaaaccattagggatccgtagccctgacttgaaccaagcagaataaacaaacccctgcccaaattggaactcactggacgcctttcagagttatccaaggggaaaggctggaggcctcaagggtcttcgagtgggttaatgtcttctttcggctgcctagctcaagatggggctttatctgtgctttcctttgttcttttctcaaatgtcttaatgcctcagtggcaaatccacaaatggattgtgttttgaacctgtaatgtgtaccatactatattttccctgctaatggtatagtaaagcccgttagaccttttgttacaaaagattcaggaactgggctggaaaggttccaggtagcattca

SEQ ID NO: 465431 - DNA, 639 bp, Homo sapiens
tcttgaaaatttagcatcaccgggagaaaaatgaaatgcaataaaaattagagtcagttaagaatggaggaatttttactatgacacagcaccattgtaaaaaatctcccgcctcgtgccaaggggtccgtgctgctaaactcctcccctgagttagtgcatttgagtgctctcagtgcagtcggcacagccagagcagctgggagcaaggccttctccaggcttacataaagcataggtcttgaccaaatgtgraaaacctttagggacatgaaaaccattagggatccgtagccctgacttgaaccaagcagaataaacaaacccctgcccaaattggaactcactggacgcctttcagagttatccaaggggaaaggctggaggcctcaagggtcttcgagtgggttaatgtcttctttcggctgcctagctcaagatggggctttatctgtgctttcctttgttcttttctcaaatgtcttaatgcctcagtggcaaatccacaaatggattgtgttttgaacctgtaatgtgtaccatactatattttccctgctaatggtatagtaaagcccgttagaccttttgttacaaaagattcaggaactgggctggaaaggttccaggtagcattca

SEQ ID NO: 465432 - DNA, 566 bp, Homo sapiens
attttcttggtatttaaaagtatgctttaawgtaatattgggtgtgtttctctaccagttaatcaactaaaaagtattcattagctgcccactgtggcctagtgctatggcacctaagaatggagaagatcacatctgggaagtcttcaacttgtaagaataatatttctcattccacagaaaatgtaatattaggtttcaggtctactgaaggagcccttaccacctaaagagaattcataaagtgctaggctgctacattaaaggtggtatgagtaggtcatagggccaggaagcttggtaggcacaggacaaaaacctgttttaggaccacaggtggtcaagtatcatccaggagtgtgacactacacctgggtgtaacctaagaatatgactccataccagttgtgaccaaggaatgtgactccgtcaccaggtgtgacctgaacatagcactccattcctaggtgtgaatacacccattttgagctgggagactgattccatttaattctcttatgtgccctaattttgctccaagaaactagcttatgaaaggaacaaat

SEQ ID NO: 465433 - DNA, 416 bp, Homo sapiens
cattatgttgcccaggctggtctcaaaatcctggcctcaagcgatcatcctgcctcagcctcccacgtagctgggactacaggtgcaagtcaccatgcctggctaaggaaactgatgggactttttaaagcagaataaatttactctcctaggttaagttcatcttggtgttccagacatgaacatccactgcagcagcaaacccctccccaccgtccccagcgctaggaacasacagttccatcccgacaagaataccttccagcaagtaactgtgctccatttctccaccacgcatttaatttaacctcataagctacagtgggggaaccactaatgcacttcacccacctcttccagagtagtgcctggagtatcctgaagccttagacctgaaagagcacaggagaggatga

SEQ ID NO: 465434 - DNA, 596 bp, Homo sapiens
atggcaatctgagacatcaggaaacaataggttcaagagtatatgtggaagtattagccttgtattagagtagatcacctcttctattgttacagaaaaaggaacggagcctgagtgttgagcaggggtgtttataggtggcagggcagaacatctgaagggttctcttatgatggtttttaacttttccacataataagaggtgaaattatctgaagggactgtggggcagaggggtagtagtggtaggaaagtagagaaggtttgaaagagctgttattaagagagaacaataggaagataactgggtggcattggaagcaagttcagattaaagaccaagaacttgcagtagactaatttgtaattttctccaacaacattcaggagctcagcacagtagggccagagaggtggacatttggattgatacattgcttggattttatcatgtggatcctacataaggacaatgaataagaaaggtgaggaaatggtcaaaagaataattgaaatatttgatagtgggatttaggctgkatagagaagttaagacaggaatagtctattccatttttcccctgattgggtttcca

SEQ ID NO: 465435 - DNA, 554 bp, Homo sapiens
ggctggtggcccagaaggtccgggctgaggtggaagggtatatgtatgctgataactgcccagggacagagacagttctaagatggaaataccaggaatttaagtaagaaagtataagtgaacatcccaggagaaaataaaggaagagggaataagttggcctattttcccttctgtgcctgaggratatgtaagtcctacactttgtaaggggtgaagtctcattcaccctttctttcgcattatcttcctcttgttcaagagaaagaactggcctaaagagttgctgggttatttgtttgtttatctttgtagtatattacagtcagcataaagctatctctggacccccagagagcgagagttaaggtgacatctcctattctgggaacttctgtccccattctgtcccctccccttcctcatgtactgagttgccttgtttcccagctttaccactgttccagccagactcacattttttttccaggttgtactccagggggaaaacacttacagatagtagctattttgaggtgcaatgagttttagaa

SEQ ID NO: 465436 - DNA, 441 bp, Homo sapiens
ctctactgaaaacacaaaaaattagccaggcatggcagcacatacacacctgtaatcccagttactcaaggtgctgaggcataagaattgcttgaacctgagaggcagaggttgcagtgagccgagatcatgccgctgcactccagcctgggcaacagagtgagactctgtctcaaaaaaaaaaaaggaaagaaaagaaaagraaatattgatctgattaaaaactgacaaaagatttgaatagacatttcttaaaagaaggcatacaaatgacaaacaggcacatgaaaaggtgctcaacatcactgatcatcagagaaatgcaaatgaaactacaatgagataccttctcacctcaattaaaatggcttatatacaaaagataagcagtaataaatacaggagatgatgtgaaaaaaagggagcccttgtacactgttg

SEQ ID NO: 465437 - DNA, 482 bp, Homo sapiens
tttgccaatacctagtgctttaatcttggatgagataatctaggcctccatttaatcttctgcaatattaaagggaaagacaaaatgatctttaatgtccttactgaatttcatgatatgtatgttctttttaatccaatactcaatcaatgttcattgttgatgtgacggtgcccatcactagaatcttttgtgtccattctgcggtagtcccattttagcagctgtcataaccaacaatgtggtcctatcacaactgtgccggcccagacccaattattcaraataacctgggaaggatacaaggatgagcatgtacttgtcattggcaatgaaagtggatcctggccaaaaaaataaaaaataaaataaataaaataaaattcctgctgcttgacaggaacaaaatccccaggaaagaagttacgtttgttttgtttcaaatttcctttttaaaatcaaactttgttttaaggtaaatg

SEQ ID NO: 465438 - DNA, 606 bp, Homo sapiens
gggagaaagttctaggagtatttcacagtggtgactcttctcccactgccagaatctagaagggaattttctttgcctttctctgttgagaatttcttgctacagtttatgcagcatttctaggtgttttttaagagagatttttagattatctaatctgcaattgtgctagaaatggaagcttctcagttctttctctaacacatatatattgagcaaaagctctgtgccagtcattgtgttaagctgtgagaaaaaattaaaaaataacttagatatgtattttgcttttccaaaatctatagttttaataaaaaaaagatcttgcacaaaaactataatggaggaaaataaatgtttattggataagcatccctttgtggccatctcctaatgtaatcacagtaggtccatttttcaatacatacagcaagtcaggatgctgagacaccgagttgccacagagaaagaggtttaatcacaaggttgccaaatgagaagataagaggaaatctcaaaaatrtctcccccaggagctggggctaggattttaaggattttggagtgggctgaagtgtggaaattattgattggtcagagtgcagg

SEQ ID NO: 465439 - DNA, 568 bp, Homo sapiens
acgaatacagacaaaaattctccagaaataattttaaatagaatccaacaacatacaccgtggccacatggaattaatcctaggaatgtcagacgaatttaacattcagaaatcaattaactgaataaagaacaaaaactacatgatcatcccaacagacaaagaaacagcactttaaaacatccaacaccttttcttgataagactttacmcaacaaattaagaattcaagggaactttttccaccttaaaaagggcatcaatgaaaaactcacaactaacattatatttaatggtgaaagatggaaggatttcctactaaggttaaaaacaaggcagtgctgtccactcttggcacttctatgcaatactgccctgatacacacatttcacaccaacactaacaaaatcccagctggagtctttgcagaaattgacaagatctatcctcaaatttatatggaaatccaagggatctggaatagccaatacaatcttgaaaaaagaacaaatgtggaaaactcatacttccaaatttcaaaacctgttacaaagctacagaaatcaa

SEQ ID NO: 465440 - DNA, 622 bp, Homo sapiens
aagccagccagtttttggaccttattatggcagccacccccctgcagcatgtcatcctgggtgtgcctggttggtggtcgtgactcaaatgtaagctctgattgaggatggggctctttgggtaacacacaggacagagcctggctcatcacaaaatggcaaatgctgtggaacatgtattaagcaccatgctctacctcaaagcactacatgtattaaatcatcaatttgcacaacactctgccacccccgagaaaagtaccattttaatccccattttcatggaggattagactgaggacttaggtggcttgtttacagtcacatagccagtaaaggggcaaagctgggattcaaacccagcagtcagatagtggagccctggcgagcaaggagatgaacggggctctcaggcacacycccctttccctgatgctcacagccactcttcatatctccagtctttggtggcccctgtgccgtcatcagaatctgccccttttgagtgatttttcattattcggcagctctcttcatttccatcttattacaggctggaccaggactcatctcctaggagacagtaagtgattctgtccggtttatcattgctttatacact

SEQ ID NO: 465441 - DNA, 593 bp, Homo sapiens
ctgggttcaggcaactctcctgcctcagcctactgagtagctgagattacaggctcatgacaccatgyctggctaatttttgtatttttagtagagatggagtttcaccatgttggccaggctggtctcgaactcctgacctcaggtgatcctccctccttggcctcccaaagtgctagggttacaggcgtgagccaccgtgcccagtttctttgatgatcttgatttctgtgctgctttatctaaagacctctttaaacaccaaaaagtcatcactgcctggtagtaaatgtgcatgaataaaggtgacttgtgatacccacctaacaatactggtgagcacttttaatctcttttaatttcttctttgatttatctttttactaactgaggaaattggagttcaccataatctcctttttttttttttaagttatgagaacctggttccaatggagaaaactatggttgtgcattcctcatataatcatgaaatcaagagacactgctatggatgcattccattttcaaacaaccttaagatgtagataattattactattatttcttacatgaggaaaaagtggtatagg

SEQ ID NO: 465442 - DNA, 559 bp, Homo sapiens
  misc_feature (1)...(559): n = A,T,C or G
ctctgaacaaatactctgagaggattgaatgcctgtttttggcactgtgtcccaaacagaaagagtataygggccctggaaccaaaaggtgaaagcaggaatgacttaatttgcaatgactattgaaccactggaggactttgtgtttttacctccataattctcagctctgcagaattagattttctgctcaccaaaaaggatacagtcttgctgggggacacagaaagaatcttattgcactacaagatatagctgactcctgagaactttgaacgttttgtgcccatgaatgagcacacaagaggagtcaccatcttggtagcaattgatcctaagaagcaggatgaagcatgatcacattactcnngaacgtaagagaagaatgaaaatgtagggaggaatatgtacagaacccaggcaatccacttgggcacctcttggtattcccttgctgacttagctcaagctgctataacaaactactgtagactggatgacttaaacaacagacttgtattgttcacagttctggaggctgagaagtccaacatcaagg

SEQ ID NO: 465443 - DNA, 602 bp, Homo sapiens
aagttctgcacatgctttccatcaccatacatccagggacaaagaagacaaagaagacccaaggacaaagagctgtaacaatttagggaatattataaaagactttacttaaaaacaattgractctttagtctgcacaggttaagagaatagggtggaatctgtaaaactatggatgttgtaattaggaaaaatccagactccattcaatcctggtacatggagtagtttcctgtggctgccaaattaccacaaaattagtggcttaaccacaataaaaatatattgtctttgagttctgtaggagaggagcatgggtctcatgaggctaaaatcaaggtatcagcagggctggttccttctggaggctcagaagagcattttttcctgaattttttagtttccagaggctgcctctgcaccttggctcatggccccttggccatctttggctagcagcagcaggttgagatctcacatggtcttaccctcacctctcctgcctgtctcttctacttttgattgcactgggccaacacagataatccaggacattctcctcagtttaagtttggctgatcagagaccttaattctatttac

SEQ ID NO: 465444 - DNA, 604 bp, Homo sapiens
cacacagtcagaaaatgttgggacctgatcttgtgcctgggtctgtggctcctgccctagacagcttgagtggacttgaccccaaggagggctaggcatatctccaggaagccatgggatgcccacaccacattttttcagggygactctagctaccagtgcctttcagggcagaggccatgaatggtgaaatcagggatttggttctggaagagctgggtgtgttgtttttaaaaagccttggttggcattgcattgagcaccactctgggtagtctatggtcacagctctaggtagagagtccctcagggatgtggtcaaaggtgcaggaagtgaagttcaaggctacgtcgtcaagccaggtccaaggaccattcccacccgccactacttcaggtgttgtttttccaggtgaccagcagagggcgcggctgcccacctgacgaacctggcctgtgtcagagtggtggttttgccttcatctttccttgggtcctggaactcccacactggtgttttgccttcttgtttctctttagatggttccctatgagtttagcctgagatcgtggcttgagcagttcttcttaagcatttgaagtt

SEQ ID NO: 465445 - DNA, 604 bp, Homo sapiens
cacacagtcagaaaatgttgggacctgatcttgtgcctgggtctgtggctcctgccctagacagcttgagtggacttgaccccaaggagggctaggcatatctccaggaagccatgggatgcccacaccacattttttcagggtgactctagctaccagtgcctttcagggcagaggccatgaatggtgaaatcagggatttggttctggaagagctgggtgtgttgtttttaaaaagccttggttggcattgcattgagcaccactctgggtagtctmtggtcacagctctaggtagagagtccctcagggatgtggtcaaaggtgcaggaagtgaagttcaaggctacgtcgtcaagccaggtccaaggaccattcccacccgccactacttcaggtgttgtttttccaggtgaccagcagagggcgcggctgcccacctgacgaacctggcctgtgtcagagtggtggttttgccttcatctttccttgggtcctggaactcccacactggtgttttgccttcttgtttctctttagatggttccctatgagtttagcctgagatcgtggcttgagcagttcttcttaagcatttgaagtt

SEQ ID NO: 465446 - DNA, 505 bp, Homo sapiens
ggcgcttaaccgggatttcgtccacactgccagcgctcacactgcactcccaggccctgctgtaggtgctaatctgatgggggcagccttagggagggctctgtccccagcaggaggacccttggtgagcgactctccccgcttgcccccaccccttccagcacctgcaaagggggcttagagcggggctgccccatggggttgagaaattgaaatgggggtgtcctcccccaggtgtctctgtggtccttgaatcctggtgtctgttgaaatgcctcctcctctgggcaccttccaggaccaggccaggtgacaccaccattccacccccgtctctacccctttcctggactttcttccttccctgccctggctggggaagcagcggctgcctgcctgtgttcaccycacaccaccgctggggttgtgagaatcgctccttagcaccctggaggacacctctgtgagtggcagccctggggggtgtcgcctcccttgcctggcc

SEQ ID NO: 465447 - DNA, 578 bp, Homo sapiens
gagtttggcaagaacttttttagctataacaccataggcatgatctatgcaagaaaaattgagattctggactttattaaaattaaaaacttctgtgaaacacattgtcaagagaatgaaaagacaagctacagtctggggcaaaatagttgcaaaagacatataaaggaccatcaaccaaaatacacaaaaagattcttaaaactcaacaataaggaaacaaacaaccttattttttttcttttaaagccaagaccttaacagacacctcaccaaagaagatctacagatcgcagataaggatttgaaaaagtcctccgcatcatatgtcatcasggaaaagaaattaaaacaacaatgagataccactacacgccttctagaattgccaaaatccagaacatggacaccactacatactggaaaaaatatggagcaagaggaactctcattcattgcggctgggaatgcaaaacggtgcagccactttggaagacagtttggtgatttcttactaaactacataaacccttaccatatgattcagcaatcacactctttggcatttactcaaagga

SEQ ID NO: 465448 - DNA, 557 bp, Homo sapiens
tcatatgtcatcagggaaaagaaattaaaacaacaatgagataccactacacgccttctagaattgccaaaatccagaacatggacaccactacatactggmaaaaatatggagcaagaggaactctcattcattgcggctgggaatgcaaaacggtgcagccactttggaagacagtttggtgatttcttactaaactacataaacccttaccatatgattcagcaatcacactctttggcatttactcaaaggagttaaatacatactttcacacaaaaaacctgcacacggatgtttgttatggctttattcataagtgctaaaactggagagcaaccaagctgtcctgcagcagataaactgtagtacacccagaaaatggaatattattcagggctaaaaataaatggaaccatttagccatgaaaagacatggaggaatgttacatgcatattactaagcggaaggaggaaatctgaaaaggctagatatagtataagtccaacattctgaaattctggaaaagacaaaactgtggagacttttatacctt

SEQ ID NO: 465449 - DNA, 625 bp, Homo sapiens
atggcagttatcactgttagtggttgcttaccttagcctgtctttggtgggatttatccaagttgacacctgggtctctcagataccaccttagtaggctttgataatgtcctcacttcctgttatgataaaatgctccaagattatctggaacatttcttgcctgagacaaataatcagttatttctctaaggaatcctggttccttttagagaaaaatgaagtagcgaccacaatctatgtgctgggagtatgcattgctactgcagtggtcattgtttctaggccttgtcagaggataaaactaggaaatatatatatatatatatatgataaaatatatcctgagtttatrctgatcctttataattagattcagaattcttgggacttactgaacctcattgatctcacgtctgcatcttcttcctcctactctaaagacttcagcggccagtggcaaagtaattatcccattgctttctcctgcaatctacccaagacactgccacaatggaacacagcattaccagcaaaatcagtgtcactaaaatcagtttaggtttttttttcatgttctttttgatttaacttactaggaacatacagtcaaatatctgtgttt

SEQ ID NO: 465450 - DNA, 573 bp, Homo sapiens
gggaacacaaatcaaggaggatttacatgttttttacccctttgaggtgttttagaccctggcttataagtgaaatcaaaaaacaaggkaaagaaatgctgaacatgaaaaaaaaaattcttctgaaggaacagaaaagaataccagggctacttagagaaaactcagggcaacagagttgatataagggcgtgtaactcatggtaaatgcaaggggagagtccacagactcagccagaagacacagcaatcgtgagtcgaggcaaatggatcagggtctgtggccagtgacttcttggtgtgagggacccagaggaggctcattcccagcacaagtccccagagagctggacaacagcttagggctctacagggagcaagaacctaggcaaaggtgatggttctcaaggactcaggtagatgagacaggtgagcagcctgctccaaaagataggcatgagagtgaaatttctaatattctcccctggctggttctctcttggtcctggctggtgacagctgtggccagttggggaaggattaaagtggcaaaccaatctgaacttcttaaag

SEQ ID NO: 465451 - DNA, 582 bp, Homo sapiens
aaagcactatgttcaccttgaaaggatggattaggcatgttaaatctactggggcatacactgcagagagctgattgtagcctaagttggcagcatttttctttttgataacaagagtccatcagtggtgggagcttgtagaaagggcagacctccactgtcctgatgaatatgtgcaagttgcaagagcttgtgtccttgtgccaagttctgtgggatgggccacagttctcaggaggatctgccatgtgactcacctcccgcatgctgtttccttccctccttcatctatctcaagatggaaagagaagaaatctttgaatgacatgagagattgcagttttgagttagattggactgcacttttttrtatctaaaaatgagtctgaggcaataattgaaagtaacaggaaattaaatcttcttgaattttagtcaaggaatagaaaaagacgatctgaaaaagaatatgtacaagcagaaactaaagaaaagtaaagcaattgcccattggggcccaccagcattcaccctgttaaatatatcttttataatcataagctttattattgagtttttcat

SEQ ID NO: 465452 - DNA, 435 bp, Homo sapiens
ctatctaatctatgtatatatctatgtatcaaatctatgtatctgtccatatatcatgtttccactctattcctcatctttccccagacaataataattaaagtcctgtaaaattctctgagttgtattttctttctttttttttttttgttcttcacattgccacagctatgagaacgctcatggatgtcttgtgactgtctgatctttgaggaatcttcactctactctgtgcctccactcctgtgctgtcctacccaccacagcaaatcagattgtgatccttggttcacagcctcccatggcttccgagtgtccttaaattgaaactctgatgagtacttggcatctaaacctgtccctaccctcccttgtgcmtcctgcaggcaagtgggctctggcctggcctgaactttgggctgagagtctggactg

SEQ ID NO: 465453 - DNA, 558 bp, Homo sapiens
ggtgacagcacaaagattcctggcctctcatccaattctcagtgttttgctacttcaccaacgtggagctgcttgactgaaagggaatccagctcccgtgtggaagagtcctaggacactgccacaagtgtgcacagtaattcttccttcatacccaccatgggaccttcaggcacagggctgatggtgcatggagaagggactgcccgggcttgtcagagattaccggacattgactctaaattgacagtaatccccaaggactcaaaacaccactgcagttcaactgtcgaactgggggttttggaagacaggtgatacagagagcttctgccttagtccattttcacagttrgccagtgtccataaacccactctgtagatatttacccagttactgaatacaaaatatatgctctcagttctcaccatggggagctctgctggtttaaagcccataattactaaggaagaaatgtttctaccagaggacactggaagttgaatcttccacttggcaattttgagctccacatgccactgaattagcaagtaaca

SEQ ID NO: 465454 - DNA, 604 bp, Homo sapiens
ctctgctcattccagcttgctgataattttacacccagtactttcatttgactggtattaagggactcttcattcttctcttccccaagtattcttctcttcattcaatacgttctgcccatcctcatgattccagcatttcattcaaccatctgcatttattttatctcctctctaatactttactttcatttctcccacagtttctccaagttctcacacatggtaaaagaagctctttatctcttgaaacatttaagtccttgactaaagaaacatgctctcaaaaagcacaaaactatttgattaaataaactctcaaaaatatagcattaatataaatacttgtatactctcattttttttcaaaattggaagacatttatttctcactaagtttcaattgttggcatacttaaatacagcctacccctaccctcatatatrtacacatatatattctacatatacaaacatatgtatacacatacacacacacacatatatacagtcatgcatcactcaaccatggggatatattctgagatgtgtctttaggccattttgtcattgtgcagacatcatagagtgtactcacactaaa

SEQ ID NO: 465455 - DNA, 459 bp, Homo sapiens
  misc_feature (1)...(459): n = A,T,C or G
ggagcatttaaaaatacctcctttatagggttcttttatagatttagtgaggtaatttgttgtgctagtaaaaagtaggcactcgaaaaatgttrgcaacattgttaggtgctaggccctttgctgaagctacataaataaacaagacagggcctgcttttgaagagctcccactccaacaaaaaaggcagaaatcgacacagaaaagtttcgaaacaacataatgtgttccacaacagaggtttgtgtaataggtgaaagatgctgtgggaacacagaggttagagtttgagggagggagggaagatttcacagagacgataacatcccaggtgtgctatggataaataggaaaaagcccatgggaagaaagaagtggaaagacattctagctggagagggcatcctatgcacagtcacaaaagcctggggtagcaggagtgtttnnnnnnnnnnnnn

SEQ ID NO: 465456 - DNA, 584 bp, Homo sapiens
ctcctggtgtaagtcttcatgaatcctacaaagaggtaacagcaatgatgatgaaaacagatttcctagaagggtggctaggtgtatactctaccttggaatactatctccaggtagtgggaagccctcatgacagcaaagcatttaagaactaaacattcagagcctgaagacaagtgttggtattttttgagccatgtttaagatatatgatatttaatctaaatgtattaaaattatataacctatttaagatttctttttgtacagtaaaaccccaaaattcacacactatargagatacacttgttcttcctttcaaggtaaaagtcactgaagttatacatagaaaatcatgacaaactaaaagggcattcctttgtcagagacaagtatttaaagacaggtactatagttttaatgtcccctccaaaactcatgttgaaacttaatccccaatgtggcagtgttgagtagtggggccctttaagaggtaattggatcatgagggttctgtccttatgaatggattaatccattcttagtttaatgagttaataaattaatggcttgtcatgggagga

SEQ ID NO: 465457 - DNA, 579 bp, Homo sapiens
atccactggtgattcctgggtgaagagtatytggagtggacctccagcaaactgcagcagacctgcagaagaggggcctgactgttagaagagaaactaacaaacagaaagcaataacatcaacataaaagacccccacataaaagccccatccaaaggtcatcagcctcaaagatcaaaggtacataaatccaagaagatgagggaaaaaccagcacaaaaacactgaaaattccaaaacccagaatacctcttctcctccaaatgattgcaactcctctccagcaagggcacaaaactggatggagaatgagactgacaaactgacagaagcacgcttcagaaggtgggtaataacaaactcctctgagctaaaggagcatgttctaatgcaatgcaaggaagttaagagccttgacaaaaggttatgggaactgctaactagaataaccagcttaaagaggaacataaatgacctgatagaattgaaaaccacagcacaaaaactttgtgaagcatgcacagaagtatcaatagccaaatcgatcaaatggaagaaaggatatcagagattgaaga

SEQ ID NO: 465458 - DNA, 579 bp, Homo sapiens
atccactggtgattcctgggtgaagagtatttggagtggacctccagcaaactgcagcagacctgcagaagaggggcctgactgttagaagagaaactaacaaacagaaagcaataacatcaacataaaagacccccacataaaagccccatccaaaggtcatcagcctcaaagatcaaaggtacataaatccaagaagatgagggaaaaaccagcacaaaaacactgaaaattccaaaacccagaatrcctcttctcctccaaatgattgcaactcctctccagcaagggcacaaaactggatggagaatgagactgacaaactgacagaagcacgcttcagaaggtgggtaataacaaactcctctgagctaaaggagcatgttctaatgcaatgcaaggaagttaagagccttgacaaaaggttatgggaactgctaactagaataaccagcttaaagaggaacataaatgacctgatagaattgaaaaccacagcacaaaaactttgtgaagcatgcacagaagtatcaatagccaaatcgatcaaatggaagaaaggatatcagagattgaaga

SEQ ID NO: 465459 - DNA, 473 bp, Homo sapiens
ctcttctcctccaaatgattgcaactcctctccagcaagggcacaaaactggatggagaatgagactgacaaactgacagaagcacgcttcagaaggtgggtaataacaaactcctctgagctaaaggagcatgttctaatgcaatgcaaggaagttaagagccttgacaaaaggttatgggaactgctaactagaataaccagcttaaagaggaacataaatgacctgatagaattgaaaaccacagcacaaaaactttgtgaagcatgcacagaagtatcaatagccraatcgatcaaatggaagaaaggatatcagagattgaagatcaccttactaaaataaggtgtgaagataagattggagaagaaagaatgaaagggaatgaacaaagcctccaagaaatatggggctaacccaacctagcaagacaggccaacattcaaatttaggaaatacagagaacaccact

SEQ ID NO: 465460 - DNA, 607 bp, Homo sapiens
tgagttaaatgatcaggagccagagatctgagactatagcatggagttgttaaagtccaagagtggaggaggtgagtgtgaagagggtctcaggctaggattcagaaccatttccctgccgagggtcatcagcagggtctgtaagtggggagacacagaatggacattacctgggtcccttttaagggactgagagagccaagttatattgaggaagaatctgaaggctcgcacagtgcagtaggctgccccacttcccatctaaaattctggaaggagattattgcctcaactagcttttcagcaacatgggagccccgggagagtagagctggtggtatggcacgtttgggcaacacaattattaagattcttggtttcaaacccartaaaagccaattctggctaactaagaaaaattaacagtatctttagctaactaaaccaaagatcatctctggcagggtctcagtgagaatgcccatagtggacagtcctcagctgagaggtcaacatggagatctctgactgttgttggcctctgcttttgcagatgccactgctgagggtctgcagctggtgcatgaagctgacccatctccttctt

SEQ ID NO: 465461 - DNA, 564 bp, Homo sapiens
atttttattgcactgtggtctgagagtgtgctttgtatgatttgaatttttttgaatgtattaaggcttgctttatgaccaagcatatggtcaatcttagaatatattcaatgtgcagaagagaagactgtatattctgtgtttgttgggtggagtgttctgtatatgtctattagatccaattgggcaagtgttgagtttaagtccaaagtttcttatttgtttattttatttatttatatatttatttttgagctggggtgtcactcttctgcccaggcaggagagcagtggcctgatgacagttcactgaagccttgacctcccaggctcaattgatyctcctgcctcagcctcctcaacagctgggattacaggtgcatgccaccatgccctgctaatttttgtattttttgtagagacagggctttgttatgttgtccaggttggtctcaaacccctgggctcaaatgatccacccacctcagccttctgaagggctgagattacaggtgtgaaccactgtgcccaacctcagagtttcttttttagatttttgctttg

SEQ ID NO: 465462 - DNA, 305 bp, Homo sapiens
ataactcctcaagtgtggctcttctcaattacaggaattttgaactaaaaagacaacttatgtgccatacacactrccaatttacaatagtgagacagggagatgataactgcaatagacacttgccaataaaatgagaaaactatagcagttgctgtcccatagctattctgaaattccactaggcaaatactgtcaggtttccctacactgagccagagatgttctgtcactggggtctggttctgcttctggagtggttccttattccatagctctctgtggaacctggttctcttatctgg

SEQ ID NO: 465463 - DNA, 688 bp, Homo sapiens
ttaccagctgaatagataaaagataagaaattactttattttccagcacagtaagtccttggaactctatattttctctgatttctccttgaaaacaaaataattmttttcttagttcatctctctgtttctgtaccttttgtgaagatgtaagaagctagttgattcttgcaatggtctttctataaatcctcctagattcacaaattattaggtgtattttctattttccaagattttgtaggcaacagaaaaaaaacctctcttcatttctctacccactcacacaaagaagtagaactaaaaaacccaatggagggaataaaatgaaaagctaaacaaactcattaatccaaaagaaaacaagaaaggcagaaaaaaagtaacaaagtatagattggataaattaaaaagttacaagatgatagaaacccagccaaattagtaattacattaaatgtaaatggactaaatatgccaattaaaagataatgtcaaaatgagtcttagttttttattgctatataacaaaccatcccaaacttaatggcttcaaaaagcagttattttatatgattacaattttgtgatgtaacaatttgcacttgactcagatgcccagttttgccaattgtttcatattacatatatgagtcactattttcccagtcccaatagcattttcctc

SEQ ID NO: 465464 - DNA, 688 bp, Homo sapiens
ttaccagctgaatagataaaagataagaaattactttattttccagcacagtaagtccttggaactctatattttctctgatttctccttgaaaacaaaataattcttttcttagttcatctctctgtttctgtaccttttgtgaagatgtaagaagcyagttgattcttgcaatggtctttctataaatcctcctagattcacaaattattaggtgtattttctattttccaagattttgtaggcaacagaaaaaaaacctctcttcatttctctacccactcacacaaagaagtagaactaaaaaacccaatggagggaataaaatgaaaagctaaacaaactcattaatccaaaagaaaacaagaaaggcagaaaaaaagtaacaaagtatagattggataaattaaaaagttacaagatgatagaaacccagccaaattagtaattacattaaatgtaaatggactaaatatgccaattaaaagataatgtcaaaatgagtcttagttttttattgctatataacaaaccatcccaaacttaatggcttcaaaaagcagttattttatatgattacaattttgtgatgtaacaatttgcacttgactcagatgcccagttttgccaattgtttcatattacatatatgagtcactattttcccagtcccaatagcattttcctc

SEQ ID NO: 465465 - DNA, 554 bp, Homo sapiens
gcatggtatttttactaaaccttttcaagcattgtaagatcaacccagctcttttagcaatcatatagggcagacctggggaaaatagttccccaaaagttagggaagcaactttcttgggagccatctgaggatcccccttatttggggccccttcaagttcccttctcattacagaaccttaggcaaataaagcaaaaacttaggctgattttctgatgaccccaataggtatataagaagttctccaaaatttaattcaggtagcartatatctcctataatacaccaagaagaaagaaagcagatagggaaagcaaagaaaaagcaggaacaccattcccaattgggaaggaagcagttccccttaacaaccctaaatggaaccccaataactcaggagatgaatggaaaaggaagtattttttaatatgaattttagaaggcctacaaaaaacagggccaaacctctcaattattctaaattgtctataataaaccaaaatccagatgagaatactgtagcctttatggaaaggctgagagaggcgcta

SEQ ID NO: 465466 - DNA, 529 bp, Homo sapiens
gcaagccttgatatgcaaatgctgaccattaaaaactgggttcacccaatatggccattcctgccttcttcttcttgtcaccaggtgtgccaagtgtcatggccacctccagataacactatgtgttcaaaacatcatggccccctgcgtttgcatattaaaaggctaaggtgggagggccaggtttttcacaggctacgtaaatgacacacctagtcaaaccaatcccctgggcactatgcaaatcagacactgcctcctgaagcctccaatataaccgacaattttccacccctccttctgtctctatacaggkgagctgctttattctatcttgcctgttaaacactctccacttcttaaaaccactccacgtgtgtccatgtcattttatctaaatcagtggaagaccaagaaccctggtgttcctccagtcatcagagccatatcacaattgagccgctttcttttgtaaatggcctggtctgaggtatgtctttatcagcaatgtgaaaatggactaataagt

SEQ ID NO: 465467 - DNA, 564 bp, Homo sapiens
atttttattgcactgtggtctgagagtgtgctttgtatgatttgaatttttttgaatgtattraggcttgctttatgaccaagcatatggtcaatcttagaatatattcaatgtgcagaagagaagactgtatattctgtgtttgttgggtggagtgttctgtatatgtctattagatccaattgggcaagtgttgagtttaagtccaaagtttcttatttgtttattttatttatttatatatttatttttgagctggggtgtcactcttctgcccaggcaggagagcagtggcctgatgacagttcactgaagccttgacctcccaggctcaattgattctcctgcctcagcctcctcaacagctgggattacaggtgcatgccaccatgccctgctaatttttgtattttttgtagagacagggctttgttatgttgtccaggttggtctcaaacccctgggctcaaatgatccacccacctcagccttctgaagggctgagattacaggtgtgaaccactgtgcccaacctcagagtttcttttttagatttttgctttg

SEQ ID NO: 465468 - DNA, 554 bp, Homo sapiens
attgttttaataacattttattttctctagcttgctttattgtaggatatagcatacaacacatataacatacaaagtatgttttaattgactgcttatgttttctatcagtaaagcttgtggtcagcagtacgctactactagttcattctaggggagtaaaagttatactatatttttgactgtgtgggggtcagcacccttaacaatgatagaattttctattcctgtccatttttgctttctgtactttgcaactctgttattagctgcacaaacacttaygatgttatgtcttatcttttatttgacccctttatagttgtgaattgttttgttttgtctctattaatacttttggtattaaaatgtattttttcctgattttgatgtagccaaatcctacacaaatgtgcttactatttgcatggtaagtttttttccttccatttactttcaactacttgtgccagcccctgcctaccaccattctactctctgtttcggtgagtctgactatttagggtaccttatgtaagtagagtcatgaaata

SEQ ID NO: 465469 - DNA, 559 bp, Homo sapiens
atggaatttcttgcatgagtcttcaaacagaaactatagaaagtaccatgatcataaccacatttcgaaagtaacataatagtaagtttcctctgactgtattaataaaatccctcagtgtgggcatatgsgggggtgttaaggatgcaaaacaaggtaccaaagtacagcttctgaagatctggctagacttctggtctaacagctagtattggaagggaataggttgacgtcatggcctttgttcagccaaccccccgtaaacatcatttctctcaattaagcttctgatcaaatttagcaacagaaaattcatattctctggcatgtacagaaacaaatgcattttgtatcactgttgaggggagaccagtagacaacaatcactctttatgtattcactatatctgaaattcaaggtcatacaaatttacttctgtatatttttttctgcaatcaacaattctgattttagcacaagtgaattgagtggatcctgttgaatttaaacaaacaaaaaattatgggctgggattttaaaaacaatagtaaatggcat

SEQ ID NO: 465470 - DNA, 548 bp, Homo sapiens
gaaaattatgtgtagtaatarcccacccttacaggccattattagtggttccttctttggggtcagacagagctgatcattctggctgtaactcttatggctatttgaccttgaataaattctttaattgttctaaagttcagactctttatctggaaagaattgagattaactccctcatgcagtcataaagattaaaccaagcagtgtgtgtaacagtactgaacaaaaaatttggtgcatatggttaatgttcaataaatatttaactgtttcctgtcatctttgtattcactaggtctgcctggcttgttagtttactatttggggcggatttgaatgtggctcttcaggtggtattgaaaatggtatttcatgaacacttgcatatttggatgcatggaaatctcaatggatagaattttctgttccatggggcaccagattctagtcattgatttttttacacattgagtctctgtaacagcccttttgcagataaagaaactgaaagttagagaaattaggtaacttacccaaggctacat

SEQ ID NO: 465471 - DNA, 613 bp, Homo sapiens
tcattttagtgtaaatctttacactgttcctctagattctatacataattaaaaagaaaagtggcaagaaaagtcacttagccccgccatttccatctcacaatcccaaacatactgcacttgctatttcctttctctttwctagaaccctgctgccaccattgtccaaaccagcaccataacttgcctggaatatgacatggttttctaaattagaaattgtcttttcacttctaactctgtccccctacattgtgttttccacacaaaagccagctgatccttttaaagcctaagttggatcttgtcactcctctgctgaaaatttccaacagttcccacccaactcagatgaaatgagagttcttaccatgggctgcaaagctctaactgacctggccctgttaaccctctgcccttgcctgctggcttgccccttccatttcctgtcagactgggtccttgttgctcctttaactcacccagcacactcctagctcaaaggcctgctttttcatctcaagaagttcatagagaaaaatcactttttatttatgtttcagataaatgactttttatcagaaaggccttccctgaccatgtatctatttaa

SEQ ID NO: 465472 - DNA, 568 bp, Homo sapiens
gaaaaaaattcttcccagtctaaaccactaccaattacagttgagagtttccttctctctgcaacccctccccaattctgctgrctgccttcccaaagggcccctgtgagatttagtcagggatagctcccctggactttagctagagactgggagtaagtgcaaggcacttcatgctgctacttctacttttatatttcgggtgacttcttaactccatttcatctctaggtaaggttgaatccttctcctgtgatctggattttcagattccccaggtggaatgtgtgtttggaggtaggttcccacctcacactttgggaactcacagtttctcacctgtttcatggaatttgcagtggcatgctgcttctttcaaagtgtgaattctttcagttttcctggtatgttcctgcagtgatccttggagaaaagttcacagtgtgagtctgcacacactgttgtgaccattcatgtgggagctgcacgttagccctgtttcctatctgccatcttcccccaatatccgatagtttgctttttgaaaagatcaacacaattgataaac

SEQ ID NO: 465473 - DNA, 568 bp, Homo sapiens
gaaaaaaattcttcccagtctaaaccactaccaattacagttgagagtttccttctctctgcaacccctccccaattctgctggctgccttcccaaagggcccctgtgagatttagtcagggatagctcccctggactttagctagagactgggagtaagtgcaaggcacttcatgctgctacttctacttttatatttcgggtgacttcttaactccatttcatctctaggtaaggttgaatccttctcctgtgatctggattttcagattccccaggtggaatgtgtgtttggaggtaggttcccacctcacactttgggaactcacagtttctcacctgtttcatggaatttgcagtggcatgctgcttctttcaaagtgtgaattctttcagttttcctggtatgttcctgcagtgatccttggagaaaagttcacagtgtgagtctgcacacactgttgtgaccattcatgtgggagctgcacgttagccytgtttcctatctgccatcttcccccaatatccgatagtttgctttttgaaaagatcaacacaattgataaac

SEQ ID NO: 465474 - DNA, 543 bp, Homo sapiens
cgggcatttcaggacataatcgtatattttcaagttcgagtttttcgggcttggattatccagataattgcctccagtctcctccagtccccctggtgtatgcactcgcagccgcagagttagagtccgggasgtgaagattggcgcttggaaattagatttggtttctaaagtatgaattcgtgtccaacagttcgtgccttggacaacgtgggttgtataaaactcaagctgtgtgtttaaaacaggttttctagctgctggttctctccaagttatgtaggacttttgaactggccaccccgctgtgcgtctgcgagggcagggactgagcgagacccagccaggggcgccgggagactggcggcggctgggttggggtccagccggaaaccacacgttggcagggccgcttggtcagtagtggagagagcctctgagaaagggccgtctatcgatccccagacccctccgtcacggagggattcatagcttcctggggatcggcccagggcgtccctttgacactccgttctctgtcca

SEQ ID NO: 465475 - DNA, 543 bp, Homo sapiens
cgggcatttcaggacataatcgtatattttcaagttcgagtttttcgggcttggattatccagataattgcctccagtctcctccagtccccctggtgtatgcactcgcagccgcagagttagagtccgggaggtgaagattggcgcttggaaattagatttggtttctaaagtatgaattcgtgtccaacagttcgtgccttggacaacgtgggttgtataaaactcaagctgtgtgtttaaaacakgttttctagctgctggttctctccaagttatgtaggacttttgaactggccaccccgctgtgcgtctgcgagggcagggactgagcgagacccagccaggggcgccgggagactggcggcggctgggttggggtccagccggaaaccacacgttggcagggccgcttggtcagtagtggagagagcctctgagaaagggccgtctatcgatccccagacccctccgtcacggagggattcatagcttcctggggatcggcccagggcgtccctttgacactccgttctctgtcca

SEQ ID NO: 465476 - DNA, 596 bp, Homo sapiens
cattggaataataaaatagaagtaagcaaccgtgcattaaaaagctatgaaaagatgaagagaatatgccttcaaatgggaaggaatacttaactgtgaataagacctagttcaacatggaacttcctggtggccaagtcagaagagaagcacagtgagttttctaactttcataatgagaaaagagaaagcacactgtttttcaaaaaagaaagttattacccagtcactgaattctaaaagaacttcatgcttgccttgttcatggacttcaaataatttaattatttaaaataattattttgtctaaaattctcatgtgtctctgttaattataacatgaataatagcatttacattatgcataaatgaagacaatagtatatcttctaatagctgtataaaccatctactaagctgtcaagattaattgacattaataaaaccactktctcacagagttccaaaaatatggattctctgtaagaaagtttcttctttcagtgtcagaagaaaaaattaaagattcctggatctgcttgtttggcattatttgataaaagtgaaagaaaagaagaggctctacaggtttctga

SEQ ID NO: 465477 - DNA, 606 bp, Homo sapiens
ttccagtagtcaaacaagtcactaaagtcagtccagtttcaaaggaattggagaaatagattccacttcttggctggggaatgacatgtaagaatagaaagaattgatggtagccatcttgtatataaactaccacagagggaatgcaactcttcctctagcattatgtttttccacaaaggtgtgaaagcagtgctgtttgctccctggtttcttataaagctttgtttttacgaggtttttttttttttcatttatagctccatttattcataggcttcagatgtaaatccatgaragtctggactcatgaatgttgtaagtgacaaacactatgctttactcagaaactcttccctgctaataaggtattatagaactaagcttgtctgttgaatttgttcttcctttgagataacttctcttcaaggatgcttcttagttccctcaaacgctggaaggtccatcttgccagggcaccagacatgcatggacattccagactccaaatggtgactgtagcctgggctcaaacagagaccactgctgcacaagttatttcagcacagagcctggcatgtgggagacgttcaacaagcattagtt

SEQ ID NO: 465478 - DNA, 560 bp, Homo sapiens
attatgtttttccacaaaggtgtgaaagcagtgctgtttgctccctggtttcttataaagctttgtttttacgaggtttttttttttttcatttatagctccatttattcataggcttcagatgtaaatccatgagagtctggactcatgaatgttgtaagtgacaaacactatgctttactcaraaactcttccctgctaataaggtattatagaactaagcttgtctgttgaatttgttcttcctttgagataacttctcttcaaggatgcttcttagttccctcaaacgctggaaggtccatcttgccagggcaccagacatgcatggacattccagactccaaatggtgactgtagcctgggctcaaacagagaccactgctgcacaagttatttcagcacagagcctggcatgtgggagacgttcaacaagcattagttcccatcttcttctcttctctctatacagggagacctaagttacatatcagtttatgattcccatctacagatgataaaactgaggctcggagaagttaacaggtccgatcaagttc

SEQ ID NO: 465479 - DNA, 633 bp, Homo sapiens
gctaatcattgagacaagtatgtagccttccagagctgttttatacacatacaatggcaggatgacattttaaaatattaactgaagtattttttccctctgtgtttcctaatggtcctggccttttacccattccatcagcacattctgcattcattgcctcagagaaaagatgacccaactgaacgtattataaaaagggagccaataacttttcagtgtcaaatttttgagtttctagtccttgtgggaatagaaaaagacagatcataaaaggagatttggaagaatayatgataagtcataaaaagtcttagagatttcaagattagataaaaaagatttcaattcttaggaggagagagaggaaaaagtacctctggcaatttatactgcttctttccaaaaattagcaaagccctattttggtgactaaattgcaatgagatgccttgctgagtggatccttgccagaggcagtagcttagagagctgacaacaccttcatgtaaagacaaaggcccctcctttttccagcagccctggctttttgccaagggtcctgaccttctagatttcagccccagtcattcccaaacaagtactgtgtgcagtgttcaaaccacacaactg

SEQ ID NO: 465480 - DNA, 557 bp, Homo sapiens
aatgtaactgttttctcctagagaaatatgcccagtaggacctggcattaaaatgagaataacttcagccctgcagacaacctcttcaacgttagtgtcaccaaagcagggargggacacaatgaaaacaaatataccatattcacttatctaaaatagagtataacacatcagccacagccaattcattctattcactttgaaaataatgtaaattatgtagagtcatcataaaaagaaggaaaataatcaaataaaaaagacaaaattaaactcacatataatcacactatcttgacataaccactgtaaatgatttgggatatatattcttccaaaccttgccctgtgtgtatgtatatatatatcattttaacaaaattaagctgcctacaatttgtaattttctatctatacttaatagaacataattttctatgttgaaaaatgtacatctacattgcaaaatatcacctatttttaattataaaggggaaaatgtgcctttataataaaagcatctgttatcctccagccagcgaagcttgactttgcca

SEQ ID NO: 465481 - DNA, 557 bp, Homo sapiens
aatgtaactgttttctcctagagaaatatgcccagtaggacctggcattaaaatgagaataacttcagccctgcagacaacctcttcaacgttagtgtcaccaaagcagggaagggacacaatgaaaacaaatataccatattcacttatctaaaatagagtataacacatcagccacagccaattcattctattcactttgaaaataatgtaaattatgtagagtcatcataaaaagaaggaaaataatcaaataaaaaagacaaaattaaactcacatataatcacactatcttgacataaccactgtaaatgatttgggatatatattcttccaaaccttgccctgtgtgtatgtatatatatatcrttttaacaaaattaagctgcctacaatttgtaattttctatctatacttaatagaacataattttctatgttgaaaaatgtacatctacattgcaaaatatcacctatttttaattataaaggggaaaatgtgcctttataataaaagcatctgttatcctccagccagcgaagcttgactttgcca

SEQ ID NO: 465482 - DNA, 528 bp, Homo sapiens
agtcaaaggggggttctctggcgggcaggagtgggggtcgcaaggtgctcagtgggggtgctttttgagccaggatgagccaggaaaaggactttcacaaggtaatgtcatcacttaaggcaaggaccggccatttacacttcttttgtggtggaatgtcatcagttaaggtgaggcaggacatattcacttcttttgtgattcttcagttacttcaggccatctgggcgtatatacgtgcaagtcacaggggatgtgatggcttggcttgggctcagaggcctgacagttaaggccacaattcacaaacacatgctttgtatgttcaacaatctcagagaaaatggggcctccaggtttggggtttcttacaaaaacagctcttctgcaatgacttagggttccatgtggttgtgatattyccaggatgagggactaagtcaatcctgatgaaactttaaaagatgccaccaagtctaagtgtttcaaagccaacacttcaactgctaaatcattccctctgtttta

SEQ ID NO: 465483 - DNA, 568 bp, Homo sapiens
gccagggcagttgatgaagttctagagagagagagacagggctggacttcttagggaggaagttctcaggcagggaagggttgggcatctaagcaggaatgatgaaccaggtcctttagacagaggtcagcaggcccagcttctgrgaggccagtgcatcagaagacacccaaggtgagtcacgaaaagaagacagaagtgatttgttcttggtctccttctgaactcctggtatgtgggtgggctagggctcacaggtgtcagtagccaggagagatagggcctcactcaaatcagctttcagttttctgatatcctcacctctggtctcaagctattcagccaatattgcatctttaatggttaagctttggggcaggtggctatttgtaaggctactaattagataaagggactgatttgcaccaggatgcagataatgcgtggaattgtgccaggacccacagctcaggagtttatgaccccctagctgccatggcaaccatgcctattcagttggggaagtctttttgttgtgggataggagtcagtgcatagggcacagcat

SEQ ID NO: 465484 - DNA, 467 bp, Homo sapiens
caacctggttggtcaatggttatcctactaatatccagctctttataaataaaggcccagattattctaaaatcttgataaccaagctgagtcagaactcactgaaacagagagaactatcaaggagtggcataagagagggtgacatgaacagctgtagaatgtaggctggattgggaagaaaataaagccagaaagtgatgaaagattgrgagaaacaggagcaggagatggagagactggacaagggattcaagaaagaacaggcagattaaaagtctgggaagtagagaactgaaaggataggaaattgtggtcagagactgggatgttaggtttatgatttcagaggtggatcatgaacaatgtggcctggggtcacatagtccccagcaggaaacaaatgatccactaaaaaaatagctgaagagagctttttttttttgagttgtttatagaggtgaggg

SEQ ID NO: 465485 - DNA, 514 bp, Homo sapiens
ggctgctatgtcacagaatagacgggaacagaaatgagctgggaactgcggaaggaagggcagctggcctgagaaatgtggagaatgaggttccgtaccttgagagttcaagaggaaaaagctgccctacacccagagtgaataaatactaggagagaggaagggacagagctttgggtctgggcagagtcagataccaggaccacagtgcaaacgggactggcttgttccttgagaagtggctgtgtgtcttccaggaagttgcattcctaggaaatttgctgaacgaacaagtgctaagaactgaaaacgctaggccaaaaggatggggtctctttaggctggggttatccctcctcaaggaaccatggcaakcgttactgtcaactctgcagtggcatctttcgtactctgttgggctgtcttcaacagtgccaccacgtgggagcaggacgccacggcaggaggggaacacgcgggccttctgtctgcatttgcctgtgagtaccttaat

SEQ ID NO: 465486 - DNA, 636 bp, Homo sapiens
gtcctgttagctccatgtagcaggattctacaaaatcgttctttcccatatcttaggggatctttcttctagggagaaaacaataatcaacagcagagccaagaatataggaaatgaaaagttgggtgtggttgaggagacttgacatcttactcacgattgagaggaacattcttcaggaagccaagcccaaggtctgcaatatggttgcattagtcagggttctccagagaaacagaaccaatagaatatctatgtcaatatcaatatctgtatctaagtctatgtctatatccatatctacatctatatatcacctattggtcctgctttcatatatatatgtaaagagattatatgcataaagacatttattataaagaattggcttatgcaattatggaggctgagaagtcccaaatctgcagtcaatgagctgaagtcccaggagagctgatatgtctgaggctgaaggcctgagaaacaggagagctgatggcgcargttccaatctgaaagtcaacagacttgagacccaagaagaactgtatttcagttcttgtccaaaagccaaaaaacacccatgtcccagctcaagtagtcaggaggcattccctctcagcctctttgtttatt

SEQ ID NO: 465487 - DNA, 653 bp, Homo sapiens
agtaaatcattatcttggaaactggtaaatagaaagaataaaaattttatcctgactttcttgtgagaactggaaactgtgctaacagcaatgtattagtcagggttctctggagaaacagaaccaatggaaatctctagctagctaactatgtataaagagagagagagagatttattatgaggaattggcttatggaggctgagatgtcctatgagctactgtctgtatgctggagatccaggaaagctgacagcatagttcaggccaatggcctgagaaccaggggagctgagggtgtaagtctcaatccaaaggcagaaaaagactgatgtcctagctcaaaccrtcaggcagaaagagatcattcaaccttcctttgcctttttgttctattcagaccttcaatgtgttgcatggtgcccacccacactgagaagggcaaattgaattatgctaattcaaatgctaatctcatttggaaacaccctcacagacacttccagaaatactgtttaaccagacatctgcacatctcatggtcaagctgacacataaaattaaccatcattatcaaaaacagaaaaaaacagacattatgggctttctgttgagagaacacgtcactatctatattttgaaaaaaacaaaaa

SEQ ID NO: 465488 - DNA, 653 bp, Homo sapiens
tataaatcttttcctttacagctaatggtttttgtgtctagttgaaaaaaatcctttcctaaagctatggagatattctatattctttttaaaaagcactacaggtttgcctttcacacctaggactttaacacaaaaaacagatggtggggatgggggagctggtgagaagtaccagtctaatttcctttttttccaaatgactactcaaaataatttattaaaagtcattaatttcccttctgatcagccacagcacttctttcatggaaatgtctatataagcttgggtgtttactactaggctttctatctactgaccattctggtatcattatcagtgttataattattctattttcctaataaatcttgatatatagtatagcaagtccacctatcttgctttttgtattcaaagcctgtccatatacattctagaatcagataaacaggctaaaaaggctgaaatttttatggaattacattgaatctacaagtcaatttgagcagaacyggtatctttgccatactgcctttaattcatgaataagaaatttctgtcagcatatttagatcttctttagcatccctcaatttcacactatagaggacttacgtttcattagaggttaatttctaggtatttttaa

SEQ ID NO: 465489 - DNA, 516 bp, Homo sapiens
agcttaacttaggttcccatgatccaaaattttattgctaaatcagcagatgtaggcaatttgctaaaattttacccaaaattttccaatgaaaagaaatatccataggggmtattcccaaaacataagaactaaagtctatagacctatatgaacattattttcttacagttgcatttttcaacagcagcagtaatacagatcaaccatactggttataccaaaccaaacagctttatctagcagcaaatatttaactatattctacatattaaccctttataatatatatggtttataaatattttctcctattctatatattgctttttcactctgttgattgtttgctttgctatgcagaaatttttaagtttgatgtagtccatttttgtctactttggcttttgttgcctgtgcttttggtgttatatctaaaaagcccttggcaaatccaatgttgtaaagctttttccctatgttttcttcctttttatagtttcaggtcttacattt

SEQ ID NO: 465490 - DNA, 582 bp, Homo sapiens
tgagagtataactaggaaaccatagaatcacagctgagcttattcaatggtattcattgcaaaaattccattcagaacactagaatgtaaacttcatagggctgaagttttcctttttttatgtactgttctatcccttccatcaaaaacatgcctggcatgtaataggaactaaaatcctcaaatttgcagaacacatttccttatcattttcccaaagcaccctaatctttttcatcaattattaaaatgtgatatgtatatttattgagttaatacattcwttgtttatgtcccactccagagtgtgagttctgttttatagtcctatctttcacataatacgtttaatgttaaatggattaccccaatgtatttaaatgtaaatactaaaaacaggttttaaaaggtttaggtgaattcacatctaatttttaggagttcctaagggaactcatcacaccgttgagccttttaatgttgatatcagctttgctatcccacaaaattaagtctgttaacatttaaaaatgctaaacagtaggattggagaccatgaatctttcccaatatgggaattta

SEQ ID NO: 465491 - DNA, 551 bp, Homo sapiens
attgcttttatttcagattttagatccgtttcttatttcatgttggaatgttccacaacagcattcactttctctctttgcattttttctgttaaatatttacaaagcactgaagcttgtaacaaataatcaktgaaaaatgccagaaaatattattggatagtattcaaataacctaacatttagatttctgagcatggttaacagcattacacagagttgtgtgttgaaactgccaatttaaggacttacttagcctccaaacttgttatttcttggaactcaactcataggatttatatgaagtataatatacatatcatcttattagtattgttttatgtaagaaagacccaccactagcagatatggccatgagcacacacttgtgggaacagctgcaagtaagactgacttgagtgtattgtgactactactctcccacatgcttctgtcctggttcctggaaatatcaaccttaacctttgattctgcctttcagtgtttcctgctcttgctttcatttgatatcagctgatttcttcaagcca

SEQ ID NO: 465492 - DNA, 551 bp, Homo sapiens
attgcttttatttcagattttagatccgtttcttatttcatgttggaatgttccacaacagcattcactttctctctttgcattttttctgttaaatatttacaaagcactgaagcttgtaacaaataatcagtgaaaaatgccagaaaatattattggatagtattcaaataacctaacatttagatttctgagcatggttaacagcattacacagarttgtgtgttgaaactgccaatttaaggacttacttagcctccaaacttgttatttcttggaactcaactcataggatttatatgaagtataatatacatatcatcttattagtattgttttatgtaagaaagacccaccactagcagatatggccatgagcacacacttgtgggaacagctgcaagtaagactgacttgagtgtattgtgactactactctcccacatgcttctgtcctggttcctggaaatatcaaccttaacctttgattctgcctttcagtgtttcctgctcttgctttcatttgatatcagctgatttcttcaagcca

SEQ ID NO: 465493 - DNA, 657 bp, Homo sapiens
taagttaccttctaggaatagatccatgtactctgagaattctcattaattcttttagamcatgagggtctcattagatgaatttccaactcaatatattaaacagtacccaggtggctttacaaaatactcaaccactcatacaaggcagcgtattgtcctaggagaatctgtcttgttgatcattcaccttgtgtcatacattatatcaaaactggcattgcataattttaggtgcttgtattatgttaaagtctcataaccaaactaaaatacaaaatattcacacctactcacacatacacatacaacatactaggcacatattgaaaacagctttttcatattccttcaaatgtcatctccagatgtaaacaaagcaggaaactgcatcattctaaacaaaataaaaatctaaaaaattctcattttcttatcctcacattctcccattcgggcacatattcaaaccaaagcacttaagctttgtacgtcaatagactgtataccacattttcgtggaagtatccatacagcctgtactcctctcctttcctttgcagttcacttaagagcctaccatcaactttttgtggtagtacattcacagtaacagaatatagtagagaaagtctctgctcagagatgctttcttct

SEQ ID NO: 465494 - DNA, 596 bp, Homo sapiens
tctgtgctgctgcgaggcacagctctgggtgctacccttcagaaagtatgcagtgtgaatgctgctgcctaccactgtgcaacctcacagaattttcatagatgtaagtacaaggtggcaaaaaaaaaatcagtaacatgtacctaaatctcaacaaacatcaactgtacatttaagaaataagcataacaatgactacacttgggataaagggtaatcagaactaaaataatgaaaaataaagacacttaaaacaggagaaggtgaccagcgtgggttgtttttaagacaaatatctaaattaaaaatgtaatacaagcattgaacattagaaatagaatgtattacttctaaaccagtagatgaaagtagagagggtgtgtttcatgagtccaaattaaaggagtagraaaagcataggaaaaaatgcaaggtgatagtgataatccaaatatatcattaatcacaataaataaaaatagactaaacccactaaattaaaaaaaaaactggaattgcctgaatagatttaaaaacacaaaattcaactctttgttattaaaggagacacacctaaagcataaccatatagaaag

SEQ ID NO: 465495 - DNA, 553 bp, Homo sapiens
aattgagtattctcaaattttagtgtctctactcagtgtatagttatatctattttgaggagatggttgctctatgatttatgatatatatctttagcttaacatagtatttcttgtaatagcattatacytcctcaaagtataagacttataattgcatatttctagttcctcacttccattctttgggttacttttgttatacagttacttttgcacatattgttatatgtaaaatatacataattgttgttatttgtgtgtgttgaggttcccagaaattcttgatgctgtcttttaaaattattattttctttcattaattttggaaaattcttgcccataatcacttcaaatatttattttgtctgctctctctctttgccttctgggactccaattacacacatgttagctcttgggtaccatttcatttatcacacacctttgtgttttagtttggatattttctattgacatttcctcaagttcactcattgtttctttagctatattcagtctgttgattagtctgtcaatcccttataattac

SEQ ID NO: 465496 - DNA, 553 bp, Homo sapiens
aattgagtattctcaaattttagtgtctctactcagtgtatagttatatctattttgaggagatggttgctctatgatttatgatatatatctttagcttaacatagtatttcttgtaatagcattatacttcctcaaagtataagacttataattgcatatttctagttcctcacttccattctttgggttacttttgttatacagttacttttrcacatattgttatatgtaaaatatacataattgttgttatttgtgtgtgttgaggttcccagaaattcttgatgctgtcttttaaaattattattttctttcattaattttggaaaattcttgcccataatcacttcaaatatttattttgtctgctctctctctttgccttctgggactccaattacacacatgttagctcttgggtaccatttcatttatcacacacctttgtgttttagtttggatattttctattgacatttcctcaagttcactcattgtttctttagctatattcagtctgttgattagtctgtcaatcccttataattac

SEQ ID NO: 465497 - DNA, 606 bp, Homo sapiens
cagctggggccactattccaaagggcacaagtggtaagccttggtggcttccatgtgatgttaagcctgtgggcatgcagagtgcaaaagtgaaaaaggcttggcagacacctgcctcctccttcaccttcttccttgattgttacctccctgaggcttcaccagaagccaagctgatgtcaacaccatgcttcctgtaaagcctgtggaactatgagccaattgaacctcttttctttataaattccctagtctcaggtatttctttatagcaatgcaagaatggcctaatacaggccactcctaaaagcagccttttttgggaatatgcagggcttgaaaaattcaggttagctgtttcttatacaattttttwaaaatgttcttgacaatggtcatttaagtttcagtgttcaggaacttactacttcacaagtagcccagtgcagttgtgggaagtgctaccaaccttataatttgtcccccagtaactttctaatctattatttataatgcaagatgagaataaagtattttagtggccagaatcagagaaggaaagacaccatcttagtttaagaaaatattctctaaagcaatttaagt

SEQ ID NO: 465498 - DNA, 606 bp, Homo sapiens
cagctggggccactattccaaagggcacaagtggtaagccttggtggcttccatgtgatgttaagcctgtgggcatgcagagtgcaaaagtgaaaaaggcttggcagacacctgcctcctccttcaccttcttccttgattgttacctccctgaggcttcaccagaagccaagctgatgtcaacaccatgcttcctgtaaagcctgtggaactatgagccaattgaacctcttttctttataaattccctagtctcaggtatttctttatagcaatgcaagaatggcctaatacaggccactcctaaaagcagccttttttgggaatatgcagggcttgaaaaattcaggttagctgtttcttatacaattttttaaaaatgttcttgacaatggtcatttaagtttcagtgttcaggaacttactacttcacaagtagcccartgcagttgtgggaagtgctaccaaccttataatttgtcccccagtaactttctaatctattatttataatgcaagatgagaataaagtattttagtggccagaatcagagaaggaaagacaccatcttagtttaagaaaatattctctaaagcaatttaagt

SEQ ID NO: 465499 - DNA, 532 bp, Homo sapiens
aggttcttatccaaggatttggactagcacaggacaatggttactgggctgtgcaagaaccagtgttcaacagcgccaccgtgtggcagcyttagaatcacttgtggaacaacagattagttgcagttctctttcttcccgtggtacttggaagcaagaattaaacctttgggatagattgtgtgaacccaggtttgtgaaatgccattaaggggagagaaagctaggaaagagtggactttgagcagaagatactagacttccattttttagaaagtaaaagcggttttaccttctcagtcgttatgttggtgaagtaaaccacttttcagacatattcaagcaatactttttccatttccaaagcacctttacttagaatactccattattcctatggtttttgtcaagacatatttaagtttgtcattgcatgcttagattataaaaagtttgacaaacaacatgcagatactgattcccctgtgctggacatacacttctattcccactcaccacttcccaagatgaa

SEQ ID NO: 465500 - DNA, 600 bp, Homo sapiens
tttacattctcaccaacagtgtacaaggtttcctttttctccacatcctcaacagcatttgctattgcctgtcttttggataaaagtcattttaactgggatgagatracatctcattgtacttttgatttgcatttttctgatgattgacgatgttgagcaccttttcatatacctgtttgccatttctatgtcttcttttgagaagtgtctatgtaaatcaattttgtccattttttaaccagattattagatttttttttctatagagttgcgtgggctacttatatattcttgttattaattccttatcagatgaatagtttgcaaatattttctcccattctatgagttgtctcttcactttgttgattgtttcctttgctttgcagaagcttttaacttgatgtgatcccgtttatccatgtttgctttggttgcctgtgcttgtagagtattactcaagaaatctttgtccaggccaatgtcctagagaatttccccaatgttttcttttcgtactttcgtagtatgaggtcttagatttaagtccttaatttatgtgatttgatttttgtatactgtgagaaatggagttct

SEQ ID NO: 465501 - DNA, 600 bp, Homo sapiens
tttacattctcaccaacagtgtacaaggtttcctttttctccacatcctcaacagcatttgctattgcctgtcttttggataaaagtcattttaactgggatgagataacatctcattgtacttttgatttgcatttttctgatgattgacgatgttgagcaccttttcatatacctgtttgccatttctatgtcttcttttgagaagtgtctatgtaaatcaattttgtccattttttaaccagattattagatttttttttctatagagttgcktgggctacttatatattcttgttattaattccttatcagatgaatagtttgcaaatattttctcccattctatgagttgtctcttcactttgttgattgtttcctttgctttgcagaagcttttaacttgatgtgatcccgtttatccatgtttgctttggttgcctgtgcttgtagagtattactcaagaaatctttgtccaggccaatgtcctagagaatttccccaatgttttcttttcgtactttcgtagtatgaggtcttagatttaagtccttaatttatgtgatttgatttttgtatactgtgagaaatggagttct

SEQ ID NO: 465502 - DNA, 600 bp, Homo sapiens
tttacattctcaccaacagtgtacaaggtttcctttttctccacatcctcaacagcatttgctattgcctgtcttttggataaaagtcattttaactgggatgagataacatctcattgtacttttgatttgcatttttctgatgattgacgatgttgagcaccttttcatatacctgtttgccatttctatgtcttcttttgagaagtgtctatgtaaatcaattttgtccattttttaaccagattattagatttttttttctatagagttgcgtgggctacttatatattcttgttattaattccttatcagatgaatagtttgcaaatattttctcccattctatgagttgtctcttcactttgttgattgtttcctttgctttgcagaagcttttaacttgatgtgatcccgtttatccatgtttgctttggttgcctgtgcttgtagagtattactcaagaaatctttgtccaggccaatgtcctagagaatttccccaatgttttcttttcgtactttcgtagtwtgaggtcttagatttaagtccttaatttatgtgatttgatttttgtatactgtgagaaatggagttct

SEQ ID NO: 465503 - DNA, 552 bp, Homo sapiens
ttgtttgtttcagttggtctcaatttacaacttaggggaattcaagatagggaacaagcctaacccttgcacatggaccaatcaaattgagccttcctagcagtaggcatttttataaagtgaaaagaggcaaattattgagatcatggacaaagaagaatgggacaccaaccctttgtgacctctcacctccatgtcaagcctcacacccaaggtcccaagacagcagaagttcatggaccaggaggccctcaaaggagatgagcctctaccaagtctattgtctgggaagaattgaagrccattgtcagagcctcatctgagaaggaagaagatgccagtgtgttaggcagacctcacagctaaggctcagattctacaggttccctccccttgctcttctccatcaaaaccagggtctacctctcattgatttatcttcccaagtggctagttgaaagagtgaggcaggagagaagaaaacactcttataatcaaatcttgcacacccatagaaagctatctccattacagagtacattctgaggccta

SEQ ID NO: 465504 - DNA, 621 bp, Homo sapiens
ctctatattcatctgctcactaataatctaaatttgaaatcaattaattcagaagtgaacacattctcttttgtgccttacaggttctgatccaaagttctgtttcttcaggaataataccctaccaacccaggttctcatcctcctggggtcattcccacccaccctgtttaattttcttttgtgtacctctaccctgtctccttctctgaatctccacagccaacatcttcacttagagagttgatatataccatcatctttcaccatgattaccatgacactctttcaatggctttcactgcctccgatcttacaacataagagtccagctctctgcttccaccagaaatgtagtttgacaaaatgcaaactgatcatgtcacttcccccattttataatccctcagtggtttcctatttcttataatatttactaagaacttcaaagcccttaacaatccccctgttaggttcttcagtttcatcmttcttggtgaccttgaagtttcatcatttttggtgactttggaatgaatccaagtgttctacttgcaattaccctaatataatatattatctatattctctatggctttacatttattttcctttctattt

SEQ ID NO: 465505 - DNA, 630 bp, Homo sapiens
ttttgccttttgatgggagaagctaaaaaacactatggccatgttttccttttaccccagtaggtaatgatgtatttattagcatgaaaacatatttatgaattacacataatcaaactcctaatgtttttaaaactatgtattttttatagtcagaaaaccaacaataaaaatattgtcattaaagatatagataattgcttttaggttcaaaatgtctaccctaccgttttctccaatgtatraggaacataaaaacaagatcagatgctacagcccaatttgcttgtgctgatcatacttcagggtcttatagactacttcctactccctggagctagcagttgtttggattttctattttttcttcatatttagacttatgaagatttttgcttctgtctatcttatgggatttctgtattaaaactctagcatgtgaccttgggtgttcactagccctccttagaaaaggtagattccaggtcttttcctgccctgaattgatgctcctctcactctagcatgacagcttttcataactgtcaacttcatcttcttgcaactgcccatcacttacaatgtaaaatcacttataatgtaaaatatattgaatagttattattattc

SEQ ID NO: 465506 - DNA, 464 bp, Homo sapiens
tcatgagaactcactcaccatcacaagaacagcatgagggtaactgccctcatgattcaatcacttcccaccaggtccctctcatgacatgtggggattatgggaacctcaattcaagatgagatttgggtggggacacagccaaaccataacagtgaacaaggcaggcaaaaacaatgagagaagtacaaacaccaactgtggaatgccaggcaccttcctctatgttttgyatgtgatttctcatctaatctttccaattacccttacttttcacatgaagatgctaagcacagagtggttacattccgcaaagttacagacctagttaggggcagaatcctagagacaaactagacactgcattttcatacttatattttgaggaaaaaaaagaacagaattccattcctgttcttagcttgctgcacattcatgaacatccataatacagtaagcatggc

SEQ ID NO: 465507 - DNA, 464 bp, Homo sapiens
tcatgagaactcactcaccatcacaagaacagcatgagggtaactgccctcatgattcaatcacttcccaccaggtccctctcatgacatgtggggattatgggaacctcaattcaagatgagatttgggtggggacacagccaaaccataacagtgaacaaggcaggcaaaaacaatgagagaagtacaaacaccaactgtggaatgccaggcaccttcctctatgttttgtatgtgmtttctcatctaatctttccaattacccttacttttcacatgaagatgctaagcacagagtggttacattccgcaaagttacagacctagttaggggcagaatcctagagacaaactagacactgcattttcatacttatattttgaggaaaaaaaagaacagaattccattcctgttcttagcttgctgcacattcatgaacatccataatacagtaagcatggc

SEQ ID NO: 465508 - DNA, 464 bp, Homo sapiens
tcatgagaactcactcaccatcacaagaacagcatgagggtaactgccctcatgattcaatcacttcccaccaggtccctctcatgacatgtggggattatgggaacctcaattcaagatgagatttgggtggggacacagccaaaccataacagtgaacaaggcaggcaaaaacaatgagagaagtacaaacaccaactgtggaatgccaggcaccttcctctatgttttgtatgtgatttctcatctaatctttccaattacccttacttttcacatgaagatgctaagcacagagtggttacattccrcaaagttacagacctagttaggggcagaatcctagagacaaactagacactgcattttcatacttatattttgaggaaaaaaaagaacagaattccattcctgttcttagcttgctgcacattcatgaacatccataatacagtaagcatggc

SEQ ID NO: 465509 - DNA, 600 bp, Homo sapiens
attcctagaaagctttcttaatgggctttttacttttaaaatataaagcatagaccctgcataaaaatcaacgtctttgaagaaatttgtcatcacccrtcagtcaaaactctgcaatgatgacgaagtgggaaaatttaaaatgctctgtgggggagatggaagtgcatctaggaagaacaagttctgaagaatgagttgagtggtggggagatgaggacagtgaggcaccaacatggactctgtcggaggctcagcttcttggatgggaattaatctccagtggttatagtggcaactgccagaagtcgacaaaacagtttttgagggacttgatttagctcttgatgtagcaggatttgagaggaaatgcaggggataggagagggtgttttctagtttacataggatggattagagacagaatgtgatgaagcaagccaagtggctatctagatatctatgagaagaatattgcaggcaaaggcaactccaagtgcaaatgtcctgaagctgaagtgttcttggtgtgttgaagaacagcagggaggcccgggtagctgaagctgattgagtaaggaggggagtgacagtgggtaa

SEQ ID NO: 465510 - DNA, 571 bp, Homo sapiens
gcagtacactccagctaaaaaattgcagatcatatgccctctttggaaattgaagctgtacgactatttaatttgaaatggagtaggcttttggacaaccacttggtccaatagattaactccagctatttatttatttatttatttatttatttatttatttatttatttatttaaagagatggggtcttactctgtcacccaggctggagtgtagtggcatgatcatagctcattgcagcctygaactccgtggctcaagtaatcctcccacctcagcctcctgagttcctggggctacaggtatgagccactgtgcccagctctatctcttcatttatttcacaaacatatgcaagcctctcccttgggtggggaatggcactagctctcagatgcaatgtccaataggacctcatcccagatgaatagacaaagagatgtggtatggtcagggtgctgtgaaggggtgcccagtctagactggggtgatggggctgggcagggcatgcattgggcccagagaaaaattttgaaaggtaaatgggaattagaggtatggcagggaagt

SEQ ID NO: 465511 - DNA, 523 bp, Homo sapiens
cagaagtcacctatagggatttgcttggcttcccttaacatagaaagcagaaaatttaacttgtgagctccttctctgcctttttagactctatttgctctatctcattattgacttggaagtgagagagtgtctctggaccactttgagtgctcagtgccaataatgtatgtgttaatgacactccctcctgcaccctgcataggcaacagcacagctacctgacttaatgagcagttcatcctaatcaaatgactaatggggaattaagaatgataagactggaaattttgttttaagggaaattcatacaggagtttttttcttttttggcraaaaagacatattaagtctccttaaaataagcagcagtaaggtgtaatcttaatggatattgaatttcaggcactatctggcttaaaagcagagattggaaagggcttctgctttctcagttttgcctgttggcatctatgaaacctcagggtggcaggatagtaagagtagtagagttgaagtgagg

SEQ ID NO: 465512 - DNA, 483 bp, Homo sapiens
tcatctgttaatgcccctcaatttactatagagcaaaatgattctgctccctcatcttccctgtccactttctagcactttccaaaaaaagaggtctagactacagccrtgctaaacagagactatccccatcaggaacatgaaaaccatgtataagtcacagcacttccgcagtgaataccaagataaaaaatatatggcgtctctcctcatggagctggggtctcataggagagagaggtacatgaattgtatagaaagacaaagaaaagcaaacactataaagatgagggagcaaatgttcagcagtggcatggatggtaggcagaggtactggccgctgaaccaataaataaatcaattatgcatatcctggagaagcaggaaaagctggaaccactgcttcagattatgaccctcatttcttttctagacaattctaacaccctctaaatgtgtctccctgcttacttcatctattct

SEQ ID NO: 465513 - DNA, 577 bp, Homo sapiens
tgaaaaccatgtataagtcacagcacttccgcagtgaataccaagataaaaaatatatggcgtctctcctcatggagctggggtctcataggagagagaggtacatgaattgtatagaaagacaaagaaaagcaaayactataaagatgagggagcaaatgttcagcagtggcatggatggtaggcagaggtactggccgctgaaccaataaataaatcaattatgcatatcctggagaagcaggaaaagctggaaccactgcttcagattatgaccctcatttcttttctagacaattctaacaccctctaaatgtgtctccctgcttacttcatctattctagcccattctgtacaacatctgcttaaaatccttcagtggctcccaaccaaacgcagaagtcagcagtgcttaccatgacttacgatgttcttcatgatctgaatcttgcccacaactctggcttcatttctaaagaatatggggccttcctcaaaggctccatgctctcaagtatatctgggcctttgcacaaggtgtttcttctgtccagaacatcttcctattctcagtct

SEQ ID NO: 465514 - DNA, 577 bp, Homo sapiens
tttcccagcacaagaattgaaaaaagcacatggtactctcccagctgagattcttagcctcttttttcccctactgtgagcagtgtcacccaggtgccctcactcatctattttaaatacactcaccatctctgctaacagcttcmgcctctgttaatcaggtagcttttcattaatgttcttatccttgtcccagcatcttatttgtcatgctttattagtagacatgataagtcataaatcttagttcctcttagcttcttagtatctgttgtcaagttgaagatcccagacagagggagatgagaactggttcattacagagtgactctttctaatatctccttggttctttatgatactaatacattcttcccactccagttgcctttttctctatttagctccaatacaattcatagaaatgagatcattcggcttaagggtacattatcttcacttcaacccatccttctttaagatgaacaatgctgcctttagattctgatactggctctgccacttattagctggatagccccagacaatttactgactctgagtttgtttccatact

SEQ ID NO: 465515 - DNA, 470 bp, Homo sapiens
ttatatattatacaattaatcatatatcagcaaattacaatggctgtactcatctagacaagtcattaaacaggtgttgcatttctcaaatacatatatatatatatacatataaattgaatttgaggaagttaaataacgttagagatgctttatcactattgctgattgttcttcaaagagccagyagatccctaaacatttagctttaagtttttcttctcctcacaccagatcattaataatctgtaaacagtccctgggaagaattaagagaaggctattttcaagaatttgagtaaatgcacttacctgtaaagagttttgcaaagtgaataatcaccactaacagatctcagaattactaaatatgatatatttataaatcaggtttcttaaagtagggcacacaacctgagaattattcaaatgctaagaattcattacaaagccactgctatagactaaaa

SEQ ID NO: 465516 - DNA, 478 bp, Homo sapiens
tattcttaccatattaaagctatgtttttccccaggagccacatcacagtgaagcagattgttgcactaacagtaagtgcaaaacaagcatataacatccttcactgccctctgcagacttgctattatttatttatttgtgattatttattcaaggtctgtcattcctgctccgttttttgctctgtgaggaccaggtctgactgtttattcaccatcctgtccttggcaggtagcacagtgcttggcacgtagcagagcttgataaagctcattcactgatgggtttggattttgactggtgtggaacacataggcacacatttgactagtgacctcaggcatggctcaaactttttatgacagaaagtataaaattaagcagtacaacttacccygcccccgcaacccactgcctagcccccactgctgtgtcttagttctggccccggccatgccagctcacatgcaccctagc

SEQ ID NO: 465517 - DNA, 456 bp, Homo sapiens
atgcccatcaagcgagcatgccctctgggagtacagacacaggacagaccaaggcagagaggaaaattcagaacgccaatgcttgggcagagtgcttgctaaggacttacttccataaggctcattaaaaacaagactcctgcagaaatgcagatttaatttaggtcctctgctctccaagcagatcactaggtaatgaggagcactcacacgccatgtcaaaactgtgcccagtcgtctggaaccaagatttattctccaggtgagttcacctttaaatatgtcatttgccctgagctagactttactcttcccctggaagaggctgctagtgaatgaggccttggcatggagacaatattttattcatgsgcactgttcccagagccaatggagagtacagtgtgagcaggtgagggaacctggagaggagaaattgcagactgtcacagccat

SEQ ID NO: 465518 - DNA, 589 bp, Homo sapiens
gactcagtttgtttagacagaagatgctatagcccatgatagtggtcagcttgttggcatcaaaaactgcccccttctcctggacagcccctctttgaattgatactactcagaaaggagactacctagacagcaaggacgatttatgaaagtcatctccactgccagtgaaaccagtcaagctgcatgtgcagctgccattaggtcaggagaaaaacttccatttttgaaattgtatagcatagacagtccctgggatcaaaaggagacaagcatgggtatggatcttgtctgcactacttaatagtcagsaaggtacttaagtcctgggcccgtttcttcttctgaaaatggaaacgatgcaaattaaatggcataaatgaaggtaaagatgcttccctttcagaacctttgtttctgcctagtgttcactccagggccacagatggcctgctagttgatgttaatgccattctttaactaccccttgtgtgtgttgtttgttcattaatgtggatgaatggttccacaattccaccagggactttggtaggtgttggatgagtgtgtaaaggagggagaaggtgtt

SEQ ID NO: 465519 - DNA, 538 bp, Homo sapiens
ttacaggtaagaaaacaggcacagaaaggtgataagtcatttgcctaaaatcagctaggaagtggaggaactgggagattcataaatcgtaactgcagataccaactttgtgtgtatcgaagacctgtcctatgtccagatccctacagtcacctttcagggatggctcttcttcctctcgtgctgctactttgcctctgcttctgcctccttaaggagctgatggtgtggggagtcatgagggaggtcaagatggtaaaccttctgatgaacataggtggtggaggtggtctcttgttctccccctcacatccccttagttactcactctctatgtggctttgaaaagttcccaaagctaggtgttcttttctgarcttcagtttcctcatctgtaaaatggaggaggtaatggctctatttcattggcagagtgattgacaggcttagatataatgtctgtggaattcctggcatggtgcctggcagatagcaagtgctccataaataactgctggagttattgctttaattatta

SEQ ID NO: 465520 - DNA, 635 bp, Homo sapiens
ggacttccaaaggaagaagtgggtagaagtggcctaaactagtctttggagtcaaggaacaatggacatttactgtgacctaagttagccagatgaaaaaaaaagagagatggcagggcatggaggcagaccagagaacccagtgcatttgaggagaatgaaatgcattcacatagctgaaatgtaggggaagagagcaactagctacaatcaaagcaaaagcagaaartaggggctacttttgaagggatctatgtgccaaaaagcttatactttctcctgaaggcaggaggaggtatccaggactttaagcaaggaatattattttagagattggatagaagaggagcaagatgaaacgcagacatgacaggaagtttttgtattattttagtggagaaacagtgattgtctgagcaaaggcagtggtagtgggaatggagatatcttgaaggattccagaaatcttaggagagtagatggatagctcttggcagtgtcactgactggggacagagtgtgccgctttactatggagggcccacttcaccacgggcttccttctcagcagggcaggtagataatggcattttagcagtgcctgaaaccaccactttcagccatatggcgggtct

SEQ ID NO: 465521 - DNA, 601 bp, Homo sapiens
ccgcactccagcctgggctacagagcaagactctgtctcaaaaaaaaaaaaaaaaaattacctgccaggttacgtaatattccagcagaacatcacaaatcatcccaactctgagctggcatcccccacttccttccctgaaagaatgatacaagagagagcaaggggtggctctaagaggggcagattttcctctggaagtgtcttgagtatctgtgagaaaatgtagaatgtataaaacctgcagtctcctattgggatgaaatgtggtataagccagaactattgagagtagaagctagttgataatcttgcctgatttgtattaagattacttcatctaaacaagacccaatatatgagtgttatacttttcaaatgaatttgggagtcgtttttctaattataaaagaaactattaggtaaaatagtagcactgcatgggcatgtaattacccatatatctataaaaattcagtttataagcaactcttcaggggcatatctattrcataaaacaaggggcaaccatattgtggtcggaatacaccatgaaataaataagtgcatctgtagaaatgacaacattcccattatgaaa

SEQ ID NO: 465522 - DNA, 503 bp, Homo sapiens
tcactattgagttatgagttttttgtaatatattctggatacaaatctcttataaggtattttatttgcaaatattttctgcgagtctgtgggttgcattttttactagcttgatggtatcttttgcagtacaaaagtttaggttttcatrtagtccattttttctagttttcttctgtagactgtacttttggtgtcacaattaaaaaggctttgcctaactcagggtcataaagatttgcccctatattttcatctaagagttttagagcattagttcttacaattaagactatcatccattttgagttaaattttgtgtatggtgtgaggtaggggtccaacttcattcacttgcatgcagatatccagttgtcttaacactatttgttgaaaaagtttttattcccccattgagttgtattggtgtatacacattttttttcaactaaagctgatctataacatactttttgacccacatttagcctggatccatcagc

SEQ ID NO: 465523 - DNA, 532 bp, Homo sapiens
  misc_feature (1)...(532): n = A,T,C or G
nnatcctgcgggtacatagtaggttaatatatttatagggtacactgagaattttgatataggcaagcaatgtgaaataagcacatcatggagaatgggatatccattccttcaagcatttatcttttgagttacaaayagtccaattatactttttaagttatttaaaaatgtatgattgagtgattattttctatagtcaccctatcgcccaatcaaatagtaggatttatttactctttctatttttttggtacccatgaaccttcccaacctttccctgagccccccactacccttcctagactctggtaaccacccttctactctttattcatgagttcaattgttttgatttttaggtcccacaaataagtgagaaaatgcaatatttgtctttctgtgcctggcttattttcacttaacctaattatctccggttccatccatgttgttgcaaatgactggatttcattcttttcttatggctgaatagtactccattgtgcatatgtggtacattttctttatc

SEQ ID NO: 465524 - DNA, 576 bp, Homo sapiens
atgcaacaaaatcttactgccaagggcattgatgagctctcccagtaaaaaaagtataataataatgttaaactaaatcataaaaatgcagaaggtggttattaaagggcagaggagagaaattgcttgtaaagttctggtggaaatatcaaaaatacattttattgaacttttaagaaattaagctctttgtttttaaactagggtgcaaaagcaataaaacttaaaggccattcaataaactatttcattcaatggtcawcagcaatgattcagcagtaaaaataaaaatcacatttattcaacatggtcatcaattcaggcaggcctgaagcttacaaatgataagtttgtcagtgaaaataaccagctgaaagtatttttaaatgaattttgattgaaaaaataataaagaattttttgaatgtacacctttttcttagtgaaaatggacttggtttaacttgacatagtataaaactcttaatgttttatgtagtttattaagttctatgaagaaatgtatttgaaacaaatgtagataatgaccaaaaaagcttaaatatgaacaccatg

SEQ ID NO: 465525 - DNA, 610 bp, Homo sapiens
acaagcctccagaatgagacgtcttaatgactccattgagtgcatgggagttcaagctgtttctctatcattcactctggggtgcaggaaacttagtggctgggcttcagtggccaggtatgataacaagactcaaaatctaaattgtcatttacagatatgtcataacatttcaaaaaatatatagtattctctcagatgatcaggcagragttttgatatgcatttcaacatagcctatcttcaccagttttgaatttccttcacaaaacaggcttaccacattcttatggttcctgaaggaagaggaaacacatatttgttaaacatgtcctttgagccagtctccttcctaattgtgttatctgcacagtctcatttaatccttacgactgtgcagtaaatgaataaaggcaatggaaataaagattctattctttcatgcaatgttgaaggagaagattggtgaagaggaatcaggaaaagaaaggaactgcctattcttatcccattgacatcatcccagagtttggtttcaagttttttaagggatgctgtattttattttactgattcatggcagttgtctggagcatgacaaatgttcatt

SEQ ID NO: 465526 - DNA, 603 bp, Homo sapiens
cacaacaatttggtaagcctaagccatggtacttgtcttcaaggggccatcatctaattgggaagataagatgtgcacaagaaataatagggataacatcatacacagtggactactgtgttctcaattgtgtggactagtcttggggactacaggtgctcagaagaaagggaatttgattaaggccagaaaagtgagggaagatattatggaggagatgggaagctgggtcttgcagagtgaatgggaattggataaacagagggagattattgtgcatttggggaaaaatttggcaatggaatggacrtttgtgagattgcaaagacccttgtctgtttagaagacaaaaaacattttagagactgatgaacaatatgtgtccatgtaaagggtaaccttgaatagcaagaagaacaataataaaatatttagagctggatgagccctcagagagtatctgaattgagcaattccatgacaacaaaaaatgtagctccaactttatctacagccctagtttgggcaagtcaaggtctctgaaagatcatcattagttaaaaaaataagagccatcactagagtaagagaggttttaagtta

SEQ ID NO: 465527 - DNA, 527 bp, Homo sapiens
gagcctcctgcttctcaggacaacatggataaaatggagaacagttaactcattctacctctctggattagggttattcatggggagccagtctcaggaaagagcactacaacctacccaagggcaaaagcccagtacttcaaatcattcttcattctcctctttcccttgtttctcacatctgaacggtctgtaagacctgtcagctctatctttaaaacaaatccctaatatattcacctcttactgtctycactaatagtccaagccaccatcatttctcatttgtttactgcaacagtctcttaaatgttcttcctgtgaccactcttgtatcctgcctccctcctgacctctcactctccacccagcagccatatagattcattacaattatacatcagatcatgtcacctctcttccctcaaatctttcaatgacattttggtggttttagaatgacacacaaagttcccttaggctagacgtcctatgtgaatctccaactccatcataacctgactata

SEQ ID NO: 465528 - DNA, 574 bp, Homo sapiens
aagtaaattgaaaccaaatgaattcaagactgatctttttcttaatagactaaactaaaaatgagtgtgtttcccagttgcctcagccggggccttgctatgattttagatgctctctcagtgagctgtgagtgacctctggtccttatcagaggaaaagaaattcatgctattgtctggatattcctcttgttttgcttttcatgytgtaaacaacaccttctgaccttaggagcctgacgcaaaatcacgaagctacgggggtaagagtgagaaagcctatacgtgggaagctactagaacttaccaagtgtaagtcaggcagcccacgtgtagagacggaacttccagaaagtaaccagaacgtggtccaaaagtccagcatacacatggccagggtgtgtgtatgtatgcaaacacatgcatgcacacaacacaacttaaaggatgactcagccatgttttggtagtgacagcatgtctaagtctgggcctttcagatttcataatcagctgatttaagaaatttcaaaaacagtcatcttttctcttgagattttggtaaaggtggtaa

SEQ ID NO: 465529 - DNA, 574 bp, Homo sapiens
aagtaaattgaaaccaaatgaattcaagactgatctttttcttaatagactaaactaaaaatgagtgtgtttcccagttgcctcagccggggccttgctatgattttagatgctctctcagtgagctgtgagtgacctctggtccttatcagaggaaaagaaattcatgctattgtctggatattcctcttgttttgcttttcatgttgtaaacaacwccttctgaccttaggagcctgacgcaaaatcacgaagctacgggggtaagagtgagaaagcctatacgtgggaagctactagaacttaccaagtgtaagtcaggcagcccacgtgtagagacggaacttccagaaagtaaccagaacgtggtccaaaagtccagcatacacatggccagggtgtgtgtatgtatgcaaacacatgcatgcacacaacacaacttaaaggatgactcagccatgttttggtagtgacagcatgtctaagtctgggcctttcagatttcataatcagctgatttaagaaatttcaaaaacagtcatcttttctcttgagattttggtaaaggtggtaa

SEQ ID NO: 465530 - DNA, 574 bp, Homo sapiens
aagtaaattgaaaccaaatgaattcaagactgatctttttcttaatagactaaactaaaaatgagtgtgtttcccagttgcctcagccggggccttgctatgattttagatgctctctcagtgagctgtgagtgacctctggtccttatcagaggaaaagaaattcatgctattgtctggatattcctcttgttttgcttttcatgttgtaaacaacaccttctgaccttaggagcctgacgcaaaatcacgaagctacgggggtaagagtgagaaagcctatacgtgggaagctactagaacttaccaagtgtaagtcaggcagcccacgtgtagagacggaacttccagaaartaaccagaacgtggtccaaaagtccagcatacacatggccagggtgtgtgtatgtatgcaaacacatgcatgcacacaacacaacttaaaggatgactcagccatgttttggtagtgacagcatgtctaagtctgggcctttcagatttcataatcagctgatttaagaaatttcaaaaacagtcatcttttctcttgagattttggtaaaggtggtaa

SEQ ID NO: 465531 - DNA, 495 bp, Homo sapiens
tataacttcgtggtcactttcagcaattaaaggctcaatcccrtttaaaactgcacatgtaccctaaaacttaaagtataataaaaaaaaaataaaataaaaaaaaaacttcaacctcaaattcaatgcaaatctttcttctctcccaccaacagctatatttgtaccctgctcttttactcctcctcccagctcagtgccctgttgcagatgctgggcatgtcccgactctgacatccctcttcccacttccctgtgtggagacctaggtcctcaagtgtttggggatgggaggggagagaagaaagggactagctttttaaaaattgtattcaacctgctatcttcaacctgctttccatcgactgaagaatcttaattgcatagtatcaactggctgtcaaatatttatgcatggccatgcagccccagtgctgcttctctccaggacataagtgggagttctttggagaatgctggagggaatgaagggga

SEQ ID NO: 465532 - DNA, 576 bp, Homo sapiens
tgaactaatgggaaggaagatgatctcaaaggaataggaataaaattattaaaacaaatatgaaaaatacaagtaacaagtaagtttatgtgatttcaaaacattgtttgagaggactgtagagaagataattcttcagatgtggtaaggctcaaaaacattttttaatgtctttgatgagaggatgttctaaggtagaaaacttaatgctcttgatrtgtacatcagtttttttaactaacaaaaaagttacatatatttgtggtttccaacatgatgttttgatattaacatacattgtggaataaccaaatcaagctacttaacatattcattacctcatattttttgtggagaacacttaaaatctctcagtaatcttcaagtatacaatatgttaactgtagtcattatgatgtacaatagatcccttgtacttgaaatggtgtgtcttttcaccaacatcttcccagtcccccaccacctaccccatagtaaccactattttactctgtttctatgagtttgacttttttatactccatgtaacaagtgttacgaaggatgtggagaaaa

SEQ ID NO: 465533 - DNA, 576 bp, Homo sapiens
tgaactaatgggaaggaagatgatctcaaaggaataggaataaaattattaaaacaaatatgaaaaatacaagtaacaagtaagtttatgtgatttcaaaacattgtttgagaggactgtagagaagataattcttcagatgtggtaaggctcaaaaacattttttaatgtctttgatgagaggatgttctaaggtagaaaacttaatgctcttgatgtgtacatcagtttttttaactaacaaaaaagttacrtatatttgtggtttccaacatgatgttttgatattaacatacattgtggaataaccaaatcaagctacttaacatattcattacctcatattttttgtggagaacacttaaaatctctcagtaatcttcaagtatacaatatgttaactgtagtcattatgatgtacaatagatcccttgtacttgaaatggtgtgtcttttcaccaacatcttcccagtcccccaccacctaccccatagtaaccactattttactctgtttctatgagtttgacttttttatactccatgtaacaagtgttacgaaggatgtggagaaaa

SEQ ID NO: 465534 - DNA, 576 bp, Homo sapiens
tgaactaatgggaaggaagatgatctcaaaggaataggaataaaattattaaaacaaatatgaaaaatacaagtaacaagtaagtttatgtgatttcaaaacattgtttgagaggactgtagagaagataattcttcagatgtggtaaggctcaaaaacattttttaatgtctttgatgagaggatgttctaaggtagaaaacttaatgctcttgatgtgtacatcagtttttttaactaacaaaaaagttacatatatttgtggtttccaacatgatgttttgatattaacatacattgtggaataaccaaatcaagctacttaacatattcattacctcatattttttgtggagaacacttaaaatctctcagtaatcttcaagtatacaatatgttaactgtagtcattatgatgtacaatagatcccttgtacttgaaatggtgtgtcttttcaccaacatcttcccagtsccccaccacctaccccatagtaaccactattttactctgtttctatgagtttgacttttttatactccatgtaacaagtgttacgaaggatgtggagaaaa

SEQ ID NO: 465535 - DNA, 269 bp, Homo sapiens
ttgaaagaaaagcccaaatatttaacccaatattgtcatattgcaaacattctgtttttacctaagtgcatgctttcagcccaacagaagtgctgtgactggactttgtctctataagaccaaaacaataagytaaaaaaaaaccaacatttcatgaaattaggttttggggccaaaaactgagatgaagttttagtttgtttgtttgttttgttcagttttagtgaattgactatgtacactgttcagagcggtcaagcaggtccagg

SEQ ID NO: 465536 - DNA, 374 bp, Homo sapiens
agctcatttaaaatctttctactgcacttgattataaatgtaaacgaaagaaagattatttcatgaagcaaatgatggcaagaaggagaaactcagtgccaattyggcaaagaacattcaagtcaaaatttgtgagcaactggacacactggggaactgccacaccaaacaactctaatctatcgagcagcttagaaatactcaatgcatcagtaaaatttagaaatccaagggtcttgcttttctcaaagtctcattttaaataactaaccatagatctttactaataccatcacaggagggaaaaaactgaagggggccaagagtaagggactttggggctgaatgctaaaacactaaaacaattggtaagg

SEQ ID NO: 465537 - DNA, 448 bp, Homo sapiens
taagggcactctgaattatcaatcaattgcaagccaagtgcttaggttcagtacagttccctaattatagatgcctacacagacctacctacaccttgatatttctgtgggatcagtggaggttaggaactcatggcagctctgttagataagtattattatctctattttccaaaagagaaaacctgagactcagcaagttcataattatgccccaaggtcacagagctgataagaggcagagtttaattcamacccaggtatatcaggccacgctcttggtcattctgctctactgcttagacccctttgccgagcactgtgttgacctgagggctgtctatcctcttccaggcactaattaatgcccaagggtgtgtggcagccagtacccccaattagttgcttcaaatagtcagaaatagctctttagccctgggaaaacatt

SEQ ID NO: 465538 - DNA, 470 bp, Homo sapiens
gaattctcatgtgttgtgggaggaagctggtgggaagtaattgaatcatggagcaggtctttcccatgtggttctcatgataataagtctcacaagatctgatggttttaaaaatgggactttccctgcatgagctctctctctttgccggcccccatccatgtaagatgtgacttgcccctccttgccttccaccatgactgtgaggcctccccagccatatggaactgtaagtccattaaatctcttttttttgcaaattgcccagtcttgggtatgtctttaccagcagcgtgaaaatggactwatacagcatttaccacagtgtctggctcatagtaactgtggcagagcctgctaattgtccgttcaacttccgttctcaaattcttacttcctaacagaacccctatgtcattgatgatagcagttctctcagtgaaaagatacatttctagcctcccttgcag

SEQ ID NO: 465539 - DNA, 659 bp, Homo sapiens
ctttctaataacaactttgggcttgtttgatcctctctattgcgtgtttgttttctgtttcattatgttttgccctttttaatttccttacttttattttctatattctgttctcaaatttataaagttgaacgcttagcacattaattttagccttttaaatttggtaatataatcatttaagccctcatgtttccctctaattgctactttggcttcatatcacaagcattaatatatagaggatttattattatttagtgctttacaatttctaattttcattgtaatttattttttgacccatgaattattagcattttgattttgttttcaaatrtgggtgagtttcccccagttatctatttaattttgatttctatttaattgtgttatgaatagtttttttaaaatgatgttctttgaattctttatctgtctaatctgctgtttaacattttattgtattttatttatttatttttaaaatttcagctctcgtacatctatatgattcactttttctaaatctacctggtactttgtttagagagtatcttattccttgatccacttactgttctcttttatttcttttgacatattaagcatacttactccatattcttaattgataattctaccattagaagcattag

SEQ ID NO: 465540 - DNA, 659 bp, Homo sapiens
ctttctaataacaactttgggcttgtttgatcctctctattgcgtgtttgttttctgtttcattatgttttgccctttttaatttccttacttttattttctatattctgttctcaaatttataaagttgaacgcttagcacattaattttagccttttaaatttggtaatataatcatttaagccctcatgtttccctctaattgctactttggcttcatatcacaagcattaatatatagaggatttattattatttagtgctttacaatttctaattttcattgtaatttattttttgacccatgaattattagcattttgattttgttttcaaatatgggtgagtttcccccagttatctatttaattttgatttctatttaattgtgttatgaatagtttttttaaaatgatgttctttgaattctttatctgtctaatctgctgtttaacattttattgtattttatttatttatttttaaaatttcagctctygtacatctatatgattcactttttctaaatctacctggtactttgtttagagagtatcttattccttgatccacttactgttctcttttatttcttttgacatattaagcatacttactccatattcttaattgataattctaccattagaagcattag

SEQ ID NO: 465541 - DNA, 659 bp, Homo sapiens
ctttctaataacaactttgggcttgtttgatcctctctattgcgtgtttgttttctgtttcattatgttttgccctttttaatttccttacttttattttctatattctgttctcaaatttataaagttgaacgcttagcacattaattttagccttttaaatttggtaatataatcatttaagccctcatgtttccctctaattgctactttggcttcatatcacaagcattaatatatagaggatttattattatttagtgctttacaatttctaattttcattgtaatttattttttgacccatgaattattagcattttgattttgttttcaaatatgggtgagtttcccccagttatctatttaattttgatttctatttaattgtgttatgaatagtttttttaaaatgatgttctttgaattctttatctgtctaatctgctgtttaacattttattgtattttatttatttatttttaaaatttcagctctcgtacwtctatatgattcactttttctaaatctacctggtactttgtttagagagtatcttattccttgatccacttactgttctcttttatttcttttgacatattaagcatacttactccatattcttaattgataattctaccattagaagcattag

SEQ ID NO: 465542 - DNA, 527 bp, Homo sapiens
  misc_feature (1)...(527): n = A,T,C or G
tattacacacagnggccattttcataaacaatgcaagccagaaaaaaatgtaacaacataaagtattgaaatgggacagaaactgtcaatctggaactatatacccagaaaaaatatcctttaaaagtgaaagtatcataaaataaaatttagaaaatagaaacaaatttctaaaatgctggcagattagatattcataaaataaaatttaaaaaataaaaataaataaaagttaaggtaaaatatagattcagacaaataaaagctgagaaagtttattgccaatagamctgcacaacaagaaatgttaaaggggccgggcttggtggctcacacctgtaatcccagcactttgggaggccaaggcaggtggatcacctgaggtcaagggtttgagaccagtctggccaacatggtgaaaccccttctgtactaaaaatacaaaaaaattagctgggtatggtggcaaatgcctgtaatcccagcactttgggaggccaaggcaggtgtatcacctgaggtcaagg

SEQ ID NO: 465543 - DNA, 584 bp, Homo sapiens
cgttgagcagtgctttgtaattctccttgaagaggtccttcacatcccttgtatgttggattcctagtattatctgatttttaaaaatgaaattactaatataacttatggaacaacttatataccagttgctgtgctaagcactttccatactttgtctcatgcatccttcatgacaatcattttacatatatagatactgaggatcagagagatgcagaaacttggccaaggttataaagctaggaagtgacagagtgaaattcaaaccsagggctggctgaatccagagcccatgtctgtgccctacaacacaatgcagtggggaagacaaatgtggtcctcattctaaatgggctcctctctgtcaaccacagctctatttccttctcaccacatggggtaggccatccccatgcacaactcacacttttaagcctatgtgccttaggctactttctcagcctagaatgcttgccctcactcctctacttaacaagatcctattctactctactcagttaaggactgtgtcatatgccccttctcagagaaatttcttggttgctccccgtcccaggtgg

SEQ ID NO: 465544 - DNA, 573 bp, Homo sapiens
tgtgattatggaggctggcaagtccaaaatctgcaggatgggctggcagcctggagtcccaggtaaaagctgagattacagtttaagtctaaagacsatgaggctgaagacccacgggagagccgatattgcagttcaagtgtgaaggctgtttgctgcagaatttactcttgcttgggggaagtcagtctttttgttctattcaggccattatggagggcagtctgttgtactcaggtccattgatttaaatgttaatcccaaacacaccttcacagaaacattcagaataaaatttgaccacatatctagatactgtaacccaaccaagtcgggttacctaaatctctatccttgtttatttgggaaaaaaatctccccctggttggaaagacaagacaaggcataaaattggccatcacagggctaaatgtgggttatcaagtaatgactgtataatcctaacctgaaaacatttctcactccctgattcccaccctttctctcaccaatttgcagcagaataaacatatgctcctcaacttacaatggagttcagtccggttaaaccta

SEQ ID NO: 465545 - DNA, 573 bp, Homo sapiens
tgtgattatggaggctggcaagtccaaaatctgcaggatgggctggcagcctggagtcccaggtaaaagctgagattacagtttaagtctaaagaccatgaggctgaagacccacgggagagccgatattgcagttcaagtgtgaaggctgtttgctgcagaatttactcttgcttgggggaagtcagtctttttgttctattcaggccattatggagggcagtctgttgtactcaggtccattgatttaaatgttaatcccaaacacaccttcacagaaacattcagaataaaatttgaccacatatctagatactgtaacccaaccaagtcgggttacctaaatctctatccttgtttatttgggaaaaaaatctccccctggttggaaagacaagacaaggcataaaattggccatcacagggctaaatgtgggttatcaagtaatgactgtataatcctaacctgaaaacatttctcactccctgattcccaccctttctctcaccaatttgcarcagaataaacatatgctcctcaacttacaatggagttcagtccggttaaaccta

SEQ ID NO: 465546 - DNA, 560 bp, Homo sapiens
tacaattttattaactatagtctttacggtgtacattcactctctagagttgttcatcctacatgtctgctactttgtatcctttgaattaaaactccccacccctggtaaccactgttttattctctatctctatatatttgaccttttttwaaaaagatttcacatataagtgagatcatgcaatatttttctttctatgtctggcttctttcacttagcataatgtactccagtaccatccatattgtggcaaatggcagtctcctttttatggctaaatagtactccactgtgtatatgtaccacattttctttattcatttacctattgatggacagttaggttgattccatatcttgactattacaaatgatgctacaatgaacaagggagggcagatatctttctaatgtggtgatttcatctcccttgagtttataattcggagtaggtttgctaggtcatatggtagttctgttttaaatttttttaggactctccatactgattcttataatggttgcaccaacctatattctcaccaacagtatacaag

SEQ ID NO: 465547 - DNA, 483 bp, Homo sapiens
tgggaactgaatgctcgagtgggttattgtactgacagaagattgaatatattttctttgatagggaagtaaaaccttatttttttcagcaagtgtatgaaactccttactctttagctatcagtcccccaacatccctgtctacctgtcccctagtcctaagtgatcactaatctatttctctttctgtacatttgccaattttgtacatttcatatacatggaatcaaataagatgtagtcttttatgactggcttctttcacttagcgtaatgttttgaagatacatacatgttatagcatgtatcagtacttcatctctttttaaggctgaataatatttcattgtacgaatatattacactttatttagacattcatcagttgatgtrcatttgggatttttccaccttttggccattatgaatgacgctgcaataaacaatcatgtaaaagcttttgtgtagatatatgtttttact

SEQ ID NO: 465548 - DNA, 579 bp, Homo sapiens
gatgatctcatgagtattgttgtaaaaattaggacaataggacaaagtatttgaaatcaggactatctggaaaatataacgtgtatagttgccacataaatattctaggacaaagrtgacaaatacgttggcctatgaatatgttcaatattaatgattaggacagtagttgctaaattgggtcctgagctgttctagtcctgctaatagatgttccataaacaaaagaaattcatgttcacaaaagttttggaaatgtaagattgaaaaacaacacaacagatttctttacttcaggactccaagagacgttaatgttttaatatgcaacgtgactcttctggaagggaaatagtatgcagtgtttatacacttatttgaatgcttcacggaaccctcttgtacataacaacttgtgactgctggaccaggctgttcttttaaattaatcacattacaattatgtcttcctgaagctcaggtcaatgtatttcaaactgatcaggatgagactttgggagatcttgttcattgaatgttgaagagcgtatgtgtgtgtgtgtgtgtgtgtgtgtgtgt

SEQ ID NO: 465549 - DNA, 523 bp, Homo sapiens
cagcatttaattgctcagcatacacagagaactagcaaactccagcacctctctgcagtaggaattaaaaacaagtctcatggaagctgggtcttcttcaaggactatcaggagtgaggttagaaagaagccccaagttatctttctgtatcctgctaaggttaagtgtgggccatttcaatttacagatgaggaaattaggtctcagagaaattaagcaagctgcccaatgttatgaagcatataaatgataaagctagatggtatgcyacctttatggaagaccctacatcccaagcagaggaatttagagtttatccagtgaagtggggagataaaatgtgtattttatggaaattagtatggtagaggtatagtgatgatgagagtaatataacaacaatatcattagttgagattctaccactattattggatacctctgaaacattcttagatatccagtcttaaaaaactctcctgtgataccacacctcacttttgctactcactgaccagtatc

SEQ ID NO: 465550 - DNA, 572 bp, Homo sapiens
gatcatatttgttaaggcctctcaggaaaggtgcaaaaaatagatacactctacctatacagtgttgagcagacaagtaaggcaaggccaggtctgacaaattttgccagtaaatatgaaacaagcccttttcagatttagaaagtttactacatacatacacagtgaaaggaagagtagccaaaggaacaagctccccatggtcctggtcctacacaccaaggtagccaaaaccaaaacagagggggccattggaagtttgcatcttgagttgtgggacaccctattgctgaggagccagtgctatgcagcagttaagcagttttataacctgcagttgtaccccaagggggcaagacagaaatcttcatatcttatcaaaactcagaaggcaatgagaaactgtctcatgacagcctccttggtaagtaggaagaagagtgggagatggcctcaagcatcccatgttctcatgttttaggagaatcacaaggtgttctgccaagactcaamttagctgcagttcaagtctttcccctgtggcctactggacgaatttgcatttgccctgc

SEQ ID NO: 465551 - DNA, 578 bp, Homo sapiens
gcggttgtcagtgagacttctgctattgcctttcgagtaactaactataagaacagaaatactattgacatgtgagaaataaaatgacaggcccaccatagatttcagactgtgagtggtagtactgacataaacacttgcaagggaagtcatcaagaaaagtcaaagaagactttaaaacattttaatgcatataagaaaacaatgaaacttacyggaaataagttatctatcccatgtgtcaatgagaaatgaactacatgcattgagatgctgacagaaacctccctcttacagtaggaaaacaactgaacccttcaataagaaaaaggattgaaagggaccaggcagcacactactatctcaagttatgctaagatttgaaacactgacattctgcaagaggttatacagttttcagtggggaggggttgggataggtgatctcattgttacacatagcaacttttaatgcattttatatgcatattagcaagtattactgtgttctcacactactcacttaacttgtgctatgtgaaggctctgctaatacaggtgttttttaaaaaactcta

SEQ ID NO: 465552 - DNA, 578 bp, Homo sapiens
gcggttgtcagtgagacttctgctattgcctttcgagtaactaactataagaacagaaatactattgacatgtgagaaataaaatgacaggcccaccatagatttcagactgtgagtggtagtactgacataaacacttgcaagggaagtcatcaagaaaagtcaaagaagactttaaaacattttaatgcatataagaaaacaatgaaacttaccggaaataarttatctatcccatgtgtcaatgagaaatgaactacatgcattgagatgctgacagaaacctccctcttacagtaggaaaacaactgaacccttcaataagaaaaaggattgaaagggaccaggcagcacactactatctcaagttatgctaagatttgaaacactgacattctgcaagaggttatacagttttcagtggggaggggttgggataggtgatctcattgttacacatagcaacttttaatgcattttatatgcatattagcaagtattactgtgttctcacactactcacttaacttgtgctatgtgaaggctctgctaatacaggtgttttttaaaaaactcta

SEQ ID NO: 465553 - DNA, 585 bp, Homo sapiens
taccatctaagccacatcatttaagatttattttaaaacactttatattattcccctactactcccttatgtatatcttagcttaaattaatcataatgccacttatcaaggcatatgtggaagttaaattagataatatggtgactggcacagagtaagcacttattaaatgttaccaytttttccttctctgtcaccccttctcttccattttctgttgagtccaaaacttcagaaaataaagtaatcccctgaaaggtatctccatgtgtctgttcctctttccttgacaattaagactaaagacataactcctcttagcaagtactgaaagtaaagcagttgttagcagatgttcatctccttgttggcttatcaaagaagcacactgcaggaggcctggggaggctcccataggaacttgctgaaattttctgaacatattcaggcattagatttctgttactgaaccccaaggagcacaaatcatatcttcttcaaagacttaggaagccaatagttcattataaacatggctccagagagctgagctttcagaaaaaagagaatctatgtcttctttt

SEQ ID NO: 465554 - DNA, 621 bp, Homo sapiens
aaatgagaacatttacttatactttatacatgacttcttttttgaaaggaagatgtgtaatctggtgcataatctttgtgtataatctagtgcataacaccagaactgccttgtatttgtacagtgatttagattttaccaagctcttttacatgcactgtttgtgtgagaattaaattgtatagcatgacataaagctcttagaacaatccttgcgatgggactcaataaatcggtgctcactacctgggtgatgaaatcatttgtacatcaaaccccagtgacatacaatttccccacataataaacctgcaaatgcaccccgtgagcctaaaagttggaaaaaatgacattacttttacttattccattttgtggttgttgttattgctgttgttatgcaaataacttccttctttctcttagtaaaagaaaacaacttcaaagctgggtagtaaaggagaaccaaagtgggactacaaagtgagatatgtttaggtcaaaataactgattaattaagagttaatgttttctcttttgtttttcactattaaaatgtcattttctacagaccactgtaatagccttggrtcaccatgtatcaatatagctaaataatt

SEQ ID NO: 465555 - DNA, 575 bp, Homo sapiens
atttaaacaaaaactcataacaaagcattgcagagcctataacacagaaagacagaatatatgacaaaaatagcacaaaggatggagtgagagggggaaatggaagtatattcttgtgaggttgttataatacacaataagtggcataatattacttgaagacagactgtgataaattgaagatgtatactataaatcctaaagcaaccactaaaataatacaacaaagaattacagctagtaacaatggagacaagatggaatcaacaaaaatgctctacttaccaaaagtaggcacaaaaagaggcaacattgaacacagaatagacaaataattataaaaaaatgcaaacattccaaacactctaactaaaaggaagaagttgtcaaactgggttcaaaagtaagattcaactaggtactrtttattagaatcccatttaaaatgcaactacacagaaaggttaaagtataaagatgggaaaagatttaccattctaacacttactaaaagaaagcaggaatgtctatattaatatcaaagtcaaattttaaaggaaagaatatcacaaggt

SEQ ID NO: 465556 - DNA, 507 bp, Homo sapiens
ggttcaaatccttttaaagggcacatgaaacatttaccaaggtaaactatatactactggaccataaaagaaattctcaatataggatttacatcaaggattcaaatcaagaaacatgttctttaattacagtggaattaaatgagaaatccctaatagaaaaatataagtaaaatgtctaaatatttggaatttaggtatttgtacatatactcaaatgacccatagggcaaagaataattcataaataaaattagtattttgaactaaacagaaataaaaaatagagaatttacgttattaaaaacgtgtagcactcagtacctatattagaaataaggcctcaacttaatgaccttagcttgcatgrtaagaggtagaaagaggagaacattacactcaatgtaagtagaaagatcacagatgaatagatgaaatagaaaacagcaaaagtaatatggaaaattgattaaacacaatcctaattctttgcaaaattatacacag

SEQ ID NO: 465557 - DNA, 522 bp, Homo sapiens
tacaatgattcaggtcacttcttcaagaaaacataacaacccttaatgtgtatgtatctaacaagagagcatcaaactacatgagacagaaatttctagaactgcaagtagaaacagattgatccactattatggttggaaacttcaacgcccctttatcagaaatggacagatccagcaggcagaaaatcaatacggatatagtttttagctcaacaatcaatataatggaccataaatcattataatcaccatcaatataatggacatctataaactacttcatccaacaacagaagaatatacattcttctcaagctctagtaggaaattaaccaagatagacatcatttggagccataaaacatatctaaactaatttaaaagaatggaattcatataatgtttactctctggccacaayggaatgaaactaaaaataagtaacaaaaagttacccagaaaatccccaaatacttgcagattaaacaacacacttataaataacatataggtaaaaaa

SEQ ID NO: 465558 - DNA, 606 bp, Homo sapiens
tattaatattttatagccatatttatcaaacttttgataacagaaaattgtctgtgataatatttaggttctttagaagcaaaacatgaaaatgtatatacagtacaaatttaattatgctccacgatagaaaataaataagtttagaaataaatatgccaaaaaaattaacagtatttgcttccagttagtaaaattgtaatttttgtgtgtgkgggggggtgctttttctctgcttcaaataattatatttcccaaatttactatattgcacattgactatttttacaataaaaatgggaaaaataacttcaaaaagataaaaaaatacaaaaaagaaatagagcttaatcaatccaagcatatcattttattttctcttattggctgaacttttagcatatttaaataagaagatctgctttcatatcacacaagtgctctcagctgcattaatacatttccactaagaatatttaatatcagttttttagagagaaaatcacctttccataaaggaatctggacatttagttttcattgattcttgcaaatgcactattgagcaactacttttacgggttaatatatcagtcctgggataca

SEQ ID NO: 465559 - DNA, 520 bp, Homo sapiens
agcaactttagacaattcacttaacctcttccaacatctgtttcctcaactataaagttagaatcatattaatagaaacatgaaaatttatttctatgccaactactaygaacactagttgaaattaacgtacacaatgtatatgaatattaagttttgatagaaaattaaagttttctgagcatttctacaggccacatactgtcctaaatgctaaatgaactaaactatttgatcctctcaacaactcctatgaggtagagaccattactatccccattttacatctgagaaaaccaaggtacagagaacttacccaaagttatacagcaagtaaacaagtaaaagtcacatttgggatttgaattcaaggaacctggctctaaccactagacaatatagctgtctacctaacagagctggtaggaataataaacaaataacataaattgaaagcacattttaagtggtaaggcttaataaaattactattcttaaaataacaagaagttgaaaaggt

SEQ ID NO: 465560 - DNA, 619 bp, Homo sapiens
aaatgctaaatgaactaaactatttgatcctctcaacaactcctatgaggtagagaccattactatccccattttacatctgagaaaaccaaggtacagagaacttacccaaagttatacagcaagtaaacaagtaaaagtcacatttgggatttgaattcaaggaacctggctctaaccactagacaatatagctgtctacctaacagagctggtaggaataataaacaaataacataaattgaaagcacattttaagtggtaaggcttaataaaattactattcttaaaataacaagaagttgaaaaggtacttttttccctctaaaagttcatgatataaaaattaaatattaatattcacttcaatattcaaagaaatgcagattttcattttgttcttcatactaaaaaagtataaatgggttttgataaacartatcttaaaattactgtggcatatagtgtccaataataatccaccatatgtgtctacaaatttgtagtttcaaaatgatttgacatcttttatattattaaatcctcaccatgacccagtgataggtaaattgaaacccagaaatgtttagtgcttgcttaagttcatgttttaaagcac

SEQ ID NO: 465561 - DNA, 511 bp, Homo sapiens
ttgtgattaaatgacattagataagtgaaaatcccggcagactgccctgtrcataaaagtcctccataaatatttataaatgtaggcgtggtggctcatgcctataatctcaacactttgaaaggctgaggcagaaggattggctgagcccaggaatttgagaccagcctgagcaatatagtgagaccttgtctcttcaaaaaattagccagccactggccaaaaagttaaaaaacaaaaaattaaaaatgtatctcagttactgggaggctaagatgaaaggattacttgagcccaggaggcagaggttgcagtgagctgggatcgtgctattgcactctagcctgggttacggagtgagatcctgtctcaaaaacataaaaaataaatgtataactaagcatcacttaaatttaaactgtgattattcatgacaagtcactttctagtacttgaactgaaactttcggtattcactgttaagaaggcattactcttagcaacaactgtt

SEQ ID NO: 465562 - DNA, 556 bp, Homo sapiens
cagctcagtgttccaactgccagctgctccggccccttaaggtgataactcagggcccagagtgacctctcttgctccattggagccagccaaacccttgtggatttttttgtacttacctttgacaagaggaaatctctgcaaacctctgtgtgcagttccagaaacatgttttactttatcatcatgctcaaaractgctttgtaagctctctgcattgggggtaagctggttagcatttacctagtatttgtgtttattaagttagtctttgctctcaaagagtttatattgtgcgtgtgcgcacacacacacacacactcttttttttccacttaaaaacagaagaatgaatgagtgtgtatatgtttaggtgacactgagaggtaatgttaccaaaacaccagaggttgggtcttgatcctgctgctgatcaccacacagaaagccaatcactgagataatcagtactgccagggaagaaggctttattcaggtgctgcaggtgaggagatgggagatcagtctcaaatccatctctctgactgactaaaa

SEQ ID NO: 465563 - DNA, 573 bp, Homo sapiens
aatgtaattatatcttaattaaaacaagtattttgatataattaccaattatgatttacatagttatcaccataacttgtgctgtctgtgtaaaatattcatatgaacacattacagtgttacatcagtgtttagaaaaaaacatttaaatggaaacactttattgacaccaagtagatcagtgatgctttcctttgtagactcatctgctacaatgcaccaaataatattttaagcaatatagtatttaaagtaaaatgtagttctaccaaagcaatgcattaatgtttaatggaacatgttttacattgcttcagtttttacatttaaataaaatcaygtgaaattaattaaaagttgacattcagttcctcagttgcactcaccaacttaagtagccatgtgtgcccattggttcttgtattggacagcacaggccaggggctacttgcatttgaacctaggaaccttgtatcaataactagatggttgctcacttttcttgcccagcaactacatcttccttgccttgtcccatggcactcaggaattttaggagtttggcaaataaag

SEQ ID NO: 465564 - DNA, 536 bp, Homo sapiens
ataccatatattatttattcattcatctcttgatggatgaatcaagccacttaggtggcttccaaatcttagctattgtgagcactgcagcaacaaacatgggagtgcctttggtatattgattgcctttcttttggttatataccgagcagtggaaatgctgtatcatatggtagctctagttttagtttttttgagcaaccttcaractgttctccatagtcgttgtgccaatttacatttacgccaacagtgtgtgggcgtttccttatccttgccagcatttgttattgcctgtcttgtggatgtaagccattttaactgaggtgagaagatatctcattgtaatttggatttgcatttctctgaggatcaatgatgctagcaccttttcatatgcccatttgctactcttatttcttctttggagaaatgtttgttcaaatcttttgtccatattttaatcaaattattaccttttttcctatagagttgtttgagctccttatatattcttgttattagtcccttgtcac

SEQ ID NO: 465565 - DNA, 607 bp, Homo sapiens
ttgcccccataaatgtcctggagattttccccaatgttttctttcagtagtttcatagtgtgatgcttagatgtaagtgwctgatccatttgatttgaagtttccagctattattgtactggggcctgtctatctctttatttctaataatagttgcttcacgtatcttggtgctccagtgttgggtgtatttacatttacacttttctatactggctatttttatgtcacctcataaattgttttatcatgatttttagcttctctgcattgggtttcaacgtactcctgtagctcaatgatattaattcctatccatattctgaattctatttctttcatttcagccatttcagcctgtttcagaacccatgctggaaaggtgatgtggtcatttggagaaaaaaatgcactctggcattttgagatttcagggttcttgcactgtttatttctcatttttgtgggcttatctatcttcaattttggactttgccaacctttgaatgttttttttcttttatcatatttgatgacctcgaggttttgattgtggtataaggtaggtttagctaactggctttgtttctggaagattttcaggggc

SEQ ID NO: 465566 - DNA, 620 bp, Homo sapiens
tattaacaatgaattttttttttaccttcaggtgatgatttattgtttattaacattattttttttttctgatttaagtactccctttagcatttcttgtaggacagttctggtgttgatgaaattgaacttttgtttgtctgagaaagtctttatttctccttcaagtttgaaggatattttcactagatacactattctaggataaaaggtttttttcatcagcactttaaatatgtcattccactctctcctggtctgtaagtcttccactgaaaaatctgctgcaagatgctttggcacttcattgtatgctatttgtttacttgtttcttctattgcttttaaaatcctttctttatcctttatcattgggagactgattaataaatttcttcagttattcttctgwgggttaaaactgctttgtgttctataaccttcttgcacttggatattgatatttttctctaggttgtgaaaaatctctgttattatccctttgaataaagtttctccctcatatttaaggaaaataatttttagatttgcccttttgagatgatgttctagatcctgtagttgtgcttcatgtttttttttttcttttgtctcctccg

SEQ ID NO: 465567 - DNA, 558 bp, Homo sapiens
ggtagttctacttttagttctttaaggaatctscacactgttttccatagtggttgtactagtttacattctccccagcagtgtagaaatgttcccctttcaccacatccacaccaaaatcttttatttttttactttttgattatggccattcttgcaggagtaaggtggtatcacattgtcgttttgatttgcatttccctgatcattagtgatattgagcatttttccatatgcttattggtcatttgtgtatcttcttttgagaattgtttattcatgtccttagcccacttttagatgggattgtttgttttttcttgctaatttgtttgagttcgttgtagattctggatattagtcctttgtcagatgtataaattgtgaagattttctcccactctgtgggttgtctgtttactctgctgactgttccttttgctgtgcaaaagctctttagtttaattaagtcccagctatttatctttgtttttattgcatttgcttttgggttcttggtcattaagtcattgcctaagccaatgtctagaaaggttt

SEQ ID NO: 465568 - DNA, 558 bp, Homo sapiens
ggtagttctacttttagttctttaaggaatctgcacactgttttccatagtggttgtactagtttacattctccccagcagtgtagaaatgttcccctttcaccacatccacaccaaaatctwttatttttttactttttgattatggccattcttgcaggagtaaggtggtatcacattgtcgttttgatttgcatttccctgatcattagtgatattgagcatttttccatatgcttattggtcatttgtgtatcttcttttgagaattgtttattcatgtccttagcccacttttagatgggattgtttgttttttcttgctaatttgtttgagttcgttgtagattctggatattagtcctttgtcagatgtataaattgtgaagattttctcccactctgtgggttgtctgtttactctgctgactgttccttttgctgtgcaaaagctctttagtttaattaagtcccagctatttatctttgtttttattgcatttgcttttgggttcttggtcattaagtcattgcctaagccaatgtctagaaaggttt

SEQ ID NO: 465569 - DNA, 495 bp, Homo sapiens
aaactgtaagcacaatttttagggcttagattcttgtcattttttgtttgctatctagttgaatgaccttaagcaggagagtcatataacttcttggagcctcagtttcttcttctttcagataatagcacaatcatgaatgccttttgaaatagcaatgcattatgttaaataaagggcaatattgttaacattgctttgaaaaccctctacatttgtcctttttttaaaaaaaaagttcagtaatttctgcctttttttccttatattactttttcccctattatgaaagagctgctaatataatgtcttgaattttcttaattattctttccaaagaagttatgattacataaattttgcattttggagagagctcattattatgcttagacttgaaacatggataktcattaaacattaaagaactactcctgtcttatcatttagatcttttgaaataaagcagtggaacagactatattctggccctta

SEQ ID NO: 465570 - DNA, 590 bp, Homo sapiens
gccattaaatatttgcttgagtatcaagaaatatggtatttcatttcttccctgtagctcacatttctataggaaaacaaacatgactgaggattccagaactggaccttcaaaaaaatgtgtgctgcacaccacattttattgatcycttatttaaaactcccccaccagccaatgccttcatctgcaaaccaactacagtaacaggcttggattcagcaaaataggaaatttacaaatgtacactgactttgaaaacatatacatggcaaattgagaattcagcccaccagaagtaaactataaatgcaaacattcccaacagcaactttcaaataaataggctgcaaattggaaacatgaacacagcaaacttatggacctcagattgcaaatcacagcagcaattccctgaaaataaggcagtcctcttttcttttgtatagcatgttacgtatcttttattttcagaatcctggagaactgaataatgtttatagaaccttgggggagacagttttcatagatctggaatttaaaaaaaaaaaaagctatatttgtgacgtttttgtgaataggtttacatttag

SEQ ID NO: 465571 - DNA, 590 bp, Homo sapiens
gccattaaatatttgcttgagtatcaagaaatatggtatttcatttcttccctgtagctcacatttctataggaaaacaaacatgactgaggattccagaactggaccttcaaaaaaatgtgtgctgcacaccacattttattgatcccttatttaaaactcccccaccagccaatgccttcatctgcaaaccaactacagtaacaggcttggattcagcaaaataggaaatttacaaatgtacactgactttgaraacatatacatggcaaattgagaattcagcccaccagaagtaaactataaatgcaaacattcccaacagcaactttcaaataaataggctgcaaattggaaacatgaacacagcaaacttatggacctcagattgcaaatcacagcagcaattccctgaaaataaggcagtcctcttttcttttgtatagcatgttacgtatcttttattttcagaatcctggagaactgaataatgtttatagaaccttgggggagacagttttcatagatctggaatttaaaaaaaaaaaaagctatatttgtgacgtttttgtgaataggtttacatttag

SEQ ID NO: 465572 - DNA, 590 bp, Homo sapiens
gccattaaatatttgcttgagtatcaagaaatatggtatttcatttcttccctgtagctcacatttctataggaaaacaaacatgactgaggattccagaactggaccttcaaaaaaatgtgtgctgcacaccacattttattgatcccttatttaaaactcccccaccagccaatgccttcatctgcaaaccaactacagtaacaggcttggattcagcaaaataggaaatttacaaatgtacactgactttgaaaacatatacatggcaaattgagaattcagcccaccagaagtaaactataaatgcaaacattcccaacagcaactttcaaataaataggctgcaaattggaaacatgaacacagcaaacttatggacctcagattgcaaatcacagcagcaattccctgaaaataaggcagtcctcttttcttttgtatagcatgttacrtatcttttattttcagaatcctggagaactgaataatgtttatagaaccttgggggagacagttttcatagatctggaatttaaaaaaaaaaaaagctatatttgtgacgtttttgtgaataggtttacatttag

SEQ ID NO: 465573 - DNA, 584 bp, Homo sapiens
ttagttgcttatctttattgattttcaggagagagagagagagagatgttggattgtaattattatttatcatataatttataaatagattatttttgtccagtcttatcccttcctttttgatatcttttgagaagtaaagtttaaattttaattgaattaaattttttatagcttgtagcttttttgcttctgtttaaaatttctcctatattttcttctaaaatttaaatagttttgcctctatatttaagttcttaatgtatctggaattaattttgtgtatgatgtgaagtaaaaatctattttttattatttttgcaatattaattaacacttgtctcagaaaacttattacatgtctagccatttccaagtttttgtccatggctcatattatagtaagtaatgcatttctcattgtaatccagcactgatcctcatttatacatatacaggctcaaatttattcttaaattaaatatcgcttatacttatgtgtgataaactacattgttttatattctakttttaattctttttttggtgagataattgtagattcaaatacagtttaaaaaaaa

SEQ ID NO: 465574 - DNA, 495 bp, Homo sapiens
tttgatttttagatctcacaaataagtgggcacatgttatgtttttctttctgtgcctggcttatttcacttaacataataaccctcagttccattmatgctgttacaaatgactgaatctcattctttttgatggctaaatagtactccactgtgtaaaagtaccacattttctttttccattcatctgttgatggacaaacagtttccaaatcttagctatggtgaacactgctgcaacaaacatgggagtgcagatatctcttcgatatactaatttcttctttggtgggtatatacccagaagtggaattgctggattgtgtcatagctctatttttagtttcttgagaaacctctaaagttcttcatagtagtcgtgctaatttacattcctaccaacagtctacaagggttaccttttctccacatcattaccagcattttttattgcctctcatttggatataagccatgttaactgaggtgagatga

SEQ ID NO: 465575 - DNA, 577 bp, Homo sapiens
tacttgaacatttttgagggtgtcaccttggtgttttatttatatgtgtttgcataaatcattttgtatagttttttttaagttgttgctctaggtgttaaaatatatacacatattttattgcagcatcctatattgacattttatcactcagtgacatactgaaacactacttccatttaggtccctttacctgtgtgtatgggaggaaaaaataaactgactgctttctcctactctactctcatactcaacacactacacacttctgtgatcagatacgagaatgtttttccttataccaagcaattctccagcagacaccgagtgtgctaaaatttaactcaattctgacactatttacctagagatagcatcagatcccgcaggttaagggctcagtcacacaacactgaccccaacttcagcaccaatctcatgccccacattgtcacctatacttctagctatgaattgggatttccaaaaccctctctctrggtttgataatttggcagcatggctcacagatctcaaggaaacacttacatctactggtttattataaagtatatga

SEQ ID NO: 465576 - DNA, 464 bp, Homo sapiens
gctcatggggatgaagtctctagtcatacatacttttgctcataaatagcaacttctaatttactgtactcaattatcctgctattacctctaggaattaaaagtctcacagtttctcatcttcaaaatgcaaacagatgtcattaatttacttgagcattttattctggtctagaaagtgttctcaagtattgtgggggcgcagggayaacctgaaaaaggttcttccaccaaacagtgactggagacatccattcccaggcttcgataaccacctccaactgccagctcctcacattagttccatggcacaaatgaaaagaatacttaaaagcatcctgaagttattttaggagtttctaatggaacatcttactaatcctacatcaacaaagtttgggaagctatgttggatgcaacagaatgacagttatttagcctctgctttggaaagctgaccattc

SEQ ID NO: 465577 - DNA, 464 bp, Homo sapiens
gctcatggggatgaagtctctagtcatacatacttttgctcataaatagcaacttctaatttactgtactcaattatcctgctattacctctaggaattaaaagtctcacagtttctcatcttcaaaatgcaaacagatgtcattaatttacttgagcattttattctggtctagaaagtgttctcaagtattgtgggggcgcagggacaacctgaaaaaggttcttccaccaaacagtgactggagacatccattcccaggcttcgataaccacctccaactgccagctcctcacattagttccatggcacaaatgaaaagaatacttaaaagyatcctgaagttattttaggagtttctaatggaacatcttactaatcctacatcaacaaagtttgggaagctatgttggatgcaacagaatgacagttatttagcctctgctttggaaagctgaccattc

SEQ ID NO: 465578 - DNA, 551 bp, Homo sapiens
ggcaatgcgaatatccggggtaggcagattccaggcagaggaaatggcaaaggccatgagatgggaacagctttgcaaggatgagaggccactgtggctagagccatgggagcaagggggagtgcaggaaggaggacatgcacttctggtatatggaaacaactttcacacagacctggtcagggacattaaaaagccaaatattaaaatattccatgatattgtgtaaaaatgaattggaatcattttttacagtatttgacatcagacatggaaaatcactactgatttgcctttgtttggttaatcaggcaggctaacagttttgtgcaattatctactctgttcaacactgaagattytgaaaaataaaaaattggtatctcgtaaacatttacactagagactctctgaataagatataaatctgtacacatgtctcagctcaaccaaaggaagcagctcatgttgttgaaaaaaatcaaaagcttaaaaaaaaaaaacaaccagttgtcaaggcaacgagaaaaaaaaatagacagaaaatagtt

SEQ ID NO: 465579 - DNA, 585 bp, Homo sapiens
atgtctattttcagttcaacatgcttactgttcctgagtaactggcaatgggaaatatcagctgatttcaaaatctgttctcaccatcctgaggttatgccacttrcttgctcacaacgagaacatattacttgtgtggaccaaggattcttagcccgatgtccctgtatagaaattcagggtgcctgtgaacttggatgtaaaaaatatacatatatatttatttattttcactaaccacaacctgaaattaagcatttcctcccatgatgaatgtaggcagcaaaccacagtattaatagcagtacctgtaactttgtcaccaatagatctcagctgttacaggaaaaacttgggactgtagtacccacccccaaactgggaaggtgctgaaagaccaaagaataacttggacaagtccagcttgatgagtagttgagtttattagggcttataacagggcactcctggatggcagcaggatagctctagagatccgtgcgtgtgcacgatgggactgttttccttggtaggttctcagattctctccgggatgtctgggttctcaaggacacctactcctca

SEQ ID NO: 465580 - DNA, 585 bp, Homo sapiens
atgtctattttcagttcaacatgcttactgttcctgagtaactggcaatgggaaatatcagctgatttcaaaatctgttctcaccatcctgaggttatgccacttgcttgctcacaacgagaacatattacttgtgtggaccaaggattcttagcccsatgtccctgtatagaaattcagggtgcctgtgaacttggatgtaaaaaatatacatatatatttatttattttcactaaccacaacctgaaattaagcatttcctcccatgatgaatgtaggcagcaaaccacagtattaatagcagtacctgtaactttgtcaccaatagatctcagctgttacaggaaaaacttgggactgtagtacccacccccaaactgggaaggtgctgaaagaccaaagaataacttggacaagtccagcttgatgagtagttgagtttattagggcttataacagggcactcctggatggcagcaggatagctctagagatccgtgcgtgtgcacgatgggactgttttccttggtaggttctcagattctctccgggatgtctgggttctcaaggacacctactcctca

SEQ ID NO: 465581 - DNA, 595 bp, Homo sapiens
tattttgaatgctgcctgcagtccatttcagtttttgatttccttttaaaatttgctttactaccaactataaagcctcctctctaatcataaggctgttgtagcttttggatgtcaccatttctttgccagcaaatgtagctaattgcttttcctttcctgatgtgtccatgtgtggaaagaatgatggtactagtcagttcgtgctcagtgatgcatcctcccagttacgttcaaaccccaccttattctctctgttggtatattccaaccttgtagagctgtcaaagggggatagcaacgtcttcagggagagtctagggatgtttttgtgtcagggattgcaaagtgctacttgcatttagtgagtggggtcaaggatgtaaacattctacagtgcacaggacaaacaaagaatggtccatctcccaaataccaataatgtccccctgcccctcacccctcccctgggtcaaaggatggatcttgaaaggagtgggaactcaaygttgactcccgctgcactgtaatatgttgatttgccttgagctccctaagagacttttgctgttggtccccattccctgcacagcac

SEQ ID NO: 465582 - DNA, 466 bp, Homo sapiens
tataatatgtggctgtttgtgtctggcttctttcacttaaaatagtattttcaatrttcatgccagttgcagcatgtatcagtacttcatttcttttcatagctgagtactgtttcattatgtggatataccacattttgtttacccattcatctgttgatggacatttgggttgtttctactttggggctattttgaatgatgctgttataaatgtttgtgtacaacttttggggcaacatatgttttcatttctcttgagtgtatacttgggagtggaattgccaggtcatatgctaacttgtatgtttaactttttaaggaactgccaaagtgtttattacagtggctgcaccattttatagtcccatcaacagcatatgaggggtccaatttcattatatcctcactaattattcttgtctgtccttttgattatagccattctaatggatatgaaattata

SEQ ID NO: 465583 - DNA, 590 bp, Homo sapiens
atggatatccagatgagtcagcattattgttgaaaagaatattctttcccccttgaattgtcttgtcacccttggaccaattttacataaatgaatgtgtttatttttgtcttccaattctattctgttgacctatatgtctattcttatgccagtaccacacaatcttatttacagtagctttgtagtaagtgtgagtcattcaactttgttcttttttttttttttccaagactattttggctattctggaccccttgaatctccatacaaattttaggatcagtttgcctattactgaaaaaaaaaamgggattttaatagtgattgcattgtaactgtagatcagtttggggaacactgcaatctaagcaatattaagtcatatgatccattaacacaggatgcctttccatttattcaggtatcatctaatttaacaaggttttgtagtttccagtgtagaagtcttgcatttcttttgttaaatttatttttaagtgttttttttttgatgttattgtaaatgaagttgttttcttaatttcctttcattgctagtatatagaaatgcaattgacttttgtgta

SEQ ID NO: 465584 - DNA, 590 bp, Homo sapiens
atggatatccagatgagtcagcattattgttgaaaagaatattctttcccccttgaattgtcttgtcacccttggaccaattttacataaatgaatgtgtttatttttgtcttccaattctattctgttgacctatatgtctattcttatgccagtaccacacaatcttatttacagtagctttgtagtaagtgtgagtcattcaactttgttcttttttttttttttccaagactattttggctattctggaccccttgaatctccatacaaattttaggatcagtttgcctattactgaaaaaaaaaacgggattttaatagtgattgcattgtaactgtagatcagtttggggaacactgcaatctaagcaatattaagtcatatgatccattaacacaggatgcctttccatttattcaggtatcatctaatttaacaaggttttgtagtttccagtgtaraagtcttgcatttcttttgttaaatttatttttaagtgttttttttttgatgttattgtaaatgaagttgttttcttaatttcctttcattgctagtatatagaaatgcaattgacttttgtgta

SEQ ID NO: 465585 - DNA, 523 bp, Homo sapiens
ttatctcatggccaaaggcagtacttgcttcactccactgagctgcagttcttagattatgagttaagatttcttttgggatagcatggcctagcacttgggaattaggtggaggytgagatgtttctgactagtcagttggagagcatctatttcacgcatccaaaatgtgcacctgcagtaggctcttccctcttcttcttgggctgtagacttcctccactggtcacttcaaatgcagttccataactatggccaatgacgttatccaggtagaaccactgtttttcgaaagttacttttctagggaaaaaaagtaatcaattaactgaatatcttttctatccagtacagaaaagacatgttcactacagtttatttcaaaagtggtctccacaatggatgatcagcagcattatctctgaacataaagcaacaaaggaactagagagaacctggttgggatagagacgtaaaattaatgaataagccacaagaacactgaattttggaaaggggaagc

SEQ ID NO: 465586 - DNA, 523 bp, Homo sapiens
ttatctcatggccaaaggcagtacttgcttcactccactgagctgcagttcttagattatgagttaagatttcttttgggatagcatggcctagcacttgggaattaggtggaggctgagatgtttctgactagtcagttggagagcatctatttcacgcatccaaaatgtgcacctgcagtaggctcttccctcttcttcttgggctgtagacttcctccactggtcacttcaaatgcagttccataactatggccaatgacgttatccaggtagaaccactgtttttcgaaagttacttttctagggaaaaaaagtaatcaattaactgaatatcttttstatccagtacagaaaagacatgttcactacagtttatttcaaaagtggtctccacaatggatgatcagcagcattatctctgaacataaagcaacaaaggaactagagagaacctggttgggatagagacgtaaaattaatgaataagccacaagaacactgaattttggaaaggggaagc

SEQ ID NO: 465587 - DNA, 523 bp, Homo sapiens
ttatctcatggccaaaggcagtacttgcttcactccactgagctgcagttcttagattatgagttaagatttcttttgggatagcatggcctagcacttgggaattaggtggaggctgagatgtttctgactagtcagttggagagcatctatttcacgcatccaaaatgtgcacctgcagtaggctcttccctcttcttcttgggctgtagacttcctccactggtcacttcaaatgcagttccataactatggccaatgacgttatccaggtagaaccactgtttttcgaaagttacttttctagggaaaaaaagtaatcaattaactgaatatcttttctatccagtacagaaaagacatgttcactacagtttatttcaaaagtggtctccacaatggakgatcagcagcattatctctgaacataaagcaacaaaggaactagagagaacctggttgggatagagacgtaaaattaatgaataagccacaagaacactgaattttggaaaggggaagc

SEQ ID NO: 465588 - DNA, 589 bp, Homo sapiens
taaactttgctttcaagaagttatacaatctcatagggaagataaaacaaggaatcatggtgttatcggttatgaacttagagcaaaaaagagcaaccttagatttaggttctgtggcatgaagcaaaccactgagtgtccctgtatatcaaatgtaaataacartttgtactgtgcttgcctgagttttttttcagggtcaggtaatacaacatatatgaaaacatttttaactttttaaattttttaaatttattttttatttatttttttgagatggagtttcactttgttgccaggctggagtgcagtgtcatgatctccgctcactgcaacctctgcctcccgggttcaagtgattctcttgcctcagcctcccgagtggctgggtgcaccaccatgcccagctaagttttggagttttagtagagacggggtttcacgatgttggccaggatggtcttgatctcttgatcttgtgatccgcctgccttggcttcctaaagtgctaggattacaggcatgagccaccttgcccggccaaaaacattttttaggctagcaaacagatacatgcttcaaggtaatg

SEQ ID NO: 465589 - DNA, 635 bp, Homo sapiens
tcttaacatctgtaaattactttaaatatatttcaacagaaacaagataaagcagatatgacaaaatgttaacaagttatcacatccagatgatgagtatatgaaggttcactattctttccacttttctatgtatgaaattttcaaactatttatttagagacaaggtctcactctgttacccagactggagtgcagtggcgtgatcatagctcactacagccttgatctcaggtccaagcaatcctcctgcctcagcctcccaagtagctgggaccacaagtgcatgctaccaygccctgctaattttttttttttttttttttttttttttttttagagagagagagagagatagggtctgctttgttgccttggctggtcttgaactcctggtctcaaaagtaatcttcctgctttggtctcccacagtgctgggattataggcatatgcaatttgtctcaaaatacttgtttattccttttcccctctcaattctcattctgtcaggtcacttcacagtacatggctctctctcactttgctttctttctctagtggaaaatcaccctccctgtgtatctgagaactcagtcctcatgagcaaggtcacagtcagagaaagaacatatta

SEQ ID NO: 465590 - DNA, 567 bp, Homo sapiens
gccttttcctccagcactggctcatatacccagctcaacacctctgctgggtatctattcacgtctcaaacttaacaagttcaaatctgagctccccatctctmcccttccaaaccagtccctcctgcagtctccccatctgttttcccagatgctcaggcctaaagccttggtattctcctctcattccctcatgccacaccaaaaccagcagccctacgtgtcagctctgtctccagaatagatctagaattctaccacttctccccattcccagtgccaccaccttggaccctgccatcacaatgacccaccagggtcattacagtgccctccttattggtttctgtgtttctgccttcacttcccctacagccatcactcaacccagcagccagtgttgttataaacataaagcaaatcctatcagtcatccgttgagaactctccaattgtaaaacaaaagtccttaccaggacctacagagagccctgcgtgacctggcccctgctgcctctctaagctcacctcctacgacagtctcccactctggcctcttgttcttct

SEQ ID NO: 465591 - DNA, 567 bp, Homo sapiens
gccttttcctccagcactggctcatatacccagctcaacacctctgctgggtatctattcacgtctcaaacttaacaagttcaaatctgagctccccatctctacccttccaaaccagtccctcctgcagtctccccatctgttttcccagatgctcaggcctaaagccttggtattctcctctcattccctcatgccacaccaaaaccagcagccctacgtgtcagctctgtctccagaatagatctagaattctaccacttctccccattcccagtrccaccaccttggaccctgccatcacaatgacccaccagggtcattacagtgccctccttattggtttctgtgtttctgccttcacttcccctacagccatcactcaacccagcagccagtgttgttataaacataaagcaaatcctatcagtcatccgttgagaactctccaattgtaaaacaaaagtccttaccaggacctacagagagccctgcgtgacctggcccctgctgcctctctaagctcacctcctacgacagtctcccactctggcctcttgttcttct

SEQ ID NO: 465592 - DNA, 517 bp, Homo sapiens
cacaatgtgccacccaaaaatatacctctttggcatatttcgagctgattattcagagaaactacagacacaggaatggctctaaaaagctgtcctttttacaaggaaatgtacatctagaaaggaaatctacattagtaaagtatctgtatcaggaagaaggctgctcagaggtagggatctcagaaggaaagctggtcagcagccaggatgccttccccgctcaggaaaggacatggtctctagtgaacctgacagacaaccagatggccgctggcctccatatgcacaaacaatgaaagtacactggagcccattatgaagaagaaagatggtaacaaagattcaaatggcatgaaaaagaatcttcagtttgttggcattaatggaggttatgcaacaacttcaagtgatgatttycacacagatgaaagctcttcttctgagtcagatgacgagtgtgatgtcattgagtgtcattgagtagtatcctcttgaagaagacgaggatgaagac

SEQ ID NO: 465593 - DNA, 460 bp, Homo sapiens
atgttgtctgcttgcaacttactgaaaaataatataaatgaccccaaagctgtgaccagcaaagatatgaggttctgtctgaacaccctccagcacaaggggttctgcgtgtccagtcagaagttagccattgcagccaccctgggagactacagagctgcttttgaggctacctccctggatgccctctactaggtcatcaacttggcagatggcaacagcaacacagccctccattacagcrtgtcccactccaattttgagattgtgaagctgctgttggacacccacatgtgtaacgtggatcaccagaacaaggggctataccttcatcatgctggcggccctcgcagctgcggaagcagaggacatgcaggttggggaagaactctggctgaaaggtgagcctcaaagccagtcagctggggcagatggccctcatgctgcagtcagttactgt

SEQ ID NO: 465594 - DNA, 437 bp, Homo sapiens
cctcctcatcccaactctcctcactctgaggtcttggagccctgtattcytcacttcctctgcccctatagcgctcccactccaggtcctcaggggcctggacgcctggataaccctttatttcttctccatattcaggttcttcctctgaagccctgtagtgggttgaatggtggtccctcttttcccctaaactggccatgctgacgtttgactcctcagattcctcctgggggtgtcccttttcctcagagggaagactccctccttgagaggacctgtcgggcctgctcctcccgtggtggtgtctgggcctcgtgcgtcgtttgtccacctcagaggtggcatcttcctcaccttcctcagattcttcctggcttcggggttggcctttagactcctgggggtgattctcctggctccctgtctcctctcca

SEQ ID NO: 465595 - DNA, 437 bp, Homo sapiens
cctcctcatcccaactctcctcactctgaggtcttggagccctgtattcttcacttcctctgcccctatagcgctcccactccaggtcctcagggscctggacgcctggataaccctttatttcttctccatattcaggttcttcctctgaagccctgtagtgggttgaatggtggtccctcttttcccctaaactggccatgctgacgtttgactcctcagattcctcctgggggtgtcccttttcctcagagggaagactccctccttgagaggacctgtcgggcctgctcctcccgtggtggtgtctgggcctcgtgcgtcgtttgtccacctcagaggtggcatcttcctcaccttcctcagattcttcctggcttcggggttggcctttagactcctgggggtgattctcctggctccctgtctcctctcca

SEQ ID NO: 465596 - DNA, 478 bp, Homo sapiens
tttatttcttcttttccaatctggatgcyctttctatcttttcttgcctaattgacctggctagaacctgcaatccaacactgaatagaaatgaggagagcaggccaggcacggtggctcatgcctgtaatcccagcactttgggaggcagaggcgggtggatcacgaggtcaggagtttgagaccagccttgccaacatggtgaaaccccgcctctactaaaaatacaaaaattagccaggcgtgatagtgggtgcctgtaatcccagctactcgggaggctgaggcaggagaaccacttgaaaccagaaggcggaggttgcagtgagctgagatcccaccactgtactccagcccgggcaacaagaaactgtctccaaaaaaaaaaaaaaaaaagaaagaaagaaagaaatgaggagagcagacatcttcatcgtgttcccaatcttagggggaaagctttcagtatttctgtatt

SEQ ID NO: 465597 - DNA, 547 bp, Homo sapiens
aatccattggctatttaggagtgtattgtttaatttccatatattcataaatttctcaaatttcctttattaatttctaatttcattccaatgtgatcagagaacatactttgtatgatttccacccttttatatttatcaaagtttattttatggcttaatacatggtctatcattttatggyttaatacatggtttatcctggagaatattctatgtctctgttgagaagaatgtgtattctgcttttgttgggtgggctgtactatatagttctattcattctattgttttatagtgttgttccaatcttccattttctttttgatcttctgcctagttgttttatctattatttgaaagtacagtattgaggtctctaactattattgttgaattgtgtacaggtcccttcaattctgtcagtttttccttcaggtagttttgggttctagtgttaggtgcctatatatttcttaattaccgtatcttcttgatggattgaccctttgtcgttaaaaaatgtccttctttgtctctaggaaca

SEQ ID NO: 465598 - DNA, 328 bp, Homo sapiens
aaatccacccccatgacccaaacactttccattaggccccaccttcaatattggagatcgaatttcaacctgagactttgcaaggctaaacaaaccatatataaaccatagcattgagtaatactatgagccatgtatcggatgctgaagattacaatgtgcctttcgctgtcttttaaaactcagtrctgcttacattagctccttttgtagttgcaatttttgtattgccaagagttaggagggattgaataagaagcatatgaagaaataagcagaaaaagaaaatctctagcatagtacacctctaatctatacatgaaacata

SEQ ID NO: 465599 - DNA, 604 bp, Homo sapiens
gacacataaaattgaccacctcaagtgggaatgggcattgcacatggtgctgtttgcaataccagcacactgaagcgaatgatgaagacgggaggccttaatctatctctccttcttaaagcactgatgattttatttacaactaaaataggttggcagggtgcagtggcttacgcctagaatcttagcattttgggaggccgaggcgggtagatcccctgaggtcaggagtttgcaaccagcatgaccaacatggtgaagccccgtctctactaaaaatacaaaaattaactgggcgtggtggtgggcacctgtaatcccagatgcttgggaggctgaggcaggagaatcacttgaacctgggaggcggagaytgcataatatttaactccagcctgggcaacaagagtgaatgaaactccatctcaaaaaattaaaaaaaagaaataataaaattaaaatagatgaaaatattgttggccttaagtaaagcctaatatagaagatattttaggaaaactgttgtaatcttattgcttatgtttgtaacatttctgctagatttgcatttataagaacagccaggaaacaaagatttatggta

SEQ ID NO: 465600 - DNA, 603 bp, Homo sapiens
atgggctaatttgtaaagtttctatttattgtttgctgaaaatttacatttacattgctgaagatggcctgcaggtgagagagcacctgcaggcaatttccaatggttgtttakatcctggagtttgcgtccttcatggcgtgtgctgatgataccctgtgagttgttttgggcggccgcaaagattcaggtctcctgaaacgttctgggctgcagccatttccttactgcaaatgaataatgaatgagctgtgggttaaactaatagttcaagataaaatcagaagctcattgcaacatgggcaactttccttcgtcatctccatggaaactgctatttgtcaagacacactagtatttcagaagacagtgaggagtcaccagttttttaacttcaggtcagctgttgaaaaatagatttaagaagcacagattgagacagaatgaatacagagaaagccatctgcatgcagtgggggagctctgttagaccattctttgggacttttagaaaaatagatcataaatggtataataaatattaagctgtaagatttgaatggaaaattgagttaacactttttccctcccccaacactatga

SEQ ID NO: 465601 - DNA, 603 bp, Homo sapiens
gtggtttcttaaccattctttagctgctttctaatgatcttttctttgtgggaggacatttcaaggtttccctgagcaagaattttctctttctgtcctttgcacagcaactggtaaactgagatccttaaaaaagtaaatatttttaaatgtggaaacatcgcttacaaccaagtgaataacatctggctaacaaagagcatggcactatcagatggaattagggcacatgcacgcagtacaaaagctccagatgctcgtgttaattcagttaaattcgagtcaaagaatcagtggagccggtcctttggactgactggtcctataaatacaaatggccaacgcatgcccagcctggctcattgatcaaacagagtagagatttattgacatatacaggaatattctttttctactgaaagatggctatgtgtgttgtacttatttctaaaattattggcatcatgaatgacacattcatgaggtacctgcccwgtgttcagaagactgttaggtagagaaggagtaaagaactgcactggtgatctcagaacagtgtcttctagggcatgatgtaaaggaacttgcagatttcatgttaga

SEQ ID NO: 465602 - DNA, 583 bp, Homo sapiens
acccgtggaagtcatagcttccaagaatgtttctttttgatgctcagatttttgtatgtgtaggaaaacttggatgcaagcaaaataaaaagtatgttctagcaaatsgtttacaaagatttgaatttatgagatgaaaacaaatatttccggccacatgcctcagtgtaattaggtttgctgatttaatgtcttcctgaaggcagaattttaggtagcaaagtgagcctgccaagtaggaaaggaagacggaagtttaaaaactctagcactgcctatgaaatcttaaatcctgcattcatgcaatttgcatgttcatttcctcttttacaaaatgctcctggaattcttatggtttcattgttagtgaaaattgtttctttttttccccttcacaatcctatattacaaattctccaaacctggcacttcacggcatattccttttgaatgtctttaattctgcaattttatacacccccttatcttacaaatttaattagtttccagaagttctgcagagaaaatgggccataataattcttgattattgccacttatcttcttataatttgatacaaga

SEQ ID NO: 465603 - DNA, 583 bp, Homo sapiens
acccgtggaagtcatagcttccaagaatgtttctttttgatgctcagatttttgtatgtgtaggaaaacttggatgcaagcaaaataaaaagtatgttctagcaaatggtttacaaagatttgaatttatgagatgaaaacaaatatttccggccacatgcctcagtgtaattaggtttgctgatttaatgtcttcctgaaggcagaattttaggtagcaaagtgagcctgccaagtaggaaaggaagacggaagtttaaaaactctagcactgcctatgaaatcttaaatcctgcattcatgcaatttgcatgttcatttcctcttttacaaaatgctcctggaattcttatggtttcattgttagtgaaaattgtttctttttttccccttcacaatcctatattacaaattctccaaayctggcacttcacggcatattccttttgaatgtctttaattctgcaattttatacacccccttatcttacaaatttaattagtttccagaagttctgcagagaaaatgggccataataattcttgattattgccacttatcttcttataatttgatacaaga

SEQ ID NO: 465604 - DNA, 583 bp, Homo sapiens
acccgtggaagtcatagcttccaagaatgtttctttttgatgctcagatttttgtatgtgtaggaaaacttggatgcaagcaaaataaaaagtatgttctagcaaatggtttacaaagatttgaatttatgagatgaaaacaaatatttccggccacatgcctcagtgtaattaggtttgctgatttaatgtcttcctgaaggcagaattttaggtagcaaagtgagcctgccaagtaggaaaggaagacggaagtttaaaaactctagcactgcctatgaaatcttaaatcctgcattcatgcaatttgcatgttcatttcctcttttacaaaatgctcctggaattcttatggtttcattgttagtgaaaattgtttctttttttccccttcacaatcctatattacaaattctccaaacctggyacttcacggcatattccttttgaatgtctttaattctgcaattttatacacccccttatcttacaaatttaattagtttccagaagttctgcagagaaaatgggccataataattcttgattattgccacttatcttcttataatttgatacaaga

SEQ ID NO: 465605 - DNA, 559 bp, Homo sapiens
tcatgcaatttgcatgttcatttcctcttttacaaaatgctcctggaattcttatggtttcattgttagtgaaaattgtttctttttttccccttcacaatcctatattacaaattctccaaacctggcacttcacggcatattccttttgaatgtctttaattctgcaattttatacacccccttatcttacaaatttaattagtttccagaagttctgcagagaaaatgggccataataattcttgattattgccacttatcttcttataatttgatacaagaggattttattgcatttttaaagtagttttaatctgaaaaagatagtcctctccaagtytaacttcatgcagtagtaataatttaactactatttcctggttctagaagtatttttctatctaaaaagaaattgcttttctcaaattattgtactaccattgtattagtctgttttcacactgctgtaaagacatactcaaaattgggtaatttataaagaggtttagttgactcagagttctgcattgctggggaggcctcaggaaacttacaa

SEQ ID NO: 465606 - DNA, 549 bp, Homo sapiens
ggatgatagaagcctttgcatttctaatcttatgctgaagggcaattgatagaagcaactcatcaaagctttctttcaatcaaaacatcttgttttgattaagcacttcaggtttggtgcttcatttagggtgtgaagttttacagaaattgtttataattgtcactgagaaggctgctgaagagccaktttctttccctgccccattcttcccactgaaatgaaacctggtgtatgaaaattttaattttaattatttatatttaattattttaattattatttaattgtttgaatgataaaagaattttcttgctttgcaaaaagattcctagcagtgtcttgaaaagcaggactttgagacctccttatttcatcttttctgaaatgtttggccagcatcttttggacatatgcctttaggatccacagttgtcactgtttcgggggctgaaattgctagaagtgttaggaggccctgcctgtgtctttccataagcagcagccttcacctgtcattgtcacagcaccccccaccgccttaagaac

SEQ ID NO: 465607 - DNA, 570 bp, Homo sapiens
agcaagccatatcttttaccaatagcgttctttttgtcttcatttatatgtgccattttttcaaaattattattactctaaatatgcatttaattcccttcccaccttgtcatttcttataagcttccaaagttgtaagttatgggccaatgaccatagtttatgagtgataaattatgaagatagatttaacactgtacagtgytgtagtaaaaatgtgcacaagttaatctaacacttttttaatgatttacatattcatcactgtgctgcattgtaattagacatatggatagggtaagcagtcctgagaaattaccatgattagtattctttccacatggccaaatcacatttttataaggctttttttcttgcttgcttagttagttctctagttcttgtaatcagtgtcatggctgatagcctcccttgtatagtacaatgtacactttatgtacacttaattgtcttctttctctctctctctctctctctcacacacacacacacacacacacacacacacttgtatttctcgttgacacatacttaaaatgaaaaacatgc

SEQ ID NO: 465608 - DNA, 570 bp, Homo sapiens
agcaagccatatcttttaccaatagcgttctttttgtcttcatttatatgtgccattttttcaaaattattattactctaaatatgcatttaattcccttcccaccttgtcatttcttataagcttccaaagttgtaagttatgggccaatgaccatagtttatgagtgataaattatgaagatagatttaacactgtacagtgttgtagtaaaaatgtgcacaagttaatctaacacttttttaatgatttacatattcatcactgtgctgcattgtaattagacatatggatagggtaagcagtyctgagaaattaccatgattagtattctttccacatggccaaatcacatttttataaggctttttttcttgcttgcttagttagttctctagttcttgtaatcagtgtcatggctgatagcctcccttgtatagtacaatgtacactttatgtacacttaattgtcttctttctctctctctctctctctctcacacacacacacacacacacacacacacacttgtatttctcgttgacacatacttaaaatgaaaaacatgc

SEQ ID NO: 465609 - DNA, 483 bp, Homo sapiens
ggttttattcttttttgtatgtcacacagtggatgttcaaaaaatatttgccaaggggataagttaatgaataaacttagaatggtgttgtgagccaacagcaggaatatttcaaatctttctgggaaagctgcttgccccttcacctctgctggactccttgccccgaacccagtagttcagaaccttaaaggaaactactcagatagggtagatgtctttggttttgtctcatttcttcattcaccgttcattgaacaattactacagggctccgcctatgtgtccaggcaccactgactatctgaaagcaaggtgccaaagtgtaaaaaacactgctgaaaacaaatcgatttgtgtttgtgtgctgtcatgtggagagcagagcccatcttttggtatatttcagcgatrcctctttcttcctctgggataccaagggctttccatttatgcttgcagccaagaaaagttttccagaat

SEQ ID NO: 465610 - DNA, 569 bp, Homo sapiens
ctgatttgtttgatggctgagggccaaatgcaaatagagtatcatctgatttcaggcgtcttggccacaagtcaactgtratgtctcccttctaaccagatccttttcattgaaagaccacaatccctccaaaagcctatatgctgtcatattagatggctgccttcgtataactacaatatttattagccttgaaatgctgtacccagggacttacataagtactgcatggggaattcatttcaagccacatttgaccccttgttgtaaaggtgatcttcaaataggtttaagggaaataaatcaagttttcaacccaaagtctgctttctcctaataaaaaagaaaagagggtttagatgtttctaaccttttcttcttttcttcactttggaattgaagattaatcacatgtacccagagatgtaatttaatgtctgtcatttggaataggagggaaaatagataaattgttcatgaagagggtgctttaaaattaaacaatacaaccaaggattttattagacagttggtgggaaggatacttctcattaaaaggaaagtcaagt

SEQ ID NO: 465611 - DNA, 589 bp, Homo sapiens
ggattccacggtcctgctttggaaatgtgtaaacagcagatgcttttattgcctttgtttgaatctctgcccttgcagagcaacacaggccggaagctcagaggagaggaagtccatatttgtctgtagcgttttgtttcctcgtaagcagcttagtctcttgggacgactgtgcgtaatgacaagttaatggaaaagatatgaattcagatttcacataaagagagtcagaaaaaggaatatgtcttccttgagccaaaggaataattcgaacttccttcttttaaaaaggggggtttattagacaccgtttttattatatactattaatatacaatatatgtggtaactattgatcataatgattttatcagctgaaatttataatatgcaaatgtgagggtgcatgatagactcattttcctacagcttggtagttaacagcctgcatttgggttctaagtgacctccgttcaaattcctactgattttctgtttaacctggctggatttttcatctgtaaaatggggatactaataccrataaattattgtcaaatagagtttgtctctttcagagttgaaagga

SEQ ID NO: 465612 - DNA, 427 bp, Homo sapiens
gaagtgcattgaagtgcacagattatcctaaattcatctttattataaccttgtgtttaagtctcctttgctatcaactctttaagaagacttctagcaaggagcggttttataaagttgaatgtgatctactgaccatacctaccttttccaatgggaagttgtgagcaggaaagtggttacatgatttcgaacagaaagcacrgaaaacatcagagtttctgttagttcaacaaattctctcatttcaatcactgaaaagtgagaggtaaatgaatgcatgttgcttggcactgaggtgacttgcccctgcctttttgtgctgggtgatgacagttacttttctctaacaatcattgcattccttttatattcttggagtctcagtgttggaaagaacatcaaaatttcatcacgtttcatttcc

SEQ ID NO: 465613 - DNA, 588 bp, Homo sapiens
tgttccctaagattcattcatgtttttaaacttaattactctctattcctagccaagttcatctactttaatggctttagcaatgatggttctggtagacagtgatggtgacaaatggcaaccagatggtatgcaataagcaaagcctttgaaggatgtataattttcccaaatttacaattaaggaaattaaggcttggagatgataaataatttgttcaaggccacacagatagtattaaaggcagaggtcaaatccaagtttgtctttgtttgacaatatatccttaatctttaaatgtaccccctttgaggtatacatctctaaccctgactcctctcaggagctccagaaccacatttccaactttctcttatgaacttccctatgactattccacagccacctgaaattcaacacatcccacaactgaactcatcrtctacctggtcagcttcatttcttgttctgtgtttcctggatgagctcatggcatcagcattctcaacaccaaggttgcaaaacatggagtcgtcttttactcacccctcacttttactccccatagcccatctgtccccctcctt

SEQ ID NO: 465614 - DNA, 220 bp, Homo sapiens
tatcatgtattttactatgttctatgtgctatattgggcacrtacccatatcttgtatcatttaactataataggtttttctaacagtataactgattcaaacaatgtactagtgtgtcttataaagtaataagctcttttcctcagaactgttggaggcaaggatcccatgctgggtgaaggggatggaactagaatattcaaaatgtcccattttaat

SEQ ID NO: 465615 - DNA, 610 bp, Homo sapiens
aaaatagctgttttgaggaaattcaaagataacacaaagaagaaattcagcactctatcagataagattaacaaagagattgaaataattaaaaatcaagcagaaattctggagttgaaaaatgcaatggacacactgaagaatgcatcagtcttttaatagcaraattgatcaagcagaagaaagaattagtaagaatgaagacaggttatttgaaaatacacagtaagagtagacaaaagaaaaaaatagaaaagaatgatgcatgcctataaaatctagaaaatagtctcaaaaggggaaatctaagagtaattgaccttaaagagaaggtagagaaagaggtgaggtagaaagtttattcagagataataacagagaactgccccaaacagagaaagatatcaccatccaagtacgagaaggttatagaacacccaacagattttaccaaaagaatacctcaaagcatttagtcatcaaacttccaaaggtcagggataaagaaggatccgaaaagcagcaagagaaaagaaacaacacacaataaagctccattacatcttgcagcagacttttcggtagaaaccttacaggccaggagagagtg

SEQ ID NO: 465616 - DNA, 610 bp, Homo sapiens
aaaatagctgttttgaggaaattcaaagataacacaaagaagaaattcagcactctatcagataagattaacaaagagattgaaataattaaaaatcaagcagaaattctggagttgaaaaatgcaatggacacactgaagaatgcatcagtcttttaatagcagaattgatcaagcagaagaaagaattagtaagaatgaagacaggttatttgaaaatacacagtaagagtagacaaaagaaaaaaatagaaaagaatgatgyatgcctataaaatctagaaaatagtctcaaaaggggaaatctaagagtaattgaccttaaagagaaggtagagaaagaggtgaggtagaaagtttattcagagataataacagagaactgccccaaacagagaaagatatcaccatccaagtacgagaaggttatagaacacccaacagattttaccaaaagaatacctcaaagcatttagtcatcaaacttccaaaggtcagggataaagaaggatccgaaaagcagcaagagaaaagaaacaacacacaataaagctccattacatcttgcagcagacttttcggtagaaaccttacaggccaggagagagtg

SEQ ID NO: 465617 - DNA, 579 bp, Homo sapiens
aaataacttttaccctaaaatagtatatcccgtgaaaattgccttcaaacatgaaggagaaataaagactttcccacacaaacaaaagctaagagatttcatcaataccagacctgtatacaagaaatgctaaatggagtacttcaatcagaaagaaaaggacattaatgagcaataaataatcacttgaaggtacaaaactcactggtaatagtaagtatactgaaaaactagaatattataacaccataactgtggtgtgtaaactactcttaagtagaaaggctaaacaatgagccaatcaaagataataactacaacaacttttcaagacacaatacaataagatataaatagaaacaacaaaaagttaaaaagcgggaggatgaagttaaggggtagagtgtttattagtttacattttgcttgcttgtttgtttatggaaacaatgctatgttgttgtcagcttaaaaagcctcgtggtaacctcaaatcaagtaacatataattgatacacaaaaaataaaaagaaaggaattaaatmacaccacctaagaaaattaccttcaccaaaagca

SEQ ID NO: 465618 - DNA, 538 bp, Homo sapiens
gaaactatggtattatttctttatgcagaccttactcagaacctcctggcttctgcaagattggtctgtgttgtgagtgaagaggtatggacaagattctaccttatggaaatgaggctctttgacttggtctctccagttggactgagccacacatggttttgaatatgctcttgacctcaccatgaaagatgttggagaaatgtggaatgaagctgctactcaattgcatctgcagcatatcagggagtggtcactgtagagggtagaagaaagcatgtgttaaattgggagtcagtagacccggataccaacaatgatcatcactagcctgcaactaactaaaagctgagtgatcttgggcaaattaatgacctgagacctggaccccagtccaaacctggtacatcagaattccttgttttggtacttgagtatcagtaattatttaaaagcatctaggtgattttaatrtgcatcccggaatagtatccactcactaataactgatctaaaagctcccttccagaccttgaaa

SEQ ID NO: 465619 - DNA, 585 bp, Homo sapiens
tttctcctaagcatttatttaaatttcgatatttcagatatttatgctaaattcaaggattacaccagtttaggaaaagaaaccaggatttatgttcctrcaattattgggggaagcagacaagataacaactataacaatacaatgagacaagtgctcttatagatttttctgggagcttccaagctgggaaataattaatttgcttggggctgatggtgggagtgagagggagaaatttcaggaaagtttcacagaaaaaacttaaagcatgcatacattttcaggcagaatatagagtggaaagagggtaacctctcacaattacaaccccacttttatccttggtattcatctaattacttctctttctgtctccctaagacaaagaacagtatacatcttcgttactcaaagttatggtttgtggatcagcagccttgacatcatctgggaggttgaaagaaatgtagaatctcagatcccatttcagatctactgaggcagtaggtgcatttgaataagatcctcgggtaatttatatgtacattaaagtttgagacacaccaagctatggcttgtgcc

SEQ ID NO: 465620 - DNA, 575 bp, Homo sapiens
tggtctccccttcgattccaaggggttgcttgacatcctttttaccccttctcacctctgtttgactgaaatttgagctgtagtggctggggagcttgtctagagatccaccactatctcctcagaacctagagcattgctggccygtgattctttaggtaagttcatgagagaatgaacaaatgagtgttgtgggctggaaggggctgcttgtatcattgatgtttgtgctgtgggttgcccaaggacaatgggcaggtctggagaactttactagttctggagatagagaaattaaaataaagttgtaattaatttgctttttctcagcagttgacttttagaataaggagatatgagttgtatgaaaacaacctgaatgagcaaatatttatttttaaaaaacccaaactccagaatatgttttagacagctttgttgatacataattcacatataaacaattcacccacttaaaatgtacaatttagtgggtttttaaagaatatttatagggttttgcaaccatccttacaatcaaattttggaacatttctgattcccttaagaaaaac

SEQ ID NO: 465621 - DNA, 575 bp, Homo sapiens
tggtctccccttcgattccaaggggttgcttgacatcctttttaccccttctcacctctgtttgactgaaatttgagctgtagtggctggggagcttgtctagagatccaccactatctcctcagaacctagagcattgctggcccgtgattctttaggtaagttcatgagagaatgaacaaatgagtgttgtgggctggaaggggctgcttgtatcattgatgtttgtgctgtgggttgcccaaggacaatgggcaggtctggagaactttactagttctggagatagagaaattaaaataaagttgtaaktaatttgctttttctcagcagttgacttttagaataaggagatatgagttgtatgaaaacaacctgaatgagcaaatatttatttttaaaaaacccaaactccagaatatgttttagacagctttgttgatacataattcacatataaacaattcacccacttaaaatgtacaatttagtgggtttttaaagaatatttatagggttttgcaaccatccttacaatcaaattttggaacatttctgattcccttaagaaaaac

SEQ ID NO: 465622 - DNA, 575 bp, Homo sapiens
tggtctccccttcgattccaaggggttgcttgacatcctttttaccccttctcacctctgtttgactgaaatttgagctgtagtggctggggagcttgtctagagatccaccactatctcctcagaacctagagcattgctggcccgtgattctttaggtaagttcatgagagaatgaacaaatgagtgttgtgggctggaaggggctgcttgtatcattgatgtttgtgctgtgggttgcccaaggacaatgggcaggtctggagaactttactagttctggagatagagaaattaaaataaagttgtaattaatttgctttttctcagcagttgacttttagaataaggagatatgagttgtatgaaaacaacctgaatgagcaaatatttatttttaaaaaacccaaactccagaatatgttttagacagctttgttgatacataattcacatatraacaattcacccacttaaaatgtacaatttagtgggtttttaaagaatatttatagggttttgcaaccatccttacaatcaaattttggaacatttctgattcccttaagaaaaac

SEQ ID NO: 465623 - DNA, 615 bp, Homo sapiens
ccctttgtcaggaaaggataaactgacacttgttgggcacctcctgtgcccccaaaagcttcatcaattttctctctaatcttcccaaaattacycagggagaggaagatacagagggactgagtggagagctcacttcttcctgctatgtgttaatcttgcagctatgagaggatcagagagaacctgatttcagagacctgctttgcttgggagaaccagaaggctgccagggcagtggtgagtgatgggaggacctctgtaagtgacaacagaaggaaagtgtaatggtcaagctaatgtgtcaactttaccaggctaagggatacccaggcagctggtataacatgatttctgggtgtgtctgtgagggtgtgtttcaggaagagattagcgttcaaatcaacagactaagaaaagaagatctgtcctcaccattgtgggcagccatcatccaatcctttaaggacccaaatagaacaaaaaggcaaaggaaagtcctctccatctttttgagctgagacattcatcttctgtccttggatattggagctcctggttcttgggctttcagactctgggacttacactagcagcctgcctgatatttgggac

SEQ ID NO: 465624 - DNA, 615 bp, Homo sapiens
ccctttgtcaggaaaggataaactgacacttgttgggcacctcctgtgcccccaaaagcttcatcaattttctctctaatcttcccaaaattacccagggagaggaagatacagagggactgagtggagagctcacttcttcctgctatgtgttaatcttgcagctatgagaggatcagagagaacctgatttcagagacctgctttgcttgggagaaccagaaggctgccagggcagtggtgagtgatgggaggacctctgtaagtgacaacagaaggaaagtgtaatggtcaagctaatgtgtcaactttaccaggctaagggatacccaggcagctggtataacatgatttctgggtgtgtctgtgagggtgtgtttcaggaagagattagcgttcaaatcaacagactaagaaaagaagatctgtcctcaccattgtgggcagccatcatccaatcctttaaggacccaaatagaasaaaaaggcaaaggaaagtcctctccatctttttgagctgagacattcatcttctgtccttggatattggagctcctggttcttgggctttcagactctgggacttacactagcagcctgcctgatatttgggac

SEQ ID NO: 465625 - DNA, 397 bp, Homo sapiens
gcgttcaaatcaacagactaagaaaagaagatctgtcctcaccattgtgggcagccatcatccaatcctttaaggacccaaatagaacaaaaaggcaaaggaaagtcctctccatctttttgagctgagacattcatcttctgtccttggatattggagctcctggttcttgggctttcagactctgggacttacactagcagcctgcctgatatttgggacttcagccttggactgtgagttacaccattggttccactggttctcaggccaccagacttggactgaattatacaagcagctttgctgttctccagcttgcagaccacatagtatgggacttctcagcctccacagtcacatragcctattcccacaataaatcctcatggctgtg

SEQ ID NO: 465626 - DNA, 397 bp, Homo sapiens
gcgttcaaatcaacagactaagaaaagaagatctgtcctcaccattgtgggcagccatcatccaatcctttaaggacccaaatagaacaaaaaggcaaaggaaagtcctctccatctttttgagctgagacattcatcttctgtccttggatattggagctcctggttcttgggctttcagactctgggacttacactagcagcctgcctgatatttgggacttcagccttggactgtgagttacaccattggttccactggttctcaggccaccagacttggactgaattatacaagcagctttgctgttctccagcttgcagaccacatagtatgggacttctcagcctccacagtcacataagccwattcccacaataaatcctcatggctgtg

SEQ ID NO: 465627 - DNA, 600 bp, Homo sapiens
gtcgcctgttcaacgagctttcctatcctcttctcctgcttcctttgttgaactcctcctgtactccacatagtctgagtaaggctattaatcagagtatatctcttccatactccatccccactctgcaaaactacaaagctcacagggatgggcacatggctgtgcacctaggtcaggccaatgttctctttggaatgtctctgtgggagctagcacagaaggctgctaggaaaacatcatgaacagcagagacaaatggaagaaagagaaataggcgggtgggaagagrgagagaggagacaaagactgaattgatattgacattgttagagcttctggatccagccatgctagatctacctcttgacttcccagttatttgaatcaataaacttctttccccttgcataagatagattgagattgatttggacaaaatgtgtcctgatgaatttaccaaggtgggccagaggacaaatggagcaagattagatgatttaggaactgatgaatcaaatactgggcatgtttaggaatctctctactgtgagtcagagataactcaccaaaggagctctactttcttagacagaaaca

SEQ ID NO: 465628 - DNA, 616 bp, Homo sapiens
gatgatttaggaactgatgaatcaaatactgggcatgtttaggaatctctctactgtgagtcagagataactcaccaaaggagctctactttcttagacagaaacagagcttgtaaaacccaagactgtgaataggaaaaaaaaaaaaaaagagagagagagaggtcttcaaagctcattcaacttttgtttaattattccaacagtgaaatctatctacaactgtctatgtcatatgcaaatggtgatcaccataggacattgtttagacctatcatactgaaaaagacccagcaaaaaaactagggctggtgtggggcatctctgggtgaagtgggtatcatgcactgctgctagaakaatcaactggctcactttctaaaagagcattttgtactatgtactaaaatcctaaaaatatacctatttttgacctaataattctgatgtttcaggtctagtacaggctcccatctgcccaagagggactttgaagaataaatttccaagttaaaagaatccatttacataatgataagaagaatacctaagttgagagcactcgtgccatttgttaccacaattccgcttctatgttggagggatctagcaagca

SEQ ID NO: 465629 - DNA, 616 bp, Homo sapiens
gatgatttaggaactgatgaatcaaatactgggcatgtttaggaatctctctactgtgagtcagagataactcaccaaaggagctctactttcttagacagaaacagagcttgtaaaacccaagactgtgaataggaaaaaaaaaaaaaaagagagagagagaggtcttcaaagctcattcaacttttgtttaattattccaacagtgaaatctatctacaactgtctatgtcatatgcaaatggtgatcaccataggacattgtttagacctatcatactgaaaaagacccagcaaaaaaactagggctggtgtggggcatctctgggtgaagtgggtatcatgcactgctgctagaataatcaactggctcactttctaaaasagcattttgtactatgtactaaaatcctaaaaatatacctatttttgacctaataattctgatgtttcaggtctagtacaggctcccatctgcccaagagggactttgaagaataaatttccaagttaaaagaatccatttacataatgataagaagaatacctaagttgagagcactcgtgccatttgttaccacaattccgcttctatgttggagggatctagcaagca

SEQ ID NO: 465630 - DNA, 580 bp, Homo sapiens
ttaccacagtgtaatggaattgatttaggaagttgggctaattattttacctcatggcacattttaaagattaaaaacaatcataggtcctagttgttttgtccccacttgttatccctacaggctgagaatgtgatggtggcagagaatggagatatggtagaggaagaatcatttaattcaagattttaattagttgggttccagctagtttaaatttggtgctctggggcagggggcgtggcttggagccagtctcattctgttgcccaggctggagtacagtggctcgatctcagctcactgtaacctttgtctcctgggttcaagtgattctcctgcgtcagcctcccaattagttgggattacaggcatgcactaccacacccagctaattttttttttttgtatttttagtagatatggggtctcaccatgttgccccggctggtctcgaacacctgagcttaggcaatccacacacctcagcctcccaaagtgctaggattacaggcgtgtgccacygtgcccagccaaattttttttctataatttatgtattacagagtaatcccagata

SEQ ID NO: 465631 - DNA, 580 bp, Homo sapiens
ttaccacagtgtaatggaattgatttaggaagttgggctaattattttacctcatggcacattttaaagattaaaaacaatcataggtcctagttgttttgtccccacttgttatccctacaggctgagaatgtgatggtggcagagaatggagatatggtagaggaagaatcatttaattcaagattttaattagttgggttccagctagtttaaatttggtgctctggggcagggggcgtggcttggagccagtctcattctgttgcccaggctggagtacagtggctcgatctcagctcactgtaacctttgtctcctgggttcaagtgattctcctgcgtcagcctcccaattagttgggattacaggcatgcactaccacacccagctaattttttttttttgtatttttagtagatatggggtctcaccatgttgccccggctggtctcgaacacctgagcttaggcaatccacacacctcagcctcccaaagtgctaggattacaggcgtgtgccactgtgccmagccaaattttttttctataatttatgtattacagagtaatcccagata

SEQ ID NO: 465632 - DNA, 582 bp, Homo sapiens
agaaaatatataatattttatattgtgagatgtggaagggctctttcaacaaaatataaaacccaaaagtcattaaaatatatatatatatatatatatatatagagagagagagagagagagagagagagagagatttcactatataactagaattctatatggcagaagacactataagcaaagttaaaaggcaaaagtacagattggaagtaaagatyttcaacaagtttaacaagcaaataattggtatccataatatgtaggagctctttaaataataggaaaaaatttaaattgaaaaatacacagtacataaataggaaatttataaataattatggtgaataaatatttgaaaaaacaatcattctcactatattaagcaacattataactgaatgttagttttgcctttatataggtaaatattctcaaaaaatttatagtaccctggagaaatcagtaatcacatactattgataggaagacaaattgataatctttttgaagagcaatttgatttttccttttaaaaagttcatattttacttatataaatttattcgtattcccacaact

SEQ ID NO: 465633 - DNA, 582 bp, Homo sapiens
agaaaatatataatattttatattgtgagatgtggaagggctctttcaacaaaatataaaacccaaaagtcattaaaatatatatatatatatatatatatatagagagagagagagagagagagagagagagagatttcactatataactagaattctatatggcagaagacactataagcaaagttaaaaggcaaaagtacagattggaagtaaagatcttcaacaagtttaacaagcaaataattggtatccataatatgtaggagctctttaaataataggaaaaaatttaaattgaaaaatacacagtacataaataggaaatttataaataattatggtgaataaatatttgaaaaaacaatcattctcactayattaagcaacattataactgaatgttagttttgcctttatataggtaaatattctcaaaaaatttatagtaccctggagaaatcagtaatcacatactattgataggaagacaaattgataatctttttgaagagcaatttgatttttccttttaaaaagttcatattttacttatataaatttattcgtattcccacaact

SEQ ID NO: 465634 - DNA, 597 bp, Homo sapiens
agaacttggtggaagcagaaaatgtgagcaagagatgactaggagaaatgcaaataggattgccagataaaggatccttagttaagttttaatttcagataatatttttataaaaataaagtacatcccaaatattacctgataagtttttatgctaaatacaattatatttttatttgctaaatctggaactctaaatgccagcctcctccacccaagaaccytctgctctactgaagggagtgtatatttctctttttaatttggcttcaagccagttgtatttaaattcattaaatataccttctacctttcagcagacaggaggacctgagaaattttggacaactgataaataggtaagtgtatcaaattaccttgttattagctagtaatcaaaactaacccagtcatccacagctaagcacattttctattgcccatgtctttttggtggtgttgcagcactttaaaaagaggactattgtcccagtgagttttgctcctgtgctacagaaagaacaaaaagtaaactagatacagtcttccttttgacattatggacaaattagataccctaaacaactctctcaactg

SEQ ID NO: 465635 - DNA, 568 bp, Homo sapiens
gaaatgtgatgcagggaatttgttacacgggtgacaaaagaagcagattagccaactgggaacagtgaggcaacccagaggttggcaatagtaggaagccactgccacccctaggctataagcacaagaaaggaggagacttaccagasaccaagggcccaggtgacattgaacatggaggaggagaaatacctggtgtggtaaggaggataatctccccctcaagacgtccacattctaatctctggcacctgtgaatatgttatcttacacggcaaaaggggcttttcagatgtgattaggttaaggctcttctgatggggagcttatcccacatttttggggtaggaccaatgtaatcacaagtgtccttataagaggggaggaaggagggtcagaattagagaagacaatgtgcagaagttagagtgatgtggtcacaagccaaggaatgcagacagcccctaggtgttggacaaggaaaggaaatgggttctgccctagagcctccagaaggaatgcagctctgctgacactcttagtctcataggacttatttcagatttct

SEQ ID NO: 465636 - DNA, 568 bp, Homo sapiens
gaaatgtgatgcagggaatttgttacacgggtgacaaaagaagcagattagccaactgggaacagtgaggcaacccagaggttggcaatagtaggaagccactgccacccctaggctataagcacaagaaaggaggagacttaccagagaccaagggcccaggtgacattgaacatggaggaggagaaatacctggtgtggtaaggaggataatctccccctcaagacgtccacattctaatctctggcacctgtgaatatgttatcttacacsgcaaaaggggcttttcagatgtgattaggttaaggctcttctgatggggagcttatcccacatttttggggtaggaccaatgtaatcacaagtgtccttataagaggggaggaaggagggtcagaattagagaagacaatgtgcagaagttagagtgatgtggtcacaagccaaggaatgcagacagcccctaggtgttggacaaggaaaggaaatgggttctgccctagagcctccagaaggaatgcagctctgctgacactcttagtctcataggacttatttcagatttct

SEQ ID NO: 465637 - DNA, 561 bp, Homo sapiens
cctaatactatgtgttgctctcttctctaggcattgggaattagtgttaaacaagacacaaaatgtgtgctctcaggaagatcatatgccagtgcagagagatgataaacacgaaatccaataaatacacagtttgtgccatgaagaaaataaaacaagctgatgaaattataactaccaggtgtgtcacttygattgggtgttcagggaagactcaggagatgccatttgagctgagacatgaatgatatgaagaaattgactatggagagatcaggggcagaacattccaggtggggacaaacagggtcaacagtggtaaggcagcaacaagagtggggaattcaaggagcagccagcaggccagtgggactgggcataggaaggagtgcaggtgaagggaggggggtcatggagcaggcaatgccaagtctgaaagaccttccttgtagaacatggcaaggggtttgggtttggttttatcctcagtgcaatgagaaagcagtgatggggaaagggccttatacaggaaagtgacaggatctggtttgaatttttgac

SEQ ID NO: 465638 - DNA, 631 bp, Homo sapiens
gttcaacatcagaagtcaaaagaccattatttgtatctggatcatccacccagggcgatagatcagagaattaagataattacatactttctggttaattatctgagatgaaatattctatagatgtgttatatgtcagtggagctgcaatctggtccaggctttcacaggaagctattaaaaatgtccttgatgctcagcaagagtcacatggactgtctatcagagaatggagggccacagaactcccactcaccgatgccgcttggcttgcagcctttcttggcattagcctcagcctcgctaccaacatccacctggcctscccagtccagttccctccatatgaatcccggtcccttgcttttacatcacaccatccacaggcttaacctcagctttaccagtggctacccaggacccctgaaaattaagggtagtgggttaaaagtgtgaagaagggggaaccccatacatctatacatatggacaaaataccttgcaaaccctcacttccaattagatctgctctcaagatattggccacaacagatgaggcaaagatgattgactgcctcctcgatgtattccctccactccctccgtggctaacagaatgccccttcagcct

SEQ ID NO: 465639 - DNA, 581 bp, Homo sapiens
cttcagaatatgagttacaggagcaggcaacgtgtcacctccagagaggtggtctgccccacctctccctaggcagcaaaacacaaccacttggtttgcattcatctcaagcacatcattactggccaaattgtaagggtgtttctcagaaggagatgtgcaaatggaatgtgtgaagaatactgtggaataatgaagctgatatcctgcctttgtccctggtttctggtacagagctttgcaaacccttagcatttccccagtgttatgtccccgccccaccccmcaaaattcatgtgttgaagtcctaaccagtacctgagaatgtgactgtatttgtagacagggtctttccagaggttaatgaagtaaatgaggtcattagagtgggccccaaatccaataggactgatgtcctactggaaattaggacacagacatacgcagagggaagaccaagtaaaaccacagggagaaaagagacatctgaagccaaggagagaggcctcagaagaaaccaacctttcccataccctcttgttctctgacatctagcttccagaattgtgagaaaataaatt

SEQ ID NO: 465640 - DNA, 627 bp, Homo sapiens
actttgtatctgcccagggttggttggtttgtttatttgtttttaatttacacaagtttgacaatgttggaaacaatccttttatttgattttttgttttgtgttcattgataatgtcctgttttaaattcacttccacaaagtcaagataaccataacaaacaagtgatttgtattttgttactccagaaagagaggctggtttgtccagggattttaaagctttctaaagtacgcttcgaacctaagcttattatagactcccagttttccctagtcagcatgagtttacactcatctgattacaccgattctaccacacaatctcagccacgggctcaggatgaagtggcctgaatcccagcacctgtaatcagtgccttctgtagctatgtgtcacccagccagtmtttgctgtactgcagggggtccccacatcaatcttactgcagcaaatgggatggtaaaaatgtggttttttcttttttaatttaaatcaacttaagtccagctccttaaccactcagtgttgtgccaatgatctaggatgttggcccctttggacactggccatggtctacaccactcacagctgaggcgccctttgttctagcctgcatggtccct

SEQ ID NO: 465641 - DNA, 520 bp, Homo sapiens
ttcccatcctgtccttgaatcatccatttcaggatctgcctctgaaagaacccaaactaaggcagtcaatccaccacagacagacaaggaaatagaagcagagcgttttatttagagattatggaggaaaatacgaaaagaagcaactaacagaactgcaggtcattacctctagggaccaagactagaggtgggaaggggcggaagaggagaccatgcttttaaatatatgcatggcatgtgctactttaayataattaaaaacaatcacttaaagcaaattggaacagtgtaacaaatgaaatcaaatgaaatcaaaaggagagagcacaaatatatctgagtaacttggtctgtcccccagcccccttaatgttgttacctgaatatgtcaattgttgtcaaaagacaagcataaactgaaatcgattattgtatggatctgaaccgatggaaaatattctctgtacagcaattttaaaagtataatggtaatcactgtgttagggattaagtatac

SEQ ID NO: 465642 - DNA, 520 bp, Homo sapiens
ttcccatcctgtccttgaatcatccatttcaggatctgcctctgaaagaacccaaactaaggcagtcaatccaccacagacagacaaggaaatagaagcagagcgttttatttagagattatggaggaaaatacgaaaagaagcaactaacagaactgcaggtcattacctctagggaccaagactagaggtgggaaggggcggaagaggagaccatgcttttaaatatatgcatggcatgtgctactttaatataattaaaaacaatcacttaaagcaaattggaacagtgtaacaaatgaaatcaaatgaaatcaaaaggagagagcacaaatatatctgagtaacytggtctgtcccccagcccccttaatgttgttacctgaatatgtcaattgttgtcaaaagacaagcataaactgaaatcgattattgtatggatctgaaccgatggaaaatattctctgtacagcaattttaaaagtataatggtaatcactgtgttagggattaagtatac

SEQ ID NO: 465643 - DNA, 520 bp, Homo sapiens
ttcccatcctgtccttgaatcatccatttcaggatctgcctctgaaagaacccaaactaaggcagtcaatccaccacagacagacaaggaaatagaagcagagcgttttatttagagattatggaggaaaatacgaaaagaagcaactaacagaactgcaggtcattacctctagggaccaagactagaggtgggaaggggcggaagaggagaccatgcttttaaatatatgcatggcatgtgctactttaatataattaaaaacaatcacttaaagcaaattggaacagtgtaacaaatgaaatcaaatgaaatcaaaaggagagagcacaaatatatctgagtaacttggtctgtcccccagcccccttaatgttgttacctgaatatgtcaattgttgtcaaaagacaagcataaactgaaatcgattattgtatggatctgaacmgatggaaaatattctctgtacagcaattttaaaagtataatggtaatcactgtgttagggattaagtatac

SEQ ID NO: 465644 - DNA, 610 bp, Homo sapiens
tcagatgaacacagtttgcatgctgtctctctggaacaatacacatcagaggaagaagttaataggaaaatcaggcaacccaaactgtgttttttaggttaatcaggaatttccttcaattctagtaaacaggtggaaatagaaattttgagctgagaaaagtaggaatcaggacgtggaagggaaaagctgggttctgctgcggtgatgtgggtgacccttcatgatgagccagctgtctattctcccagctctctcccggcggtaggaactgagaagaggcgcccctcgctgcaggccctttgatgcctctcctctcccctgtcctttcacccccgactctgtgagttgcttttagatatcgttctttacttaccaattgtctctttctcccctgcttgttaacgtatcatgaaaaaactgtgacgtgatgaccccccatgaatgcctctggaggaaaagtgctagamaatttaaaaagaaaattaaggtgataaaactggcctcattaatctgttaaactccttcaacattgccaaaaacagaggtgagcttctcagctcagtttccccaaaattcacagaaaaaattactgtgcttgaaaagaaaa

SEQ ID NO: 465645 - DNA, 610 bp, Homo sapiens
tcagatgaacacagtttgcatgctgtctctctggaacaatacacatcagaggaagaagttaataggaaaatcaggcaacccaaactgtgttttttaggttaatcaggaatttccttcaattctagtaaacaggtggaaatagaaattttgagctgagaaaagtaggaatcaggacgtggaagggaaaagctgggttctgctgcggtgatgtgggtgacccttcatgatgagccagctgtctattctcccagctctctcccggcggtaggaactgagaagaggcgcccctcgctgcaggccctttgatgcctctcctctcccctgtcctttcacccccgactctgtgagttgcttttagatatcgttctttacttaccaattgtctctttctcccctgcttgttaacgtatcatgaaaaaactgtgacgtgatgaccccccatgaatgcctctggaggaaaagtgctagaaaatttaaaaagaaaattaaggtgataaaactggcctcattaatctgttaaactcctwcaacattgccaaaaacagaggtgagcttctcagctcagtttccccaaaattcacagaaaaaattactgtgcttgaaaagaaaa

SEQ ID NO: 465646 - DNA, 494 bp, Homo sapiens
ggctgcgacacaggtgcccaggagggcacaaaactgccttctggagtggacaggaaggttccaygccatggtggtggtaacatggtgatttggagttataatgtgtttttgttcatttggaatatatttaaaataattaggcaacttgatttttaaatgtatgatatagaatatcaaggtattgatcaggattagatgtatttaagtattgccatttttaggaaagtggtgttctatcaatgacttaatcattctaggtttttgcccagctgcagatggcttgagagaactgcctggttacagctgatggtgagttacagtcagtgtgagtgtgcgtgggcatgcacactcagtaagcaggcagcagctgtttggttagagaacgaaactggccaattggaaactatggtattatttctttatgcagaccttactcagaacctcctggcttctgcaagattggtctgtgttgtgagtgaagaggtatggacaag

SEQ ID NO: 465647 - DNA, 572 bp, Homo sapiens
gcaacttgttcctgacccacagttagagttagctgtgacttaccaaaaaagctaggtggctctttggccaatgtccagggagtatgggaaaggaggaatagatggtgtccaaggaataaagcagcctggggcactgtgccctgccgtcccctccttgctggttttgaagcctgctctagccccactcaggtgycttccagcagctcagactcaccaagtggggcgggacctgactcctccccatcccaccactgcagctgccctacaatcgcctacaactcagtgaatggcaatttcatcatcgctgaagcttggagcaatcttgaatcttctttctctggagccccacaccggatgccttcaccagccccaccctcacctgccagggctctcagtgcctcctgactggtcccaaacttgagaagtctaattcctcccagccgtctggaccatcctcttacacttcagttggatcctgttactccccactcagagcctgcaagggtgccatttgtccctccaaggagaagcctcagtccttgccaaaagatgtggccccgttgaccctctgc

SEQ ID NO: 465648 - DNA, 579 bp, Homo sapiens
ctacaactgcccctttcctggccttatttttttctctcttttcttcctttcttccttatcgaatatttatgacataggattacttatactcagagatagggccaagcttgtctcccacaaagatgaaagagttgtataaactcacctcaaagatgctccagaaaggaaatcaaaacagtttcagaacttgaataggaatcaggaaagaatcagtgttaaagtatatttctcaaaatacaaatcacctagggtgggagtgggggcttgtggaagttcacattcccaggtcctgctcagatggactgaatcaaaacactagagatgrgtcttgagttcaacattttgagcaaacttgcattatttgtttgcttgtggttgcacacaagtttgagaaccaatgccatagatattcaggaacaaggacatatgcaggagctgcattttaggaagctaagtccagcagtttatgtaatatgcactaaggggagggggtgctggacacctggagaagatcaaagaaggatggaggcacttgcagtaatccaagtgtaaaggcagagcctcgagtcaggtcttgta

SEQ ID NO: 465649 - DNA, 358 bp, Homo sapiens
agtggccagaacataatgctgactgcatgttgtgaggaaatgtattaaatgaaacaaattgaattcaagaaggttttttgtttgtttgtttgttttgttttttaatgtgtgtttgtttgtttgttttgcagaaatgaggtacaggggagagaaacacctacttggaaagcaccgaaacaactgaattggaaaatgtggaaaggggattgggggaggggactctttctgagatctggctccagtactaacagcaaagggaacttgggcaarttacagactctctgtgccttggttttgtcatcagcaaaacagaatcatcccataaactgtaaggtccgtggtatcagagggtccccag

SEQ ID NO: 465650 - DNA, 609 bp, Homo sapiens
gttatactatatattgtataaatgttaattaatttctgtcttccctactaactatcaattctataacagcaggtctctgtttgctcacccgaaccccatgtgtttggcacattgcacagtacctggctaccttaaattctcaaattacaatagctagtatttttctttctaatctttatattttgctagcatttttctctctaatctttatattatattcccaaarttgatgtagctaaatagagtgaaatcaataggcaattgaaaagtaagtctttcactgttttagtctaaacattctgttcccccctcccacccacccctacaagaaattaaataactcctttaaaatgtagagaagatcccttgaaaatttagaaaatatttacttgccacggaatttcttggaaaatgttctattgctatatgcgtctttttgctttttaatcagaaactagtaacatcccctccagtttttatagttttgtaattaaattggaaactttcttacttttttctaatgttgaacttactttgcccattgattttctcccaacttattatgaaaactgtaaactctaaaaaggatggcacaatgaacatttatat

SEQ ID NO: 465651 - DNA, 368 bp, Homo sapiens
atgtaagcagtatccttctcaactgtgatagatttcatgaatatgaccatgtccaaggtttggagttaaaattattgaattaattccatgttcagtcaaaacttgctctctgacctttgacaggttcccccacttttctccctctgatgtccttgtctacaaaatgaaaagatattgggaccacaatatcttttaattaactttaatgaattataacttacacatcataaaattaactcactttaagtatgcaatccagaaattttagtaagtttatygaattgtgtaaccatcactgtatttagttttagagcatttccatcattgcagtaagatccctcagccacagacaaccactaatctgtttt

SEQ ID NO: 465652 - DNA, 585 bp, Homo sapiens
gcgtattcctcttgattgccacagatagggagtacagacctgtttcccattttttaataaagtaatgatatgcatagggaagctaaagtgtgctaagttcctgtttgttaaaaaagratagggaatactgaataatttcagactttgttttaaaaaatataaatttaactctgtgtgaaaagaaataattcaagagaatgcttacaaattaatagaatatgtaacttccacgcctgggaaaaattaagagaataaagaaaatctcatcaatccaaatatgcagaaaaagataaaagatatatagagcctggcaaataaaaaatacaaagtaagatggaagaaaaatccagtagtgttagtagtcacaataaatgtaagtaagttaaactcactaagagactgtcagattggatttaaaatatttcggctatgctacttacaaaaaccacatttaaaatgacacagaaaggttgaaaacaagggaatagaaaaagatgcactaggccaataccaacctaaagaaaaatggtgaggcaacatcagtgtcagacaaaatatgatttaaggcagtttagtaataattag

SEQ ID NO: 465653 - DNA, 628 bp, Homo sapiens
tgctttcaagtaactctatcttatttgtgtcactatgcattaatttatccttatagttttctttttaaagaggcaggtaatctgttttctgaaaatttattccagaccttcatttattctttacatactgtacagccatttaaaatgtacagttcagtggttcacagagctatgcaaccattacaacaggccgtattagaatattttcatcatccccaaaagaaactctctactcattagcagtcattgcccattcctccttttccccagtctttggcaaccactaatctacattttgtctctgtaatggaatcatatattttttataaatggaataatatattattcagtcttttgtgactagcttctttcacttagcatgctktcaaagctcattcatatggtagcgtggtacttttccttttatggcaagtacaattttattgcttggatatgctgtattttattcatccattcatcagttaataggcatttggattgtttctaccttttgtctattttgaataatactgctatgaatattcacatatatgtttttgtgtggatatatgtttcatctctttttggcatatatatgtatccctaagagtaaaattgctggatcata

SEQ ID NO: 465654 - DNA, 566 bp, Homo sapiens
ggtgtttgctggatttctttactgtaaagttacagttttcctctttacaattactaaataccttctggaagatgcaytgaggctgttcaaatattctgtttcccatcatacttttgcccactacttttagcattcatcaatggttcttgacagcagcaattattacggtagtgtttacctagtggggattgtcttagtctgtttgtgctactataacaacaataaaaaaaaatggaggcagggtaatttttaaagaacagatacttatttctcacagttctggaaactagaagtccaagatcaaggtgttggcaggttcagtgtctggtgaaggctattctccccttccaagatgatactttgttgctacatcctccagaggggaagaacgctgctcccttttatggcggaggtacagggtaaaaagggcaaatccctttttataacatcattgatcccaatcatgagggctccaccctcatgacttaatcatctcctagagacccaccacttaatactatcacattgatcacattgatgattaagtttcagcatatgaatttgag

SEQ ID NO: 465655 - DNA, 566 bp, Homo sapiens
ggtgtttgctggatttctttactgtaaagttacagttttcctctttacaattactaaataccttctggaagatgcactgaggctgttcaaatattctgtttcccatcatacttttgcccactacttttagcattcatcaatggttcttgacagcagcaattattacggtagtgtttacctagtggggattgtcttagtctgtttgtgctactataacaacaataaaaaaaaatggaggcagggtaatttttaaagaacagatacttatttctcacagttctggaaactagaagtccaagatcaaggtgttggcaggttcagtgtctggtgaaggctattctcyccttccaagatgatactttgttgctacatcctccagaggggaagaacgctgctcccttttatggcggaggtacagggtaaaaagggcaaatccctttttataacatcattgatcccaatcatgagggctccaccctcatgacttaatcatctcctagagacccaccacttaatactatcacattgatcacattgatgattaagtttcagcatatgaatttgag

SEQ ID NO: 465656 - DNA, 650 bp, Homo sapiens
ggtaagtgtacatttaactttatatgaaactgccaaaccattttccagagtggctgtaccattttgcattttcaccagcaatgtatgaragttcgagttgctctacatctttgtcagcacttggtattgtcagtatttattttggttatttcaatagctgtgaagtggtacctcattgtagttttaatttgcatttctttaatggctaatgatgttgaacatctttcatttgcttatttgccatccttatatcctgtttgctaaagtgtctgttcaaatcttttgctgttttataattgggttgtttattttcttcctgatgacttttgagagttctttgtatattctaaacacaatcttctgttggatatgtgattttcacacattttttcccagtctgtagcttgtcttttcattctcttaacagtgtcttttgcagggcaaactttttttattgtggtaaaatatacataaaatttaccatttaaaccacttttaagtgtgtagttctatggcattaagtactttcacattgttctgcaactatcacagccatccatctccagaaatttttcatcttcccaaactgaaactctgtacttattagatactaactccccgttttctccatccccaccagcctctggcaa

SEQ ID NO: 465657 - DNA, 650 bp, Homo sapiens
ggtaagtgtacatttaactttatatgaaactgccaaaccattttccagagtggctgtaccattttgcattttcaccagcaatgtatgaaagttcgagttgctctacatctttgtcagcacttggtattgtcagtatttattttggttatttcaatagctgtgaagtggtacctcattgtagttttaatttgcatttcyttaatggctaatgatgttgaacatctttcatttgcttatttgccatccttatatcctgtttgctaaagtgtctgttcaaatcttttgctgttttataattgggttgtttattttcttcctgatgacttttgagagttctttgtatattctaaacacaatcttctgttggatatgtgattttcacacattttttcccagtctgtagcttgtcttttcattctcttaacagtgtcttttgcagggcaaactttttttattgtggtaaaatatacataaaatttaccatttaaaccacttttaagtgtgtagttctatggcattaagtactttcacattgttctgcaactatcacagccatccatctccagaaatttttcatcttcccaaactgaaactctgtacttattagatactaactccccgttttctccatccccaccagcctctggcaa

SEQ ID NO: 465658 - DNA, 561 bp, Homo sapiens
tgtcttttgcagggcaaactttttttattgtggtaaaatatacataaaatttaccatttaaaccacttttaagtgtgtagttctatggcattaagtactttcacattgttctgcaactatcacagccatccatctccagaaatttttcatcttcccaaactgaaactctgtacttattagatactaactccccgttttctccatccccaccagcctctggcaaccaccatcctactttctgtttctatgaatttgactactctcagtatataagtggaatcatacaatatttgtccttttgtgactggctttagttagcataatatcttcaagattcatctaagttgtagcatgtgtcaraattttctttttaaggtggaataatatcccattgtatgtatatagcacattttgtttatcaattgatggatgcttaagttgtttccatgttttagcttttgtgaataatgctgctacgaacatgggtatacaaatatctgtttgaatacctgctttcaattattgtaggtatatactcagaaatggaattgctggatcaca

SEQ ID NO: 465659 - DNA, 564 bp, Homo sapiens
gctttccctccattcttagtgtgggaaatcagtcttgatccttcgggcaagaagtacatgttttttgttttttgttttttgtgttttttttgtaaacaatataatcttaacagaaactgaagtccagagaagttaggtcactggcatgagggtttcaaagcgtatctgacgtgataccatatagattgcaagacagttcagagttgggagtctaaggaattacaggagaaatcttagggaatgtcaaagtcagctacagtcttcccctctctttggtgtttgtgagtgtttatgaaattccttttcattcaattcttatgtcatgctgagtcataaaaagaagtgttcttcagtgcaacacatctctggaggccgcttaagccagcctctgtgttagtcatcactatattcacaggcttggagccagtgccattcacacttccccctcttctgcagcagacggactgagttcctctaatccctstgttccttctcccccatctttctaaaacccttctctgagagaggaataactatagcttcagggataatatagctttaagg

SEQ ID NO: 465660 - DNA, 581 bp, Homo sapiens
aaatccagccaaagaccacaggactaaaggagtggagattagatggctcgaagcccaattctgaacacctgtatgaaacctcatggcatgcaaaggtctttacctttcccaaaacagaagcctgagctgttggaggcgtgagcacagagcagttttttaaaagttagattcagttgaggttctcaaagggctatttgcaaaggtggaacaccccacttccacgtgaatcacaagtcaccactcctgagaagctcagattggtgaggcctctgccagccctgcaattccactcattcttccctcttctatccttaggaggccacatgatgagagacatttcccctacactgctagctcagctgttgggcttgccttcatgcctttgttcattcattccttcaacaaatatttattgaggrctctttatgcatccaggacagttttgtttacttgtacagccttgtcttcaaatgggcatggcacagaatagcagccaaatgtggatccagggctaatcagaaaaagggtccaggaataatcagcagtggctgggaaaagttaagaatataaataaagcaaag

SEQ ID NO: 465661 - DNA, 492 bp, Homo sapiens
gaagccagaagaagaactgaaatgggaaaacagaaaaaaagaaaaaggggaaaaagaaaaaatgaactctttcctctggaatgagggcaaaccaacgaggacatgatttcataaggcaaactttcaattgattcattcccttgttcaccaagttggactggtttcccaatacctcacctcccccacccctagtctgggcctgtggggaatggaggagcttcatcatctggccctctgctcygcccttcagtgcagggggccctgtgcctcttcccaagaggaggaggcgagcttgtggcctgagtatttacacaggccaaagggctccagcactaaaacccagccctgtcctggaagcacaccctctcctggaaatagggaattgtctcttgactccaaaacagctggctaccctattcctgtgcgtgcattagggctcagggaggctggaaggagggcttccggaaacttcactccggaaaggaccaagtt

SEQ ID NO: 465662 - DNA, 492 bp, Homo sapiens
gaagccagaagaagaactgaaatgggaaaacagaaaaaaagaaaaaggggaaaaagaaaaaatgaactctttcctctggaatgagggcaaaccaacgaggacatgatttcataaggcaaactttcaattgattcattcccttgttcaccaagttggactggtttcccaatacctcacctcccccacccctagtctgggcctgtggggaatggaggagcttcatcatctggccctctgctctgcccttcagtgcagggggccctgtgcctcttcccaagaggaggaggcgagcttgtggcctgagtatttacacaggccaaagggctccagcactaaaacccagccctgtcctggaagcacaccctctcctggaaatagggaattgtctcttgactccaaaacagctggctaccctattcctgtgcrtgcattagggctcagggaggctggaaggagggcttccggaaacttcactccggaaaggaccaagtt

SEQ ID NO: 465663 - DNA, 530 bp, Homo sapiens
tcattggtcaaaggcctgggaccccatgcgttttggggaactcttacctaatccttttctcatctgctttccggacctcttcatctcgctgtagaacactgagaatcaaatccttttcctcctcagacagaaaagaaaggtccagtaactccgacatgatttactcaactttttcttctactcttctttcttcaaaacaaccagacaaggagagctaccagagttgcctgaaatgacaaaagaactaatttcacacagatgatttactcaagaataggcccacagccctaaaccctttcaataggttcctttccccttgagccaagctaaagagacaaagtagaagtatctgacctatttastcttcctactcccatccgaaacatgccctgaaaatgaagagtccttgatttttcagaaagaaaaagttattcgtgactctgggaaaaggattggttattcagtatatgcatcttagtctggaaagaacatagaacagctgagtcaatctccccctccaccaagtgagt

SEQ ID NO: 465664 - DNA, 562 bp, Homo sapiens
cagtttggcattcactccaagtccagttaaccctctgtttgagtctcctcacttgagtaggacgcatctgcctttggtatatttccatctaggggcactgtagttcaataggatcttgcctgggctgggaatcagaagatgtgaacttgttcaatttttttttttaaatgactgtggcagttatctcactattccttggtttctcatttgcaaaattatatttcattatgataataatatactatgataaatatgatatatccaacatataggcctttttttttttgagatggagtctcactctgtcacccaagctagagtgcagtggcgcgatctcggctcactgaaaactcctcctcccgggttcaagcaattcacctgcctcagcctcccgaatagctgagattacagrcgctagccaccaagcccggctaatttttgtatttttcatagagatggggtttcaccatgttggccaggctggtctcgaattcctgacctcgtgatccacctgcctcggcctcccaaagtgctgggattacaggcgtgaaccaccgcgccc

SEQ ID NO: 465665 - DNA, 570 bp, Homo sapiens
gtgctcaagaatgactgaaggcatgtcaaaagaacatataaatcatcttaaagtgaatccctttggccaaattagtgacaatttgaggatcagattaatgatagtaacaagttattgawtaaaataaggaactatgagtccatactggtacagatactgctagacttcccatgggtttacaccccgataaacccattgtacactgaaaatatcatgggtcaaaaatacatttaatacactgaatctagcaaaatcatagcttagcctagcctactttaaatgtgctcagaacacttacactagcctatagttgggcaaaatcatgtaacacaaagcctattttataataaagcattgaatattgtacacaattgggcattttatagacaataagatgtgaaaacacaaaacacaatattcatgtaatgttttcaacgtagtccactgtaaaatattggttgcttaccctcgtgatctcatggctgactgggagctgccatagtccagcattgcagaagagtactatactgcatttcactagcctggaaaaagattaaaattcaaaatttg

SEQ ID NO: 465666 - DNA, 570 bp, Homo sapiens
gtgctcaagaatgactgaaggcatgtcaaaagaacatataaatcatcttaaagtgaatccctttggccaaattagtgacaatttgaggatcagattaatgatagtaacaagttattgaataaaataaggaactatgagtccatactggtacagatactgctagacttcccatgggtttacaccccgataaacccattgtacactgaaaatatcatgggtcaaaaatacatttaatacactgaatctagcaaaatcatagcttagcctagcctactttaaatgtgctcagaacacttacactagcctatagttgggcaaaatcatgtaacacaaagcctattttataataaagcattgaatattgtacacaattgggcattttatagacaataagatgtgaaaacacaaaacacaatattcaygtaatgttttcaacgtagtccactgtaaaatattggttgcttaccctcgtgatctcatggctgactgggagctgccatagtccagcattgcagaagagtactatactgcatttcactagcctggaaaaagattaaaattcaaaatttg

SEQ ID NO: 465667 - DNA, 570 bp, Homo sapiens
gtgctcaagaatgactgaaggcatgtcaaaagaacatataaatcatcttaaagtgaatccctttggccaaattagtgacaatttgaggatcagattaatgatagtaacaagttattgaataaaataaggaactatgagtccatactggtacagatactgctagacttcccatgggtttacaccccgataaacccattgtacactgaaaatatcatgggtcaaaaatacatttaatacactgaatctagcaaaatcatagcttagcctagcctactttaaatgtgctcagaacacttacactagcctatagttgggcaaaatcatgtaacacaaagcctattttataataaagcattgaatattgtacacaattgggcattttatagacaataagatgtgaaaacacaaaacacaatattcatgtaatgttttcaacgyagtccactgtaaaatattggttgcttaccctcgtgatctcatggctgactgggagctgccatagtccagcattgcagaagagtactatactgcatttcactagcctggaaaaagattaaaattcaaaatttg

SEQ ID NO: 465668 - DNA, 633 bp, Homo sapiens
accttttctgctcttgtttttaaatgctagataagatttttaaagtgatttatgtatctacattaaaatactacctacaggattctacatttatctacatattaacctttaccaagkaattttatatttttgtatggtttcacattgctgtttattgtcttttttcttcaacttgacagactttcttcagcatttcttataggacaggtctagtgtgattaactccctcagcttttgtttatctcagaaactcttcattttgcctccatttttgaaggacagttttgccagatataatattattgagtagcagttttttatttcagaattttgaatacatcagttctatcctgcaaggtttctgctgaaaaatctgttgacgatctattagaagcgcacttttaaatgacaagttgtttttcttttgctgcttacaagattctctctttgcctgtgactttttatagtttgattataatgtgcctcagtataggtctctctatatttatcctagttgaatttctttgagcttcttgaatatgtatgtctttctctcctctgatatgggaagttttcagccattagttcttcaaacagttcttcaaattctctgctccttcctcttttttttcc

SEQ ID NO: 465669 - DNA, 633 bp, Homo sapiens
accttttctgctcttgtttttaaatgctagataagatttttaaagtgatttatgtatctacattaaaatactacctacaggattctacatttatctacatattaacctttaccaaggaattttatatttttgtatggtttcacattgctgtttattgtcttttttcttcaacttgacagactttcttcagcatttcttataggacaggtctagtgtgattaactccctcagcttttgtttatctcagaaactcttcattttgcctccatttttgaaggacagttttgccagatataatattattgagtagcagttttttatttcagaattttgaatacatcagttctatcctgcaaggtttctgctgaaaaatctgttgacgatckattagaagcgcacttttaaatgacaagttgtttttcttttgctgcttacaagattctctctttgcctgtgactttttatagtttgattataatgtgcctcagtataggtctctctatatttatcctagttgaatttctttgagcttcttgaatatgtatgtctttctctcctctgatatgggaagttttcagccattagttcttcaaacagttcttcaaattctctgctccttcctcttttttttcc

SEQ ID NO: 465670 - DNA, 594 bp, Homo sapiens
cacctggtctagagtgtagtttagctctgatttttttgctgatgtttctgtctggacaatctgtccattgctgaaagtggtctgttaaaagtccgctagtattattatattgtagtctatctctacctttagatccatcaatatttgctatacatatttgggtgttcaggtgttaggtgcatatatatttacaattgttatatactcttgctgaattgacctatttatcktcatacgatgactttgtctctttttgctgtttttgacttaaagtctgttttatctgatataaatatagctactcctgctctcttttaatttacatttgcaggaagtatcctcttttcatcccttcactttcagtctatgtgtgtccttacatatgaggtgagcctcttgttggacacatatatacaggtcttgtttttttatcatccagtcattgtatgtcttttaattgaagaatttaattcgtatacattcaagattattattgataggtatgaacttactcttgccattttgttcattgttttctagaggttttttttttcaactttttagagtcggggtacatgtacatatttgttacaa

SEQ ID NO: 465671 - DNA, 405 bp, Homo sapiens
tgtgtttgtccagactgccatctctgttttggatggatttcaggagcttagaatgtgtcacatcttgtcagtaccttgagaccagcaaggttctttaaatatagctggtaaggttggggtattgggctagtagtgggattgctggatcaaatggtagttctacttttagttctttaaggaatctccacactgttttccatagcagctgtactagtttacattcccaccagcagtgtagragcattccctgatcaccgcatccatgcgaacatctactgtttattgatgttttgattatggccattcttgaaggactaaggtggtatcacattgtggttttgatttacatttccctgattattagtgatgttgagcattttttcatatgtttgttggccatttgta

SEQ ID NO: 465672 - DNA, 589 bp, Homo sapiens
tattgtacagaataagtgtgaatttaaaaagatatagcatttggaagtaaattgtacactgtgacataaatgtcagttgctaattttattattgtgctactctttatctctggagtaaagttttctcctttttttcagttagatagatcatggaacatgatgctcttggcagaacaccaaatatgaactttcctataaaaatcagaaaacagagtaattgggttaagcaaaatctttcaatttgggtgttactagtttagacttcatgataactcaaaataattttatcaaatttaaaaaaagatacgttaaattgggtttgtcacataatcatggaagyttttggctgatatagatttcaaaaaattatccagtgcttaaatcttttataatatccctattgagtatttacagagccagctttgcttaattcctgtgatgtgtcctttggaagcatgtgtgccctatgctaggaacatttaaaaaagcaattcagcaacctttgtatgtgaattacaaattattctcattcactcattaaagcagggcagggcagcatgctttccactaggcaagacttacttaattt

SEQ ID NO: 465673 - DNA, 391 bp, Homo sapiens
aaaaagtgtttttaaatggcctgtaaaaataatccaataaaggcctcagaggtgtgagctgttgtcatcatcctgtttggaaaacgtcactcagaatgcaccctaaagtgagggagggaggttgtgatgccttaaaaaaaattaatttgtgaaatgaacctgcaggattagttgtccgcctttgtgcccagctttaatatgtcctcaaccagggaaatccgaggctttggattattagccgggttggatcacgttaccctgtttggctctgyagaaatcacacttttcattttgcctttaatcctaaaggtcaccgggaaggtcagccccaaacacaaatgatactttgtggtcttactttcagacaattatcaactcataaatcttggtc

SEQ ID NO: 465674 - DNA, 607 bp, Homo sapiens
ttaaaagtctgttttagggtttgttagatttcctcacatagacagtaagctcctgaataaccacataagttcatcttgcacagcagcagcgctatcagcttttgaacactcactatgtaaaattcactttatcctaatcctcccaacaaatggaagggatggtactgctttcttcatctttcacactgaaaaagctaaagactaggaaagttaagcaactagtccaactgcatataaaaactaaggtgtgaattctggtgtttagaggcaatactcattttacttactctcattcccctgcttattggtagttcccactgccaaagtaaattayacatagtaggtgctgaaccaagctgatggattctattattttaggatgccattaccctaaatgattctggttaattcagcagttgtccattatctatgctcaaattaatgatgtagttttctatttatagggatgggggaagtaactacttccttgtcaaattaccaaagcactaataatatttttttttaattgaaaagaggccttctaaaaggaaggtataaaatctgccatcatctgcattgaaaggttaaaaaaaattcctttgcaaaa

SEQ ID NO: 465675 - DNA, 488 bp, Homo sapiens
tgatacctctcaaaagtttaggcattaataaactaaagtcagtcattatgtaagtactgttcatagggatgcatagaggctttgaatgagaattttggaagacagaaagggaaaacaggtatgaatattttgggaaatgatgtgccagtgggttctgtgggctcacagatttgaggcattctgatccagtctgacatccttactttacacagaggaaacaaaaaaacagacaagctaagtaaaatcacacagcatgttagtgacaaaaggaagttttgatacaaycaatgtccttccacatttaggtagagatcagtttctctgacagattcccagagcacagctcagttccttcatagtcaaagagctctttacccacactgtgctttgagaggaagtcccacttacctccaaatatgcctattacaagattaatgaattattctgggccatcaaatcacttctctgaggttaatgaattaaacact

SEQ ID NO: 465676 - DNA, 578 bp, Homo sapiens
acatgtaggtcacaatttgagatgagatttgggcagggacatagagccaaaccataacactataattcctagagcaatcacttgaaaagactaaagaaattgctagagtttgaatatggtttgtttgcctccatcagatttcacgtgtgtttattattttcccaaaccgaaactccatacccacattaaatgataatttaccacccctcctcctttctcctagtcactggcaactaccattctactttctgtttttatgaattgagttgctctgggtatttcatataagataaatcatacagcttttgtcctttcatgactggtttatttcacttcgagtaatattttcaaagtccatctatgttatagcatgtatcagaatttccttcttttttaaggcagaataatattccaatgtatgtatatacatgtgtttaccatttatctgttgataaatatttgggttgcttccaccatttggctattgtgaataatgctgctatgaacatggctgtacyagtatctgttcaagtcactgcattcaaatcttttgggtatatactcagaagggaaattat

SEQ ID NO: 465677 - DNA, 474 bp, Homo sapiens
gtccatcaggcagcactctttccctttagctccttttcaatctggtgagctttgcttttttatatgctttacacattggctttctyttcagattttagctaaagaaaatgggctcttctactaatataaacaatatacattttttattagccaaaaggaaaagaaaataggcttacatgattttcagcctccacagaaatgtcatagatggatctttctaagcaattcgtggtaagagatgtaactatgaaaatgttaagatgtttgccttccctttgttacctaattgtccttttgagctccctgacaccctcaattttttccacactatcactggcaaagttcctcagtaccactgttcctctctgggtttttcatcattcttctcttggaaatcatgccaacctatagttattatacactagagcttccttttcatctgtaggggtctgtatacacagttctgttccagtt

SEQ ID NO: 465678 - DNA, 600 bp, Homo sapiens
gatacaacattctcacacagatctggcccacacagccatttcaagctttggctttcccctctttgaatgtgttaatcttctgaccttcgtccatccttgtctcccactaattactttaaatgacatcattttttttgtataaatctaaatgcaatactaaaagtggataaccagtttagtgccttctgtttttttccaattagttccctaatattagatactccctggtggaatgcaacaaataaacacagtgcaattactatagtggaaagaaatataacaataattatttttaatctgtaattttcatccttttcaaactcctttccttgtaagcatacaattccaaccaaatatacttgctttattcatataagcaaagaacatgatgaaacatccctctttgttactatcttrgcaatatttcatcttttttatagtaagcaatgctgattttccattttatcaaagattaacctatgcaaatcacaagtgtatttattacttttcataaaattaacatggtcatgtaactaccaccaaatgaagaaattcatcattgccagcactccaaaagtcttcctgtccccccttcccaag

SEQ ID NO: 465679 - DNA, 540 bp, Homo sapiens
ttatggtagagattcattattcagcagcacccttgctagatagcacaattttaatttgaaaatagcctcagtccatactttttttttttaggtacaattgccttaagtcgttccagattgattcactctatttcctatttttaagcattcaccgggaacaaaatttccattttcttttttccaaaatttagaattaccatctttgcagctcttatttcaagaaaactcttctttgcactaagtcaaatcctttgtgcagagatgtagtcaagcacgcaaagcaagayatgtactgtgccaaagaacctttaacctggcactagtaattagcaggcagaagaggtaataagtagccacttaacattaagaggtgggggcccaagcacaacaaagtgaggaaagtaattttattcatcaggataggctagttgcactatggtaattgacaatccaaaaatctgggtggattaaaacaataaatgtttatttcttactcatgctgcatttatatcaaaggttggtggaagttagggtatgttg

SEQ ID NO: 465680 - DNA, 570 bp, Homo sapiens
gccaaatttctactttaaaggaacatcctttattttgagatcatttgcatactccattttttgttccagattttcttaaatttgctktaatttattaaaagttaaactccaaagtctttccatggtcattcctgaacaattactatccagtgtgtttcctgaactccttttagacaggattcccaactttcccctgacctaattgagcagaaccttcacatcctatcaaagtcccacccctcaagtatttcttggaggccctgggatgtatttaacgatgccatccccattgaatctttggtgctgcacaccaagcctgagaattattgtccaggttccactcccactaccatgagagggctgctcctgtctgttctcacagatgctgcagtttcctgctggcccctcattggcatccaccaatgtcaagttgggaaaactgccctctcttcttcttgtttctttccaagatggcccaaagcagccttatttcaggctcatgtctttcatttgggttcaaatacagcctctgtggtagactcacatgtttactctcctactgtggttgaa

SEQ ID NO: 465681 - DNA, 653 bp, Homo sapiens
cagagtatattgacaatggttaacagtaaaagatggtatattaaaaatagctagaagggaggctttgaatattctcatcacaaagaaatctaaatgcatgagatgatggatacactaacctcacaacacatgtatgtatggaaatgtcaaattgtaccccagaaatagatacaatcatgtgcccagttaaaataatgaatcatttttaagttagaccacttaaacaaaccaaaaaaaaccctctatttactacaaaataaaatttaaacttgtcaatatgagatttgtttactcctccctaaaagatagtctaatttatatgtaatgtaataaggtttaattaatccatagaataatgtttgataggaggaaaaggggtcaatgtttgaacatacatgtgcttgctttaccttcttcatgcctttagtctttctgaaaaacataaaaagcagatgcctgattaaggcagtaaaatatcttcatgataaaaaaatggacagagagctcctggatcagtatttgactcatttacttatttcctccgagttcagtagtttcatgtttatatattcaggcttcctttggcccagccgtttctttgctttggctttgttttacmtaggcaactgtccagatgatgttagccaaaatcc

SEQ ID NO: 465682 - DNA, 495 bp, Homo sapiens
aacttgctgtctaagctttacagttttgatttcctcagcatgacagtatggctgcccatgggcgctgggagaatatgtctctttgtttacaccttgcaagggagacagaaggagagagtaagagagagagagagagagagagagagagagrgagagaatatgaatcttctcttcagagaagatctgagcaaacctctcttctagttgcattagcccaaagagtctaggctgacccaaccaagctccagtccctggacagaggagagtagtatttgatagccatcaattgatagatgaattacctgaggctaaataaaatcagtaacaagattactattataccaaatatggaactaaatctgcattaaagagtcaaatataaagacaagttgaataaatcatactggaactgaagaatgtaattgactgcaatggaattcagtgagggataattaatatttagcccctgttcaattagaattaaataaatattat

SEQ ID NO: 465683 - DNA, 609 bp, Homo sapiens
ataaaatcagtaacaagattactattataccaaatatggaactaaatctgcattaaagagtcaaatataaasacaagttgaataaatcatactggaactgaagaatgtaattgactgcaatggaattcagtgagggataattaatatttagcccctgttcaattagaattaaataaatattatgcaactgacatggatttagttgtattcacaatgattttaatactatcttaaagagtttatctgattaattcttgtattattaagcttagtataaattttctaaaggaaatgctgttctattttttaaaaatgataccattaagtaatctgaagaagattatagtaaaaaaaacccaaaaaacctccttattccactgaggcagtttaacgtaatgaatcatcagtttcaaaaattataaagaatttgatttaaccatgctcaaaacatttttttaatatcttaattatcaagaggttaagggtgtcagagggaacagtatatgacttattgcatattcatttcccataatacctgaacatgtattatgttctagaccatgtaacagcataaaacacctagaaaggcaaagatttgaaatgtattca

SEQ ID NO: 465684 - DNA, 512 bp, Homo sapiens
agtttgcagtgatcacgccactgcactccagcctgggtgacggagtaagactcaatctcaaaaaaaaaaaaaaaaaaktatgcatgggaacacagaatcaaattctaaacctgtcatcaatatactttttaagccattttttgtagaccatacactttgtaaactgcacactgtatgagcatttgtagtgtatgctctggttagtctcagatttatgactttttcccagcttaattattaatagcaccctcttcattttcaaaagtgtcttggtgaggatagtaaattagattattgccatagcatcagggaagaaatttaaagtatctttgaaaggaatgagcaggaagattggggtagaaaaaatagaatttttgctgaagacaatttaaaagaaatttcatggttctgtttgataaatactaagaaattaaaataaagaagcatgaattctagaaaattcgatgttttaagaaaatattaaagtgataccactttggggcaagttaaag

SEQ ID NO: 465685 - DNA, 512 bp, Homo sapiens
agtttgcagtgatcacgccactgcactccagcctgggtgacggagtaagactcaatctcaaaaaaaaaaaaaaaaaagtatgcatgggaacacagaatcaaattctaaacctgtcatcaatatactttttaagccattttttgtagaccatacactttgtraactgcacactgtatgagcatttgtagtgtatgctctggttagtctcagatttatgactttttcccagcttaattattaatagcaccctcttcattttcaaaagtgtcttggtgaggatagtaaattagattattgccatagcatcagggaagaaatttaaagtatctttgaaaggaatgagcaggaagattggggtagaaaaaatagaatttttgctgaagacaatttaaaagaaatttcatggttctgtttgataaatactaagaaattaaaataaagaagcatgaattctagaaaattcgatgttttaagaaaatattaaagtgataccactttggggcaagttaaag

SEQ ID NO: 465686 - DNA, 620 bp, Homo sapiens
cagctgtttttgatgtcttaagctactctttctagccatctgttgattttttttttcttttataaaaatagactgaacctatacacacagcatttgggtaaaataattattttgactttatgttgattatatgtgaagagaatttaggcttcatatttaataagcacatcaggaatattcgttctcagcaaccaccagacaatggtgtgaattttgtatgactgttttctttaccctttctgtgcagacagcattattcactataagcaccattaaagaaccaagtgtcaatgaacccagcagtgaactgacagttacttaaacagcacatgatccaaagctgtttgaggaatgccaaatgcatctttcttcaacaagttcatttcatccaagggaaaacatcatttcgtttaaagatttatatttatgaacatgttatgaatgttctggatgttccctgtaatgttttatgaaagatacagatgcatttccaagaatcaygaagcaagccggctggccatggagacagtttggaccttagtgggcagattcaagggatggaaggagttggctgagccctggagagagattatactcgcttggcagtgggtctgctgatc

SEQ ID NO: 465687 - DNA, 571 bp, Homo sapiens
aatggattttattgataatgttatgaaatctttagcctgtttttcataaaaattctccagccttatttcccattattttctctcacttctcaatggtctcactacttttctgcctcacaccaggatggcaacttccctttctcttctctctaacacccacttcacaccaactgtacattttctaatattactccatcttcctcaacatagccttcaatccctctctcacatcagagttaagcaaagcttcccagaatggttgcacgttatgcccygacaagtgccggcttgtcctccactcccaacactgtgccccaggtaggaggctacaacctcaagagaaaggggtgcctcttcttctctacacaattctatgcttatacatctattttctaacaatcttctcaaaattatgcacacagcattcacttacaagtcttaagcaatacagaatcacatacatgtatgtagcctatttttaaatactaaacatctcattagttaatttttgtaataagacgcattatgaagatgaaaataatacctaattcatcttagattttacattaac

SEQ ID NO: 465688 - DNA, 593 bp, Homo sapiens
aaaattttaccatgggatcatgataatacatgcctatagttccagctgctctggaggctaaaggagaaggattgcttaagcccaggagttagagactagcctgagtgagcaacayagtgcacagtaaaaccccatctctttttattattattactttttatttgaagttcaggggtacaagtgtaggtttgttacacagctaaacttgtgtcacaggggtttgttttacagattatttcatcacccggattttaagtctagcatccattagttatttttcctgatcttctccctcctcccaccctcaaccctctgaaaagccccattgtgtgttgttcccctctatgtgttcatgtaatctcatcatttagctcctacttataagtgagaacatgcagtatttagttttctgttcatgccttagtatgctaagaataatggcctccagctctatccatctccctgcaaataacacaatctcattcttttttatggctgcatggtattccgtggttatatgcatcacattttctttagccagtctatcactgatgggcatttaagttgattatatgtctttgctattgtgaata

SEQ ID NO: 465689 - DNA, 593 bp, Homo sapiens
aaaattttaccatgggatcatgataatacatgcctatagttccagctgctctggaggctaaaggagaaggattgcttaagcccaggagttagagactagcctgagtgagcaacatagtgcacagtaaaaccccatctctttttattattattactttttatttgaagttcaggggtacaagtgtaggtttgttacacagstaaacttgtgtcacaggggtttgttttacagattatttcatcacccggattttaagtctagcatccattagttatttttcctgatcttctccctcctcccaccctcaaccctctgaaaagccccattgtgtgttgttcccctctatgtgttcatgtaatctcatcatttagctcctacttataagtgagaacatgcagtatttagttttctgttcatgccttagtatgctaagaataatggcctccagctctatccatctccctgcaaataacacaatctcattcttttttatggctgcatggtattccgtggttatatgcatcacattttctttagccagtctatcactgatgggcatttaagttgattatatgtctttgctattgtgaata

SEQ ID NO: 465690 - DNA, 606 bp, Homo sapiens
aatctaaacacttataccagatatcttcagatttgggttgtgctaacattatttccatttgtaaatcttcaggcaagcttcagagcatagagaaaagatagttttgattttcgttatgaaaaggaatttcgagtttgtcaaagacaagggaaatcataggggacatatacttggacccgattcactcaaaaaccagtaaaatattatacagaagagcagaagaaaagaaattaaaggagcctggattctgatcatggctcatagccttcaaagtaactacctgctgggcttcagttttcatctataaaacaaggtaatagactgactaatctctagggtctttccatcagcaayagaaatctgattctacgaaatgttcagaccttctaaaatctgaaagactagcataacaaaaatgataccaagttttattgaatttcaggttttattataataaccttattgtttatcatgtctgttatgtcaattttaaaaatattctaaaataaattaagatggaagatatcatatttaaatagtcttgaaatatgtctctaaatgttaattagagcttttcttaatgccaccatttagcgttattacaat

SEQ ID NO: 465691 - DNA, 569 bp, Homo sapiens
ggggctctcatatttctgtctcctgtaatgagaagaaggagagagcaaagaaaggaaaaaagaagataaagtgactaaatttctcccaagttagccatcaattcttccctaaaggaataaaaacagaaactaaaagccaaggagttgcctctttggggtcagggtagaggcaggggcccaggaccagccttggtcttgaaccaagaatccaaaaaggtaaacagaaacactttgcccacttttcatgccatgtggtgtgaaaggtttagcaatgcctgctataataaaggcaaaagtctcttactttcaaatttgaaggaaaaacaatyaaggactaattctcagggttacccaaatcctttttaagtcatttccagcttaagtataaataaaattctggtaggattttatcttttagaaaattttcataaatgctatggaaaatatatccaacttactagagtttcaccaacaaaacacaggtctttgttccatgcacttgattttctcatgagttaaatgtagataatttgacatataagcggtattatggaagtatgtatatacgc

SEQ ID NO: 465692 - DNA, 609 bp, Homo sapiens
ttaattttttttaaatcaaggaaagtaaactaggtacatttttggaaacaggtagcttaattgataaaatattaatttattaaattattctaacttaaatttctgaaattagtgctcagcaaatatyccatgtgctctcctacatttcctatcatctcctgcagttgcctggtcctggccaatggcaacaataatgtatgttaattctacctgctctttccctctcttccccagctgtggccatgtgtttcagggatcactgcttcaagatagaagagggccacctgattcacactgaactatgctagtgagaaagttgtatcatgctaggttactgagaagtgaaagttgtttgtcttaatttttctaacaaaaacacactgctaatttagtggagatatttggactaaattatggaatagatcttctaaaatgtaccgctctattttcccatataaaaaaaaaaagtcctcagagtttagtgctaacagaaggcacccacaccaaaggaagaggtaaggactgtttttggaacaatggcttaaatgggaggagggaattttccaaagaccatatgccatagttgccctataacttaggtcactgaag

SEQ ID NO: 465693 - DNA, 654 bp, Homo sapiens
agctcaactcttattttattactaaaccattttatttccttgaagttgcttaaattaatttttaattaaaatttaattatatccaaatacagataaaaacaacaagatcaagcataggaatcttgaattaatactataataaaggctgactctttttctcctaaaatgtcatttaaaatatatttattttatcggctaaaaatttagtttattatacttttaatatgtctatacactgtcatgtcatttagtgttcttgagggttgtaaaataattttaattatattatcacatataactaatattcaccttgctcttcagtgtrtcacttccagagttctaattaaccctggtatttactttgcatgtacttatttatagattcatgtacatagaaaaacatcagagggtttcaaactctaagactgaaatttgtcaccacttttgtcaaagtcattaacttgttcattagcattcatgcttctactgcaggcaaacctaaaactacagagaattcatcagccttgggatagcaactctattgttaaaaattccttactattggaatattattttaaaaatgtttactgaaatctgcctttatgtaactttcacacatcactcctataactttgctcttgaaaagctgcatag

SEQ ID NO: 465694 - DNA, 545 bp, Homo sapiens
tcatgcttctttccccttcttagccaagctccttgaaagatttacatgcaacaactatttgtttttattcatctttctcccattctacccattccaatctagtgctgaccccataaatttgtagaaaaagcctttcctgaagttaccagtgatctccttgttaccgaatacaatagctctttcgtagttctcatcctatttgatgtctctgcagaattcattttaaaaaattgattcaggtaaaatttaaatacagtgaaatgcacacgtagtaagtaaacagtttggtcagttttgacaaatgcatacatatgtataatacatacctctatcaatatttaagatatttacaaccctccagaaagtcacctcctacccctttccagccagtccttcacccttgccaccayagaggagcctaccaatctcatatccaccaccatagattagctttccctattttggagcttcatatgaatggaatcaatcatgcagtctgcctgatttgtgtctggcttttcctatctaccataatgtttttgaga

SEQ ID NO: 465695 - DNA, 597 bp, Homo sapiens
atttagtagggatgaaaggttgtgaatatgtatatagtgcttggaaaatagaaggaactccattcattcattctttcggtatttcccaaacacctgctttgtgtgaggtgctgagggtgatatggtagggaaaaaagcatataagggccctacagaggactgacaaaactatggcctacragccaaatttagccaaatgactgttttttttttttttttttttttgtaaataatgtttcattggagcacagccacaccaattgttttatgtattgtcgacagctgctttcatgctataggggtagagttgagcagatgcaacagaagccatatgtctcataaagcctaaaatatttacaatctgcctctttatagaaaaaagtttgttgacccttgctctagatgctgacaatgaaattggagaaaataggcataaataaataaacacacaagaacaattagtgtgtaataattactccagaaaaaacttgccagatataataaagcctaactgttgggaaaataggtagccatggaaatcttaagaaggggtcctgtagggcagagttttgaaggataaaaaggaactagcctaag

SEQ ID NO: 465696 - DNA, 618 bp, Homo sapiens
atgtaattgtggagctgaatcacctgctggccagctgacaatgaagaacctatcactaattgtaggcagaatatgtatagcccctgccatttagcaataatgcaattgttacaatttgtattggtagtgagctgggatgggacaccaacagacaggacttcacttatgagtgcaatatcccaggcatttgagaggcacgggagaagtataactatgaagactatggaatcggatggtttctgttaggtttcactgatgcattggagaaagacattgagtgccttagggtgattaatcaccaataatgtctaggtgtaaaagtcaaaggacctccttggtggctgatatagtttgaatgtgytctttccaaaattcaggtgttgccagtgtgatagtattaagaggtgggcctttacgaggtgattagccatgaggattttgtcttcgttaatgggatcaaagttcatagaaaagaagctacacctaacattcagttagcttgtccttccccttccaccttttgccctgtaaagacacaacattcctctcctctgtaggatgcagcaataatgcaccatcttaaaagcagaaaccagccctcaccagacaaccaaacct

SEQ ID NO: 465697 - DNA, 579 bp, Homo sapiens
agtaaccctgctccaccaagatcagagcttgagttgagaaggctcggaaccttgagacatgggataagaatatgtaagtctatgcattcagaaaggttaaatacccagattaccttgaactctctcagccaaaatagctcattcctttgtgttaaaggctaggtgtcctcatctgaagacagattcagtattctcataagatattacctcacctttctttctgaccacctgaccaatggtaactatggttaagtcataatataacccagccagagtaatgctgagcctatttacagagaacagggactatactctgaaggaatgctaggaccttgccagcaggtatcagtaggagttgagaagtacttacagtcctggatcctgaatgtactagatcaagagagactggaaataaagttacatagtggaatgtttatcaatgtggatatagaagcacttcctcatgatacaggatgcacatcctcacaaggattctgggagacagtggtgacacattcctgggattactcttggaaacrtggagaagtgtcagaccacaataagtgaattagaaatgcc

SEQ ID NO: 465698 - DNA, 601 bp, Homo sapiens
agggatctaatggaaaaagtagacaacatgcaagaacaagtgggtagcataagcacagagatgaaacctctaataaaaaatgatagatatcaaagacactaacagtaatgataatcagaatatctaagcactgtggaacaatttcaaaacctgtaatatgtgcataaatattagaagcagaagaaagagcagagcagaagacatttttaaggaaaaacggctgagaactttacaaaaattgatgacaaacatcaaaccacagatccaggaggctcagagaacgccaagaagagtaaataatgattaaaaaacctattctttggtttatcatattcaaactatagacaaccaaaaacacataaggatgagaattacagygaacttctcctcagaaaacatgtaagcaagaagagagtgtaatgaaattcttaaagtgttaaaagaaaaaatgctaccaacataggattctatatctagtaaaactatccttcaaaagtgaaggagaaattaagactctctcaaacaaacattgagggaattcatttccataggcatgttctgtaagatatgttaaaaaaatattcttcaagaagaaggaaat

SEQ ID NO: 465699 - DNA, 608 bp, Homo sapiens
gccttataaatcactaataagattttaatgcagaatattcttctgttccaccccccagaggtctgtggtcaatgataaaaacaacaataatattttccacttttttttttttttttgagacggagtctcgctctgtctcccaggctggagtgcagtggcgtgatctctgcttactgcaagctccgcctccggggttcacaccattctcctgcctcagcctcccgagtagctgggactacaggcacccgccaccacgcccagctaattttttgtatttttagtagagacggggtttcacygtgttagccaggatggtctcgatctcctgacctcatgatcttcccgcctcagcctcccaaagtgccaggattacaggcgtgagccaccacgcctggcctccacttttttttttttaagtccttgttttcaaataactttttgatttgggccaatctttgcaaaagttttatatatatatatatgtacacacacacacatatatatatacaccagtgttaaatcaaatgaagagttttactttcacttcctaaagggccttcataaaccactctgattctctttaaaatcagcaaggaatgcaattaact

SEQ ID NO: 465700 - DNA, 608 bp, Homo sapiens
gccttataaatcactaataagattttaatgcagaatattcttctgttccaccccccagaggtctgtggtcaatgataaaaacaacaataatattttccacttttttttttttttttgagacggagtctcgctctgtctcccaggctggagtgcagtggcgtgatctctgcttactgcaagctccgcctccggggttcacaccattctcctgcctcagcctcccgagtagctgggactacaggcacccgccaccacgcccagctaattttttgtatttttagtagagacggggtttcactrtgttagccaggatggtctcgatctcctgacctcatgatcttcccgcctcagcctcccaaagtgccaggattacaggcgtgagccaccacgcctggcctccacttttttttttttaagtccttgttttcaaataactttttgatttgggccaatctttgcaaaagttttatatatatatatatgtacacacacacacatatatatatacaccagtgttaaatcaaatgaagagttttactttcacttcctaaagggccttcataaaccactctgattctctttaaaatcagcaaggaatgcaattaact

SEQ ID NO: 465701 - DNA, 622 bp, Homo sapiens
aatctaccacttcttttttttcttcatacacatcttccataataaaagaaaagggcaaagaagtaaacaggagtagttagattgctaaagcaattattctcaagcacaaagttagtatgtctgaataaatggcttctgaaaagaagagactaaaatgctactttaaggtaggagtaacaattggcaattttgtgttgccacataagcagctcataattatatgactaatctgagagagacaagatgaaaaatgtgaacggtgtaagaatatgtgactagttggagggccacttttctaaagagataaaaccgtttgtatctgctacgggaataagtataataataaggatattgggcacagagcttggtgcattttagttgctcagccaatgttaggtccatgcagtcccccmcaaaatggtctctagggccttccaacatgagcagccagaggctgtttctgaccattgacctgcccaagactcagtgtgcccaagagaagctcagggtcataagaggtaacatttctagggatgtgccacagcattattttctccctttccaaacatcccatttagatggtaaaaggtagaaaaatattaatagcatctgaccaggttgt

SEQ ID NO: 465702 - DNA, 601 bp, Homo sapiens
ggtgacactatgattctgtcaaggagtagggagagaactaggatgtggatggaagaatttatgatattcattcaaaaactttgatccattacttgcctatactctgaaatacgtggagcctctcatttagaggtgagtttccttcaccgagtcaagctaagtatgttactaaaacatacccagatctcttcctacaaaaaacgcatatcaaataaaaagatgaaatgagatgatctccaaggtctcttccagctttagcatgtgaatttgatgataagggagttattgtgtttttaataaataaaaattaggaaaatttkgttacaataatgtaaagcctaaattccttaaggtctttggaagttttccaaagtgacatgacaattaagtcaattgaaagccagaattccagatgcttcacaggggaaacactgtgtgaaggcatccacagtaaatgtttaagcttcagcttatgaggtggtttattcagcataaaaattttctgtgggtcagagcaatttctgttttagtgcttcaaatcaaacacactctgaggtttagagatgaaaaataaatatttgcaaacagtggttgaatcagg

SEQ ID NO: 465703 - DNA, 552 bp, Homo sapiens
agatcgttatagaattacattttatttgtgtgtaagcaaaagaagacacaaaataatttttgtggtgaatagcaattaggaccaggtattatagagaaaaaaactaaatattttctttccttagttaatatcttgtatgtattgagttggtgtaaacataaytgccattttttgctattagttttaaagtcattaaagttttaattaagtttaatggccattacttttaatggcaagaaccacaattacatttgtaccaacctaatattataatatcatttacatattgggccattatgtaaaagaaagaaatagcattgtcactaaatgcatagttttaggtgtaatgggaaacatgtttccttccttccccttcactataatgacctccctcctacacacaaatacacaccctacaacttgtcctaatcttcttgtgacatcacatcatgatattttagaaggtgtgtagcaattcccacaacacaagaaatatagctgtacatataaatatatgtatagctagcacaatttgttggctcagtttgtttg

SEQ ID NO: 465704 - DNA, 273 bp, Homo sapiens
ccactaccatcattatttttgttataccatccttgttccaayagtacaagggccaaggccgtctacaaatctctgaacttatgccacataaatgtagaatgggatgcccttctagagattaaattagtgatttcctttttttccataaaataagttagcaggtgcctctggactgaaaaagaagacttgtcttattctaggaaagttcacaaaagtgatatcctttaaatacacaagaatagggcaactagacactttcttaattgtttcaag

SEQ ID NO: 465705 - DNA, 598 bp, Homo sapiens
cttttctttttctagtattaaaaaattcctccatatgtaatacatctatatattttaaagataattcatcatattatacatctatgcagtcctgggtggatttactgttacatacataaaataagtataaaataaataaaattttcaactcatttgaaaaattctaaaacactcatacttccattcatacagagctgtcagtagagttgcaaataaactttttattaaatgataagttaaatgctttgaaagatcagtgttattatttatgaacagcttgcatagcttggtctaagaccgggaaaaataagtgaatatttgttctgtttgaattaaagagggctcggaccttcacttattctgaatatttttgccatgacacaataatttgacatgatgaaaatttgagggacatgacttttgaaagcttctgttatctgcgagattcctaaagagcastatttggcattatttcacgtcttgacatatatacttgtcagattacatagctgttttctagcagagggccagtccttgagatcataagccacacaatttgctcattcactttacaaacatttattgaacacctggtgta

SEQ ID NO: 465706 - DNA, 484 bp, Homo sapiens
gaataaattccttggcactttatgtttttgaagttcttgtttaatttttgttattaaagattttgctggattgaaactrtccatttgatctttgctaaagagactaaaggctctggaaacaaatgccagctagctaattattttaaacacaaatgttcagcagagtctacatcttagacctgacaggaaacacatgatttttttaacaattactcagagctgaaaaaacaaaaatacacagaggttttctgagaatgcaaaaaaaaaaaaaaaaaaaaaaatgactggtgagtaattcatttcaaattcagcttagtttctgcagtttctctcctatatcttaattgagacaggaagaatagtgcgtttttcctgagaacaacaaacagcctaagtatcctagaaagtccaaaactgatattaataatggcctaacaaccccccaaaaaatacaaccatggtaaataatgccacatagtgacat

SEQ ID NO: 465707 - DNA, 595 bp, Homo sapiens
ttaaattaataaataaaaacaatacaatgaggatggtgacactaagattatcgtaaatgtggaatcagattgttgttttcacatagtccaagatataaaattggtgatcaaattgcttacctgactagttagcataatacattctatgcactcatgggctaatattactttgttcatttataggtcctgtttgttttgttttgttttacatctgtctccctgactgaacttagtattatgggatggatgagaccaaaatgtattatctttttaatatcttttatatcatctttaatatttttctcccwtttctctaaactgcagcagttaccccccccaaccacctcaatgtctctgaccacatctggcatatgccaaagaagcatgtgtgcttgaagtatgaaagaaaagagaaataaaggagagaagaaggaaaggaggaatgaagcagaaaaagagggagggaagaggcaggcaataagaaatatatttatacaataatgttattttcctccaagggaagctatgactaaatgatatgcgcaagcgaacagcatttctgttggtgtaccatttcgtgagaaggggctgcaca

SEQ ID NO: 465708 - DNA, 595 bp, Homo sapiens
ttaaattaataaataaaaacaatacaatgaggatggtgacactaagattatcgtaaatgtggaatcagattgttgttttcacatagtccaagatataaaattggtgatcaaattgcttacctgactagttagcataatacattctatgcactcatgggctaatattactttgttcatttataggtcctgtttgttttgttttgttttacatctgtctccctgactgaacttagtattatgggatggatgagaccaaaatgtattatctttttaatatcttttatatcatctttaatatttttctcccttttctctaaactgcagcagttaccccccccaaccacctcaatgtctctgaccacrtctggcatatgccaaagaagcatgtgtgcttgaagtatgaaagaaaagagaaataaaggagagaagaaggaaaggaggaatgaagcagaaaaagagggagggaagaggcaggcaataagaaatatatttatacaataatgttattttcctccaagggaagctatgactaaatgatatgcgcaagcgaacagcatttctgttggtgtaccatttcgtgagaaggggctgcaca

SEQ ID NO: 465709 - DNA, 517 bp, Homo sapiens
cattcactctcagtctacagaaaccaatgttcagacatgtaattcaaaacctcaaaacaatttcataacgtggacatgcatatatacacacaactctgaagagatgtaccgaaggaaaagaagaagacagacggcacaagcaaaacactacctagggtctgtaggagcaaaagtattaatacttgtcagtgtaaaagtattacaagaaagcttgagagaaacaaacaaaattattcattctgttgagggagttcagtaaagtggtaagatttttaaaaaatcatttttattccagcaatatctaggtaaaaaatgtaatcaaggattataccttatacaaaagaagcaacaaaaatataagacacttaagactactcttaaycaaacccaaaatatatacataaaaatattaagctttgttgataagctttaaaaataatttttataattatgaacaagaagactagttaacataaagatctcaattattcccaatgtaatttattggcctcctgaa

SEQ ID NO: 465710 - DNA, 610 bp, Homo sapiens
aaacacaaataaatagaaaaacattccatgctcatagattagaagaatgaatattgttaaaatggccatactatagaaagcaatttatatattctgtgcyattcctatcaaaccaccaacctcattcttggctgaattagaaaaaaaactattctaaaatacatatgcaaccaaaaaagagcctgaatagccaaagaacaaagcaaaagaacaaagctggaggcatcacactacccaacttcaaactatagaatagggctacagtaaccaaagcagcataacactggtacaaaaacagacatgtagatcaatagaacagaatagaaaactcagaaataaagccacacatctacaaccaactgatcttcaacaaggcaaactaaaacaagtaattaggaaaatggtgttgggataactggctagccacatgcaaaagaaataaactggacccttatttttcattatatataaaaattaaatcaagatgaattaacttaaatgtaagatgaattaacttaaaaatagataaatgaaataaaataattgtaaaatgtaatttcacaatttgaatttaaaaatcctagaagacaatctacaaaataccattccc

SEQ ID NO: 465711 - DNA, 610 bp, Homo sapiens
aaacacaaataaatagaaaaacattccatgctcatagattagaagaatgaatattgttaaaatggccatactatagaaagcaatttatatattctgtgctattcctatcaaaccaccaacctcattcttggctgaattagaaaaaaaactattctaaaatacatatgcaaccaaaaaagagcctgaatagccaaagaacaaagcaaaagaacaaagctggaggcatcacactacccaacttcaaactatagaatagggctacagtaaccaaagcagcataacactggtacaaaaacagacatgtagatcaatagaacagaatagaaaactcagaaataaagccacacatctacaaccaactgatcttcaacaaggcaaactaaaacaagtaattaggaaaatggtgttgggataactggctagccacatgcaaaagaaataaactggacccttatytttcattatatataaaaattaaatcaagatgaattaacttaaatgtaagatgaattaacttaaaaatagataaatgaaataaaataattgtaaaatgtaatttcacaatttgaatttaaaaatcctagaagacaatctacaaaataccattccc

SEQ ID NO: 465712 - DNA, 426 bp, Homo sapiens
aggaaaaatagaacattttaccaaaaagacatatgyactcatatatacattgtagcactattcacaatagcaaagacatggaataaacctagatgccaattaatggtagaatggataaagaaaatgtggtacatatacatcatggaatactatgcagtcttataaaagaatgaaaacatgtcctttgcagcaacatggaggcaggtggaggccatagccctaagtgaattaatgcaggaagagaaaaccaaataccatatgttctcatttataagcaggagccaaacattgagcacatgggcataaacatgggaagagcagtcactgtggactactagaggggaagggagggtggtatgctttgtgacactacctattgggtactgtgctcactacatgggtgcaacatacccaggtaacaaacct

SEQ ID NO: 465713 - DNA, 564 bp, Homo sapiens
tcatgcaacctgtgtgtatccacagctgacacccacacacacatgccacccacagaattgggactggcccacacagcctatcgcagccactgacaacaccacagcagactgcttgggcctcagaggattatcctaccactgctactgttcccggaccaaactgagggtcgggctgctatttcttatggcccaataatgagatgcagatgaactgggaaggaagacagtttttatttctgtaaccagttacagggaaaaggcctggaaattatcaccagaccaactcaaaattacaaagttctccagagctcatataccttctaagttatacatctatgtgtaagtgtgcatttgtctaaagacataagtgattaacttcttttaatctayaactaaggccagagccctgaagaccttcttctggatcctcagtaagtttacttaatttaaatgcatccaggtgctggggtgattacccttatcttgactcctgctaaatcatggaggtttggggagttccttcagatctccaataaacttgtttgtgggggcctggggagtttc

SEQ ID NO: 465714 - DNA, 577 bp, Homo sapiens
tgccattcctgatgtctgagcaagccacctggagacctaataatttttctgcctagacccaccaacactggtacaagtatacgctgccctggggtattgcgggatctggccagcagcccgcaatgcaacggggctctctctttgttctcaggtggatcatcaagtcgagaaataatagacacacacaagatagtgaaaactgggtccagggaggtcactgccttctggtcccatggtgccaaccatgcactggatataccagcatttattattaagtttagtgagggcgggggtaggttagtgagggatttagggtcatttgattatgaggtgagatgctcacaaggggatgaagtaattctttaacataacatctgtatgcagaagtacagtatacagggataagaatttacaatatagtgtgggcatcagtaatttctaacagagccttaaaatagaaacacagtctttccataacctacaattagcaagatattaatcagcagtaacagttgcagcaaaagctggttacaaacaatccatagaaacargacatgaagctagacaaccggttaga

SEQ ID NO: 465715 - DNA, 578 bp, Homo sapiens
aaccggttagaccagaaattctcagaagggagtatgccttaaccctaaagaggtctagaagagccgtgacaagatgaggacgtttatagccctatcttatccatatggacaggcgccccccatgtgtccgtttataggctctccacaaaggttgcattccactcccagagctataaatatctgcttttctgggataggaatcttggtgatgtgaaacttccctgactgcacatccattcataggctctctgcagggggaagcacatcacgtgctgttggctcattctggcagtccaacctggcattatctttaaacaatgcggtgtgcaactttgtatttacaataatcaggagcatttcatcttttattctgtarcaatagtttcagggcgtctgcctacactggggcttaaggaaatgctcactcagccgaccactaccaccaatgagacccaaagaatagcatacctgatgtcacaatcctcagcaaagtttgaccatagccttcactaacaatcatgttaaaccaccaaggaaatcaaagacaccaatgatactatttacaactgaagaaatca

SEQ ID NO: 465716 - DNA, 616 bp, Homo sapiens
ccaaactcctgtttcattttctgattcctattgtccatgagacaagaaaatcatctctaatcatgcatcacagcgcaaagytgtaaaccaagagtgtttctattgaagaccctgggggatcaggacaccaggcaggtgctggagacactctctcaggagcgtccagcagatctcagagtgatccgctggatgctcacgtgaaatccagcagtcactttctgagtcaccagtgagctgtgctggtgcctgaggggaccaaaataaggtcaaagcacctgctcagtgtcatagacagtgacagtgccagaaatgatccagatggtctccatgcaaatcaaatgttgcgttcacagtgaggtgcatgtcttgcagaggcttattctttattgtgaaagggcctctgtccataaatgttcataaatggagcaggacatgcttttcttcaagcaggattagggcttggaccatcagcatctcactctcgcattgttgatgtgtcatttatcttccctttctttttttttgatttattctaaaacaacaacaacaacaacaacgggacacatatgcagaatgtgcaggtttgttacatacatatacgtgtgccatggtggtt

SEQ ID NO: 465717 - DNA, 375 bp, Homo sapiens
tgttccatcaatacctagtctattgagagtttttaatacgaggggactctttttttaaaaatggaaaacatttttaaaaaagaaaaggggagttatgtcattatcttgaacacwttttagaaggcctagataacataatgttaagattgaaaccatataaacaatcaatgaaggataatagcccatatgtttcacagtttcttaattggagatggattagtttttaagcagttattgtacaattaccacttaatatgacatttcctagtttcagttgttttgtgtagaatgagatttatatgataatatactaaactattaaattatatataaattgtgattaagaagaattatagtaaggtattcaaaaattga

SEQ ID NO: 465718 - DNA, 625 bp, Homo sapiens
gcaattgtgcttccttgccataatccctgtgattttttaatctgcctggttccattaagatgacaattaaatcactgcttcacctatgctttagagaaactgctttccactgctaccaaattgttaagtttcacatacccagcatactaggagagtgtgataaatgatacagttattagttctgcataaatgtcaagctcttgaaaatccagctacatcacacctcatggcttctgctatcagcctttgctcccaaccagtctgttccagagggtaccactaggcaaatgagttatttagagctgcttgccttctctatcagacaatgataagtctgagataattaaatcaaaagccctcccaacatcagtgtgtcaattgacttgtagactctttgctataactccaaagactctctgagccattatttcttaattttcctcagctccacctcagaaaacttttaaatttagtttttttctccactgtgccctagttcctacagttttaccaatggaacagtctattttgaatgcttcttatgaatgttcaggcaactggaccccaactgaataccagagcttccccytcctgcattaaccagtgccccgacattggtcagcag

SEQ ID NO: 465719 - DNA, 564 bp, Homo sapiens
cactacctctagcaattttgattctataaactgaggttgttgggcttggggatctgcctttttagtaagcagcccagataaagctcaggaacatagttcacagacatcacattgaaaacaactactggtttaggcaaaaatgagagatcttcatatttgtcaggtgtttcttttagaacagagaaccaattacgagggcaaagaactatgacaaatgtcaaacatgtatgtgtatgtggtggtgaggaaggtgagcattaagcatttgaaatatggtttgtggactactatagataaaagaaattgttagatgctgagaagtagccagaaaaagtagaatggtattgaattccaaactkcaaattaaaaaaaaaaaaacaacagcaggatagagttacagaatttattaggagttgagtgtcaaacttccgtgtaataacttacagcaagacagaccgctcaatttgcctgggagttagcaaaatctacaagctggaatgacacatcattattcttgctattgcacttccagccgtgccaggacaagggcacatgctgctattc

SEQ ID NO: 465720 - DNA, 521 bp, Homo sapiens
attttgattctataaactgaggttgttgggcttggggatctgcctttttagtaagcagcccagataaagctcaggaacatagttcacagacatcacattgaaaacaactactggtttaggcaaaaatgagagatcttcatatttgtcaggtgtttcttttagaacagagaaccaattacgagggcaaagaactatgacaaatgtcaaacatgtatgtgtatgtggtggtgaggaaggtgagcattaagcatttgaaatatggtttgtggactactatagataaaagaaattgttagatgctgagaagtagccagaaaaagtagaatggtattgaattccaaacttcaaattaaaaaaaaaaaaacaacagcaggatagagttacagaatttattaggagttgagtgtcaaacttccktgtaataacttacagcaagacagaccgctcaatttgcctgggagttagcaaaatctacaagctggaatgacacatcattattcttgctattgcacttccagccg

SEQ ID NO: 465721 - DNA, 564 bp, Homo sapiens
cactacctctagcaattttgattctataaactgaggttgttgggcttggggatctgcctttttagtaagcagcccagataaagctcaggaacatagttcacagacatcacattgaaaacaactactggtttaggcaaaaatgagagatcttcatatttgtcaggtgtttcttttagaacagagaaccaattacgagggcaaagaactatgacaaatgtcaaacatgtatgtgtatgtggtggtgaggaaggtgagcattaagcatttgaaatatggtttgtggactactatagataaaagaaattgttagatgctgagaagtagccagaaaaagtagaatggtattgaattccaaacttcaaattaaaaaaaaaaaaacaacagcaggatagagttacagaatttattaggagttgagtgtcaaacttccgtgtaataacttacagcaagacagaccgctcaatttgcctrggagttagcaaaatctacaagctggaatgacacatcattattcttgctattgcacttccagccgtgccaggacaagggcacatgctgctattc

SEQ ID NO: 465722 - DNA, 426 bp, Homo sapiens
tgacaaagtactgtgcacaaaatcttaagcaaatgaagcatggcaattttcattaagttaaagcaggcaaggattgcgctatttctccccagtaaaacaacagccaggaaagcatttgccgcctcttgctattatgaaggarttcgtcctattaatactcgtggcgtgatgggcacattccttccccaggaaagactgacctccagtcagcgcgtctgtattttcactaaaagaagagactagctcattttggaattttcattatgcattgaaatgtatttttttttttttttttttttttttttttttaccaagactttggattcttgtcaggatttccccaggattagaatgacatttctctgcattcaaagcttctatagaagaaactcagccagcagccacccttggtagagaatataacta

SEQ ID NO: 465723 - DNA, 426 bp, Homo sapiens
tgacaaagtactgtgcacaaaatcttaagcaaatgaagcatggcaattttcattaagttaaagcaggcaaggattgcgctatttctccccagtaaaacaacagccaggaaagcatttgccgcctcttgctattatgaaggaattcgtcctattaatactcgtggcgtgatgggcacattccttccccaggaaagwctgacctccagtcagcgcgtctgtattttcactaaaagaagagactagctcattttggaattttcattatgcattgaaatgtatttttttttttttttttttttttttttttttaccaagactttggattcttgtcaggatttccccaggattagaatgacatttctctgcattcaaagcttctatagaagaaactcagccagcagccacccttggtagagaatataacta

SEQ ID NO: 465724 - DNA, 642 bp, Homo sapiens
catttcacaatctactgaaagaaaagtaatcataacataaattgtctgactcccactgttgtttttctttaatgtattactgtcgatattgttgctattattactatcattgtaaagagaaacattcaagaaataataaaatcataaaaggttagcactggagagagctttggtttcttgaacttgtgaggtgaagtaagtgattggtaatgtgaccgaaaccacatcaattgagtagcaggaccctgagatttctgactcttcttacagtgtttttctgtctttatcttactgcttctaagttcaacaggaatctttttaagaaataggtttaaaagagcgtgtctcacctgaagcaatcgcactcaggttttgatagtatttagctcaatccattgagaaacaatacttattttgagaattagaaaaaatacaaccattgcaaaatatgtattttccaaattagacctatatccttattataaccttttagctcaatttactatgcacctgttgcttagagtatagggcattattttaaatgccagatgaataaatttttgctctgtagtcacagataaaccaacrttacatccatttattttctatattcctgaacttgagggtatctatcctcttaac

SEQ ID NO: 465725 - DNA, 544 bp, Homo sapiens
aggttcatttttctcaactactgttacaagaaatgagagaaaaatttctttagtcatacttttttctataaatatgtaatcctttatacaaagaatactgtcaattaattaattgcatttttacctgacttgtctctctataggtagaaggtagacaaggagagacagaagcaagagttaaacctaactcccatgagcccctattttcaattggaacttcaaattacatcaatctttgttaattaacctttaactgtcacrtgtggtgtttctagaagctgctgtctcttacctgaccattgggaacctggaagggtctgctataaccctcagctgagcttcttaggtatgaccaactcactccttcagaggcaaaagaaaaaaaaaaaaaaaacttatagctatagcttggtatagcttcactggatgcaccaactgtggtcccttggtgacacacttttataactttctaattttgtttatggcagttttaatggtgaaacatataatcacaactttctagctctttgggacatcaagtgca

SEQ ID NO: 465726 - DNA, 544 bp, Homo sapiens
aggttcatttttctcaactactgttacaagaaatgagagaaaaatttctttagtcatacttttttctataaatatgtaatcctttatacaaagaatactgtcaattaattaattgcatttttacctgacttgtctctctataggtagaaggtagacaaggagagacagaagcaagagttaaacctaactcccatgagcccctattttcaattggaacttcaaattacatcaatctttgttaattaacctttaactgtcacatgtggtgtttctagaagctgctgtmtcttacctgaccattgggaacctggaagggtctgctataaccctcagctgagcttcttaggtatgaccaactcactccttcagaggcaaaagaaaaaaaaaaaaaaaacttatagctatagcttggtatagcttcactggatgcaccaactgtggtcccttggtgacacacttttataactttctaattttgtttatggcagttttaatggtgaaacatataatcacaactttctagctctttgggacatcaagtgca

SEQ ID NO: 465727 - DNA, 544 bp, Homo sapiens
aggttcatttttctcaactactgttacaagaaatgagagaaaaatttctttagtcatacttttttctataaatatgtaatcctttatacaaagaatactgtcaattaattaattgcatttttacctgacttgtctctctataggtagaaggtagacaaggagagacagaagcaagagttaaacctaactcccatgagcccctattttcaattggaacttcaaattacatcaatctttgttaattaacctttaactgtcacatgtggtgtttctagaagctgctgtckcttacctgaccattgggaacctggaagggtctgctataaccctcagctgagcttcttaggtatgaccaactcactccttcagaggcaaaagaaaaaaaaaaaaaaaacttatagctatagcttggtatagcttcactggatgcaccaactgtggtcccttggtgacacacttttataactttctaattttgtttatggcagttttaatggtgaaacatataatcacaactttctagctctttgggacatcaagtgca

SEQ ID NO: 465728 - DNA, 539 bp, Homo sapiens
attacatttgtttcctatgagaagaaagaaatatcacagatctaagctcaatagtccctgctccatttagagccctttgaagattccccataacagcagaaatgttctttccttggggatccaatggctcactaatctgatatttcttcatgagacctcatcaaagtctacaatgatacttcactatgttgcctggtgcttcttgtgaagaataggttatcttgtagtccactggcatgtggttctgtgtcacctcatgatacttattagtccttactctgttgagaaaaaaaataatggtttggttcatttgagcacaaaaggcagcgcttggaagtcagctgggtttacaacctagggccaatgcctctgagcctttatttccttgttttaaaaacagggataaagcttccctgtggtgaaattagggtgaattatgacttagtatttttcaaacattaatgttggtaagaatcacrtggtagattctgattcaatgatctgaggaggggcttgatattttgcatttttaacaagct

SEQ ID NO: 465729 - DNA, 316 bp, Homo sapiens
atatgcattcttagccaatcatgtaggatatcctattyctgcttagcccacctgcagctttatatgccaagagcctcacatcagggcatacctaaagccttcccttttttcactataaagttttcctactcttctgcctgcctttgagtttgccaaatgcaaagtggtggctgcatttggcggctatagcaagctctgaataaatagcctttgtttgttttcatttggacagtctttatttctactgcactggtttatgaaaagtgcctgccatttagtaaggaccaaacaaattgtagctttaggcctctaaagg

SEQ ID NO: 465730 - DNA, 536 bp, Homo sapiens
tgtatcccagtttttaagggatagctatatttgagttgggtcactatcaacaaagcacaaatgacaatttcctttactattttcattatattttggtctcccttggggacctcacttgggggagaaatggctgaagcaaggcgggatttggacattcttgacttttatagcctagtgtcacccaacagcattccaatcgcacatccttttttctaatgatgattttcaactacacataaatatgtttacttgaggtaccttgaaacaaggaatatagacatattccaaagaggaagaggaagaggaagaaagggtgaagctgacttctaacactccaagctgaaatgcaaatactccactcaaaatttgaatgtttgctcaaatgcaaacactccaagctcaaatgtaaatgccattaaatggcattgtgggtcatagtatttgcatttgccacagtaaaaagaacaatatataaggactatctcaaacrtaaatacactagaaaagcttgatgagcatcggaattgttagaaggg

SEQ ID NO: 465731 - DNA, 558 bp, Homo sapiens
tttataaataaatggaggttaaatgacctagtctcaggtagtatctttatagcagtgaaagaatgaactaatacaaatacctttctattttctcaatagcacaaggtaattaaaagggttttacttaaagccaaggctcaggaaaggaatgagatcactgtaaaactttgccaaaatatcatttcttaggcttccttgcagatgcagattctgattcagtagttttggagtaaggcccttgaatctgcatttttaaaagctctctaaataattctggtgctgtcaggtttggctttggagtcacaattaaattgatgccaattagcataattaaagtgcttctagattggaagagcttgcagtcttttgtgaaaaagaacaatttaattcaattcaacaacatttattgaatgcctactctgtgccaggcactttggkgtatgctatagacaaagaagtgtatgccacagcgttcttgtcctcagttggctcagagagtagcaggaaaaggagagggacagagaaagagagacacctagacacacagagcaaaggggg

SEQ ID NO: 465732 - DNA, 543 bp, Homo sapiens
aagggaggtaggaaagaaattaattaacctacttgcaaaatgtggtaagaaagatggcaatgaattccactggaatatactgataaacgaggaatggagcaaatgctacaaaagagaagataactttgggtctgtcttgttgggggattacaatatatacattagaatggttctcaaccaccctattgagccacgtgtgatggcaaatgtagttgtagttgttgtggggctgtcactagcatttggaaaccatgaagtactcttgtaaaaagtamccatagtacccctttaagaaacctatttcatgagttgatgaaatggaaaaaaaaaatcatagacaatcacaaggttagggaagtatgagataagaatgttggttaagagtgctattatagtactctttttaacaagaataataatagaaaaaagtaataaagttgtatgaagagttgcagatgctaaatttttattggtctgataatggaatttacaccatatcagtttggagcttcagactgatattagtggcaatgaaattaccaa

SEQ ID NO: 465733 - DNA, 553 bp, Homo sapiens
atagacaatcacaaggttagggaagtatgagataagaatgttggttaagagtgctattatagtactctttttaacaagaataataatagaaaaaagtaataaagttgtatgaagagttgcagatgctaaatttttattggtctgataatggaatttacaccatatcagtttggagcttcagactgatattagtggcaatgaaattaccaaaataaaatcaggtcttattaacaggaagcagcatagagcaatgtcttccctttaggtcctcaaaaaccaagccttaaccaattgctttataattggctctagcatctactatttcatgaattgaataaagtcacctcaagcatgcttaaaatttcattgatttttcaatttttttcatgtcagtagcatttttgaaatatactttctttgctcagctacatatgatactttttggtttttgctcagctgtatatgaaacttttgtttttaattgtcacccctgtttgtaatcaaaacagttaactsgtggattttctattaaaccaaaaatcctaatgatagg

SEQ ID NO: 465734 - DNA, 615 bp, Homo sapiens
tctctcacttaactacatataatttatcaccaaatccaattgacttagtttctgcaacaccttttaaatgcaacattttcatagcaaaagaagctatcaaaagagtaaacaggcaccctacagaaggagagraaatattcataaactatgcatctgacaaaggtttaatatccagaatcaagaaagaactaaaacaaatcaacaagcaaaaaacaaataacctcattaaaaagtgcataaaaaacatgaacaagcacttcatgaaagaagacatacaagcagccagtaaacatgaaaaaatgcttcacatcactaatcatcagagacagtaatcatcaaaacagtaacatctcacaccagtcagaatggctaatattaaaaaggcaaaaaacaaacaaacaacaacaacaacaacaaaaaacagcagacgttggcgaggctgaagagaaaagggaatgcttatacattgttggtgggaatgtaaattagtttacccactgtggaatgcagtttggcaatttttcaaagaacttaaaacagagctaccattcaactcctgaaagaaaataaatcattctaccaaaaagacatatgtacatgtatgttaatttcagc

SEQ ID NO: 465735 - DNA, 334 bp, Homo sapiens
cttcctgattttaaaacaatattaagtgcttcatcacattcttagtatttttattattagaaagaatgctgattattggttttaaacatgaattcttaacatgctaaaatatgttttcatttataatgtttaacagttgtttttagtcatgaatattggatcttagcaaataacttgtggcatatattatgactatcatatgatttttaaaaatactttcacatattgatattctgtaccaatgtaaacgatttctgaattttaatccgtatttctayaccaggggggtaaattctgcctattggtaatataatgctatttttctccttaagtc

SEQ ID NO: 465736 - DNA, 615 bp, Homo sapiens
tctctcacttaactacatataatttatcaccaaatccaattgacttagtttctgcaacaccttttaaatgcaacattttcatagcaaaagaagctatcaaaagagtaaacaggcaccctacagaaggagaggaaatattcataaactatgcatctgacaaaggtttaatatccagaatcaagaaagaactaaaacaaatcaacaagcaaaaaacaaataacctcattaaaaagtgcataaaaaacatgaacaagcacttcatgaaagaagacatacaagcagccagtaaacatgaaaaaatgcttcacatcactaatcatcagagacagtaatcatcaaaacagtaacatctcacaccagtcagaatggctaatattaaaaaggcaaaaaacaaacaaacaacaacaacaacaacaaaaaacagcagaygttggcgaggctgaagagaaaagggaatgcttatacattgttggtgggaatgtaaattagtttacccactgtggaatgcagtttggcaatttttcaaagaacttaaaacagagctaccattcaactcctgaaagaaaataaatcattctaccaaaaagacatatgtacatgtatgttaatttcagc

SEQ ID NO: 465737 - DNA, 599 bp, Homo sapiens
attcagtctttgtaataacccaatcaagtaggtgctactattttcaaacccattttatacattaacaaaattaagtactgagaaattaagtaacttttycaaggggaaaaagctgataaatggcagcaccatgttcaaacccaagtttgaagccactggtagtgatgattagagagagcgatgaagaagacatgcagaaaggtacagaggtcctgaagaccagatattattacttgattacatgagacattcaaatattattatgacaaattccaccctccctcttttttaaaaaattgggcttaaatgtgagacatctaacctatgcttttattaatggaaactgagtccacatggacaaaaactctccatcaaaatactagaaaaatgaattcaacaaacattaaaacaataattcatcatgaacaagtcggattcatgtcaggatgcaagcatggctcaacacatgcagatcagcaaatgtgatacataaaacataacatcaacagaatgaagggcaaaaaccataagatcatttcaactgatgctaaaaaagcagtcaataaaattcaatatctctttatggttaaaagctctca

SEQ ID NO: 465738 - DNA, 589 bp, Homo sapiens
cccactactgggtacatacccaaaagaagggaaatcattagtttgtaaatgcctaatttagacattttctacaatgattagagctaggaatgaatcacaaagttaaatgggcatgatcagaaagggaaaaggaaatgacaaaagctgatgcaaaaaggctttgatatgtggtggtggtggtgwggtggtaaagatggattgcgaatttgaagtccaatgcatttcattgccttttcccagtgccaccaatgggtaactgtgtgaatgtgttgaaattctaaaccaatagacaaaatacataactagtgaaaaaaataatggtcttggaattgttctcattattgccttgtagatatttataagttaaaggtataaatttaaattataaaattgtaaaaatgatcacatcaccatagtaaaaaatactttgaaggaaatgaacaattatttactaataaaatatacttagccaaaatcagatttgtgttaaaccaagcttgaagtatatgcattatatataaaatagtcttcaacacttcattctgtcagaattttttccttaaggagcaatttaattttgctgcactaa

SEQ ID NO: 465739 - DNA, 591 bp, Homo sapiens
tatgcctttattatacattttgagataatttttgtatatcgtgtgaggtaggggtccaacttcattcctttgcatgtggaaatcccagctactcagaaggctgagataggtggatcacttgatcttaggagtttgagactttggtgacctatgattgtactactgcaccacagccaaggccacagaatgagaccctatatctacaaaaaaaaattgtcaattggacatagattcatacatttattacatgactttcarttatattctgttggtctatatgcctattattttgccaggtctacactgtttttattaatacaactttgtagtaagttttgaaatttaaatgagggaatcatgcaacattgttcttctttattgttttggttatttggggctccttgtaattacacataaattggagaattagattgtctagatttgcaaaaaaactattggtgaaactttgatagggattgtgttgaatctagaaattgtttgagtagtgttaacatctcaacaaaattaagtatttctactgtgaatttgtgcttttttccatatatttaggtcttgttgaatttagttcag

SEQ ID NO: 465740 - DNA, 537 bp, Homo sapiens
gggccttgaaagcctgattgggatttcaataaataaggtttgagggtaagactttttcaaacttagtcaatagcaagaatgaaatggcaatgtatcaaacataaatgtggtgcacattcagcaaacaatttttaatctagtttggtgtaggaagaaaagacaaggctagagagagaatttgaagatgtggttaaagcagtgatgtgttggaactggttcacacctccttgcaagagcttactattagcatctcttcccatgtctgcattcactgacatcacrctgttagcttgaatttggccgtggtgggaaaacttacatcatcgaattcagcaaatgctgcaaatcagggttttgtatttatttgggttgggagagccagttaacaaacatagcacactactattttaataatttgaatgccagggtcataaaaatatttatttcagaatacaattaggaacgatttacgaacttttaacagaggaatgattagatttaggagtcatctactgaaatcagaaagttaaaggtgtg

SEQ ID NO: 465741 - DNA, 569 bp, Homo sapiens
tgtgacaacattggatgaacctggtggacatttggctaaatgaaaaaagccagtcacacaatgacaaacactgcatgattccacatatattagttatgtaaaatagccaaactcatagaaacagagagtgaatagtcgtcgccaggrgctgtagagagagagacatggagagttgctgttcaactggtttaaagtttcagttatgcaaaatgaataagttcaagagatctgctgtacagcattgtgcctacagtcaacactagtctattgagcacttaaaaatgtgtaagatggtaggtctcatattaagcatattaagtttttacaacaaagaataataatagaaatagaatttacttagaaaaatcaatgtaatgaattgtactaataaagcacaaaaaccacaatgtcatcttgatagatacagcaaaacaatgtgacaaaatacaatgtgttttcatagtaaatacacaaaacaaactaagcatagatgaaaacttcatcaatctgataaaagacatctatataaagcccaccaatcacataatattcaatggtaaaaactgaaa

SEQ ID NO: 465742 - DNA, 569 bp, Homo sapiens
tgtgacaacattggatgaacctggtggacatttggctaaatgaaaaaagccagtcacacaatgacaaacactgcatgattccacatatattagttatgtaaaatagccaaactcatagaaacagagagtgaatagtcgtcgccaggagctgtagagagagagacatggagagttgctgttcaactggtttaaagtttcagttatgcaaaatgaataagttcaagagatctgctgtacagcattgtgcctacagtcaacactagtctattgagcacttaaaaatgtgtaagatggtaggtctcatattaagcatattaagtttttacaacaaagaataataatagaaatagaatttacttagaaaaatcaatgtaatgaattgtactaataaagcacaaaaaccacaatgtcatcttgatagatacagcaaaacaatgtgacaaaatacaatgtgttttcatagtaaatacacaaaacaaactaagcatagatgaaaacttcatcaatctgataaaagacatctatataaagcccacyaatcacataatattcaatggtaaaaactgaaa

SEQ ID NO: 465743 - DNA, 580 bp, Homo sapiens
atcattactattattttagcaatgaagtattttcaaattaaggtatgtatactgttttttagacataatggcatcacacacttaatagactacagtattgtgtaaatataactcttacatgcactgagaaatcaatttgtgtgacttgctttattgcaatatatgctttatcgtggtggtctggaaccaaayacatgatatctctggggtatggctgtactgaggagtaaactttaaagaagtgcaaaatgtatagtttgaaaacgacaaaacattgctggaagaaattgaagagaacctgaataaaaggaaaatatcttgttttcatggttcaaaatacttaatactgcttaatactgctgatatggcaatactcggcaaatgtatctacagtttcaatagaatccttgttgtaattccagttgatatcttatcagaaactgatctaaaaattctcatagaaacacaaaggatcaaatagacccaaagcaattctgaataaaataataaaagactcatatgtctttattttaaaacttattataaagctatagtaatcaagatagtatgatattggcaa

SEQ ID NO: 465744 - DNA, 475 bp, Homo sapiens
ttttttcaaacttacactatgatctatcaaggtcaattcttctastattccatatatttttgtagttttcaataatgtattttaataaaatatttttgcatacttctgcagtaattattatggctctcaagacttctgattattaaaattgctataaaacactgaagctattcactatgtttatgcatcacaaattgatgactaaatccaaatcattaagttaatttgatcaataaaagaaccaaattgcagggtttatgcacttatgcaataaatgtgactgggtgataaacatgccagcacagagaatgttctataaaatatttaattcatccataataaatttcttcaattaaatgttgtgtctaattatctgtaatcacatcattattctaatcattataacattaagaaataatttgtcgaatatgtgcttgtacatttccacattgattttgcatgagaagcccaaata

SEQ ID NO: 465745 - DNA, 629 bp, Homo sapiens
tagaaataagtatgatttgtatatccagtcatttattatcttgatatattctacgcatcatataatcctattattcaaagaacatactagaagactactttccagtggaattagtgatcaaagtgttatgatcatcagtgacaagcattagcacaggcatcagcttaatataaaccaagctaaagaagagtggcatgtgtttagaaggacactgaaaacatgtttcaatatcacagcttgttttttttttaaccccagggatttttaaaaacgatatggcaaaagggatgtgttatgcagttcttgcattcatataaagaaatacctgatactgggtaatttataaaaaaaaatgagatgtaattggctcatggttctgcaggatgcacaggaagcatagcactcgtgtctgcttctggggaggcctcaagaagcatttactcatggaagttgaagcaggagcaggcatatcacatggctagagcaggaaaaagggtgtggaggtaggtgcaacacayttttaaataaccagatctcatgtgaactcagagtgagaactcacttatcaccaaggggatggcctgagacattcacaagggatttgcccccataatccaaacacctcccat

SEQ ID NO: 465746 - DNA, 525 bp, Homo sapiens
acttgcccaaacaggtgaaagatctctaaaagaaaaactacaaaacactgttgaagaaatcatagattacacaaagaaatggaaacacatcccatgctcatggatggtagaatcaatactgtgaaaataatcatactgctcaaagcaatctacagactcgatgcaagtcccaycaaaatagcatcatcattcttcacagaactagaaaaaacaatccaacaattcatatggacccaagaaagagcccacatatccaaaacaagactaagcaaaaagaacacaactgaaggcatcacattacccaacttcaaattatactacaaggctgtacttaccaaaacagcttggtactcatataaaaatagacatgcagcccaatggaacagaatagggaacccagaaataaaactaaatacttacagccaactgatcttcaacaaagaaaacaaaaacataaagtgggggagaaaacaccctattcagtaaatggttctggaaaaacttgcaacccacatgtagaagaaa

SEQ ID NO: 465747 - DNA, 657 bp, Homo sapiens
cggcctcccaaagtgctggaattacaggcgtgagccaccatggccggcctattcagtatacttttgtgttttaatctgtacacagtaactagagctattttaattttcaaggtagaataacttagtactgkataacagtaatgtgctttgtcctcagttttttcactgaagattgttgtctgataagaaatttttattttataaaaaaataaatcgaaatgccttcggtagcactccattgctgcaatttgtcgtcaggcactgtgagacacgcgtgttacaaataaatattttaaatatttagttacataataagtgatgctgtggagatggccatccattggagttatgcttttatggcgtgaaagttgctgtggtcccttacaacttctgcaagtgatctctctagattgcaatcacacatgtatgctttactcttttctatactcatcactgggggctcccttgtatagggagatattcaccttgaaagaaaatcccactaagaaacattactattctggagcgttttagcattgctgagataaaaacattcatggtgtagagatattttctggcagcgtgtttcatgggagttacacagagacaatggttggattcatattaattaatttgaatgtcatatttaggaatcag

SEQ ID NO: 465748 - DNA, 542 bp, Homo sapiens
tatatattccatgtatagatgtgccatgtatagatgtgccatgtatagatgtgccatgtatagatgttccatgtgtagatgttccatgtagatgttccatgtatagatgttccatgtagatgttccatgtatagatgttccatgtagatgttccatatagatgttccatgtagatgttccatatatatatttatatatgggattttattaatattaactcatgtgatcacaaggtcccacaataggccgtctgtaggctaagaagcaagaagaaccagtccaagttccaatactgaagaacttggagtcctgtgtttgagggcaggaagcatcctgcatgggagaaagatgtaggctggraagctaggccagtctctcttttcacatttttcttccggcttatattctcgctgtgctggtagctgattaggttgtgcccacccagattataggtgtatctgcctttcccagaccattgactcaaatgttaatctcttttggcaacctcctcacagatgtacccaggattaatacttggtacc

SEQ ID NO: 465749 - DNA, 595 bp, Homo sapiens
gagttgatatactcttaaggtacaacaatgaagctgtatttctggccttgtccgctgaaaacaaattgcttttcatgggctttatagacaggaatgaagaaaaagtcctttgccagagcaatagctgcatactaggtgccaggggctgtwttactttgcacaaacaatgaaataacatctgttatagtagatgcaattggagtcaccacctggttaggcttataataattcactgcaattctccaagattcaactttcttctgcacagggtagataggtgagctgaatgaaaatatggtgagaaccaccatccctacatctttcaagtccttggtggtggcattaatctctgcaataattctaggaaggcagtattgcttttggtttactattttcctaattaaaggcagtttaagtggctttcacttggcctttcccaccataagagccctcagtctatataagtcaggaaaccaagatgattattcttcctgctgctgagtatctctattccaattatcaattctggaactggggaaataaccacagaatggcttctggaaaacaacgggcccactgtgagactgatctgagt

SEQ ID NO: 465750 - DNA, 473 bp, Homo sapiens
atttgggaggggtcagggcagaatgatatggtttggatctgtgtccttacctacatttcatgtcaaactgtcatccccagtgttggagatgcagcctggtgggaggtgattggatcactgggggaaagttctcatgaacggtctagcaccatctcctggtgcggttctcatgatagtgagtgagtcagttctcatgagatctggttatttaaacatgtgtgccaagacaggcttgcttctcctttgccttctgccatgattgaaagtttcctgaggccacttcagaagctgagcagatgccagtatcatatttcctgtacagmctgaagaaccattatccaattaaacctctttgctttataaattactcagtttctggtgttttgttatagcaatgcaagaatggaccaataatggaaacatgtctggtctgaagcattccagataagcgatattcaaactgtagagaatgt

SEQ ID NO: 465751 - DNA, 542 bp, Homo sapiens
ctagatatagaggttgtgaaaatcaatttacactgcagaaaaacatgcataatgggccaatttgtaacatagattcaggaaacaaaatagtaaaaaacatgagcctatacaaataaaaggaaaatatttttccaagaatgaattctatggattataaatttacttgtatccaagaaagttataaagaagatatttcagaggattaagattaaaaattaaagataattcaaaatcagaatgactctatcatgraaaacttgggaaaacagtctgtataacacagaattcacagtttgtcacctcctataaactctttcatgaggaacatgcccttaattacacagatttgacatttttatcaatatgctcactaataactgtgcaattatacctgtttgtaatctatgcatattcacattttcatgttaccacagtactaatgacagacagttctgttttcattagtcatctccttctcttgttcacgcacacccacgtatgtgcacatacccacaatcactgagaatatgtactgatatttc

SEQ ID NO: 465752 - DNA, 542 bp, Homo sapiens
ctagatatagaggttgtgaaaatcaatttacactgcagaaaaacatgcataatgggccaatttgtaacatagattcaggaaacaaaatagtaaaaaacatgagcctatacaaataaaaggaaaatatttttccaagaatgaattctatggattataaatttacttgtatccaagaaagttataaagaagatatttcagaggattaagattaaaaattaaagataattcaaaatcagaatgactctatcatggaaaacttgggaaaacagtctgtataacacagaattcacagtttgtcacctcctataaactctttcatraggaacatgcccttaattacacagatttgacatttttatcaatatgctcactaataactgtgcaattatacctgtttgtaatctatgcatattcacattttcatgttaccacagtactaatgacagacagttctgttttcattagtcatctccttctcttgttcacgcacacccacgtatgtgcacatacccacaatcactgagaatatgtactgatatttc

SEQ ID NO: 465753 - DNA, 542 bp, Homo sapiens
ctagatatagaggttgtgaaaatcaatttacactgcagaaaaacatgcataatgggccaatttgtaacatagattcaggaaacaaaatagtaaaaaacatgagcctatacaaataaaaggaaaatatttttccaagaatgaattctatggattataaatttacttgtatccaagaaagttataaagaagatatttcagaggattaagattaaaaattaaagataattcaaaatcagaatgactctatcatggaaaacttgggaaaacagtctgtataacacagaattcacagtttgtcacctcctataaactctttcatgaggaacatgcccttaattacacagatttgacatttttatcaatatgctcactaataactgtgcaattatacctgtttgtaatctatgcatattcacattttcatgttaccacagtactaatgacagacagttctgttttcattagtcatctccttctcttgttcacgcacacscacgtatgtgcacatacccacaatcactgagaatatgtactgatatttc

SEQ ID NO: 465754 - DNA, 590 bp, Homo sapiens
actgctacaagtttccagaagatactttctcatctggatacttacaacatgtgttttcttcccccatttgcctagaaaattgactcactggttagcaaaattctactattgataccttgtagctttttaaacattgtcaacccaaacctttgaagcatataggggttgcattttcaggtcccaggtaattatttyttatttgcttttcaatggaataatacatgttgtaaaggaaaactttacctttatgtttttccgtgcttagacttcacaaatgttatatcccatatcagcaccgaggccaaaaactgtaacacaatagtggtagtatccccacagatactcctactaaattaattttactcctactaaaattaagatgtaaaataagaacaattacttaggtctcctgtaataaaagaatggtcttaaaactgtattactcataataatactgacattcccattagtactgtggcatacgctttcaaagctgtataccctgttcaaatggcgtggtgtctttttgcaatactgtttgtgtccaagcagatacaaggtttatagagaatgcatgtagggagccataa

SEQ ID NO: 465755 - DNA, 526 bp, Homo sapiens
catgctactcctctgctctaatcctccagtgacatcccatctcactcacataaatgccaatatctttattccatctacaaggcaagtagtattggtctgatatggcactcccttgacctcttggaccttacttcttactacaaatgtccccctcactcaattcacccaactaaaatgacatccttgctattcctgaaacaggaagattttggacctgttccccccatctggaataccactacttcatacacccttacactagactcttaactcgcttgaggtctttactcaaaagccatcatctggccaggtgtgatggctcacacctatagtcccaacacattgtgaggttgaggtgggaggatcacttgagcccaggagttcaaggctgaagtgagctacgatagtgatactgcattccagcctgggttaaagagcaagaccttgccccccaacccmaaaaaaaaaaaaaaaaaaagctgtcttctcagtggaccttccctgaacaccgtatttaaaatatcaa

SEQ ID NO: 465756 - DNA, 523 bp, Homo sapiens
tacatgaggaactgaaatagtgcttgttcttggggacaaagttaggtactcagaggaaaggggtggaaggaagatattttaattattgcccttttgtaattacagaatttgtatcatgtcaatgtattacttaygcaaaaataatacattaaaaaaaattttttttgagatagagtctcgctctgtcacccaggctggagtgcagtggcgtgatctcaactcactgcagactctgcctcccgggttcaagcgattttcctgcctcagcctcccaggtagcttggattacaggcacgtgccaccatgaccagctaatttttgtatttttagtagagacagggtttcaccatgttagccaggctggtctcaaactcctgacctcaggtgattcgtccacctaggcctcccaaagtgctcggattaaaggtgtaagccaccttgccagtcctgattaaattttttaaataaggtaatcatatattaccttaaagtaatgaaacaaaatctatctcctttgtcaagg

SEQ ID NO: 465757 - DNA, 554 bp, Homo sapiens
tttctctgttgcccaggatggagtgcagtggtgtaatcaaggttcactgcagccttgtccccctgggcaaaagcaatcctcccacctcagcctcctcagtagctgggactacaggtgcatgccatcatgcctggttaattttaaaattttttgtagagatggggtctcattatgttgctcaggctggtcttgaactcctggcctcaagtgatcttcccacattggcctcccaaagtgctgagattataggcatgagccaccatgcctggcctgctttttaacttttaaaattattatgcttttagtcagaaaaatgaactaaaatatctaaggtgaaaatgaaagagtgtatacttgctaatataaaatatacaaacattcacctactatagatggaaaaatgactgaacagatgttatgagtggttgcttgactttgggtaatttccttaatacatttatggctttacagtttcacaactaaaaaatactactagatacagttgasacttgaacaacatgggcttgaactgcatgggttcacttatatgcata

SEQ ID NO: 465758 - DNA, 611 bp, Homo sapiens
atctatgtgctgtggtttggatgaggtttgtttgtccccaacaaaactcatgtggcaatttgattctcaatgtggcagtgttgagaggtgaggcctggtgagaggtgtttgggtcatggggacagatccttcatgaatggcttggtgccattctcatggtactgagttcttgaaaggctggatttcttctctgagaatggattagttcccatgagagtgtgttgttataaagccaggatgtccctcaggtcctctgttttcacatgtgtctgcttctcctttggccttctccaccatgttttgaccgacacatgaccctcaccagaagccaaacagatgctggcatcatgcytcttgtacttcagagcctgcagaattgtaagccaaataaacatattttctttataaattactcagtctcagatattcttttacagcaacacaaaacagattaagacaccatgtgaacagttttacctgaatgtctattgacactttatttgtaatacccctaaactggaaacagcgtaactgcccattaactgatgaatggttagttgtggcatagtcatacaatggaatattactcagtaataaaaacaaaggaacta

SEQ ID NO: 465759 - DNA, 594 bp, Homo sapiens
taatgttactttatgtgttagctgtctttttttctattgcacagaagtatatcttacacttcaaaattgtgaatgaatgtttgtgagccattagtgatcatggaccctgacagtggccactgtgccatgcttcaggcatctcttacttcaaggaaagagcaagggctgaaaacccaactcttctatgcactactgtccagctttgtaaaatctgtcaaaatacaaaaaattagccaggtgtggtggcggacgcctgtaatcccagctactcaggaggctgaggcaggagaattgcttgaacccgggaggcggaggttgcagtgagccgagattgcgccattgcactccagcctgggtgasagagcaggactctgtctcaaaaaagaaaaaaatctataaaagcccaccctcatcttcattgtgaggatgaaatgagggcgtgtgtataatctgctggtacagtggctaacgcccagcaggcactcaagaatttgctatgatggttgctcttattaggtgacgacactgataaatagaaccaagggtcatgattgcactctatcctaagatttagatactttcatggataccctc

SEQ ID NO: 465760 - DNA, 633 bp, Homo sapiens
tcgtggaccaggccacgttctacgataagcattgtgacctggagagcctgggcatggtcctctacatcatgctgagtggctacctgcccttcgtgggtcactgcggggccaactgtggctgggaccggggtgaggtctgcagggtgtgccaggaaaaagctgtttgaaagcatccaggaaggcaagtttgaatttcctgacaaagactgggcacacatctccagtgaggccaaatgcctcatctccaagctccaagctcctggggcgagatgcgaagcagaaacttagcgccgcccaagttctgcagcacccacgggtgcaggggcaagctccagaaaagggactccccactccgcaagtcctctagaggaagagcagcacaatggacctgacactcttcgmagctgaggccatcgcccttaactgccagctatctcagcacgaagagaacgaactagcagaggagccagaggcactggctgatggcctctgctccatgaagctttcccttccctgcaagtcaccctggcccggaggacaggagcccaaccacagcactctgaaatgctccagtcacaccttataggccctaggcctggccaggcattgtccccctggaaacctgtgtggcta

SEQ ID NO: 465761 - DNA, 578 bp, Homo sapiens
cggcagagcctcttaaaattaggagcatgactaaaggcattccttccctaaaaatgggttattttgaaagtaaaataaacaagtgtttctaacagattaactttaaaacaccatgtaaaatctcgattttccatgacaggggaattctcatataagraagtttaatgagactctgcctaaagaattttccctttctagcgccaacacattagcagatctttaggtcaccagggtgtatttctagaggcccagctgctgcttattcctcctacttcattccaattctgagaaaaatacacaaagtgcatcttttccacaagccactagccagaatcctcattacctttcctggagctcatcaccacagaagactctgggaaaactggcagggaggctggagcatggggaagctcctgggaggactctcgctgttctctgacctagcccagagccttcctgagccagagacctaggactggagaagtaatttgctttttaatatatttctcccctcagacaggatcagagaagtggtgatggctgttgctgaaagctttatgggttagacacacacatta

SEQ ID NO: 465762 - DNA, 578 bp, Homo sapiens
cggcagagcctcttaaaattaggagcatgactaaaggcattccttccctaaaaatgggttattttgaaagtaaaataaacaagtgtttctaacagattaactttaaaacaccatgtaaaatctcgattttccatgacaggggaattctcatataagaaagtttaaygagactctgcctaaagaattttccctttctagcgccaacacattagcagatctttaggtcaccagggtgtatttctagaggcccagctgctgcttattcctcctacttcattccaattctgagaaaaatacacaaagtgcatcttttccacaagccactagccagaatcctcattacctttcctggagctcatcaccacagaagactctgggaaaactggcagggaggctggagcatggggaagctcctgggaggactctcgctgttctctgacctagcccagagccttcctgagccagagacctaggactggagaagtaatttgctttttaatatatttctcccctcagacaggatcagagaagtggtgatggctgttgctgaaagctttatgggttagacacacacatta

SEQ ID NO: 465763 - DNA, 542 bp, Homo sapiens
tgctttctacacaaaatcttactttcaagactgttttgtcttgatggactcaaaaacaagaatgtggcactgagatttaaactgarcaataacctctgcgttgaggtggctgctgcccttcctaaagcactaaaatctattgctttcataggtggagaaccccaggaaaacaaaatgtacaggatatggatacacatccaaaatacattttaaacatgctatctctgtctattgccttaagcaattggagtattttctccaaaataccattattgtcatcaattcttcattgagatcacctccaacttgtctattaaggataccctcccgcttcctccagaccctagtcccagctactaaatccctctttatagacagctcagtttggacccattgtcccagctttgaacttagccattcttcaagcttgtgagttccagtactagctcttcttaacccagggtaagaaagaacttacccagccccatttcctcacctcacaagaaagatcaaacacaatgatgttttaagacatggaaaga

SEQ ID NO: 465764 - DNA, 542 bp, Homo sapiens
tgctttctacacaaaatcttactttcaagactgttttgtcttgatggactcaaaaacaagaatgtggcactgagatttaaactgaacaataacctctgcgttgaggtggctgctgcccttcctaaagcactaaaatctattgctttcataggtggagaaccccaggaaaacaaaatgtacaggatatggatacacatccaaaatacattttaaacatgctatctctgtctattgccttaagcaattggagtattttctccaaaataccattattgtcatcaattcttcawtgagatcacctccaacttgtctattaaggataccctcccgcttcctccagaccctagtcccagctactaaatccctctttatagacagctcagtttggacccattgtcccagctttgaacttagccattcttcaagcttgtgagttccagtactagctcttcttaacccagggtaagaaagaacttacccagccccatttcctcacctcacaagaaagatcaaacacaatgatgttttaagacatggaaaga

SEQ ID NO: 465765 - DNA, 509 bp, Homo sapiens
cagtgctgtgccagtgtaaccctctgagtggacactaagggacatcagtgggggattctgaaatgtggacataggagggtgtggttcccagggcaggatgcagtccagtggtggctgtgctttcacaatggtgctgtgctgcagccacgtacgtcttggggaagcatgtgaccctgcatgagtcccctgtctggtgagatgccctgacagggcctycagaccaccacccacactagtctcagagtttgtatgggtagaggagctctctcatggttaggactgcagcagtctgcagcagggatgtgtatagcagagggattctcaccgccaaccttggctgagttgaccactcacttcctgctccatctgtgcctcaggtatttcccataacttctctgttgaactccagtgttctctcctagatgttctattggaggtatgattatctattcacaattattgattccttctttaaagagtgagtgtctaatgtctctagtcagccattt

SEQ ID NO: 465766 - DNA, 509 bp, Homo sapiens
attcagatcatgctactcctctgctctaatcctccgtgacatcccatctcactcacataaatgccaatatctttattccatctacaaggcaatagtattggtctgatatggcactcccttgacctcttggaccttacttcttactacaaagtccccctcactcaatacccaactaaaatgacatccttgctattcctgaaacaggaagattttggacctgttccccccatctggaataccactacttcatacacccttacactagactcttaactcgcttgaggtctttactcaaaagccatcatctggccaggtgtgatggctcacacctatagtcccaacacattgtgaggttgaggtgggaggatcacttgagcccaggagttcaaggctgaagtgagctacgatagtgatactgcattccagcctgggttaaagagcaagaccttgccccccamcccaaaaaaaaaaaaaaaaagctgtcttctcagtggaccttccctgaacac

SEQ ID NO: 465767 - DNA, 471 bp, Homo sapiens
gctcggggctgggagttgatgctgtgttggggtcaacagtcaaggggacagctaaattccagcacagtgaggtttgggccacagtgagtggtggaaatataaaagctcccctctgagaattggaaagcatcatatttttaaacaactgttgctggagtttaccttccttcttaaaggaaccccagctgcctgttcccatgatgccactgctggagtctcagccctgaggttgggcaagcsgggggttgagactgtaccttctctgtttactgaaggtgttcctgtctatcttactgcctatgcactgtggtccccacagctgaaagtcagtaggcagaacagctggcccggtaggacccatttcttcaatgaaacagcctatggcccagacaaaagcccctgcatgggtgggtggaggctaggatgctctggtgagccccttggacgccattcctgtagtggtcacattgg

SEQ ID NO: 465768 - DNA, 635 bp, Homo sapiens
tcacaaattctggtaagtggtgatttaattttcattcagttcaagacattttataacttcctttgtgatttcttcttggtcctttggttattagtaatatgctaacttccaagtattgggtatattctagttagctatctgtaattaatttataatttaatttggccaggcacagtggctcacacctgtaatcccagcactttgggaagccgaggcaggaggatcacctgaggtcaggagttcgagaccaacctggccaacatggcgaaaccctgtctttactaaaaatacaaaaaattagccaggtatggtggcaggcacctgtaatcccagctacttgggaggctgaggcatgagaatcatttgaacctgggaggcacaggttgcagtgagctgagattgtgccactgcactccagcctgggggatagagtgagactctgtctccgaaaaaaaaaaaaatatgtatatatatagagaaatataaaaaatatatatatagaattaaatataatttaattctattgtggacagaraacatattctatatgattttaacccttttaattaaattaattgagatttgttttatgacccaccatactggtctagtttggtgaatattccatggcattt

SEQ ID NO: 465769 - DNA, 533 bp, Homo sapiens
aaaattccttctttcctaaggcccacagggaacagctttgtggctggggctggcacatccacagctgcctgtcttctagaccctagggcctgctcaattctctggggcctgccctcctttccactcttcccattaccctatcacccaacttatccatcccacccaccctctgccatgtgcttggggagggcctcgtgcctattcagacacaggaagcagtagaaacatttactgtcacacatgggcacaagcacacatcctcctggctctctctctctctctcattccatctctctctacacacacacacacacacacacacacacacactcctggctacgcacactcatgcatatgccactatatacacacactgccacatgtaggcatgcatgctcccaaacagatctatgacagaaacccattcagtcagatgtaagtacacatgtctcctgccagggccagtctgtggggtgtcytttttctagatggatctgtctttgttggggtgagggagataagaaagaatggag

SEQ ID NO: 465770 - DNA, 479 bp, Homo sapiens
aagggtataaattttcagttataagatgattaagttctgaagatctaatgtacagcatggtgactacagttaataatactgtattctgtrcttgaaatttgctaagagagtagatcttatgagttctcaccacaaaaagggtaactatgtgagctgatagagatgttaattagcttgattgtggtaatcatttcacaatgtattcatgtatcaaatcatcatgctgtacaacttaatatataacatttgtattggtcaatcgtacctcagtaaagttggggagggggcgggaagaaaacaattctgtgtgcaagatcatcaaaaagaataagaatatttagtaataaatttaaccaagcaggtgctagacttgtactttgaagcctacaaaactttactgaaagaaattaaaagatagccttaaaaagtggaaagacatctcaagttcataggttgaaagacttaatattgaaaatatg

SEQ ID NO: 465771 - DNA, 576 bp, Homo sapiens
gtagggacttgcccatgattatatagcctctgtagcaaggaatgttatgggacttttgctggccaggagttaagaggccctgcttcctgcttttgtcccaacatcagaaatgctaggccatctctggtggcaatttcgaagtttacaaggtcaagagaagttctaggtctgacagggctgcagatgtgtgctatgaaaataactctgtgggctagagatcaggacacctgggtcctggtcctagctctgccactaacttgctgagtgaacttggacagggccatccctcattctaggcctcattttgcccatctataagctgagaagactggattgaatggtctgaaaacagactataagttaacgcttttattctactcttggggagggagggagagaaggcaaaaggctgagagtgaatttctcctctccatctggaaccatgtggaatttctgcagtggagacatttaacctgactttaatttgagttgaaatgtctgatatttctgatagtaataacatgccctggatggggcaagggggagcaagrccccctgaaaagaacaccaaaaagc

SEQ ID NO: 465772 - DNA, 565 bp, Homo sapiens
ggatttctaaacagtgaagattcagcacccatgaggcaatttttttcacaaagaattgaggggaacgaatgaactgtaaagagttggtgattttggcatytaaccaatggaaacagctgagggacagcaattgggattggggtccctgcatgttctgtgtgtcctccatggggcccagaattgagccaagccagaaggttcaattccaggtccttgagccaaaacattctttcaatgatcctactgccgttaacgtttgtgcatttcccaatagccctgagatgcaagaactgggacctccattttatagatggaaaaacagaagttcaaagaggaaatggcttccaaagactacagaaggaatgagctaaggagttgaaactagccctgagatctcctggccttcaccttcaggctcttttctttgacccttgccactgtgaggtggacccttgtaggccagcccttgctccattgagtttctaaatgaagcaagtgacaaagcaggcccaagagtgagctcttggccttgaacagggtggaggtggtgagattgtccaaaaag

SEQ ID NO: 465773 - DNA, 461 bp, Homo sapiens
gctgaatatgtttattgctaatgtctagccagggctgacgtccttcacctgtggttcttgatgtcaggggagaatgccaaaccrttatcaaagacgaaacctcctcaaaccaagaaaaactgccccttaaataatgattaagagcacggggtccagagtagggcctccttgggtttgattcccactcagttaactgcccagtagctgaggttcctcttctgtaagctggggatgatcagaacaatacctacttcagatggctgtaatgaagactcaatgagataatgcacgtgtacatgctcagcagctgctcaatacatgtggtggcttccatcttcgttagctctccctcctctcgtgggtgagagtagagggtgagaaccaggttcagaggcactgagacactggaacccccaggagctgatggcatggcttcccagccccaagctgtagctgccaaa

SEQ ID NO: 465774 - DNA, 461 bp, Homo sapiens
gctgaatatgtttattgctaatgtctagccagggctgacgtccttcacctgtggttcttgatgtcaggggagaatgccaaaccattatcaaagacgaaacctcctcaaaccaagaaaaactgccccttaaataatgattaagagcacggggtccagagtagggcctccttgggtttgattcccactcagttaactgcccagtagctsaggttcctcttctgtaagctggggatgatcagaacaatacctacttcagatggctgtaatgaagactcaatgagataatgcacgtgtacatgctcagcagctgctcaatacatgtggtggcttccatcttcgttagctctccctcctctcgtgggtgagagtagagggtgagaaccaggttcagaggcactgagacactggaacccccaggagctgatggcatggcttcccagccccaagctgtagctgccaaa

SEQ ID NO: 465775 - DNA, 452 bp, Homo sapiens
tcctccctcagatctctcctttcgtctttggggaaagaagacacttatgaacggaaaaatgcctacagcaaatgccacccacttggtggcaactcagccctctttcctggtctctgccattcagggcatggcctgttgggaaacctccaagtttctgcttggaaacttgcaggtgggggaagggatgaggtgaaaaatattttaaaatgaagattaagcccaaagataatagttgaccttcagagtctgtggcascttggagtgttagggtggaaagctaggggaagtacagggcacattggaggaattgctggactgagtcaggtgtgttagtgcaaatatgaacttcaacaccaattttctgtgtgaccttgggcaagttactccagtctctgagctttggttttcctgttagcatacgagttaagggcacgtatcctggagcctgaatg

SEQ ID NO: 465776 - DNA, 549 bp, Homo sapiens
ccggcctgggctcagctgatggatgagctccttgttggactgcctctggctctgtctctggctccacagatggatgctctcaggactgctggctgaaaggaaatccacatttgacctggagccagatgtggagctaagggaagtggagaaacaggagatccagggcctggagtgggatacagagcccgggrgccagagctgtgacccgcaggcctcacaaacccctcaatgcctggcccgtagtaggtgttcaatagattgtcgttgaaggagagagggaggaagggagggagccttctttgcagcggggacattggaagctccagtgagtgaagctaatggccccaaagaccccagtagaaattcagagaccctggacatgcgtctttgggaatctctcccattcatctgaggcttccctaaacctcatcccgcacacctaccaccaccctagccttgcttccctgagaagaataccacaatgcagccttttccctctactctcgttctgccaaacttagaagacttctgccctactcatcagaaatg

SEQ ID NO: 465777 - DNA, 549 bp, Homo sapiens
ccggcctgggctcagctgatggatgagctccttgttggactgcctctggctctgtctctggctccacagatggatgctctcaggactgctggctgaaaggaaatccacatttgacctggagccagatgtggagctaagggaagtggagaaacaggagatccagggcctggagtgggatacagagcccgggggccagagctgtgaccygcaggcctcacaaacccctcaatgcctggcccgtagtaggtgttcaatagattgtcgttgaaggagagagggaggaagggagggagccttctttgcagcggggacattggaagctccagtgagtgaagctaatggccccaaagaccccagtagaaattcagagaccctggacatgcgtctttgggaatctctcccattcatctgaggcttccctaaacctcatcccgcacacctaccaccaccctagccttgcttccctgagaagaataccacaatgcagccttttccctctactctcgttctgccaaacttagaagacttctgccctactcatcagaaatg

SEQ ID NO: 465778 - DNA, 549 bp, Homo sapiens
ccggcctgggctcagctgatggatgagctccttgttggactgcctctggctctgtctctggctccacagatggatgctctcaggactgctggctgaaaggaaatccacatttgacctggagccagatgtggagctaagggaagtggagaaacaggagatccagggcctggagtgggatacagagcccgggggccagagctgtgacccgcaggcctcacaaacccctcaatgcctggcccgtagtaggtgttcaatagattgtcgttgaaggagagagggaggaagggagggagccttctttgcagcggggacattggaagctccagtgagtgaagctaatggccccaaagaccccagtagaaattcagagaccctggacatgsgtctttgggaatctctcccattcatctgaggcttccctaaacctcatcccgcacacctaccaccaccctagccttgcttccctgagaagaataccacaatgcagccttttccctctactctcgttctgccaaacttagaagacttctgccctactcatcagaaatg

SEQ ID NO: 465779 - DNA, 549 bp, Homo sapiens
ccggcctgggctcagctgatggatgagctccttgttggactgcctctggctctgtctctggctccacagatggatgctctcaggactgctggctgaaaggaaatccacatttgacctggagccagatgtggagctaagggaagtggagaaacaggagatccagggcctggagtgggatacagagcccgggggccagagctgtgacccgcaggcctcacaaacccctcaatgcctggcccgtagtaggtgttcaatagattgtcgttgaaggagagagggaggaagggagggagccttctttgcagcggggacattggaagctccagtgagtgaagctaatggccccaaagaccccagtagaaattcagagaccctggacatgcgtctttgggaatctctcccaytcatctgaggcttccctaaacctcatcccgcacacctaccaccaccctagccttgcttccctgagaagaataccacaatgcagccttttccctctactctcgttctgccaaacttagaagacttctgccctactcatcagaaatg

SEQ ID NO: 465780 - DNA, 564 bp, Homo sapiens
tgtgaaacagcctatttgaggaaggtgacttggtcggggtggggaaggagagaagcagaggctggtggaagatgaggcttgggagtgggctgtggcccgtggtaaaggctctgcatggtgtatgatagcgtgagtgacgcattcgtgcctgtgtgtgcacatgcttgtaggtgtgagtgggcatgtcagctcctgtgcatgtgcaatgatggtcacttttgtgatgggtgttaggatctgaatgtgtgctcccgggtgtgttctcctgaaccatctccaaaagcacccccckcacccccccgccgctttttgttttttttttttcatttctctttgttccagcagacatcagggctgggggtggacccttccttagcttgtgttgggtcccatccctgtgtgtgttgggtctccttgaccacactgccagcaccccaggggccaggattaacattgccatttcccctgtaaattacttgcccaccaagtgtcaaggaccaagccctgttcatgagcagcttccaacagggcatcactggacatatctctcaatcaaatatgcca

SEQ ID NO: 465781 - DNA, 564 bp, Homo sapiens
tgtgaaacagcctatttgaggaaggtgacttggtcggggtggggaaggagagaagcagaggctggtggaagatgaggcttgggagtgggctgtggcccgtggtaaaggctctgcatggtgtatgatagcgtgagtgacgcattcgtgcctgtgtgtgcacatgcttgtaggtgtgagtgggcatgtcagctcctgtgcatgtgcaatgatggtcacttttgtgatgggtgttaggatctgaatgtgtgctcccgggtgtgttctcctgaaccatctccaaaagcaccccccgcacccccccgccgctttttgttttttttttttcatttctctttgttccagcagacatcagggctgggggtggacccttccttagcttgtgttgggtcccatccctgtgtgtgttgggtctccttgaccacactgccagcaccccaggggccaggattaacattgycatttcccctgtaaattacttgcccaccaagtgtcaaggaccaagccctgttcatgagcagcttccaacagggcatcactggacatatctctcaatcaaatatgcca

SEQ ID NO: 465782 - DNA, 534 bp, Homo sapiens
gttgcccaggccggtctccaactcctgggctgaagctatcagcctgcctcrgccttccaaaaagctgggattataggcgtgagccactgtgccctgcccagaatgtctttattagctgtgttagatcattagttacagaaacccagctggttagaaataaattgctttcctgcttacctgccacctagttctgagtacacatgtcagtcctacaatcccacctaatatctgatgcataaactaaaatgatagtcaaggttgttcactggttggaattttgagggattatttttgaacttttctatatttttgaaatatgttaacagatttttttttttaataagaagaaaataaactttgtcaaaaaaaaaaaaaaaaaaaaaaaagcaacaccaaggaaagattctttttttttttttttccccaggctggagtgtagtggtatgaccagggctcactgcaactttgtcctcctgggctcaagtgatcctctcacctcagcctcccaagtagctgggactacaggctcatgcc

SEQ ID NO: 465783 - DNA, 534 bp, Homo sapiens
gttgcccaggccggtctccaactcctgggctgaagctatcagcctgcctcagccttccaaaaagctgggattataggcgtgagccactgtgccctgcccagaatgtctttattagctgtgttagatcattagttacagaaacccagctggttagaaataaattgctttcctgcttacctgccacctagttctgagtacacatgtcagtcctacaatcccacctaatatctgatgcataaactaaaatgatagtcaaggttgttcactggttggaattttgagggattatttttgaacttttctatatttttgaaatatgttaacagattkttttttttaataagaagaaaataaactttgtcaaaaaaaaaaaaaaaaaaaaaaaagcaacaccaaggaaagattctttttttttttttttccccaggctggagtgtagtggtatgaccagggctcactgcaactttgtcctcctgggctcaagtgatcctctcacctcagcctcccaagtagctgggactacaggctcatgcc

SEQ ID NO: 465784 - DNA, 609 bp, Homo sapiens
ggtagctttaggtctggttttattaatttgtttatatattttgattttaatactgacatagagaacaactaatcctaaaagtgtggttaaaaaaactggtataattaattttatgcacgtttgttgttttgttacccttatgtttaaactgccagaaggcattccttgcatgccggtttcaatagggtatcaatgaataattctgtaaagctatcttctttcaaataatggtaaatacccagtgatgtcatttgctctttacttagaagcaactgctatttcaaccgyaaaacacagatggggacattgaattatgtgataaatctttttaaggctgctatacagatacgggagcattgaaattatgtggaaataatgttttaagttggctgttcagataatctgtaatgtgcttattaattttttaagaactgtcattgaaatgagagcctaaaattcatgtaggggaacttcttaacttttatgaataattctgtaagccctgaattgagacttactgtattaggcattagtaaagatttgtgcttctacaggttttatgtaaagttgaacgaatttaaaatttctctttctaattatagtacaata

SEQ ID NO: 465785 - DNA, 548 bp, Homo sapiens
tatgcaacaaacctgcaaggcaggcattactatcctcatctttagacaaagaaattaagtctcagaaaggttgtgtgacatgttcaaggtcacccagactgactaattaaaagttcattctttcatcatatttctttttcaccaactatgtgccagacattgacwaacctatttgtctaggaaacagtaaaaaaaaaaaacagcttatgttctcgatgatagagatgaaaatttaaatcaatctttaaggtggggttgcaaaggaaagttatgagaagcaggaagccctcagcaaggaagagacacttaatctgaatcttgaagaatgaatgggagtcttctgggacgacaagggagaaaaggtattccaagaagtaacatcacatgcaaacacacagaggcattcaataacattgtgcttttgaaaacagccaccgatttgctctggcagagttgcaagggcaatcagaggggcaattaagtaggagaggcagaggtcacaggggacttagggaggctctggtggctcatgatgaagagtttgaact

SEQ ID NO: 465786 - DNA, 548 bp, Homo sapiens
tatgcaacaaacctgcaaggcaggcattactatcctcatctttagacaaagaaattaagtctcagaaaggttgtgtgacatgttcaaggtcacccagactgactaattaaaagttcattctttcatcatatttctttttcaccaactatgtgccagacattgacaaacctatttgtctaggaaacagtaaaaaaaaaaaacagcttatgttctcgatgatagagatgaaaatttaaatcaatctttaaggtggggttgcaaaggaaagttatgagaagcaggaagccctcagcaaggaagagacacttaatctgaatcttgaagaatgaatgggagtcttctgggacgacaagggagaaaaggtattccaagaagtaacatcacatgcaaacacacagaggcattcaataacattgtgcttttgaaaacagccaccgatttgctctggcagagttgcaagggcaatcagaggggcaatkaagtaggagaggcagaggtcacaggggacttagggaggctctggtggctcatgatgaagagtttgaact

SEQ ID NO: 465787 - DNA, 584 bp, Homo sapiens
atgtgaacaagatttttcaacacctctataaaaaagaaagttataagtagctctaatattgattcctgtattattgtagcaataagtaatattcatatgtgcatgtgttaactattcatcccattaagagatgaatttctaatataatttcattttttatgcttaattatttttcaaagttcacaatatatttatgctgttgtatgaytgtatgctaataatatttgtaacaatttatttcagaataaaaaatttaaatacttagaatgttatggtcttaggaacctaaaaaactaaagctttaatcagtaagtatatacactttttgcagagtagtataacatagtgatcaaaaaagactcacaagcacaaatattttagattaggtaaatttgggggaaggaattgaaaggaagtatgagttcaaagagagaaattatataaaatgttcatttgaaaaaagagcttatttgtacatcttaaaacagatgataatagtaatcaatcactactctacttattttattctactggatatatctgaaaagtaatataacaattttattttaaaatagtaatattta

SEQ ID NO: 465788 - DNA, 615 bp, Homo sapiens
ctgtgatgttccctaggccgggtataaacttacccatttatttcactattctgacctgactaagttctttttatcctttaagactcagccatgatgtcattttctcctgaaaaactttccttgcgctaccacggctctccagtatgctcaaatagcaatctgtgtttcctcaaacagcactgaaacatttatcacactggttttaattgattgttaatctgtctatattccccactatgagtaggttccgtatctaccttattcattgttttatctccaacacttagaacaactcctggtacatagaagttgctcaatatataatctgttgaacgaagaataaagtaagtacaaatgacagtagatgaactagacctttttgyattctgtgactattgtctttggataacatagtgtctgccatccagtacatgttcctatagcagaaaacctaggaataactttattgcaatgtcctaatgcatttaattttaatgctttacctgtaattcttaagttgggagttctcacactgggagttcttaggttgttcttatgtttttgatgtcattaaatttgcttccaagtttaaaaggattaaataacattcatttc

SEQ ID NO: 465789 - DNA, 643 bp, Homo sapiens
attgtgtttcaatgaatagctatgtagacagttcagatgatgcaagtatttttagcaaatatgaggaaaagaatagctcacagcagtctgagttatgtgaggcatgcaaaaattcatcaggtccagagagacgtgcgtgtgggacatcagtcactcatgctgcctcctcaacccaagcctggggagcaactgtttaaaaaggcatttggtttctgaccagctgccttacccattatcttcagttcctgaaatcggtgatacaaagaacaatgtatagccaatggcttatcttattttaatgtaaattcttggtaagcaacttaggacctgcctcttctttttttcttaaaaaccyatttatgattgctgctaatcagagtgtatattcagggctacttgaacctatgttatggggtgaccattctcaagctttgagctcaaacaaactttacacttaatcatattttctgaatatggttatttaaagttgacatatatatggactaacatatattacctaaactaatcagatgtattttataaattgcttgctcatgagattttggtttatgtctaaatgcacactcagactgtagagaatggtacaaaccaaactagtacttaaagtattttttaaattggt

SEQ ID NO: 465790 - DNA, 643 bp, Homo sapiens
attgtgtttcaatgaatagctatgtagacagttcagatgatgcaagtatttttagcaaatatgaggaaaagaatagctcacagcagtctgagttatgtgaggcatgcaaaaattcatcaggtccagagagacgtgcgtgtgggacatcagtcactcatgctgcctcctcaacccaagcctggggagcaactgtttaaaaaggcatttggtttctgaccagctgccttacccattatcttcagttcctgaaatcggtgatacaaagaacaatgtatagccaatggcttatcttattttaatgtaaattcttggtaagcaacttaggacctgcctcttctttttttcttaaaaacccatttatgattgctrctaatcagagtgtatattcagggctacttgaacctatgttatggggtgaccattctcaagctttgagctcaaacaaactttacacttaatcatattttctgaatatggttatttaaagttgacatatatatggactaacatatattacctaaactaatcagatgtattttataaattgcttgctcatgagattttggtttatgtctaaatgcacactcagactgtagagaatggtacaaaccaaactagtacttaaagtattttttaaattggt

SEQ ID NO: 465791 - DNA, 643 bp, Homo sapiens
attgtgtttcaatgaatagctatgtagacagttcagatgatgcaagtatttttagcaaatatgaggaaaagaatagctcacagcagtctgagttatgtgaggcatgcaaaaattcatcaggtccagagagacgtgcgtgtgggacatcagtcactcatgctgcctcctcaacccaagcctggggagcaactgtttaaaaaggcatttggtttctgaccagctgccttacccattatcttcagttcctgaaatcggtgatacaaagaacaatgtatagccaatggcttatcttattttaatgtaaattcttggtaagcaacttaggacctgcctcttctttttttcttaaaaacccatttatgattgctgctaatcagagtgtatattcagggctacttgaacctatgttayggggtgaccattctcaagctttgagctcaaacaaactttacacttaatcatattttctgaatatggttatttaaagttgacatatatatggactaacatatattacctaaactaatcagatgtattttataaattgcttgctcatgagattttggtttatgtctaaatgcacactcagactgtagagaatggtacaaaccaaactagtacttaaagtattttttaaattggt

SEQ ID NO: 465792 - DNA, 560 bp, Homo sapiens
tagactgtatccatttaaacttctgttttcagacacaacctgaaaaaagtgattgttgtcaacataaaagtgattaacttcttctatctggggtttaacctcagaaagtacttgaatactggtcactggttctaaaactggtttgttaatgtcgtttatagcctgtaaatttaaaaaaatcatcttgaacgtcaaacagacaaagcaataatgagcaaaaagaacagaaatggggcatcatactatctgacattgaaatacactacaaagctattgtaaccaaaaacagcaaggtattgctataaaaacagacacctagaccaatagagaacctaaacaaaggtgctgagaacatatattgcggaaagaacaccctctttaataaatggtgcagtgaaaactgagtctcaatgggcacaaagaaggaagctagacccctatctctcaccatataaaaaatcaactcaaatagattaaaarttaaatatactcaaaactataaaatactagaaaaaatcatgaggggatgatgtaagagattggtgtgtgcaaagatttta

SEQ ID NO: 465793 - DNA, 538 bp, Homo sapiens
aattaaatgtttaatacttttaatatcttaaacatcacagtgtgtattggggagggataatgkttagagatcacctctgctattgacaataaaggtattggggtgaagtgtcttcatattttctgtatgttttgcatactttaagtgtttcaaagttaaaacttaatgaatacacagcattttttattgtgttaaggaaagtgaaaatttgcttttattgggtaattttaatttggaccctaacttactaaataagagcatttccctgaccactttctgtatccaactccaacctctttaatatacataatacctaataccactgtatcattgcatttcatcttagcaagatgaaaatgggttctaagtatcttccaaagaaccaagttgacataagcttcaacacagactataatattttgtttcttattttttagtgccaataccttcaaatagtgacagttacaataatatagaattagccatggaaatgaaaaatatagaacaaataatgggaaataaaattagaaaacaagaa

SEQ ID NO: 465794 - DNA, 463 bp, Homo sapiens
gagaacaatcaaaatggagaagaacccgaaatcactgtgatgatgtttagttattacagctagcctttgtttaccagtttctatgtaccaaacattctcttgagtgcttatactagtttttgttgcataactgtgtagattacattattttttagtaaatattcactcctccctcccctgcatccattggaagtgtatacttttccaccccatttgatgttgaatgtggctatgtgacttgttttgggctcatggttggcagagtttacttcccctcctstggactttggacttagcacaggactttctgtgaccaatggtaagctagcagaggtgacaggcaaaagcccagctttttgtgtgtgttgttagttggcttttgcttcctacactcctgcctttttccattagataagcatgccttgggtagctgctagtctgagtaagaaggggcatatttgga

SEQ ID NO: 465795 - DNA, 605 bp, Homo sapiens
  misc_feature (1)...(605): n = A,T,C or G
aaatttcaattgcttatttttcccgtatcatagtccatacaacctttaacttattttttcactgtcccaacccagtggttttgacattttgggaagagagtcacttgaaattatttstaaaacaaacttgtaaggaacatctttaagtcagtttcatacattgatatttttatatatatatgtatgtatggcgcctattaatttttttggggaaaacaaatctttgttaagagcctcagatcaagaatatgcctttcccctacagatgtaactgtaaataatcacctcccctgttatcctgtctaaggcctttggtaatcacagacgctttcttcaatgtgttattctcctaatgtacccctgtcaatatactaacagtccaggagtgtagaactatgggtaagaaaataattatttaaagggtaaaagagaaaaagtggaaaataatcngtttcagtataaaaaatcatttataaagtgatatataaagtaatatattggtatttattttgtactttattaattattgttaaatgatcaattatttagtacatagtaggttataggtcacgaatatcaatatatctattccctttaaaaacact

SEQ ID NO: 465796 - DNA, 605 bp, Homo sapiens
  misc_feature (1)...(605): n = A,T,C or G
aaatttcaattgcttatttttcccgtatcatagtccatacaacctttaacttattttttcactgtcccaacccagtggttttgacattttgggaagagagtcacttgaaattatttgtaaaacaaacttgtaaggaacatctttaagtcagtttcatacattgatatttttatatatatatgtatgtatggcgcctattaatttttttkgggaaaacaaatctttgttaagagcctcagatcaagaatatgcctttcccctacagatgtaactgtaaataatcacctcccctgttatcctgtctaaggcctttggtaatcacagacgctttcttcaatgtgttattctcctaatgtacccctgtcaatatactaacagtccaggagtgtagaactatgggtaagaaaataattatttaaagggtaaaagagaaaaagtggaaaataatcngtttcagtataaaaaatcatttataaagtgatatataaagtaatatattggtatttattttgtactttattaattattgttaaatgatcaattatttagtacatagtaggttataggtcacgaatatcaatatatctattccctttaaaaacact

SEQ ID NO: 465797 - DNA, 637 bp, Homo sapiens
  misc_feature (1)...(637): n = A,T,C or G
ttcatacattgatatttttatatatatatgtatgtatggcgcctattaatttttttggggaaaacaaatctttgttaagagcctcagatcaagaatatgcctttcccctacagatgtaactgtaaataatcacctcccctgttatcctgtctaaggcctttggtaatcacagacgctttcttcaatgtgttattctcctaatgtacccctgtcaatatactaacagtccaggagtgtagaactatgggtaagaaaataattatttaaagggtaaargagaaaaagtggaaaataatcngtttcagtataaaaaatcatttataaagtgatatataaagtaatatattggtatttattttgtactttattaattattgttaaatgatcaattatttagtacatagtaggttataggtcacgaatatcaatatatctattccctttaaaaacactactttatatatgggcaaattaagacagggagaagttaagtaattcacccaaggctacagctaaatacttatttagctgtaaatacttatttacaaacccaggcagtcaggctccagaatccataacctcaaatactatatttacccccacatacatagtatttcatttaaaagcaagatttctg

SEQ ID NO: 465798 - DNA, 467 bp, Homo sapiens
taaacggctgcatggagagggactcaccaaggtgctatgaattgaacacacttaagtagagataggggttgcagggagctgaggcctattgtttctcagcaaaggaggcaacatagttctcagcagagcagaaccaatgtggggacctgacaaagttctagccctatatggactggtcccaataccactccaccttctttcccattctcctcttttaycatatgttactcactacctcactacctgcctctgcatttcaacctctaggcctctgatcacaatgtgcttgctacctggaattattttctcactcatatctatcggtcaaggcccagcaccaagctaccttcttcaagaaggcctcctgggtctcccagaagtgaagggccgactcttttttctatgggctatcctcaagaggccagagcagtgttaacttgacttagttactgttctgcagtgtcata

SEQ ID NO: 465799 - DNA, 389 bp, Homo sapiens
agcaccaaatcttggaacacgcattctatctataaccttcaccctagtttcatttcatttttttctatcttgcccaaatcatagaaggctgtttgtcacccttatttatagcttaacagttactactaaaatttttgagccagttgttccctttgaaattaaaaccattaaatgtaattaagccaagtctccttccaaattgtgttccttctagaaggatttataatttccaaaattataaagactagaagaaattttaaagatcctgttagggttcagaaaacaataccccagagtatgtcactttgacatgctgagtactttgaagtwaagaagcagcctcagaacgaaggtctctctgaccttctctcaccatcccggccacggtc

SEQ ID NO: 465800 - DNA, 603 bp, Homo sapiens
tgtttgcaagtctttttaaatgcttagggacacagaaactaaagggttatacttattttgccctttggtgaagccagcccaaagccaacttcctaggccaccagcctctgggtttgygacacctgccatttagaagtagcatcatgcacttgtggacttcagaaaggtttctctcctggctccatgtgagggcttttggcccagcagcctcattccaaggctattggaaactggcaacttgctggtagtggtgatccctggacgccctgatttagatattatagagagaccagagttatgactgaactacaaaacaaaaatcaagacatgtcctctgccatgggattttctccctccatttccatggatataaattttaaaatttatgtaatacaaatcttaaaagacattgaatcatataattaactaacggctctattacaatgataaaatgatatgaaaattaataccaaaactggcaagtagagcctatctcataatccaatgtttgaatatttattacctaagtggcccagaaggtctaggaccctgacacacagtaggtatcaatcttctttccttgtgagagcagtgccagatatt

SEQ ID NO: 465801 - DNA, 566 bp, Homo sapiens
tttgggttcctattatatgtcatacccttttcatatattcaaacttgaccatcacaaaaactctgcagggtaaatattaaaattctcattcatagaccagaaaaattgcttaatttgtcaatgacatggaactagaagtgctgcagcaacttctaattctgctcgcctgactggaagggccttggatctcagatgtttatcagtagctgcaaatcactgggatattctgaattcagaatggaaatgagcattccagagagaggaggcatgagttttgactgtggttctcctgctgtcccctcactgagaaggccgatcaaagccctctcctttacaaatggcttcctcaggccttctgcaacttttttctcaggtcaagtccatcctagcctccaaggtttggttcctatggctttcctgcctcaagtgccctttccaggcctctctctttagcktctgagtccagctcaaacctccaccacttcccagacagtcttccatgatgaccccagcccacactggcttttcccttttccacatccttgctatacttttggtggtggaag

SEQ ID NO: 465802 - DNA, 616 bp, Homo sapiens
tttagtttttcacgaaacatctgtactgttttccaaaatggctgcattaatttacatccccagcaacaggcagtcctgtcatttgtgacaacatggatgaacccggaggtcgttatgctaagagaaataagtcaggcacagaaagacaaatattgtatgatctgacttacatgtgaaatctgaaaaagtcaaactcatacaagcagaaagtagaatggtggttatcagaggttggggtagggggatgagaaaaggggagagatcgacgaagggtacaaagtttcagttacgtaggaggaataaattttagtcatctagtgcacagcttggtggccatagttaataataatgtawatttttaaattgctataggagtgtattttaaacattctcactataaataaatgacaagtaggtgtgaacctaaaagtatctgagacaggtcttagtcaatttataaagcttttttgccaagattaaggatacacctgtgacatggcctcaggaggtcctgaggacatgtacccaaggtggtcatggtacagctggttttatacatttcaggaagacataaaatttcaatcaatacatgtaagatttacattggttcaatcca

SEQ ID NO: 465803 - DNA, 479 bp, Homo sapiens
tgtaatgtacttataagatcaattgctcagaggagagtctgttctgaattagaaaattgttgctgctaaggagccccygggggatggggaattgggggaggggagggctgcacacaggttcagcatggcaggcccctgtgctgataatgaatgggggaaacgtggccagtaagacccacagaaagaaaaacacttaaacctcttgatgaaaggccatatgagaaggtaagtgttataattcaactgaaaataaaagcccgtggcaggttatccttccttccaggcagacagtctgtgggattgctttcctgcagctacagtggcagtgatggattatctgggaaggtgaagcagctgagctgatctaccccctcctcttccactcccaaattcccctcaggctacagggtttcagggcagctttaatccctcttagccttcactctcccacggattccaagacaagtcccaggagttac

SEQ ID NO: 465804 - DNA, 620 bp, Homo sapiens
aacaatgattgagagaaaacaaaagactggaaatacatttgttcatgatacagatattggagttagcagaggatgctaaaacaaccaatataaatatttaaaagaaaataaaggaaaagatgaaaaaaatgtagactctgaacaaaaaatgaaatttgaagaataatcaagtagacattctaaaactagaattataatatctgaaattaaaatcttggtagttggaattttacagtacactggacacagcagaggagaggattattgaactcaaggactgatcaatagacaaaaattgaactacacagagaaaactagaaaagaacataagaaatatatgaagcagtgagatagtcyactatgtatgcctaagatcacaggataagaagagagagagagagagagggagtaaaagcaatatttgaagagataatacttgagaatgctgaagagctgatgaaggacaccaactcgcaaatccaagaattcatgaaatcccaatgacagtaaatacaagtaaaagtactgtaggcataccagagtcacacaatgaaaactaaagacaaagaagaagtctcagaagcagccagcaatggaattgggtagtggggggaacactt

SEQ ID NO: 465805 - DNA, 602 bp, Homo sapiens
attacattcagcaattcctgttgaccacaaaacattttattatgccaccaacaggaagctatttagagatatacagcatctttatttatgcaacataacacctatggcaatagaaaccaggtatattgttgacaataaatcttacagccttgatttcataatttcagaggcatgaagaaaaatgggtttttatatagtttttaatgtggagaccacttaaatggtcccttaagtttagggatgttagtcttctaggatcagactattctaaatgaaatgtctccatacaaaagagtacagccatgtctatacattgcaataaaattgttcattgaatagttgattccaaactcagaccacctcattgagagactggggttcagttgttgacatatgacaattcatgtgaccctccagacctctggaatgagtagattgtctaaaatgttaatctttgctgttgttatctagttgtaatctataaggatgargcaaaggtgtattgtgctttaagtaataattaaataaatacatgtatattttggcattaatgcaaactaaaccacgagaagaatacagtcttaaaactgcatttggtcact

SEQ ID NO: 465806 - DNA, 597 bp, Homo sapiens
tttggcttgtagtattttattgaaatttttgcatttacgtttatctgggatattagcctatagtgtttttgttgttgttgttgttgttgtgtctttatctggttttgacattacagtaatgctggtcttcctataatttatttggaagtattccctactcttctaatttggggggataatttgagaagaattggtattcaggagtgaagccatctagtcctaggcttttcattgatcagagactttctattactgctttaatcttgttactcattattgagctgttcaggttttctttttattcatggttcagtcttggcaggttgtatgtgtccaggaatttattcatttcttctargtttttcaatttttttttagtataactgttcattagtcttatcattctttgtatctgtggtattgtaatctctcctttttcatctctgagttgctttatctgggacttctctctatttttcttagggtagctaaaggattttttgaaaattttgttttctcaaaatatcaacttttcatttttttgacctcaaatgttatttgtttatttctgctctgagatgttattttgtttatttc

SEQ ID NO: 465807 - DNA, 583 bp, Homo sapiens
ggtgatgatgaaccatgataatggtgaggaatatagctagatcacttagaagattatgtattatcctgaaattactttcattaagccttaccatgcacttagagttatggagtttctggatcagttccttgaagaaacctagtcagagccaactctgccctaccctcttgatgtagctgccatgtttccagcagtcacaggcccttgtcaccgtgttcacctacatggcttatgtatgtcttgaaccaatacttcatttttacaacctgctttccarcttctccctgatcttcttggtgactaactactatttttattttccttattcagtttacactaagatagtggacttgggaattaatatttctcctttggctctgatctgtggcttccctctgaaactatactttgatctcgcccatttaataatgctgtttccagtctccctagtccagggctgcccttctctcctattcttggcatcactccatgtggctagcacccctggctctacaaatgggatgtagtcaggaaccgatttaacaatcattaagacagattcttactgcatagatatgaaacc

SEQ ID NO: 465808 - DNA, 583 bp, Homo sapiens
ggatgtagtcaggaaccgatttaacaatcattaagacagattcttactgcatagatatgaaaccaagaccccaaaatgatggaagccctgtattgggtcacatactcagcatcaaaaggatcaaacttacccctgatctcttgaatctactcattttctaattttatctttatatatcactgtgttttcttccttacacttgaaacttggtctatcttggactattcaaaggactcaatagccagttctttgtaggaagatgcaataagagttcacaaaatgttctcagacttacacattttaaatattatttcctacaggtgtacacatggttagaactgataacctgcctgcctggcctgtagttgaatctagagtttgatatcgcattaacactacactcccctaaagtcaaactgatcttkatttttctttttcagttttccatatgaaaaactggttaaagacaaaaacttactgcatactgcaaccaagtagaatatttgattctaatagaaagttggcatagacaacttcaccatggttcaagtttatatccaccaaaattaagggttctttataa

SEQ ID NO: 465809 - DNA, 585 bp, Homo sapiens
gtcaagttagtatttacttctgaggggaaggaaaaaattgatgtgacttgggaagaaagcagaaacttcaaaagaattgttgacatatttttctaagttgagtgatgggtacatgattgtttttaaaccayagatagatgtataatcacaaattgtttttcaattaaaaataacaattaatggcagaataaacccccaggaatttgtaaactattagagttgtccaatgatcataaataggacttagacaacaagagagccagatggtaaatatttgtacctaggactagatggaataaagcaattaggtagcaaattttatcatcagtacgtagccctattcctgacataatagacattcagtaaatgtttgcccaacctttgggctgggacttgaaaaccacaggcttcattttattactaatgggagataaggctttagaggcatatggtggaatgctttgaaaatatcccttgtgggatttaggccattaaaaatgcagaataataaaatgcttatcattggagggagtcacagacataatgaaaacaacttgtcaatttatttagtctggcagcctcgta

SEQ ID NO: 465810 - DNA, 594 bp, Homo sapiens
aaaacaagttgttacttcctagatacaatgggggtacaggcattgggtaaatatagccattgcaaaagaaagaaattggccgaaacaaagggtttacaggtcccatgcaagtccaaaattcagcagggcagtaaaatcttaaagctcagccaggcacagtggctcatacctgtaatccccgcactttgggaggccaaggcgggcagatcatgaggtcaggagatcgagaccatcctggctaacacggtgaaaccccgtctctactaaaaatcaaaaaattagccgggcgtggtggcgggcacctgtagtcccagctacttgggaggctgaggcaggagaatggcatgaacccgggaggcggagcttgtagtgagccgagatcgcgccactgcactccagcctgggcgacagagcaagactctgtttcaaaacaaaamaaaacaaaacaaacaaacaaaaatcttaaagctccaaaacgatctcctttgactccatgtctcaaatccaggtctccctgatgcaagagatgggttcccatggtcttgtgcagctccacccctgtggctttgcagagtataccctcccttctggttg

SEQ ID NO: 465811 - DNA, 603 bp, Homo sapiens
cacacagtttaaaagccccacaaccaagtcaaagattctgtggtaggcaggacaatggtcccccaaakatatcagtgcctatgttaccttgtaaggaagatgggtctttgcaaatctgattaaattaaattaatgaattttgagatgagagacttttcttagattatctgggtgagacctaaatggaaacacacctgtctttatagaacaagtgtagaaggagatttgagaggaaaagacacacagagaaggagaaggcagtgtgaccatggagacagagattggagtgatgcagccagaaattgaggaatctgggcagccaccagaggctggaggaggcagggaacaaattctccctacagcctctggacagggtgctgccctactgacaacacaattttggccagtgatactgatttcagatgcctggtctccagaattattgtttgaagccaccatatgtttgtggtaatttgttatagtagccacaggaacttcattcagatacttttcccatatctgactctggtcctgctatatctttgtatgccattctgctcctgtctctgtgattttcatagtaaattcagccccagtgtgtat

SEQ ID NO: 465812 - DNA, 603 bp, Homo sapiens
cacacagtttaaaagccccacaaccaagtcaaagattctgtggtaggcaggacaatggtcccccaaagatatcagtgcctatgttaccttgtaaggaagatgggtctttrcaaatctgattaaattaaattaatgaattttgagatgagagacttttcttagattatctgggtgagacctaaatggaaacacacctgtctttatagaacaagtgtagaaggagatttgagaggaaaagacacacagagaaggagaaggcagtgtgaccatggagacagagattggagtgatgcagccagaaattgaggaatctgggcagccaccagaggctggaggaggcagggaacaaattctccctacagcctctggacagggtgctgccctactgacaacacaattttggccagtgatactgatttcagatgcctggtctccagaattattgtttgaagccaccatatgtttgtggtaatttgttatagtagccacaggaacttcattcagatacttttcccatatctgactctggtcctgctatatctttgtatgccattctgctcctgtctctgtgattttcatagtaaattcagccccagtgtgtat

SEQ ID NO: 465813 - DNA, 515 bp, Homo sapiens
atctgactctggtcctgctatatctttgtatgccattctgctcctgtctctgtgattttcatagtaaattcagccccagtgtgtatgctgtctggctattcaccttggtttgcgtgacacgttcatgaacaaatactcttaaattaaatatctattatatgtcaggcaatgttcaaggccctcaggacacagtgacgaatgcaagttgccttatttcaggctggggktgaaagttgtaggaaggaagaaggaggaagaataatgaaaatgaataagcacaataataaataaacaaataaagaaataataaacaaagaaaatgaataaacacaactaagtaaataatgaatagaataacaattcagaaacaaacccagacctgttgacaaaacatgaccatgccttgggaaaagcatgccttttcagtaaatggttctggtcaattggatatgaataagggggagggggaaggaattttaacctgtctcacattatgctcctaaattagttatcta

SEQ ID NO: 465814 - DNA, 430 bp, Homo sapiens
ccacactgatgtcaggtagcagtgccatgaccctacattatcagtgggctcaagatcacacaagttttgaagaggctaaaccagactcaggactctgtgagtcatggcggtcttttctctcccctcatgcactctgtggacatttaagattacaggatgtttctccagttgtcttctatccttcaagaggtcactatctcacaagaataaatttaagtctttccacattattaatttgcattataggacccataggataacaaattctgttaattcgttgtccccattctactgtgatctaccctctttacctctgtctaccccttccagtctgggagsgaagcctccaatatggactgccagcattgtttaacaagttcatgatgcaattacacagtcgtcatattctaattcatgccacgcccacaca

SEQ ID NO: 465815 - DNA, 588 bp, Homo sapiens
atccataagtataacacagtatggaatgggccatggaagcttgcacacggtgtcctggggccactgcggggargggggggccctgcacttatatttttatatctctctctccttatgttccaaagttcagacctccttctgacccatttctctctaacacagatctcttagtactgtaaaaaactagcccttggaagaagcacataatcagacagacttctaaatctggctccagcattgacaagctgtgtgtccttgagcaaatcatttttaagttctctgagtgtgtaatttctccctccagcacgtggaaatgttgataatgctgcatacacttgaaataggagtgaagggagatacgtaaaatgcctagcaaagtgcctgagcataataaatgtgattactgtcctacatacagctagtttaaattatcttgctggtcatatctcatctctggccctggtaatgagcctgacttatcatggtaacagctaacacttattgagtatttacagtgaaccaaccattctggacgtattgtctcagtccatcctcacaaccacccactgagtagatatacccagccaa

SEQ ID NO: 465816 - DNA, 622 bp, Homo sapiens
tgccatcatagattggaggagactataagacatgataattaaatgcagtgtagagtcctaaataggaccctagaacagacaaaaggatgttaaatacattctgagctttatttaatagtactacactaaggttagttttatagattttataaacatttaatatattaacattaggggaagctgggtgaagggtatatgagaattttccatactatattttgcaattctattgtaaatctaaaatattattttcaattaaaacataactatcmaaaaactatatgtgagttgaattttactttatcactgattaccattagaatatcagaaatctgttgtttaattctgattgttctttaaggtacagacaataacatgttagttttccatagctctatcactctggcaattatgtcattatctgtaaacaaacacataattttactagtacaacatgtttgaaagagtcttgcattggtatttttcaaataaatgatatctttcacaaacttgagtctcttccaatgtatacattttgtaaatttaattatttcatatcagatcacgagttaatgagtagctaccaaactgaacatactatgcatgctcacacctctgtatg

SEQ ID NO: 465817 - DNA, 557 bp, Homo sapiens
attttcaattaaaacataactatcaaaaaactatatgtgagttgaattttactttatcactgattaccattagaatatcagaaatctgttgtttaattctgattgttctttaaggtacagacaataacatgttagttttccatagctctatcactctggcaattatgtcattatctgtaaacaaacacataattttactagtacaacatgtttgaaagagtcttgcattggtatttttcaaataaatgatatctttcacaaacttgagtctcttccaatgtatacattttgtaaatttaattatttcatatcagatcacgagttaatgagtagctaccaaactgaacatactatgcatgctcacacctctgtatgaaggtgtgaatcacctttgtctttgctmcttcttctgctgaaatgttcttgccccttctctattagttctcattattcgagatgcagcttaaatggtctacttttttcattttgtacatccagagtgtgatgtctttaatagctgtaattttcacaatattgaaaagctggtgcatcatagg

SEQ ID NO: 465818 - DNA, 555 bp, Homo sapiens
tgtttttgtttttatttttccattgattccggtggtattgatgtcatcagtactggaatyaaggtctctaaatggttttcctaaggcaggtaattctgagattcacgagcaacaccttccttaaagacaatgacgatggtggatagatatgagaaagaaaggagagagagagaaaaacagaagctgcccaggcttccaacccctgagagataaagatgttgggatctcagccaacacctttaagtaataaggagtgatgggagagaaaggctgacagtttgtgacatgtgacatgtgactttctaatgatccagagacaggatttgttctaaacagaaacagcttgtaaggtgacatcaggaacagtttccaatccaacaagtagctcatatgcctctcatgaaggttaaaacccagagggaagtaattaattagaggaacagagccctatcttggaatctaaattgacaatactttgttaaactccccttgagtcattgactacacccattctgacatggaaagttgcctcagtggaagaaaaagaagtcttca

SEQ ID NO: 465819 - DNA, 555 bp, Homo sapiens
tgtttttgtttttatttttccattgattccggtggtattgatgtcatcagtactggaattaaggtctctaaatggttttcctaaggcaggtaattctgagattcacragcaacaccttccttaaagacaatgacgatggtggatagatatgagaaagaaaggagagagagagaaaaacagaagctgcccaggcttccaacccctgagagataaagatgttgggatctcagccaacacctttaagtaataaggagtgatgggagagaaaggctgacagtttgtgacatgtgacatgtgactttctaatgatccagagacaggatttgttctaaacagaaacagcttgtaaggtgacatcaggaacagtttccaatccaacaagtagctcatatgcctctcatgaaggttaaaacccagagggaagtaattaattagaggaacagagccctatcttggaatctaaattgacaatactttgttaaactccccttgagtcattgactacacccattctgacatggaaagttgcctcagtggaagaaaaagaagtcttca

SEQ ID NO: 465820 - DNA, 541 bp, Homo sapiens
ctgctgatttctttggggcatcaccctcataaacttttcataaagcctcaatgatttcaccattcttccacccaagcttcaccataaatttaatgtttactcttgcttcaattttagcagaattcatgttgctctggtaggggytgttttcaaactgatgtcttgtccctcttagtctctctcctcaaactagatcccattcagacatgttataaaaagttagtatgagtttattttggtgcaaaaaattttttgaaatccatgcatagttttttcataatatgcattttccatgaactttttgaaggcccttcctatatatgatagtatttgctatttgagtggttattttcttttaggcctgtgataagtgttttaaatacattatctcaatcagaaaaggcctatgatacatcactgggcttaattcccactggggagcaaaattaaataaagacagaattaaaagtgtagttacaagctctgaaaagtgctttgaagggaaacatacagagccatgaaagcatctaagagggcaagc

SEQ ID NO: 465821 - DNA, 472 bp, Homo sapiens
tttggtaccctcttgttatcctaattacagagagcaaaacaaagaatgttcataaagtggtaaaactcaagtggcagaagatcagaatcctcctataataatattgagaaatgtccaagctttctaaagagagctgctttgcatgcattttcacttaatccttcaaaatactcccatataatgtatattattacgtcaccattttacagatgtagaaaccgaggatcagtgatattaaataaagttgcccaggcccatcaagctaataagtgtcaatgcagagactcagactcagggctgtctgaattcaaagcctgtgctgttgaatgccttctaacgctgcctcacaaatcctcatttattcaggacttacatcaatattaaacactcttcctccccagtcaggcctcttccttgttgctgggtgastgaccgtgctgttagtcaccaccatggaaagaaacctttgtga

SEQ ID NO: 465822 - DNA, 647 bp, Homo sapiens
ccatatatagaagttaagcgaacaaatacaaaaaacaatgtctgtaccatattcctaytggagcatatttagatgaaacataacagaggaggtgcctggggagggcagcaggaggagaatggagatgttgacaagagactgtcatgaactaatgagtatggctaaacctctttgcacttcaaatcctgaagggaaaagatgcataacaacattatttcaagatcaaggatggatcaacagaacaagagagtcaggaagccactgacttggccagataaacctcagagtcccttttaatgttaacattttgtgtccagtgattttagttcattagttcatgcaatatttacggaatgcctcccatatacgtggcaatattctcagtgcctgagtacctcaaaaagcaaatcagaatgaccctctgccattgtggagattatattctagtgagaggagacaggtaacaagcaataaacataaaattatggtatatggaaaaaggtgataaatactaaaggcaaaaaagtccaggcagaggaagatattaggagtgcagaggaagagtgccagggtgcaatttatgatggggtgctcaggagaggacttatttttaaaggtgatatttgagcaaatacttgcaaaagtag

SEQ ID NO: 465823 - DNA, 647 bp, Homo sapiens
ccatatatagaagttaagcgaacaaatacaaaaaacaatgtctgtaccatattcctattggagcatatttagatgaaacataacagaggaggtgcctggggagggcagcaggaggagaatggagatgttgacaagagactgtcatgaactaatgagtatggctaaacctctttgcacttcaaatcctgaagggaaaagatgcataacaacattatttcaagatcaaggatggatcaacagaacaagagagtcaggaagccactgacttggccagataaacctcagagtcccttttaatgttaacattttgtgtccagtgattttagttcattagttcatgcaatatttacggaatgcctcccatatacgtggcaatattctcagtgcctgagtacctcaaaaagcaaatcagaatgaccctctgccattgtggagattatattctagtgagaggagacaggtaacaagcaataaacataaaattatggtatatggaaaaaggtgataaatactaaaggcaaaaaagtccaggcagaggaagatattaggagtgcagaggaagagtgccagggtgcmatttatgatggggtgctcaggagaggacttatttttaaaggtgatatttgagcaaatacttgcaaaagtag

SEQ ID NO: 465824 - DNA, 492 bp, Homo sapiens
tcaggtcataagggtggagactttacaaatgagattaatgcctttataaaagggaccctagagagctcattcaccctctttctgccatgtaagtattcaagaagtcagcagtatgcaacctggtagagagctctcagtagaactaaccatgctgaaaccccgatctcagatttccagcctgcagaactgtgagaaataagatctgttgtttacaagccattcagtctatgttactttgttatagcagcctgaactaagacattaatattgaagaatgtggcatataacttcaggctagtagagtaattaatactgaaaccccaagkttctacccacctagcctcaggtagtgtgggatgcaggagtagaacctgctcctgaaagctatgacgtgggggagcagggcagctcctgtcttgtccccaagcagctgactcccaaagaggaggaagggcaggtgctggaaagcacaggctaaacttcttccctaaa

SEQ ID NO: 465825 - DNA, 610 bp, Homo sapiens
agtccctctttattcatggtttcactttttatggtttcagttacttgtgatcaactgcagtctaaaaatattaaataaaaaattccagaaacaaactatttataagtttaaaattgcatgctgttctcagtaccatgatgaaatattgctccatgccatctgagacatgagcaatccctttttccagtgtatatatgctctgtgtgatacgtgcccattataggaataaacagtgtatatagggttctgtacaatctgcagctttaagcatccactaggggtctttgaacttattctttgccrataatgggggactactgtatcgagaatacaacttggaatgtcactgtaacccagatttaattttgtgcctataatacttgcctgtggaaagaaaatgggacaagtaataacaaaatcacatatggatagaagaaacactgatattctcattttgttcatatattgatttttgctgacttctattagttcattgtgctttcttttagcttttcgagcatatttaaaacagttgttttaaagtctttgtctataagccaaatgtctgtgtttcttcagagttgatttctgccactttattttcttcctt

SEQ ID NO: 465826 - DNA, 609 bp, Homo sapiens
ggcattatcacagttcactacagtcttgaactcctgggttcaagcaatccttccacctcagcctctcaagtagctgggactacaggtgcatgccaccatgcccagctgagttttaaattttttgtagatgtggggtctcgccatgttgcccaggcagaacttttcaaaacatcacctgaaactctgcattgagaaattaggttataatgattaccctgaatcactgcaaatgacttttgtttttgtttttgctttaataggagaaaaggcatacaaacttatttaacatgcacacaaaggaaccttcagaataaagacccaagccaacaataaggyacagaatcttatattccatcctgaggttatagaaaaaaatgtgagctcagagtgtagcccaaaactggttatgttggtaaatcaggtttagtggcaagacagattatgagagggagaaaggaagacgccgatctagcaaaggtagctttgttatatggatgaagcctcatagagagcagtgctccgagagagtagacagtaaatatcttttcagacctttaaaggtgtcagtctcagttaatctctcttagatccaggaattgcctataaagg

SEQ ID NO: 465827 - DNA, 572 bp, Homo sapiens
gttcagcaagttctcaggtgcagtgcctgactagtgacagcttcccctagcactccacaggatgaattcctagcaaagtccacctgtttgacaccttagttaattctttattatctagtgagccacagctatgccctatctggatctcaggttggaaggaagagagaagggagtctttctggaacactttatatgagttctgggggtagtgactgctccttttatctgctaccctatattctttagactctctttacctcttactcgccaatcccctgttacttcaatctactattatagttaattctttatattacatttccttgttcactttattgtgtggtttctatcttctggttggaccctgactgatacatacatctaattcatattaagcgggcccaacactaaatagattggcctagataatctgttatatattacttctcttctagttctaagactttaaaaaaaattcgattccacarctcatgttacttctcatgataataaaaagtgtaatgcataagttataaattaatacctaaggcaaaacaacaatgaaggccctg

SEQ ID NO: 465828 - DNA, 561 bp, Homo sapiens
aaacttacttgcgctaaatccgatgcaaagttcagaaaatgcagatgatgaagttctgttctcaaggagtttataacccagtgggtaaaatatccacaatcaccaccacaaccacaagaaccataagaaaaacscaattcacgcaattacaatctgtataatgagtattaccaaggttaaagcatcaggagctatgagaacacagagaagagactcctaacctcttctccattatcagggaagggcttcttagaggaaattgacatctaagatgagacacagaaaagagaagaccttatctaggtaaagaggaatagaatatacagagcaattatttggttttttgtttgtttatttagctttgtttttgcagcatgtgcaaaagcctggtagaaagagagggcacaatgcctttgacaaatgcaaagtatcctagttcagtaggatagagaagatagactaatgaaatatatagagcaatagaggagatgacacgtagtaaaatatacggactgatagaggagctgatactggagataaaaattatttttgaagccatag

SEQ ID NO: 465829 - DNA, 561 bp, Homo sapiens
aaacttacttgcgctaaatccgatgcaaagttcagaaaatgcagatgatgaagttctgttctcaaggagtttataacccagtgggtaaaatatccacaatcaccaccacaaccacaagaaccataagaaaaacccaattcacgcaattacaatctgtataatgagtattaccaaggttaaagcaycaggagctatgagaacacagagaagagactcctaacctcttctccattatcagggaagggcttcttagaggaaattgacatctaagatgagacacagaaaagagaagaccttatctaggtaaagaggaatagaatatacagagcaattatttggttttttgtttgtttatttagctttgtttttgcagcatgtgcaaaagcctggtagaaagagagggcacaatgcctttgacaaatgcaaagtatcctagttcagtaggatagagaagatagactaatgaaatatatagagcaatagaggagatgacacgtagtaaaatatacggactgatagaggagctgatactggagataaaaattatttttgaagccatag

SEQ ID NO: 465830 - DNA, 579 bp, Homo sapiens
ctttacattgaacttactttcctattgttttatggtacaccagacattgtataagttctttgaaaatattatgtcatttagtcctcaccacaatgatccaaatcattacacttctcaggcaaggaaagcacgcttccaaaagactgggagcttgcctggattcatggagctggtgaggaacagcaccaggatgtgaagcaggtgtttctgactctgaagtttgtgtgctcttaaccaccaggccactctgcttcctgtattcctgcttcctttgttgaatgggcatataggttttatagaatgagaaactgctgaaactggaagagaacttagtgatcatccaatccagctctttcattttatagttgtccaaaaaaacaaataattttcctgagatttatttagctatctgcttatatttatcataggtgattattttcatgctttatgtttggggctgtaaatggtgccaagattctttgctttttctgagttgattttcagccctggaggcactgtaygtaaatgttgatgacacacaacttcctaaccaccccccgccccaccccgatgctggag

SEQ ID NO: 465831 - DNA, 606 bp, Homo sapiens
actttacattgaacttactttcctattgttttatggtacaccagacattgtataagttctttgaaaatattatgtcatttagtcctcaccacaatgatccaaatcattacacttctcaggcaaggaaagcacgcttccaaaagactgggagcttgcctggattcatggagctggtgaggaacagcaccaggatgtgaagcaggtgtttctgactctgaagtttgtgtgctcttaaccaccaggccactctgcttcctgtattcctgcttcctttgttgaatgggcatataggttttatagaatgagaaactgctgaaactggaagagaacttagtgatcatccaatccagctctttcattttatagttgtccaaaaaaacaaataattttcctgagatttatttagctatctgcttatatttatcataggtgattattttcatgctttatgtttggggctgtaaatggtgccaagattctttgctttttctgagttgattttcagccctggaggcactgtacrtaaatgttgatgacacacaacttcctaaccaccccccgccccaccccgatgctggagagaaccctgaagggtcaccatgtcat

SEQ ID NO: 465832 - DNA, 585 bp, Homo sapiens
gccaagtggtggggtaaggggatcaaatctcaagagaactcgtggggaggatttaatatatgtttcttggagtttgagggtaactagggactggtgcctggcttaaagagtttaaaataaaaaaaattccaaaagagagatggctgatgcagcctgaggtggaggcctgtggtgggagcctgcttttccagagttcagagggggcaagtacgtggctctatttcccaggctggatgtggactggcggcctgaaagttcaaggtgacaccaacagaagggtagaacagaggctaaggaagagattgagggtggccagatcaagatggaaatctcaggtggaaggcccccaaaatgcggagtgggacaaggatctctaaatgcagtatgaggctttggacatacagaaggcctgacactgcagggctgtctaccgaagatggtgcccattttggcatccccacctccacccagggcaggggccctggagaggtgagcaagtgaggtgtgagtrgaatgaccctctctcccatagtaggctccatgcctgtatcagtcctgagctgaagtgggagggaaggggaaggg

SEQ ID NO: 465833 - DNA, 585 bp, Homo sapiens
acaacatcaacaacaaagaatgaaaaagagtgaaaaaagcctatgagacctattgaacaccagcaaaccaaaatatacattgtgagatttacaaaagcacagamgaaagagaaagacacagaaagcttatttaaagaaataatggctgaacactccccaaatctgggaggggaaatgtacattgagactcatgaagcccaaagaatctcaaataaatacaacctaaagagatttatgctgagatacaatattattaagctgtcaaaagtcaaagacaaaaaatatttctgaaaacagcaagagaaaagtgactcattacatacaagaaactccccataggactatcagcagatttctcagccaaaatcctgtaagtcagagaggaatgggatgatgttcaaaatgctgaaagtagaaaaataaaaacaaactgcgaaccaagaatgctatacctggcaaaattatccattaaaaatgaagaagggataaagattttcccacagaaacagaaaactaagcaagttgatcaaaactagacctttcttacaaaaaataatatggttctccaagttgaaacaagagtgc

SEQ ID NO: 465834 - DNA, 585 bp, Homo sapiens
acaacatcaacaacaaagaatgaaaaagagtgaaaaaagcctatgagacctattgaacaccagcaaaccaaaatatacattgtgagatttacaaaagcacagaagaaagagaaagacacagaaagcttatttaaagaaataatggctgaacactccccaaatctgggaggggaaatgtacattgagactcatgaagcccaaagaatctcaaataaatacaacctraagagatttatgctgagatacaatattattaagctgtcaaaagtcaaagacaaaaaatatttctgaaaacagcaagagaaaagtgactcattacatacaagaaactccccataggactatcagcagatttctcagccaaaatcctgtaagtcagagaggaatgggatgatgttcaaaatgctgaaagtagaaaaataaaaacaaactgcgaaccaagaatgctatacctggcaaaattatccattaaaaatgaagaagggataaagattttcccacagaaacagaaaactaagcaagttgatcaaaactagacctttcttacaaaaaataatatggttctccaagttgaaacaagagtgc

SEQ ID NO: 465835 - DNA, 536 bp, Homo sapiens
tacacatacaagttgagggtgcctgtgaaaagtgagagaaaggcctctcacttccccactggatgcttacarggtgtggagttgaaggagggagaagggctgaaagggtcttggaaggattcttagagattgtatgtgaaactcatgactgttgcctcttctctcctagaactgggcctgaagaccagctgtggccatgcacaatggtagagtgaggagagatggtggcagtagacagccatctctgctaccaggttttggtctggcagggatgattgagtttcctgtggccaagtgggtcctgtgggaagtttctgggcttgagtcaccatacaagaaggaagcctgttggggcaaaatacttcaggagtaacagctgtggggtgaacaacacagacagccaggggtagccaagagaggattacttggcaccagtgacatgcaaatcttcccttcttcatctttaaaccccttcccccgacttggaccccaggatatccagaagacaaagtggagaggtggccaagaatgagaag

SEQ ID NO: 465836 - DNA, 536 bp, Homo sapiens
tacacatacaagttgagggtgcctgtgaaaagtgagagaaaggcctctcacttccccactggatgcttacagggtgtggagttgaaggagggagaagggctgaaagggtcttggaaggattcttagagattgtatgtgaaactcatgactgttgcctcttctctcctagaaytgggcctgaagaccagctgtggccatgcacaatggtagagtgaggagagatggtggcagtagacagccatctctgctaccaggttttggtctggcagggatgattgagtttcctgtggccaagtgggtcctgtgggaagtttctgggcttgagtcaccatacaagaaggaagcctgttggggcaaaatacttcaggagtaacagctgtggggtgaacaacacagacagccaggggtagccaagagaggattacttggcaccagtgacatgcaaatcttcccttcttcatctttaaaccccttcccccgacttggaccccaggatatccagaagacaaagtggagaggtggccaagaatgagaag

SEQ ID NO: 465837 - DNA, 616 bp, Homo sapiens
agtccggtccaatcctgtgaaattcctgctgtttttctgtttctaacaaaaccacagggtgagatgtyaagactgctgcttccctgatcaagataacagaatgggccacagtgaaggctctagaggaacaggaatatggataaaccccagctctggaaaaaatcccaaatcgtgaagaattcgatttggaattgtgtgtatgtgtgtgtgtgctcgtgtgcgcctgtgtgtatgtgaggaggaggcataaagagagagagtgggggtgggcagggaggagaatagcgggcttatgcgtattgtgcttgttttggctggtattaaaatgcatcagcatttcctgaatcctcatggactattgacaggttctgagataccttgaagaatttgtgggcagaggggtggggggatgtcaccttgtgatgacaaattgggtggaaaactttttaaataatgaagtcatatacgtgtaatgaagtgtttattgcacttgaggattctttttaaatggaatgtgttgtaaattgttggtaatgtttctattccttttcattattttctcaccagtctgggagtggaagagaattttttcttccatatgcaaagtaggttttaa

SEQ ID NO: 465838 - DNA, 580 bp, Homo sapiens
caacttgtattccgaccagcatgaaagagttctctttaatcacccaatggcacamaatagagactcctgttgggggttgggggatgtcatactttattagtaagatgaaaatatctctagaaaaagtgagttctattctagactcacaacaacacaaagcttaaaaacaacttctgaaaggattaagattactgaacattatttactttcctgaagaaatgaagcataattctattgtttaaaatggcaacaaattgagccactcaacaacataaaattcataatatccagtgagcaactaaatatttctagacatgacaagaagaagaaaaatgtgagaaataataataaatcagtcaatagaaatgaacatcaaaataaaaatgataatgggaacagcaggcaaacatgctaaaatagctcttacaaatatgtttaagtattttaagaaaacaaacataatgataagagaaatagtacacaaagaaccaactagtactttgggaatggaaaaattctgaacatttcacaacatctgaaataaaaactcactggatgggatttaacaaaagataagaca

SEQ ID NO: 465839 - DNA, 580 bp, Homo sapiens
caacttgtattccgaccagcatgaaagagttctctttaatcacccaatggcacacaatagagactcctgttgggggttgggggatgtcatactttattagtaagatgaaaatatctctagaaaaagtgagttctattctagactcacaacaacamaaagcttaaaaacaacttctgaaaggattaagattactgaacattatttactttcctgaagaaatgaagcataattctattgtttaaaatggcaacaaattgagccactcaacaacataaaattcataatatccagtgagcaactaaatatttctagacatgacaagaagaagaaaaatgtgagaaataataataaatcagtcaatagaaatgaacatcaaaataaaaatgataatgggaacagcaggcaaacatgctaaaatagctcttacaaatatgtttaagtattttaagaaaacaaacataatgataagagaaatagtacacaaagaaccaactagtactttgggaatggaaaaattctgaacatttcacaacatctgaaataaaaactcactggatgggatttaacaaaagataagaca

SEQ ID NO: 465840 - DNA, 657 bp, Homo sapiens
ataaagcataaatgctccataaattatacaactacaacatgttaatggtggtggttgttttcttttagacaccatttctgagcccagagatgtaaatgccatttcagtcttaactacagcacagtctgtgaaacatcccagaccctgctgagygaggagtcaagacctgctggagtgtccccttcctccatcgattcctgttgccggcagagccagggctgaagagaggaaattgcaaccctcctgttttacgaccttgatgctgtggctgaagggtttaagacagccagcctgactaaccagggaggctggacaccttgggaagccttctcttcatgtattgtttgctcctaacatgtcgcaggccccgtgggagtgatgaaaacaagtccttccaggcatctagccctggcaggcctgccagcctcctctagatctaagtcagggaggctggcagtagcaggctgggtgaacttgcagtagactttccacagagctttatatgttgtgtgttatgcaaactatggtggctaagagagggactctggaaccagccaaatctgagttcatatccaagctctgctgctggctagctttgtaatcctgtgaattacttcacttctctaaccttggtttcctcttctgttaatatgagca

SEQ ID NO: 465841 - DNA, 626 bp, Homo sapiens
cctcagtgttctccaaaagaaagactgaggctatctacaaagcctgaggaagtggaggtatttgttcaaggtttaaagagacaggaaaaaatagactcctagagaaggcttagtgagccactrataaacttcaaaataaaagtaaatgtattgagattgcctgaggatgactgatgggcacaatttgaaagaaatgaagaaactcactctacccaccctccttattccactgggaatggaagaaggaaaatctctgtggaagaagattgcaagaacagtatccagggaaaaggcaagtctgttgtggtaaggaagcagaaaaagggctttagggaaaggttaaggggaatatgtccttaatagaactggggctccatgggctcaggtgaagcatcccattgaggagcagcaagggtgggagtgggcctgaactggatagaaagagagggaagcaggactcactcacaggggagtagaaagcagtttttaatgattaagggataaaggaggctgaaagttggagatgcgctagagattcttgtttgttatgggaggacagagcaaataccaattaagttcattgaattaacctgcccctaaaatctaagttaaataagttaaatatt

SEQ ID NO: 465842 - DNA, 453 bp, Homo sapiens
aacaagtctctaggaagttccaaattttccttaatcttcctgtcttcttctaagccctttgagctgttccaacctctgcctgttacccagttccaaagctacttccacatttttgggtatgtttatagcaatgccccactccttggtaccaattttctgtattagttcattcttgtactgctataaaaaactacctgagactgggtaatttataaagaaaagaggtttaattggctcatggttccataggctatacacaagcatggcagcagctgcttctggggaggcctcagggagcttttactcatagtggaaggcaaagcaggagcaggtgtcttacatggcaaaggcaggaccaagtgggggcrgggaggtgctacatacttttaaacaaccagatatcatgagaatgctatcacaagacagcaccaaggggatgatgctaaacccttc

SEQ ID NO: 465843 - DNA, 458 bp, Homo sapiens
aaaatcacaaaatactcataatgttttaagaaagtttatgcatttttgttgggcagcattcaaaaccatccgccacgggttggacaaacttcttctagattawgttactgttaaaattatttttggtatccaagtggttaaaattgtatactaaatttaaaatatagttttaaataaacagtcactaaacttaaaggtaaaatattgctggaaatgcatctcttaatgatattgatggggttggtatttttttttctactagttcatatatccatgaacgaatattattgctagaaccacaaagctgaccataaattcccttaatatttttcattgttttgatattaatgttgaaaaactctgtttagacaaataagtagataaagatggaagatgtttttatagcaatgacaatcaattctttaaaccccctctgaattatgtgccccaattcacac

SEQ ID NO: 465844 - DNA, 391 bp, Homo sapiens
cttaccagccccagactcccttgattttggagagcggaggaacagaccgtgtgagggcaaggggaaggggtcaccacagcctctctacctgtctccagcagacaacycggagggctacaccagtgcacaggggctcagaggtggctcctttcagcgtctttccctgcctctctgccctccccctcccaccaaagttcaagtgcagcttctgctctaagtctttgcacagccccatctactctgagctggagcttaggaagctggagtcactcacccacatagaaatactctggggacttgtcctctgatgataactcctttatggcacctccgaaccgaaaccatagtccaaaagcaatgacggccgatccagccagctggaaggcaaacg

SEQ ID NO: 465845 - DNA, 551 bp, Homo sapiens
tgtctgcttagggtcttatagacctgggtctcctctgaatcctggttccttgctgctagaccatggcatgtcccatagtcttatacctgcagctgttgtctcagaagcaagaagtacagggagtgagcactrgtcttcagtcagtaggcctgactttctgtggcactatgcttggcctatggttggttactgattgtatgagtaaacgagtgaccttgggcaagtgactttacctttctgtgctttggtttcctcatatgcacaatgcaagtgttgagttggataacctctgacatctaagccccatccagttccagttttaagtatctatattttctgattaaatccaaacttcctaggacctgccaaagaagctgttcctttcttcccagttcactcatcctggtttcccagcacagactctctgacatgacctttcctgatacctaccttgcctatagtggagtgagtggagtgcagggtgtgccagcccaaggcctgctttgccttgcatctccacatagtgcccaggctgggttgcccaaacaaaa

SEQ ID NO: 465846 - DNA, 551 bp, Homo sapiens
tgtctgcttagggtcttatagacctgggtctcctctgaatcctggttccttgctgctagaccatggcatgtcccatagtcttatacctgcagctgttgtctcagaagcaagaagtacagggagtgagcactggtcttcagtcagtaggcctgactttctgtggcactatgcttggcctatggttggttactgattgtatgagtaaacgagtgaccttgggcaagtgactttacctttctgtgctttggtttcctcatatgcacaatgcaagtgttgagttggataacctctgacatctaagccycatccagttccagttttaagtatctatattttctgattaaatccaaacttcctaggacctgccaaagaagctgttcctttcttcccagttcactcatcctggtttcccagcacagactctctgacatgacctttcctgatacctaccttgcctatagtggagtgagtggagtgcagggtgtgccagcccaaggcctgctttgccttgcatctccacatagtgcccaggctgggttgcccaaacaaaa

SEQ ID NO: 465847 - DNA, 551 bp, Homo sapiens
tgtctgcttagggtcttatagacctgggtctcctctgaatcctggttccttgctgctagaccatggcatgtcccatagtcttatacctgcagctgttgtctcagaagcaagaagtacagggagtgagcactggtcttcagtcagtaggcctgactttctgtggcactatgcttggcctatggttggttactgattgtatgagtaaacgagtgaccttgggcaagtgactttacctttctgtgctttggtttcctcatatgcacaatgcaagtgttgagttggataacctctgacatctaagccccatccagttcyagttttaagtatctatattttctgattaaatccaaacttcctaggacctgccaaagaagctgttcctttcttcccagttcactcatcctggtttcccagcacagactctctgacatgacctttcctgatacctaccttgcctatagtggagtgagtggagtgcagggtgtgccagcccaaggcctgctttgccttgcatctccacatagtgcccaggctgggttgcccaaacaaaa

SEQ ID NO: 465848 - DNA, 566 bp, Homo sapiens
acacacacgcgcatgctgcactcaaatgaaagaatgaacaaaatcaattctgtattcttgcttctccagggtgaataccaactcatttgcaattctcttctttgggatgaagtcacaaaattggaaatgatgcttcaaccctagaattttcattaaatgcttttaagctaatacttgctcttggtggcaattctcatccccattggaatcacataatgagcacttatgattattgatctgattgtaaaccccattatgataccttaagggtaatggagtctcaccctcttagcaggcaaaagtcagargcacatttgctctggaagatgatctgaattttctcaaagaggaaaaccagctcccaagatttttattctgttatgcagtaaaagcaagtcaaggattcagatggcatttcttcaaaatcaagggttttatcagaaaaaatacaagaattgaatgccatatgacatctatgtcaaatggtctccgaaggacctcactaccttggccttcatcaggaccaggtgagtgggaactgagaggcaggactgtggcagcctgtg

SEQ ID NO: 465849 - DNA, 597 bp, Homo sapiens
caatgcctcggctccatgctgggcactgaggacactgcaatgcaccagaaatgatccctgccctgcaggagctgcaattgcctcttggtgactgtttctgaygcactttatgtggaagttggttcaatcaggaaagagacacctctttggacccccatctctcacccagtccacacttcctggtggtgactggtcggctccctagtttcctggtctggcctgagcagccggatcttctcctacgtacctgcttcatttttcctgctgcctgaagagagtaagtctgcttccttccactacgtgggtagtaatgtgggagtgttttgatagctaaagggccgcttgcgtgtttgtactgagtttcacacacatgcagaggcacccagccctgcaccaagactcctggagattgtccatggactcaccctgggacaacagtcaccccatttagtgagcctgtgttttatgtgcaatttgatgatcatagtagctctgtgagatagagtttcatcagatatttaatatcagattgtattaacatcattattactttacaggtcaggaaacttaggctcagaaaagttgcctaagatccca

SEQ ID NO: 465850 - DNA, 556 bp, Homo sapiens
tagttcagctactcacttatgaagcaaagaatggaaatttggaaagcctgagtctggcctggtgctaaataaacaaggggattatccacaaaatttatctaaatcatatgagaatgggtagttctttgcagtaagcagtctcccagaacaacaaaaaaaaaaaaaaaaaaaaagggggaatttctttaatttaaatttctttaattatgttttccaggattacagaactcagacaaagctcaacattttctataaaatattcttattatgttgataagacgaagtgtcactaatctctactgtttcactgtttcctgtattctgaattcagaatgtctcagtatgggccaatgtcttctgaggaaaagccaggaagtgctatgtgtgtaaggtcccttggtttgtattgaaggsgaggctcctactagtatttccatattgttagggactctgggaggtttcatatcccatggcaaagcaccacagtataatctgcaatggaaacaggctctggctttcttctgtaaagtgggagaactacttaaagtattcatgc

SEQ ID NO: 465851 - DNA, 530 bp, Homo sapiens
aaagttcatgtgttggaaacttaatccctaatgcaacaatgttgagaagtgaggacctttaagcatgaatgagtaatgaaggctctactcttatgaatagatcaatgccatgatcaagggagtgggttagttcttgagggaatgggtttctgataaaaggatgaatttagctttctttatgctctcttgcattctcatatgctctcttgcattctcaygtgctctcttgctcttccacctctgccataggatgacacattatgaaggcccttgtaagacactgagactatgctcttagatttctcagcctctagaaccataagctgaataaatttatgtacattataaatgacccagtctgtggcatcctgtgtggttatagcagtataaaatgaactaagacacaaaatgataaacatttagtgagttctcaatatgtatttgttgaaaaaataattgtgtagttgtgaagttggtagagtgtgaatctggaacttctaggttttgcaccttttgaaaaagcccattct

SEQ ID NO: 465852 - DNA, 629 bp, Homo sapiens
gtgtccatatgcctaatttttcctggtcatgtgacaagaacctggattttagctaaactaagaagcaaaaatccttcatcatattggcggctcatatgaggacatgaggaaaagtgagtaaaatgyggaccaaaaaatctttttccctcttgcttctgagcctttttgtccttggacttattctgagagtagagaaaactgtgcctcccatccctcgttgctctcaggggtgaggaatactggcctcagtccaacctagccttttctatggaattttccttcctttattgggactgtaatggcactaccccaccccaatggccacaggcacatgcaggacagacaggtgagtggtgcctccacactctcatcccctcccagctggggctggggcacatggcccaagggccccacgcggcagcctggccagtgtccccggccacacatccatggagtcttcccatccctcaaccaaggggtccagctctgtccaacagtaattaaaagtttctctccatgttggaggaatccatttgcataagaataacaggttcttctgcaaggcatctttccagtcctgcactttaagctgttttttcttttcttttctccaccttgtcagcagttaa

SEQ ID NO: 465853 - DNA, 530 bp, Homo sapiens
ctgttgttttattattacagtactaactcatatttatatagacaaataaaatactcttaaataaatatgacctagtgattgttgtcacttaaaaaatgataatcctggtggctacttttccatccttcaaattaaaaccagaggtggtaatttacgaatgccttgagtgtatttctactgacttattgattaaaagggcaatgtgggtttttcacatagaacatatgctgaggtggtcctttcattaatttttgctgctgtttgagttttgtctcttatatggcttatattggacattgattgtggcagaaagagttatgtgagaaactctacaagctttcatccctttgtagtagcccttttaagaaattgttgaaagttagtaaatatttcccagtagtatttccgagtgcccaaatacagcacctgctttttggctttacatcattttctattccrtttgcttatctctcttcagcaaaatagcattgctattaaggatgacattacaatggaacattttattagcc

SEQ ID NO: 465854 - DNA, 599 bp, Homo sapiens
ggctttgaccaatagagaggagcagtgctgatagtgtgccagccccacaccaagatctcaagagtccttgcatgctttgctcacttccttggatccctgcagagctgccatctgagcaagcttggactagcctgctggatgatctgagacacatggcccagtcaccactgtcactccagccgacagccagaaaaataccagaagctgactgacagctgggtaaaaatagcatgtgtaagtccaactgagtcctgaaaaatcacacagctgtctggcctaaattactaccccacagaattgtgagtaatcaaaattgttgttgtgttaaagcacagcaataatttattttgattgcccttagatgttggagtttcttagaaatctggactgaattattttctctacttctatatgctgttcttgagtggtttccaccccttgggttttctcattttgtatatatactgatgccacctaaacatgtatacattagccctatcasatataaggaacagcacaatcaggatgtctaacaagcacccaaaacttaaaatacattttagttttaagtcactattcacctgtcctccaagtgtttt

SEQ ID NO: 465855 - DNA, 626 bp, Homo sapiens
aatccatggttattatacatgtatgttttgctttaatagcccagggagcatgcacagggacaaatgtaaacttgtttatgtgtatgtgttgtatgacttttttcacttactatacatatacataagcagccttgaaaggaaagcaatagctcccatttctgcactaatcacaccataaacttttcactataatcttgtttccccctataaagctagtcctaatttgtmttttctttatctcaaaattcctaggctgtcaaggcaagttactcttaaaaggactctgagaattgcagtcaagaaaaagatatattaaagtatcattattcaaacataaaaatttaataaaaatgttaacaaggtttccccaaggtgggggtgcttattgtttccttttttcttaacagcacaattacatgtctacagctagaggtcaagtataacatatagcatttgctatttaaaggcaatatgtgagaaaggatactacatattctttgtagtatttcttatgtattactacaaaattacataagaaagttgtataattcacacaactttgaaactcttaatgtttcacagtttcaaagtgaaattcaatcatgaatgatggcaatggctttttc

SEQ ID NO: 465856 - DNA, 631 bp, Homo sapiens
agtcagtcagaacctaattctagctaatttaatcagaaaataaatctagttattatggctaacagacacttcaaaagggccagagaagcagtgtggacattacccagccaatggccacattaccaatcaagacacataactgagcacttgaagccatctctttcatctgcagtggcccaaccagtttgtgtacattgygaacccatagtcacggagcactgggcatcgctgctggagccactaaaattcttgccactggaaatcgggttcagtgtaggacttccactggcattttcaccagagtggtttcccacaaaaatcctctttctttgtatctttagattctggggaaaactggcatgctcacatctgttggtggagactcttctaatgtcagtgtgatagttatcagggaatatgggaaaagtatttggtattttcagtttttatattggaagctggtctcttctttccagcaagactcactcataaggcagggcattcttcaagcatagaaaagggctttagatgctgggctgccaaaaattaggaaaatatatactacctcctctaattttaagtcgttttatatgtaaaatgtgcccaataatagtacctactttgcagggtt

SEQ ID NO: 465857 - DNA, 562 bp, Homo sapiens
tatattggaagctggtctcttctttccagcaagactcactcataaggcagggcattcttcaagcatagaaaagggctttagatgctgggctgccaaaaattaggaaaatatatactacctcctctaattttaagtcgttttatatgtaaaatgtgcccaataatagtacctactttgcagggttattgttggcaataaatgggactgtatgtgtgaaatyagtgtgttgaatagcctgaacattgtagtgcacaaatgtaaaatgcttttattttgtctccaactatttgttgtgctatgtttggtctcactttgccatgtcttagcatcttaggtggatcctatagttttctagtcactttctgttatttaaacaaaacaaaacaaaaagagtcaagtctaatttgttacagtatagcccagtttaaaatttgaatctcacatttgttttgatgtgactgggaataacagaaagtatcacttagtttaggtagaaactcagagatagaaattccagctgacgcatggatcctatttctttcagcatgctgctgaaaagggg

SEQ ID NO: 465858 - DNA, 576 bp, Homo sapiens
cagctcttacattagcaaagttctgttctttcgaatcgacccagagtttgtaaatgtactacatakttttccattccagcactttttatcactctttcacttggtaaccctttattattttatttctgtcaaaatcctgtctctcagtctgttttctgatctaagacaggaatcaggtacaaaaggacgatgttcaagccttctaaaggatgtgggttaatactgtatcatcctgcttgtgactcattaccacttccttctcaggcccttgccaccaatgggtttgagtggaagcacatctggcctctagtatgctgcatttccacctcctttaggccccttggctttgtgatggccagcaatcctctggcttctctcttcttgttttgccgtctcagcaaatgacttgcattcccagcttaaacttgcttttctttcctagcatttgctaaatcccttggttccagcgaggcagccttgcagggtcccacatccttccagcattccccacggagtgagcagggtgccctgaacagagcagtggttatcctttaaaagaacatgattggattccat

SEQ ID NO: 465859 - DNA, 627 bp, Homo sapiens
tgttaaaggccgtatcaaggatgctttcactgggtccagcctactcataagactggctgtcactaatattccactcttagcaattcattctttagacttagggcttgatcctaactgaaatgtaaaaatacagagaggaggacattccaatgatatctgggtataaatgatgtctttgtgagtagatcgaaagtggggtggcaggaggaaagatgctttctcttttgagagccctgagggaaagacacaaaaattcttggggctacttctcaatttcatccacagaagcccttgtaggaatgcatcagtgggagcaggagaactaaatgtctaccagttgctccagagggcaaggaactcacagatagaacctgkgggtcaggaaacagtggactcagaactgcctctgtgtggtaagaagaactagcaggagctcaaaccagtgggacataaaatgtctgggagtttctattttcagaactcacaggagagaggaaacaggtatcccttagagctcatgagcatttgataataagaatgacattagatttgggccaagttagatgatgtgatgagcaaaaacagacacattatgattttaggcaacttcctctcactccctttgct

SEQ ID NO: 465860 - DNA, 605 bp, Homo sapiens
caagctgagcccagaataccctcgcagactttgtcaaggggctttttcagaaatcacacagggaaaaatattgggcaaataatgttaggatccctgccagtgggcagctctgccctcaagtatgcatagaaatatggagaggacttagagggagcagccacgccccttaaaagttgaccagaatggacctctgagaaaagtcacagacaccacgaccatttggatcggttcaagagtctggaggtgactaacgtcggtgaaggtgacaaatgtgaatggctcttgtaaaggataaatgatgaccagcatttcttaatatctactgaggtctgagctgtgccctgtgaagacgttaggctttcagcagggcagccttctggctgggtgaaactttagaaagggtgatgaaagtctgctcagaaaaagtctcacttgggatgaagcttcctccaacgagctcacaaggtttcttctcttcacagatgtaggattttgagttatgtgttttggaaaaggatgcaaaatkgaatgaataattttcttctcttgaccataatgcataaggaaggaggtaatgagaggaatactagaaacaaatgcatgga

SEQ ID NO: 465861 - DNA, 628 bp, Homo sapiens
ccttagtcctaagttctaatgaaaactacagaaattataaatatattatatacatgtgtgtatatatacagagagagaggcatatacaggttaaactattacgaaagtgatataaattaataatgacatgttaaatggaaagatcatatgaaaaaggcgggatttgagcagagtttaataatgtgcaataagttacaaatatagtgtgctattgccctattccttttgtgtgtagataaaatctatgccttcataacaaagaacaagaaaaggattcrgtttatattcaaagattctggaggatatagaaaaattgacaatgactgtttctaaattgacacatagctcatcattatttccaaagagcttttagactttgaggaaatgttcatcaaaattatatgtaaactgctcacttatttcaactatgtttctggatttttaaaaatgtgatacagcactcacattattattgcatttttggagggaaggaaaaagcaattattattattaatattagtaataaaaaacagttgtgattgcagaaaataagatcagtagaggcagcagaagtaaaaatcacattttatttattcattgcactcattaaaatatgcctattgcaaca

SEQ ID NO: 465862 - DNA, 628 bp, Homo sapiens
ccttagtcctaagttctaatgaaaactacagaaattataaatatattatatacatgtgtgtatatatacagagagagaggcatatacaggttaaactattacgaaagtgatataaattaataatgacatgttaaatggaaagatcatatgaaaaaggcgggatttgagcagagtttaataatgtgcaataagttacaaatatagtgtgctattgccctattccttttgtgtgtagataaaatctatgccttcataacaaagaacaagaaaaggattcggtttatattcaaagattctggaggatatagaaaaattgacaatgactgtttctaaattgacacatagctcatcattatttccaaagagcttttagactttgaggaaatgttcatcaaaattatatgtaaactgctyacttatttcaactatgtttctggatttttaaaaatgtgatacagcactcacattattattgcatttttggagggaaggaaaaagcaattattattattaatattagtaataaaaaacagttgtgattgcagaaaataagatcagtagaggcagcagaagtaaaaatcacattttatttattcattgcactcattaaaatatgcctattgcaaca

SEQ ID NO: 465863 - DNA, 578 bp, Homo sapiens
aggtttgtccattatatttagaaattattaaaatgataaactttatgttatttgtattttactacaaattaaaaatcctcctatccaagaaaaatatgtaaatgcacatagacacaaataatgtcaatgttgtgaaatatatttggttttctgctggagagaggagtcactactgacatctagagagtagagaacagaaatgctgttaaacatcttatacagaataagcctccacaacaaagaattctctgaccaaaatgtcaatagtgctgagcttgagaaacctctgtgtatgctaatcaagttgctcaattaattttctataggaaatgatttgatcaccttcaaaattgaatatgcaaagaaacaagaaaaatgtagagatgcatccattatttatataaaagtaaacaacatgttttttgtgtgtgctgggagagggagttgaagtggataatcaccttggtgtactttagttttatacttacccagtatacttattattgttctttgcaggaacggtcagatttaaataaaataaataagraaattaaaatgttatataatgcagtgtttaa

SEQ ID NO: 465864 - DNA, 515 bp, Homo sapiens
agataagcatgttgaatgcagcaagatgccacatttatcatctttattgcaaattgagccaggaaatctagagtaaagattaagaagcaaaagcctaaaagaatgacaataacaacattatgatttgtgttgacctatttaataatatgatatattaactaagacttttattacaagtgatggaaaaccaatttaatcaacctaaaaacaaaagacaggaatttatttcaaggagattggggctccctagagtcaaaaaaggaattgaaccaccaagttttggacaaagtaggaatgcagctgcaycttgggaaaaaccagcattctggaacgcaagcagaactcttctttttctgttggttgctgtctgcaggtagatttctttcatctatttcactgtagatgggcttttctcatgttgttaaaacatagccattaacaccttttgactttacatcttgcagcttcaattatattttagaaactaatctgaatcagatccactttaagaaatc

SEQ ID NO: 465865 - DNA, 598 bp, Homo sapiens
ttctattcagatcccacaaactttatccatattagcaataaggctgtttcactctcttatcattcttgtgttcattcaagtagcatttttaatttccttcaagaacttttgctttgcattcacaacttcgctgtcttgtacaagaggcctagctttcagcctgtctcacctttcaacatgcccacttcactaagtgtaatcatttttaccttttaatttaaagtgagaggcatgcgactctctctttcacttgaacacttaraggccagtgtagggttaataattagcttaactctaatgttgctgtgtctcaggaaataggaacattcaggcatgaccagttagttggtggagcagcagtcagaacacacacaacatttaccaatgaagttcataatcttatatggacacagtttgtgtattacatgcctcttaaagaagatacaaacactaaagggacccacacatgacaatcaagaaaagaggaggcaaacatcagcagactggtcattccttcactctttccatgctctacttcagaagcctcccacgtccctcagggtatttcagaagacctgttctgggagttactgttact

SEQ ID NO: 465866 - DNA, 598 bp, Homo sapiens
ttctattcagatcccacaaactttatccatattagcaataaggctgtttcactctcttatcattcttgtgttcattcaagtagcatttttaatttccttcaagaacttttgctttgcattcacaacttcgctgtcttgtacaagaggcctagctttcagcctgtctcacctttcaacatgcccacttcactaagtgtaatcatttttaccttttaatttaaagtgagaggcatgcgactctctctttcacttgaacacttaaaggccartgtagggttaataattagcttaactctaatgttgctgtgtctcaggaaataggaacattcaggcatgaccagttagttggtggagcagcagtcagaacacacacaacatttaccaatgaagttcataatcttatatggacacagtttgtgtattacatgcctcttaaagaagatacaaacactaaagggacccacacatgacaatcaagaaaagaggaggcaaacatcagcagactggtcattccttcactctttccatgctctacttcagaagcctcccacgtccctcagggtatttcagaagacctgttctgggagttactgttact

SEQ ID NO: 465867 - DNA, 598 bp, Homo sapiens
ttctattcagatcccacaaactttatccatattagcaataaggctgtttcactctcttatcattcttgtgttcattcaagtagcatttttaatttccttcaagaacttttgctttgcattcacaacttcgctgtcttgtacaagaggcctagctttcagcctgtctcacctttcaacatgcccacttcactaagtgtaatcatttttaccttttaatttaaagtgagaggcatgcgactctctctttcacttgaacacttaaaggccagtgtagggttaataattagcttaactctaatgttgctgtgtctcaggaaataggaacattcaggcatgaccagttagttggtggagcagcagtcagaacacacacaacatttaccaatgaagttcataatcttatatggacacagtttgtgtattacatgcctcttaaagaagatacaaacactaaagggacccacacatgacaatcaagaaaagaggaggcaaacaycagcagactggtcattccttcactctttccatgctctacttcagaagcctcccacgtccctcagggtatttcagaagacctgttctgggagttactgttact

SEQ ID NO: 465868 - DNA, 547 bp, Homo sapiens
atttgtatttacaagcactttttacagcaattgwcgcacaataagtattccatacgactcctgtttcttctgttcaattgtctttagtagcttcaaattaccttctcagcgcaccacattttcctaaattttatgtaagctagtcagctagaataatggctaaaccaatgtaatacatattaacatagcctttatatcctgccccttccgttctccactcctgctgagcaaacacaggtactttcctgtgttaacattaagcttcacagtcaatgcagttttccctaagatggctgtgtggtatgctggaaggattatgaggactggagcctcaactctaagatttgtaatcaagttctactaaaccgtaaaaccaggcaagccagggctccccacagtacagtggcatctgctttacaggattacttcagatattgagataactgtgaaaggacattgtaaatgttcaagcagtttcaaatattagcaagaggcagcaagttcctaaggtgaaatatggcataatgggaaaagcctcaaaggtttg

SEQ ID NO: 465869 - DNA, 601 bp, Homo sapiens
agtcattcacaatgcgatttggaatcttacatgcaaaattagaagggtccacccaacaaatgaagtttcaaaaaattaacataatatgccctggccagtatctcagatgatctttgtggcaagggctgttggtacagatgtctccagtttgcccacaaattcgtaggccattactattagcaaacatcatacaaggatctggaattccatgaggggacatgtttggaaaggcccatgtgttattatttacatcataatcaaggtggttacttagagcatgccattctcattgggacttccaaccagatggagyggctagattctgaaagccccccatagggcttctgatccttttagatcatgcttatggcaccttcttcctcaaatcttagaactatcagcaattacaagtgtgatattacaatatttgagatctctaaagtatggttcttccccactgcctttaaagcaatgggagacatttgccattacccagtcaactttcccagcctgaggttgtgaggcttatatttggggagagtattccttggcactaggggtggagtgttttcctgagcagagttagttattcagttgaaat

SEQ ID NO: 465870 - DNA, 530 bp, Homo sapiens
cagatccttgatgaaatgcacaaaatcccttttattgtatatagttacactcttgtcttttctatctttttgtttaactttttatcttctctagaatgccgtgccatagtcaagttctgggttaccgccccattggttagataatttcattgatcaaaataagaagataagctttcattttaatggaatgaaatgcaatatatctaaaaagagcagatatgaaaatattagagtgtcccacttactagagtacacacaattttagatatcattgcacgtgtattatactgtatattttatacatacacacgtatataatggctataatgtaaaataatattttttttggctaacatcaaatatatttagaagctacwgttcaggtgtctttcctccccttcctactttatttttaaaagttctttcatttcatcattacattaggagttatattagatgagtcaggctttaagactccagataatatttgagagccaaaaatcacccttaaagattactttgttatttta

SEQ ID NO: 465871 - DNA, 519 bp, Homo sapiens
gccgccacagctgcagctgagcacattacaggtacattagcaggccccagtgagtatagggacagcatgccaaagttccaccatcacagttcttgataatgaattccacagtgtaaccatttacaggtgactgcttcttagctgaggtcttacatgagtttgtctgataaaatattgacaccatgaccaaatgctgtttcataatgttgatagacttgtttcaagtttgtggtatttgggttcgttaaggaagcccctctatcatcasagattattaccgcttcataatcactataatctccatcagctagatagtaatagtgtttactagttttcatgttttagcagctttgttgacatatggtatcttttaaaaaatattcactattttgattactgtgaatattgagaggttgttatatatcaatctcccatttaaatttttctgtaggaatatttatgcttttttctcccactaaattttcagttgtagtgttgcctgcattctttattcataaa

SEQ ID NO: 465872 - DNA, 535 bp, Homo sapiens
ccatgggaagaaaagttacccaaggagggtgagtttcatgggccagtttcctgagatgtcttttgatggtatcatttgtcttatctacctttcatgaggactgggatctccaagtgcaatggagatgataccatatgtctagtgcccttgagaccccctgtgtgacagctgccttaagtgaggggtcattgtcactttggaggtacttaggtagaccaaaatggggagtaatttcattagttaacacctttcctacctcagaggccttttctgtacagcatggaaatgcttctacccagttaataaaagtatctacccatacaggaggtattggatgcttcatctttggcatgtgggtaaagtctatctgccagtcctcccctggatagcttcccatcctttgggtttgaggaggaataagccgtctgttcaggggattatttttaagacagacttcacaagmattaacaatctattttactatttttagtaagttatctcttgaaaacaatctatggacacattgataagtttt

SEQ ID NO: 465873 - DNA, 632 bp, Homo sapiens
ctaatttcttctcaaattcaggtgccaatttaccgtttccaatcattcctccattcttaaagctttactgattgactttgttcctcaagccaacaagttgtccacacatttgagttcgatragaaatatttatatttattactatttggagctgtactagcattcttcaggtatttcaactctgtacttctgatccaattatactgtaacttatttgaggggaaagaccagtttttctattattttctggttcttatagcatttatcacaagtattatacaaaagatattctgcatgtctactgaatgaatgatgtgttaaaatatccaatgatgtatttgtaaatatcccatttttttcaaagcagcacttgagatggcactcgtactaagtggaatcctaggtgggtatttggaaatatgtgtctctttatacatatgttgttatatttattttaacagtgtattataattaattttagcaatatccagccacttttgcatcagaaataattaagtcaagaggataaaaaataatcaatcaatgtcaccataagattaagactaaagataattgtgcaactatttatagcttaagttgtgtggcctgtttttttgtttgtttttatttta

SEQ ID NO: 465874 - DNA, 632 bp, Homo sapiens
ctaatttcttctcaaattcaggtgccaatttaccgtttccaatcattcctccattcttaaagctttactgattgactttgttcctcaagccaacaagttgtccacacatttgagttcgataagaaatatttatatttattactatttggagctgtactagcattcttcagrtatttcaactctgtacttctgatccaattatactgtaacttatttgaggggaaagaccagtttttctattattttctggttcttatagcatttatcacaagtattatacaaaagatattctgcatgtctactgaatgaatgatgtgttaaaatatccaatgatgtatttgtaaatatcccatttttttcaaagcagcacttgagatggcactcgtactaagtggaatcctaggtgggtatttggaaatatgtgtctctttatacatatgttgttatatttattttaacagtgtattataattaattttagcaatatccagccacttttgcatcagaaataattaagtcaagaggataaaaaataatcaatcaatgtcaccataagattaagactaaagataattgtgcaactatttatagcttaagttgtgtggcctgtttttttgtttgtttttatttta

SEQ ID NO: 465875 - DNA, 632 bp, Homo sapiens
ctaatttcttctcaaattcaggtgccaatttaccgtttccaatcattcctccattcttaaagctttactgattgactttgttcctcaagccaacaagttgtccacacatttgagttcgataagaaatatttatatttattactatttggagctgtactagcattcttcaggtatttcaactctgtacttctgatccaaytatactgtaacttatttgaggggaaagaccagtttttctattattttctggttcttatagcatttatcacaagtattatacaaaagatattctgcatgtctactgaatgaatgatgtgttaaaatatccaatgatgtatttgtaaatatcccatttttttcaaagcagcacttgagatggcactcgtactaagtggaatcctaggtgggtatttggaaatatgtgtctctttatacatatgttgttatatttattttaacagtgtattataattaattttagcaatatccagccacttttgcatcagaaataattaagtcaagaggataaaaaataatcaatcaatgtcaccataagattaagactaaagataattgtgcaactatttatagcttaagttgtgtggcctgtttttttgtttgtttttatttta

SEQ ID NO: 465876 - DNA, 632 bp, Homo sapiens
ctaatttcttctcaaattcaggtgccaatttaccgtttccaatcattcctccattcttaaagctttactgattgactttgttcctcaagccaacaagttgtccacacatttgagttcgataagaaatatttatatttattactatttggagctgtactagcattcttcaggtatttcaactctgtacttctgatccaattatactgtaacttatttgaggggaaagaccagtttttctattattttctggttcttatagcatttatcacaagtattatacaaaagatattctgcatgtctactgaatgaatgatgtgttaaaatatccaatgatgtatttgtaaatatcccatttttttcaaagcagcacttgagatggcactcgtactaagtggaatcctaggtgggtatttggaaatatgtgtctctttatacatatgttgttatatttattttaacagtgtattataattawttttagcaatatccagccacttttgcatcagaaataattaagtcaagaggataaaaaataatcaatcaatgtcaccataagattaagactaaagataattgtgcaactatttatagcttaagttgtgtggcctgtttttttgtttgtttttatttta

SEQ ID NO: 465877 - DNA, 552 bp, Homo sapiens
gatttggctattgatacttgtatatgcttcacaaagttctcatgctgtctttttcagctccatcaggtaatttatgttcttctctaaactggttattttaattaggaattcctctagcctttttttcaaggttcttagcttccttatattgggttagaacatgctcctttagctcagaagagttcgttatcacccacctcctgaagcctacttctgtcagtttatcaaattcattttctctccaattttttcccttgctggcaaggwgttgtgatcctttggagaagaagaggcattctggtttttggaattttcagcctttttgtacttgttttacctaatcttcgtagctttatctacgtttgttctttgatgttggtgaccttaagatggggtttctgtgtggacatcctttttgttgatattcttgctattcctttctgtttgttagtattccttctagcagtcaggtccctctgctgcaggtctgctggagtttgctggaggtccactgcagaccctgttttcctgggtatcaccagcagaggctgc

SEQ ID NO: 465878 - DNA, 520 bp, Homo sapiens
gccaaggaacaataggctataccatacagcctaagtttataataggctatcccttgggtttgtgtaaatatattatatactctatgttgttcccacaatgacaaaatgacctaacaatgcacttttcagaagcatccttgtcattcagcaacacattaatgttgatgcatttacaacgtattgagttggacaagatgactgactagacatagccaggtggaacagttgccaccaagggaccagtaaactggtgcactcctaacagatcttcagagagaaggcactgagagtggacagagrgagaacacagaagttgggctgaagggggaggaagctgggaacgcttcatgaggctaccaacactaggactcattcctggcccctcacaactctagggaaacaggtgagttgaactggaaaggagcaacccactcttactgccagtctcaagaattctgggcctctggaatcctggcaggaggagactcctcgcctaccacagacacttgagttggcagga

SEQ ID NO: 465879 - DNA, 546 bp, Homo sapiens
tattcaagaagctaagacagaagaatcacttgaaccctggaggcagaggttgcagtgagccaagatcatgccactgtactccagcctggacaacagagcgagactctgtctcaaaaaaataatgagtaaataaagaaatataaacagcttttttttaaagcaaagggtacaattcaacaaagtgaagagatcacagaatggaagaaagtatttgcaaactatccacctgagaaaggattaaaaaccagaatatgtaagctgcttaatcaagtccattagacaaaaatctaataatctgataattaatgggcaaaagatctgaatrgatatttctctaaagaagacataaaacaacaagcaggtgtatgaaaaagtgctcaacatcattcatcatcaaagaaatacaaatgataagtacaatgacatatcatctcaccctagttaaaatggcatttatccaaaagataggcaatcatgaatgttggtgaggttgtggagaaaacggaacccttgtacactgttggtgggaacggaaatttgtacagc

SEQ ID NO: 465880 - DNA, 562 bp, Homo sapiens
gatctcagctatcggggggccagaagttcaaggaagacaggatggctactatatgcaagtctgagctggcaaatttccagttctgagmtgccaagatcatcactcttatcctgctgtgtaaagaattgttcccacacacgccatcctacctgtgcaagatattgctgacatttccctattttgcacattgttcaaatccagctcacatcgtgatttttctaatggggctggggaagactgaacattcagatttcagtagttgaagtttgagtaataccattaagtgttgcattgaattgttcctaatgattttgtgggtggtagttgtgcctcctaaccacattaagagctctttctgggcacaaccatttcttggcatcctttgtaagtctgcagtgtgctgggcacatactgactggatgatcacttgctgattgactaactgaaatatgcatctgcccacagacaagacttttttgagcacagtattcttgcttagataatgaatcatatttgaactctgtcatttgcaaatccttttcactctgctatggaatttacc

SEQ ID NO: 465881 - DNA, 574 bp, Homo sapiens
gagcattttgaatgtttatatttatgtccttaatcaaacttgtgatgttttcaaccattttttaagtaatctcttcacttttctctcttcttctgagattcacacaatctacacgttggtccacttgatgttgtcccacaagtcccttaggctctgctcacttctcttcaatcatatttgtgttcctcagactcaataatttcagttgtcttcaacttygttgattctttcttctgcctgctcaaatcttcccaaacatctttcattataatgtttaatcaattttcattctacaccagtctataagaccttaaccctttctatcatgttgactgttccttacacacaagtccatgactgcatggtttgaagcatgttttaggcatgtaaaaatcctttcttcagaagactgggatctcccagcaccccttccttcaccttttccccagaacccaatttttttaaatgacgttcccatcttgtgtctactcatctcttgtaacctattgcaatttctactttccaataattattgaaaataaaaattctgcactgaatcactttttgatatgtt

SEQ ID NO: 465882 - DNA, 568 bp, Homo sapiens
cttttgttcacagtaagaatactaacaattcccattactcaaaatactgtttcaagtgggaaaaaaggttttttctatattcccttttaacctttaggcttcatgctttctatgcattcccagatacatttagctgatgacaaatatgtaggcacataacattggaatagcaacaagtatgccggcagttgattattttgctcaaaatctaaaatttagataacacttcatacacaattaaactattgaagtgaaacagactggggaaggaaaaagggctctaccaagaatagttgaatattgttcatgaaggattctgttgctacatgaaacaacttttcttgtaattgctattaccagaaracattagtcactttctttctgagcaaagacagtgaagcaaacaaaggcaaaatgcattttatagtcatatactgaattcattccaaaatagacataaatttacttaaagacagcataattaagttcatgctgattattgtgtttaaatttaaagggagaatatacaaaatatgtgcaaaaatatgtaatcatattagttgtgcta

SEQ ID NO: 465883 - DNA, 594 bp, Homo sapiens
gtgagactcttttgaggggaccttgtgcaactgcatgattcccttccgccacattatagggtatgagactgaagaagaatacggtcaccagggatgtatggggaatgctttgggagcactccctagtaatttacatccttagggaatatatttgtacctaattttggtgatatarttaattccttaccatgtgatgaggcactttctacagaagaagcaacacacaaatacaaacaactggaaccattaattgaacatgactcttgggctacatgtgatttttctcctacaacacaatgaaagttcttttaaaagatgctgatgtgttaaagaaatattgcaggattcaggttattgtttctcctaatgaagcagagagagttttccttgtgatatttgataaaataaatcaattcatttcatctgcacagataaaatgttattcaaaaagcacagttgtgagataaaatcctttcttctctgattctctctcttttctttagagagcctttgaaaattctttttagtttgtactttcaactctttctgttcccaatgaattagcagattttagtctgaattcttatggttact

SEQ ID NO: 465884 - DNA, 581 bp, Homo sapiens
cttcccaaaattatttagaaaggaatggcactatttacctaagttttgatcacgtttttcaaaaataatttcccatgcttaatagttccgcttcaaacattgcaaggtccctcatagastctagttcccataaaggaagtaaaagattgactgaatgtgaagtccataatacctgaggccatttaattatgaagttgtgatgcttaaaaaattcatcttagactataatacattttgaattattaatcctattaattaaattctatttatcaattaaatctttagttttaaatatcagactctgtcagctgaaacataatgaaattataccaaatatcaagtcaactgcaagaacccaaaactctcctggatcattaaagcaacagttgtcacagataattttgttttgtttgaattattcaatacttatgatgaaataaaggcagcccaaattctttgctccttttttaaggtatccccttcatttgataggtcaaagctggccctatgactgctttgaccaatagaatgcagcagaagtaatgctattaatatacaagtgcagaggctgagccttaaga

SEQ ID NO: 465885 - DNA, 566 bp, Homo sapiens
ccagaacacattggtagtctgtaagggagccctcttggatggtccagcttcaagagcctccagttgactgcaggcccaactaataccacagagaatgtaatctgactccattacatactagccatgtttctggagccgattatttaatcctctgtgtttcagtttcctcatttctaaattgtagcaataataataccttccttactgatttgttggtgataaaaggaaataaaacatctgagacatctatgtgacagagtaggtttcatcaaatgaataaataaatttgtaatttttaaatggtttttactttaataaacctgtcaacaatctagtgtaagctggggagcaccctcatacccaagagcttactcgaggatctctctccactactcattctttatttttatttctaggaaatgtaacacacagtgcttaaagggactgactcatacctgttacttgatggggacactggcaacaattcaatggaagtttcttaacwgacttttcttcaagggagcatgttctgattatcaccatcaacatcatcattgctgtcacct

SEQ ID NO: 465886 - DNA, 610 bp, Homo sapiens
  misc_feature (1)...(610): n = A,T,C or G
tgctaagtcaggcctgaaggaagctgatctaactcatgtagtaaagcgtgtcactgcctccttgcacttaggaacactagaaggcccttcagcactacttttggggccattttcgatatcaaaatcacmaataaaaagcacaaagtatgaaaagtgggcactaaatagactgtgaaaaggacacttaagatcatgagagctgaaacaagaaggcagagcgtgccttgttcaagctcagcagggaacaagtccatcaggtcactaacatttttctacatgtctagaatgaccacaaaagtattaggttggcgcaaaagtaattacttttaatgggaaaaaccgcaattactcttacagcaatctaatactatgagtaggccaggtgcagtggctcacacctgtaatctcagcactttgggaggctgaggcaggggatcacttgagctcaggagttcgagaccagcgtggccaacacagtgaaaccctgtctccactaaaaaacacaaaaattaggccgggcatggtggcacacgcctgtaattccagcactttgnaaggcctanngcggccgatcaccacgtcacgagattgataccatncctgctaacac

SEQ ID NO: 465887 - DNA, 550 bp, Homo sapiens
acctgccgctgccttctggcaatttccagcagccagcatggggtcttacacagggaggtgcccagcctcggggacatgcagtgacatcccactcacatcccctggggtccccccttgctcagccccccaagaacaagctgtcatttagaagactgccaaaatgcttcctctttaagcagccttccaggactgtgagaagagaaataacacggaattccacccaaaatgcgcacgcagatgaacacacacacacacacacacacacacacagtctacctcatcatctcctccagataaaagygcttacccttgtcgagcacagaaaatgagatgtgtttggtgttcatgagtgaggcatagactatatgggcccagaggcttctatctgatttgctgatgccacaaggtcagcagtgggcagggcaatggtttggaacaaaaagaacataggctattgtcctggctttgttactcacttgctgtgctaaatgagcaagttgctagcctcttctgagtccgtgatctcagcaggtgtgggagtaaagggtat

SEQ ID NO: 465888 - DNA, 554 bp, Homo sapiens
ttataaccttatcttccttcattctcttactctcctggaattacttaacagctctcaaaaacaaacaaagaaacaccacaaaaaaattgccttatgctgctccttctgccttgtatgcccttcataccatgactttatagcaatgactatcaagaccaatcaggagcaatgactaccaagaccaattagcctccagatttgtaaagccctccccccattttgggctaacattcattcttttaatcaattaaaaaaaacatttactgactttctactaatgctaggcaccggtaacatggcaatgaacaaagctccagccttcaacattctagtgggggtatgggaagggtgagtgtgtatctccatacaaaatttcaggcagctctaagtgctatggagaaaaactgagcaaggtaagsggatagggagcaacaaaatggggaagagttttttggtagggagtcagatgacatttgacccaatcatctggggaaaagagagaagagcaagtagaaagatattgaggcaagaatgcgcttggtagttttcagagg

SEQ ID NO: 465889 - DNA, 554 bp, Homo sapiens
ttataaccttatcttccttcattctcttactctcctggaattacttaacagctctcaaaaacaaacaaagaaacaccacaaaaaaattgccttatgctgctccttctgccttgtatgcccttcataccatgactttatagcaatgactatcaagaccaatcaggagcaatgactaccaagaccaattagcctccagatttgtaaagccctccccccattttgggctaacattcattcttttaatcaattaaaaaaaacatttactgactttctactaatgctaggcaccggtaacatggcaatgaacaaagctccagccttcaacattctagtgggggtatgggaagggtgagtgtgtatctccatacaaaatttcaggcagctctaagtgctatggagaaaaactgagcaaggtaagcggatagggagcaacaaaatggggaagagttttttggtagggagtcagatgacatttgacccaatsatctggggaaaagagagaagagcaagtagaaagatattgaggcaagaatgcgcttggtagttttcagagg

SEQ ID NO: 465890 - DNA, 595 bp, Homo sapiens
tgatgggttaaggctgcagaaaccttgcctgtggccaaaagcagaaacaaatgagagtctgagactagacgagatccacatcacacagggaccagatactggtycaagttgatccacctgcacaaaaggaggacactgaactgagcaggaaacacaggacttgccctggggtgatgtacactgtagggccactgaggaagcatggtcagatgacgatgatcctttgaacaagaattagaaaatgtctttcagtcagcagatccgacaaatgggaaaacatgaatggaaatacacataaaaggacaatgatttgaaaaaatgattttgaaatagcatatattaacgttccagtatataaggtagaaatagcacccacaaaaaagaaaaggaggttatgaaactagtgagggcaattatgaagcaagaacagtctataaaataaaaccatggaaattaaaatataataaacaaaaaaagtaaactcaaaagagggttaaatatgcccaataagtgcaagaaaagatgctcaacatcattaatgatcagggaaatgcaaattgaaaccacaaaatggtacaatgtcacacctactaag

SEQ ID NO: 465891 - DNA, 595 bp, Homo sapiens
tgatgggttaaggctgcagaaaccttgcctgtggccaaaagcagaaacaaatgagagtctgagactagacgagatccacatcacacagggaccagatactggttcaagytgatccacctgcacaaaaggaggacactgaactgagcaggaaacacaggacttgccctggggtgatgtacactgtagggccactgaggaagcatggtcagatgacgatgatcctttgaacaagaattagaaaatgtctttcagtcagcagatccgacaaatgggaaaacatgaatggaaatacacataaaaggacaatgatttgaaaaaatgattttgaaatagcatatattaacgttccagtatataaggtagaaatagcacccacaaaaaagaaaaggaggttatgaaactagtgagggcaattatgaagcaagaacagtctataaaataaaaccatggaaattaaaatataataaacaaaaaaagtaaactcaaaagagggttaaatatgcccaataagtgcaagaaaagatgctcaacatcattaatgatcagggaaatgcaaattgaaaccacaaaatggtacaatgtcacacctactaag

SEQ ID NO: 465892 - DNA, 595 bp, Homo sapiens
tgatgggttaaggctgcagaaaccttgcctgtggccaaaagcagaaacaaatgagagtctgagactagacgagatccacatcacacagggaccagatactggttcaagttgatccacctgcacaaaaggaggacactgaactgagcaggaaacacaggacttgccctggggtgatgtacactgtagggccactgaggaagcatggtcagatgacgatgatcctttgaacaagaattagaaaatgtctttcagtcagcagatccgacaaatgggaaaacatgaatggaaatacacataaaaggacaatgatttgaaaaaatgattttgaaatagcatatattaacrttccagtatataaggtagaaatagcacccacaaaaaagaaaaggaggttatgaaactagtgagggcaattatgaagcaagaacagtctataaaataaaaccatggaaattaaaatataataaacaaaaaaagtaaactcaaaagagggttaaatatgcccaataagtgcaagaaaagatgctcaacatcattaatgatcagggaaatgcaaattgaaaccacaaaatggtacaatgtcacacctactaag

SEQ ID NO: 465893 - DNA, 536 bp, Homo sapiens
ggtcatgcattatgggtttttgtaaaatggctaaagtagctacattgggagattctttgtctaaaggtgcaatacatcccccaatttgattcagggcttggaaagttgtctggtttcatctaaacaaataaataaattctatttttttcaaatctcaattatagaaacctttatctacagacaccctcctccattcatttcttcagtgaaattatctagacagattgttatagagagattaagaatgtcatactttcaaatctctcttggattcctcccaaaatacttttgttagaaatatttaaacattttaaaggaaycttgcctggaacccatcagataaaaatcaaaaggcatcagagaaaacactgaaaggctttggaaaggaaatggtatcactggtataaacaaacatttcatacaatttaatagtttcttagcattattctttcaaatctcagtgccaatcctttttagcatcttcctgaagaaagaaatttcaggctactttggacacactttctatagggtacccc

SEQ ID NO: 465894 - DNA, 587 bp, Homo sapiens
aacttggttgttgtttttttttttaatctttcctaccctatcaacataggggacatagctggggaaagggtaacaaaaaatcgccccagactgttttctggatcaatccaaaggtgagcttagagcaatcaacctttaggcaaaatacttggggcttttctgacaagggggagctttttttttttttttaatttcaacttttattttagattcagggagtacagtgcaggtttgggacaagggtgtattgcgtgttgctgatgtctggagtacgattgaacccgtcacccaygtggtgagcataatacccaacaggcagtttttctatccttttcccccttccaacctcccacctcttacggtctccagtgtcttctgttccaggggagctcttgtttgagcttacaggcttttcttcctggaggaagcaccatcgtatctttgagacggaaaaggttaaaatagatcaaacaatgatgctccctcttacgctgtcatgtccactccttcattgcagacttgagttcttggctcatatttctgtacccgaacgtgcattatcattattagtaacttagagaagagag

SEQ ID NO: 465895 - DNA, 533 bp, Homo sapiens
gtgaacaataatgcttcctttctaccctacaacacctggctagtaccagaaaagacagagggatgtgcaaataataattagcttgtgattgtcatcttaatctttttttactccctgtcaagatgtagttcatctgagaagtgaaattggaaaaagggtttgcattctctggcatactgatttatctaccaacctagataaaaaaaattcactttctaagaaaatgagcmccactactcagtgaaatgctcaatatttttcaagatgcattttgatctctatgttgcttatgatagagaccagctaagcttagccaatcttagtcctagcgactgttcttcaatggacagataggaatgctttcttcttggccaagccaccatattggtataagtcatttattaatttaaaaaaagaaagtgcctcaatctgttttcctaagtgggtcaagttgagccctgtgcaattgtttgtccactactttctatcttggaaaatctacctttcataaaaaaggtaaagataaaccaaag

SEQ ID NO: 465896 - DNA, 544 bp, Homo sapiens
atgccctgccaatctggctcctggcaacttttgcttcttcttctctccacccagctttattcctcaccatctccgctcccctgatacatatcctaaactctagccttgtctgataccttcatttatttgcactctagaagagtcttcttccacctctggtccttggagagctctactcttttctctttaaaaacacagcttgaggcatggcgctgtggctcacaactgtaatcccagcactttggaagactgaggcaagtggatctcttgaggtcaggagttcgagaccagcctggccaacatggtgaaaccctgtctctactaaaaatataaaaattagcygggcgtggtggtgcatgcctgtaatcctagctacttgggaggctgaggcaggagaatcacttgaaccaaggaggcagaagttgtagtgagccgagaatgtgccactgcagtccagcctgggcaacagagtgaaaccatgtctcacaaaaaccaaaacaagacacagcttgaggggcccctgtgtgaagctttcttcccctag

SEQ ID NO: 465897 - DNA, 544 bp, Homo sapiens
atgccctgccaatctggctcctggcaacttttgcttcttcttctctccacccagctttattcctcaccatctccgctcccctgatacatatcctaaactctagccttgtctgataccttcatttatttgcactctagaagagtcttcttccacctctggtccttggagagctctactcttttctctttaaaaacacagcttgaggcatggcgctgtggctcacaactgtaatcccagcactttggaagactgaggcaagtggatctcttgaggtcaggagttcgagaccagcctggccaacatggtgaaaccctgtctctactaaaaatataaaaattagctgggcgtggtggtgcatgcctgtaatcctagctacttgggaggctgaggcaggagaatcacttgaaccaaggaggcagaagttgtagtgagccgagawtgtgccactgcagtccagcctgggcaacagagtgaaaccatgtctcacaaaaaccaaaacaagacacagcttgaggggcccctgtgtgaagctttcttcccctag

SEQ ID NO: 465898 - DNA, 622 bp, Homo sapiens
tcacagtgcaggggtgaggatccagtgagaggctgcctgggaccctgcagaggaatacactatgcatgatacagtattgcagttataatcctttccatggcattgcgcagtgctttctcacacagaaaggactgcctcttgtttaactcagagggaagagtggactagtgatgacgaactcacctttctgacacttattcccagagaaaggagccaggcagctgcatgtgaaggtgctcccatgaacgaggcagtccccaccgtgttcacaggggttgggctggcatggatctaagacacacaggaagaaggcaatgttggtaaggaaaggcaggtgagaagcgcccccctccaaatttttcatcaaatttcagtctcctgccccaaatgagagagtaactactgarccagaaactggggaaaggaggaaaacatatgttgtccctaaacagcaaggaaaactgcagtcacctgaccagagagagggattcaggttagtgagaggagaggcgagaaggaaccacgactgtctcccctcggcctggctttggacggggcctttctcattgagaaactccccttttccctcatcagtgtttttctcctcccagtcttgctggga

SEQ ID NO: 465899 - DNA, 586 bp, Homo sapiens
ttttttccaagtccaagggaagcaacaaatgagatttttttttagttcattaaatcattaaccacttaatcactaaaaacaagacattataagtggtccccttagctgggttacctaggaaagagaaggacgctgctctgccgagatctggcattgggaggtgggccctttttaaacaatgtgacagtctctaaktttttatttatatgccactgcatttttttcttcatcttaactaatcagtgtggcaacagccacactgacatctgaaagtgacaggtgtctgaatagcaatgaggtgtctatacaacagccaatgtgggagaaggaaaaaacaaaggtatggaggaaatgtttggaaaacaaatattgcaactgccaagctggttgaatggagaaagcaaaagagagagagagagagagacagagaaaagaaaatggggtttagaaaagagctggttggtgcagaatgcaaccccccaaattcagccacagcaaagctcctcctttgttttggtgtccagctggcacaggagaaactgccccttctttctcaagaagggtctcacggtcaagtgaaaatgtc

SEQ ID NO: 465900 - DNA, 293 bp, Homo sapiens
caaaacatttgggacagtaatgaagatacagcaaatgaattgtttaaatatataatcaaggcaaagttatcmtcagaaatataggaaaaaaatccactaaatttggtttatgagaaattcatgattcattgtataacttgatactgggcttaaagcagcaatcctaattccagatctaccttcaagtctgggtcagtgttctcaaatgctgccagtttcatgtcaggaccggcttaatattgaaggtaactgagcattgctaatgtctgactggagctgaaagaggccaaaag

SEQ ID NO: 465901 - DNA, 293 bp, Homo sapiens
caaaacatttgggacagtaatgaagatacagcaaatgaattgtttaaatatataatcaaggcaaagttatcatcagaawtataggaaaaaaatccactaaatttggtttatgagaaattcatgattcattgtataacttgatactgggcttaaagcagcaatcctaattccagatctaccttcaagtctgggtcagtgttctcaaatgctgccagtttcatgtcaggaccggcttaatattgaaggtaactgagcattgctaatgtctgactggagctgaaagaggccaaaag

SEQ ID NO: 465902 - DNA, 274 bp, Homo sapiens
atgtatcaagtttgtgccagatttgtctcaccacaaagtcatcattcttccaattgtaattgagaagtatttcatatgaagatattaattacacatacacatgaatgyatatttatatgtaacatacatacaaaatattatttcaatgtctaaccattataaaagttattaattagatatgtttaattttatttcctactaagtcttcaaaatctggtgtgtgttttaccctgacagcacatctcagtccagcctagccacatttcaagtgttc

SEQ ID NO: 465903 - DNA, 274 bp, Homo sapiens
atgtatcaagtttgtgccagatttgtctcaccacaaagtcatcattcttccaattgtaattgagaagtatttcatatgaagatattaattacacatacacatgaatgcatatttatatgtaamatacatacaaaatattatttcaatgtctaaccattataaaagttattaattagatatgtttaattttatttcctactaagtcttcaaaatctggtgtgtgttttaccctgacagcacatctcagtccagcctagccacatttcaagtgttc

SEQ ID NO: 465904 - DNA, 274 bp, Homo sapiens
atgtatcaagtttgtgccagatttgtctcaccacaaagtcatcattcttccaattgtaattgagaagtatttcatatgaagatattaattacacatacacatgaatgcatatttatatgtaacatacatacaaaatattatttcaatgtctaaccattataaaagttattaattagatatgtttaattttatttcctactaagtcttcaaaatctggtgtgtgttttaccctgacagcacatctcastccagcctagccacatttcaagtgttc

SEQ ID NO: 465905 - DNA, 412 bp, Homo sapiens
taagcccctgggtccagctatgcayggcagcgacttgggttaaagctctgtcgcttatgggaccattgacttaaatataaaataaagtattaaaagctatgaacttttagatgaaaatacagaaaaaaaatctttgtaatgttcagttaatcaaaaatgtcttagatgaagccccaaaaaccaaatgcacaagaacaattaataaattggaccccatcaaaattaaaagcatctgctatttgaaagatagtgttatgagaacaaaaaagaaaactcaaggggaaaatactggcaagtctcatatctaataagggatttgaatccagagtatataaagaaactattaaaatttaataatgagaaaataagcaaaaaaaaaaacaaaaaagaaagaagcaaaataaacgtgaac

SEQ ID NO: 465906 - DNA, 412 bp, Homo sapiens
taagcccctgggtccagctatgcacggcagcgacttgggttaaagctctgtcgcttatgggaccattgacttaaatataaaataaagtattaaaagctatgaacttttagatgaaaatacagaaaaaaaatctttgtaatrttcagttaatcaaaaatgtcttagatgaagccccaaaaaccaaatgcacaagaacaattaataaattggaccccatcaaaattaaaagcatctgctatttgaaagatagtgttatgagaacaaaaaagaaaactcaaggggaaaatactggcaagtctcatatctaataagggatttgaatccagagtatataaagaaactattaaaatttaataatgagaaaataagcaaaaaaaaaaacaaaaaagaaagaagcaaaataaacgtgaac

SEQ ID NO: 465907 - DNA, 329 bp, Homo sapiens
ctcaggctttgcccagaatcagaggcatccttggagatttatcagcaggagagtatgyagtcagatttgtgtttaggcagaacattgagcaatcctcagaagaagcagagggagggaggcccacagaggagacagaaccttcaacaccaaccagggtcctggtcctgggtccagcagatctggcaggaatgaggaacgggaggctcatgggtaaaggctgcagccaggcagggaaaggcctcactctccctgccactcctttccctgctccccactttcctgtcccatctttgctaataggctcagcatctccaactgcacccaccgac

SEQ ID NO: 465908 - DNA, 329 bp, Homo sapiens
ctcaggctttgcccagaatcagaggcatccttggagatttatcagcaggagagtatgcagtcagattygtgtttaggcagaacattgagcaatcctcagaagaagcagagggagggaggcccacagaggagacagaaccttcaacaccaaccagggtcctggtcctgggtccagcagatctggcaggaatgaggaacgggaggctcatgggtaaaggctgcagccaggcagggaaaggcctcactctccctgccactcctttccctgctccccactttcctgtcccatctttgctaataggctcagcatctccaactgcacccaccgac

SEQ ID NO: 465909 - DNA, 329 bp, Homo sapiens
ctcaggctttgcccagaatcagaggcatccttggagatttatcagcaggagagtatgcagtcagatttrtgtttaggcagaacattgagcaatcctcagaagaagcagagggagggaggcccacagaggagacagaaccttcaacaccaaccagggtcctggtcctgggtccagcagatctggcaggaatgaggaacgggaggctcatgggtaaaggctgcagccaggcagggaaaggcctcactctccctgccactcctttccctgctccccactttcctgtcccatctttgctaataggctcagcatctccaactgcacccaccgac

SEQ ID NO: 465910 - DNA, 329 bp, Homo sapiens
ctcaggctttgcccagaatcagaggcatccttggagatttatcagcaggagagtatgcagtcagatttgtgtttaggcagaacattgagcaatcctcagaagaagcagagggagggaggcccacagaggagacagaaccttcaacaccaaccrgggtcctggtcctgggtccagcagatctggcaggaatgaggaacgggaggctcatgggtaaaggctgcagccaggcagggaaaggcctcactctccctgccactcctttccctgctccccactttcctgtcccatctttgctaataggctcagcatctccaactgcacccaccgac

SEQ ID NO: 465911 - DNA, 537 bp, Homo sapiens
tctaagttgtgaatacttgtttgtaatagtctttagtgacctttgtacttctgtggtatcagttgtaatgtctcctttgtcatttctgattgtgtttatttgcgtctttatttttttcttagttagtctagctagtggtttatcagttttgtatatcttttcaaagaactaatttttttgtttcattgatcctttgtattttgggagggttctattttatttatttttgttcatttccttgttatttattttcttctgctaactttgggtttggtttgttctttttctagttccttgaggtgtgacattagcttgtaaatttgtggtccttctacttttttgatataggcatttaatgttaagamttccctcttggcactgctattgctgtataccataggttttggttatgttgtgtttttattttcacttgtttcaaaaaatgtttaatttccatattaatttctttattgacctagtgactgttcaggagcatgctatttaattcccatgtatttatatagtttccaaggttcc

SEQ ID NO: 465912 - DNA, 361 bp, Homo sapiens
gttggtctttccttccctttctaggtctccatttcctcatctacacagtagggagcaactctgtcctgattataaataagacaacaggtgaatgcactcagcaagcctaggggcaaggatgcgtagagaagcttcttgyaaaggtgaagaatgtgtgctctgagccccgtgctgagaggcaggtgagaggacagcaagcccagcgactgaggcctacaaaatgccccctgcagagagggaggaggagcagtgttctaaggcgggtgggaggcagcatccccagtgcttgcaggaggagcaggactgttgtgcttgctcaggtgggtggtaggttaggttcttaggtatctgctgggtatca

SEQ ID NO: 465913 - DNA, 595 bp, Homo sapiens
aatggtagttctgttattagttctttgagaaatctccttattgttttccgtagaggttgtacttatttacatttctaccaacagtatataagcattaccttttcwtcacatcctcatcaacatctgttttgttttttttgactttttagtaatagccattctgactggtataagattgtattttactattttaatttttatttctctgatgattagaaatattgagcatttttcatgtttgttgactgcttgtaggtactcttttgaaaaatgtctgtttgtatcctttgcccgctttttaatggggttgtttcttgttgttttgttgttagagttccttgtagattctggatgtaagcgctttgttggatgcatagtttgcaaatatattttcccactttataggttgtctgtttactttattaattatttcttttgctgtgcagaaactttttagttaaattatctcgtctgtttatttttattgcatttgcttttgaggacttggtcattaattctttgcctagaccaatgtctggaagggtttttcctaagttttcttctaggatttctgtggtttcaggtcttacacttt

SEQ ID NO: 465914 - DNA, 595 bp, Homo sapiens
aatggtagttctgttattagttctttgagaaatctccttattgttttccgtagaggttgtacttatttacatttctaccaacagtatataagcattaccttttcttcacatcctcatcaacatctgttttgttttttttgactttttagtaatagccattctgactggtataagattrtattttactattttaatttttatttctctgatgattagaaatattgagcatttttcatgtttgttgactgcttgtaggtactcttttgaaaaatgtctgtttgtatcctttgcccgctttttaatggggttgtttcttgttgttttgttgttagagttccttgtagattctggatgtaagcgctttgttggatgcatagtttgcaaatatattttcccactttataggttgtctgtttactttattaattatttcttttgctgtgcagaaactttttagttaaattatctcgtctgtttatttttattgcatttgcttttgaggacttggtcattaattctttgcctagaccaatgtctggaagggtttttcctaagttttcttctaggatttctgtggtttcaggtcttacacttt

SEQ ID NO: 465915 - DNA, 595 bp, Homo sapiens
aatggtagttctgttattagttctttgagaaatctccttattgttttccgtagaggttgtacttatttacatttctaccaacagtatataagcattaccttttcttcacatcctcatcaacatctgttttgttttttttgactttttagtaatagccattctgactggtataagattgtattttactattttaatttttatttctctgatgattagaaatattgagcatttttcatgtttgttgactgcttgtaggtactcttttgaaaaatgtctgtttgtatcctttgcccgctttttaatggggttgtttcttgttgttttgttgttagagttccttgtagattctggatgtaagcgctttgttggatgcatagtttgcaaatatattttcccactttataggttgtctgtttactttattaattatttcttttgctgtgcagaaactttttagttaaattatctcrtctgtttatttttattgcatttgcttttgaggacttggtcattaattctttgcctagaccaatgtctggaagggtttttcctaagttttcttctaggatttctgtggtttcaggtcttacacttt

SEQ ID NO: 465916 - DNA, 595 bp, Homo sapiens
aatggtagttctgttattagttctttgagaaatctccttattgttttccgtagaggttgtacttatttacatttctaccaacagtatataagcattaccttttcttcacatcctcatcaacatctgttttgttttttttgactttttagtaatagccattctgactggtataagattgtattttactattttaatttttatttctctgatgattagaaatattgagcatttttcatgtttgttgactgcttgtaggtactcttttgaaaaatgtctgtttgtatcctttgcccgctttttaatggggttgtttcttgttgttttgttgttagagttccttgtagattctggatgtaagcgctttgttggatgcatagtttgcaaatatattttcccactttataggttgtctgtttactttattaattatttcttttgctgtgcagaaactttttagttaaattatctcgtctgtttatttwtattgcatttgcttttgaggacttggtcattaattctttgcctagaccaatgtctggaagggtttttcctaagttttcttctaggatttctgtggtttcaggtcttacacttt

SEQ ID NO: 465917 - DNA, 488 bp, Homo sapiens
cttcactatattaccacatcacatgtttacatctggctaaagtaagaaacactactcgtgttctgtagctaattgataattgttaaaataaacttaacaattgataacaaattatagaaaatgattattttaaggtttatacttgtaatatttgtaaataatatgagttatcacttatttctgtagctaattgtatggggagcacatgcagttagtggcatgtttcttaacacatttctcatatcaagaataacaaatacaatgcagtggggagtggagaaaagaaattaaatgtggstacatctgtaagtaacaattgcagccactttgtcaagggtaaaacaatcgtccatgagctatacagattatttgtcaccagaataactgaatcaagaggttccaactcattaatttgtttcattcccatatacctgaacatctgggacatgaagaaatagtgtgtatgtgttaataggcaaagctgtatt

SEQ ID NO: 465918 - DNA, 600 bp, Homo sapiens
ccagtccataacactatgattgccctgaacagttgtagctttgtgcaaacactgtctcaaagcaggatgggtggttatttgttcattgttttagcttcactgtcagctagggagatgccatttctatcagagtcctagtcacacaaaccatgtggctaacctttctctcagcaactatttaagtatttttgctatgtctaatagttctactaaggtgtactctcagacagtwcaggtttattgcaaagactgtccattattgcccagctccatgtgttgggcttttgctttctgctgcatgagtggattgctctaaaatggggacggtaatcctacacctcttctgtgataaactctgtcttcatctggctcactagttgctttctgatgattccagaccttagcgtcccagtcaggtttagcaaggcagtcctccactttcagctggtgcaacttccaccctcccagctgcacaagtggcagctagagcttccagctgtgcctcctgtgttttgaactcatcccccaaggtagtcactaacacagacatggatgtcctcaaactcatgcttaacagtaatttttcttgtagccagatga

SEQ ID NO: 465919 - DNA, 559 bp, Homo sapiens
tttcactcttttgagtcaagtgatgtgatctcagctcactgtagcctcctgagtagctggaattataggtgcccaccaccacacccagctaatttttgtatttttagtagagacggggctttaccatgttggccaggctggtcttagctcctgaccgcaggtgatccgtccacctcaacctctcaaaatcctgagattacaggcgtgagccaccatgcttagctcctttcatyatttcaaactgagcttggagaagaacctgaggaaaaacatgactttaaaattttgatgaatggagaaatctctttccattcaccttcctttcctctatttcattcttattttaaaatatacaaacaaagatatggatacatcagttattaaataaacatctgtgtgatacctatccaggtgaagaaatagaggactatcaccaccgagaagtcctctgtatgcacctaactgatcctaaagtcttccttccccttattagtaacagatataagagatatccacattacctgtggatatctgccatcctctccttggttctctttat

SEQ ID NO: 465920 - DNA, 443 bp, Homo sapiens
ggttagcctatatcaagcttctccttgttctatgtgtgaagaccatgggacagagggagcagcttgagccaagtcaggatggtargatgggacaggtggccagggctgctgcactgggaaccctggtggaggatttggctggaaatgcaggtgggaccagaccatgaagactctcaaacacagacctgaggactctgagctttatcctgggggcggcaagaagccatgttaggtgaaggaacaaggctgtttctcccacagcactagtgcaaggaaaggtcagggaggccctcagtggaagcttgctgctggatttgttgatgtgccttttctcctgcctgcactagggtcagaatggccttgggtactgcacacttcctaccaggaatagaaggcgccagagctatagcacttctcttccctttagttctttggaaggatga

SEQ ID NO: 465921 - DNA, 443 bp, Homo sapiens
ggttagcctatatcaagcttctccttgttctatgtgtgaagaccatgggacagagggagcagcttgagccaagtcaggatggtaggatgggacaggtggccagggctgctgcactgggaaccctggtggaggatttggctggaaatgcaggtgggaccagaccatgaagactctcaaacacagacctgaggactctgagctttatcctgggggcggcaagaagccatgttaggtgaaggaacaaggctgtttctcccacagcactagtgcaaggaaaggycagggaggccctcagtggaagcttgctgctggatttgttgatgtgccttttctcctgcctgcactagggtcagaatggccttgggtactgcacacttcctaccaggaatagaaggcgccagagctatagcacttctcttccctttagttctttggaaggatga

SEQ ID NO: 465922 - DNA, 443 bp, Homo sapiens
ggttagcctatatcaagcttctccttgttctatgtgtgaagaccatgggacagagggagcagcttgagccaagtcaggatggtaggatgggacaggtggccagggctgctgcactgggaaccctggtggaggatttggctggaaatgcaggtgggaccagaccatgaagactctcaaacacagacctgaggactctgagctttatcctgggggcggcaagaagccatgttaggtgaaggaacaaggctgtttctcccacagcactagtgcaaggaaaggtcagggaggccctcagtggaagcttgctgctggatttgttgatgtgccttttctcctgcctgcactrgggtcagaatggccttgggtactgcacacttcctaccaggaatagaaggcgccagagctatagcacttctcttccctttagttctttggaaggatga

SEQ ID NO: 465923 - DNA, 455 bp, Homo sapiens
tttgcactttttggtaagctaagtgagttaccagccatttatggacttcctattttcaaaactgttgctgttttctttttatatcacttgaatragccatttgccatcatgttatagtttcaggtgggaaaataagtctctctatgtgtttaacatgccatatttgctcaggtgtctgcatctactctcaccattttttgaagaaaggttaaattgttatggcactaacaactagtcttcatagtttggtttataatttttaatggtgtttatttttaacaaaattggaggagtttttttctttgtacgttgatttttcttttggttttcagttgttttaagaaataaatggagggagagatatgcttcctttgctcccattaaccaaaagaatagtttgaacaacacaggaattaacttttccattaagtttaagaggacctacttgagacaca

SEQ ID NO: 465924 - DNA, 455 bp, Homo sapiens
tttgcactttttggtaagctaagtgagttaccagccatttatggacttcctattttcaaaactgttgctgttttctttttatatcacttgaataagccatttgccatcatgttatagtttcaggtgggaaaataagtctctctatgtgtttaacatgccatatttgctcaggtgtctgcatctactctcaccattttttgaagaaaggttaaattgttatggcactaacaactagtcttcatagtttggtttataatttttaatggtgtttatttttaacaaaattggwggagtttttttctttgtacgttgatttttcttttggttttcagttgttttaagaaataaatggagggagagatatgcttcctttgctcccattaaccaaaagaatagtttgaacaacacaggaattaacttttccattaagtttaagaggacctacttgagacaca

SEQ ID NO: 465925 - DNA, 547 bp, Homo sapiens
aacattttacagtcattttaaatgatgacaagatatccaatgtattttcaaatgaaatatgaggtcactacaaatcataattagcataatcccattttttaaraagtacacatatgcgttttatgagtgagagtatttcagttctaattaaattattgtcggtggatttctaaggaatagaggaaatgatgaggcatgtgggattgtagagagagggagatttcaatttacatttaattcactcctggagtgtttgcgtttttgtaataaaacattataaaatgttatatcatttacagtatgatcacttataaactttcatttcaattaaaaggaaatttttaaaaagaggactaccaaataactactgcagccattgtagtttcataaatgactttttccttccttcatgttgtgttaatgtgtgcctgctaggtcaagacccagatttgacactgtatacagtcaggctataagtatcaaaacagaagattacctatctgggtaccctagcttccccattcctgagcaagttgggaagccatag

SEQ ID NO: 465926 - DNA, 430 bp, Homo sapiens
ccaaggagacaccagcttgataataatacacagataaatcccctttgtgaaaagtacagaggagaatttaaagactctggattccctggtaggcttcaagccaggcacatctaaaccagcaggtaaatttgttgcactcactcatcctccctcaggagtacaacgcaatggagagaaagctccaaactcccagctcatctctagggagagaaataaaagtctagaccatatgtccaacattttgactttttgggagggcactagaacctatctaccctgaatctaagtgctaacaggaaaggatgccarattgcatgcctgctgataaagtcacagtttggactgtcattcaatcaccatcattcctcctgtgactcagtataacaagattgggagaatactctacagttcctgattcccccacagaaat

SEQ ID NO: 465927 - DNA, 541 bp, Homo sapiens
gaaaaaccaaaataatggcatgttattgaggctcctgccatggtgttttttcttcaggaccttccaagaggctccggaaagttatccaaaactgttcacctgaaacatgagcctggagcattcgtccacctgtcccacactggttgaggtcttcccctgaggctgttaacttgcaagtgtttctgggctgtatttatgctcagacaaaatcctacaataatggagatgccctagggcagaaagtggagcttgagtttgctggcagcacaagggaagcctgcgcttcagtggaacttcccatggtgcttatactgaatgaaaggtgatctgagaagacatgaygcaggcgccattgcactaagcaatggtagccatcgatctgggcaagaggacccctgccctgaatcctgtacttgagaaggtgcctctctggccctccactgactgtaccctggcccacccagagcttcaccctctcttctagggcacacgctgggcactcaggcccctgatgaaatgtgcctgagcctgcatggcctct

SEQ ID NO: 465928 - DNA, 573 bp, Homo sapiens
ggtgaccaatttaatggcatcttttagtcctaatttttttttcttttaaaatacttttgtctggtattgtataatggtgtgttacttttcagttgtgctacacatttatttccaggcagagttagtcaagctttctaataaagttatttaatacctttatgtgcatttagttgttgtaagccaaaacagtagattttaatgatagttttaaagttaccaagtaagattgaaaatatgtcaattcatcactgctcaagaatctctggattcctcatttcaaactcttacgtatgatgtgtgtgtgtgtgtgtgtgtgtgtgtaatggcttaraatcttacctaacatattgtatgcactaaccaagtactaaaagacatgattcatcaaattatcatctttataccattcttcaaatagaatattattttctgtttgttctaattaaaaattatgtttgtcttatttaaatatcaatgaaaattaaaaggtctactcagtctgccgccttgataaaagccaaagctaaatggcagtttcactaatattttaaattcaataccttatttgcatca

SEQ ID NO: 465929 - DNA, 573 bp, Homo sapiens
ggtgaccaatttaatggcatcttttagtcctaatttttttttcttttaaaatacttttgtctggtattgtataatggtgtgttacttttcagttgtgctacacatttatttccaggcagagttagtcaagctttctaataaagttatttaatacctttatgtgcatttagttgttgtaagccaaaacagtagattttaatgatagttttaaagttaccaagtaagattgaaaatatgtcaattcatcactgctcaagaatctctggattcctcatttcaaactcttacgtatgatgtgtgtgtgtgtgtgtgtgtgtgtgtaatggcttagaatcttacctaacatattgtatgcactaaccaagtactaaaagacatgattcatcaaattatcatctttataccattcttcaaatagaatattattttctrtttgttctaattaaaaattatgtttgtcttatttaaatatcaatgaaaattaaaaggtctactcagtctgccgccttgataaaagccaaagctaaatggcagtttcactaatattttaaattcaataccttatttgcatca

SEQ ID NO: 465930 - DNA, 582 bp, Homo sapiens
gttcctattcggccatcttgsctcctcccccccttcctgtattatttcatatcactgcaagtgagtctacaattatctcaaaagtaattatttagttagaagtcactgaaaaccagttagaagcaattcacaagaaaaaatttagttttttcaatgtacaaaaatcagtagcatttctatataccaacaagtgttcaagctgatagtcaaatcaagaagacaaccccatttacaatagccacaaaacaaataatatacctaggaatgcatttaaccaaggtggtaaaagacctgtacaaggagaactacaaaacattggttaaaattagaaatgacacaaacaaatggaaaaacactccatgatcaaagattggaagaatcaatatcattaaaatagccatattgcccaaagaaatctatagataaagtgctactcctatcaaactaccaacatcatttttttacagatttagaaaaacaattctaaattcatatggaaccaaaaaaatagcccaaatagccaaaacaatcctaagcaaaaagaacatagccagaggcatcacattatctgacttcaaatga

SEQ ID NO: 465931 - DNA, 582 bp, Homo sapiens
gttcctattcggccatcttggctcctcccccccttcctgtattatttcatatcactgcaagtgagtctacaattatctcaaaagtaattatttagttagaagtcactgaaaacsagttagaagcaattcacaagaaaaaatttagttttttcaatgtacaaaaatcagtagcatttctatataccaacaagtgttcaagctgatagtcaaatcaagaagacaaccccatttacaatagccacaaaacaaataatatacctaggaatgcatttaaccaaggtggtaaaagacctgtacaaggagaactacaaaacattggttaaaattagaaatgacacaaacaaatggaaaaacactccatgatcaaagattggaagaatcaatatcattaaaatagccatattgcccaaagaaatctatagataaagtgctactcctatcaaactaccaacatcatttttttacagatttagaaaaacaattctaaattcatatggaaccaaaaaaatagcccaaatagccaaaacaatcctaagcaaaaagaacatagccagaggcatcacattatctgacttcaaatga

SEQ ID NO: 465932 - DNA, 582 bp, Homo sapiens
gttcctattcggccatcttggctcctcccccccttcctgtattatttcatatcactgcaagtgagtctacaattatctcaaaagtaattatttagttagaagtcactgaaaaccagttagaagcaattcacaagaaaaaatttagttttttcaatgtacaaaaatcagtagcatttctatataccaacaagtgttcaagctgatagtcaaatcaagaagacaaccccatttacaatagccacaaaacaaataatatacctaggaatgcatttaaccaaggtggtaaaagacctgtacaaggagaactacaaaacattggttaaaattagaaatgacacaaacaaatggaaaaacactccatgatcaaagattggaagaatcaatatcattaaaatagccatattgcccaaagaaatctatagataaagtgctactcctatcaaactaccaacatcatttttttacagatttagaaaaacaattctaaattcatatggaaccaaaaaaatagcccaaatagccamaacaatcctaagcaaaaagaacatagccagaggcatcacattatctgacttcaaatga

SEQ ID NO: 465933 - DNA, 577 bp, Homo sapiens
atttagctttttaattactgctatatacatttatatacacatattttctgtatataatattttttgcattttgatgaaatagattggattcacatttctttttgcttttcattccctagctgtgtgacttttygacaagtcatttaagctctctgtgctttattcttctcatccgtaaggttagaaaaatatcatctacttctccatataatcgtgaagattaaatgaaatgatccatgcctggctttgagtaagaactcaatgaatacttagctgctattaccactggtactactaataataccatcaccagtaccaccaccaccactactacgtgcttttgtgttctgcaattatttactttaaagttattataacaaacatttccccagtttatcaggaactttgtatgaaccatttgagggctgcatacagatgtatttaatttgctttagcattcttgcttgtatcttttataaacaacaccttgatgaacctctttggacataaaacatttaaagtttttttttatttttaaaataatccataacccattccatctagtggcggtctcaat

SEQ ID NO: 465934 - DNA, 583 bp, Homo sapiens
aaaaatatcatctacttctccatataatcgtgaagattaaatgaaatgatccatgcctggctttgagtaagaactcaatgaatacttagctgctattaccactggtactactaataataccatcaccagtaccaccaccaccactactacgtgcttttgtgttctgcaattatttactttaaagttattataacaaacatttccccagtttatcaggaactttgtatgaaccatttgagggctgcatacagatgtatttaatttgctttagcattcttgcttgtatcttttataaacaacaccttgatgaacctctttggacataaaacatttaaagtttttttttatttttaaaataatccataacccattccatctagtggcggtctcaattgctttaattcattgctgagttatatagattatatggatttttgttatctgaccttggaaactatattatttttatataggaaaartaattctacatttcaattactaaagtaaacaatgcctttggaaactaattactttataaagtggtgattgcatataggtatgagttttgtcttcatgtttgcac

SEQ ID NO: 465935 - DNA, 565 bp, Homo sapiens
tgcatcttaaagaactgtaaaagcaagagcaacccttacccaacattagtagaacaaaagaggtaataaatattggagcacaaatttttaaaaattgaaataaaaaaccaatacaaaatcaatgaaacaaaaagttgtttttttgaaaagttaaacaaaatggaccaatctttagccaaactaagggaaaaaatagagaagatatagataaaagcagaaatgaaaaaggagacattgcagctaatactgcagaaattcaaaggattattaatggctactatgagcagctatatgtcaatacattggacaatctagaagatgaggttaaaattctaaatrcataaaacctaacaagattgaacccagaagaaatccaaaatctgaccagaccaataaagtaatgagattgatgctgtaataaaaatatcttccagtaaagaaaagcccactacctgatggcttcactgctgaattctaccaaacattgaaagaggaactaataccgatcctacttacactatttaaaaatagaagaggaaggaatactttcaaactcattctatga

SEQ ID NO: 465936 - DNA, 547 bp, Homo sapiens
atacagtggttctgctgtccttgagttctaaataaagttcctgagagttcctggaaatgaccaaattactatacaatctagcatccatttagatagatgaccatctgtttagaaatatagaaggttggcggaggggccaagatggccacttagaagcagctgggttcgaggctttcacaaaacgacaagtgaattctgcaccttcaactgaggtatccaggttctcacattgggactgactaggcagagggctcaacacaccaagagcaaggaaaactaggytggggttatggcccacctgggagtggcacagagacagggtagcccccaccccagccaagggagtcagtgagggattctgcggccctgcccaggaaaacatgtttttcctacatatctttgcaatccgcgatcaggagattcccatgtgagcccatgtcaccatccttgggtctgaagcacagagctgtgtggtgtctcagtggggcagccactcacttggttgcttgggaaacccaggagttttgcatactctggcccaggaatt

SEQ ID NO: 465937 - DNA, 484 bp, Homo sapiens
agtgcagcactctgagatcaacttgtggggcagcagcctggaggggggaagggcgtccaccattgctgagtctttagtaggtaaacaaagtggccaggaagctcgaactgggcagagcccaacgcaactaaacaaggcctactgtctctatagactccacttctgtgagcagggcatagctgaacaagaagcagcagaaacttctgcagacttaaaagtccctgtctgacagctctgaagagagcagtggttctcccagcatggtgtttgagcactgagaatggacagactgcctcctcaagtgagtccctgacccccatgtagcctaactgggagacacctcccagtatggaccaacagacacctcawacaggcaggtgcccctctgggaatgaagcttccagaggaaggatcagggagcaatgtttgctgttctgcaatatttgctgttctgtagcctcagctggtgatacccaggcaaaca

SEQ ID NO: 465938 - DNA, 562 bp, Homo sapiens
tttcttttctaatgtatgcaattatgtctgtgaatatccctataaacaaagtttagctgtatcccatatgttttgatatgttatatttttatttttattagttcaaaatgttccttaactttccttaactgttattttctctggtcagtgtgttatttggaagtgtattcattaattttcaaacatataaaaatgttttgtttgttttcatacttgctggatttctaccacgatttcattgtggttagagatcatayttgtatgattttaaaactttgaatgtttttgagatctgcttcatagataagaacaatttttctatgtattttacttattctttttttttttttttttttctgagacagagtctcgctctgtcgcccaggctggaatgcagtggcccgatcttggctcactgcaagctccgcctcctgtgttcacgccattctcctgcctcagtctcccgagtagctgggactacaggtgcctgccaccatgcccggctaattttttgtatttttagtagagacggggtttcaccgtgttagccaggatggtctcg

SEQ ID NO: 465939 - DNA, 562 bp, Homo sapiens
tttcttttctaatgtatgcaattatgtctgtgaatatccctataaacaaagtttagctgtatcccatatgttttgatatgttatatttttatttttattagttcaaaatgttccttaactttccttaactgttattttctctggtcagtgtgttatttggaagtgtattcattaattttcaaacatataaaaatgttttgtttgttttcatacttgctggatttctaccacgatttcattgtggttagagatcatacttgtatgattttaaaactttgaatgtttttgagatctgcttcatagataagaacaatttttctatgtattttacttattctttttttttttttttttttctgagacagagtctcgctctgtcgcccaggctggaatgcagtggcccgatcttggctcactgcaagctccgcctyctgtgttcacgccattctcctgcctcagtctcccgagtagctgggactacaggtgcctgccaccatgcccggctaattttttgtatttttagtagagacggggtttcaccgtgttagccaggatggtctcg

SEQ ID NO: 465940 - DNA, 562 bp, Homo sapiens
tttcttttctaatgtatgcaattatgtctgtgaatatccctataaacaaagtttagctgtatcccatatgttttgatatgttatatttttatttttattagttcaaaatgttccttaactttccttaactgttattttctctggtcagtgtgttatttggaagtgtattcattaattttcaaacatataaaaatgttttgtttgttttcatacttgctggatttctaccacgatttcattgtggttagagatcatacttgtatgattttaaaactttgaatgtttttgagatctgcttcatagataagaacaatttttctatgtattttacttattctttttttttttttttttttctgagacagagtctcgctctgtcgcccaggctggaatgcagtggcccgatcttggctcactgcaagctccgcctcctgtgttcacgccattctcctgcctcagtctcccsagtagctgggactacaggtgcctgccaccatgcccggctaattttttgtatttttagtagagacggggtttcaccgtgttagccaggatggtctcg

SEQ ID NO: 465941 - DNA, 333 bp, Homo sapiens
gtaacattaattcatccatgaaggtagagccctcattaactgaacacttcccattgggtggtacctccaaacactgctgctttgagaccgaagtttcaaacacatgagttttgaaggggacaaacattcaaaccacagcagagatatacattttatttattcattgttatttyactcaaaaaattatttctgggccaccaatcaggttaatggaacacagcagtatatatgagagatgaggttctcatcacatggagttcacattctagtggggcaagagagacataaataaagagataagctgagagaaggaagcatcaaatatagaaaact

SEQ ID NO: 465942 - DNA, 594 bp, Homo sapiens
ttatgttatattagataatatatattcattaaatgtctaagttatttctaagtaagttaaaatattgaagcagtaattactgaatatatgtttagtttatatacttttggcatcttgtcatttcacagctatagagaagctggaaatatttgggtttgttaataaacataaaaattatactataaaaacatgcatgcttttagaaatgaaagatactgaaagtaattgtaattggtatatttaattaaaactattagctataataaagaaaacaactatatgtgaggaaagtaagatgtatttttagtaaagaaagtagtaaagtatgaggatgtgttttgtttaaggaaaaaaaaaatttgaaagacaaattttaatgtgtggtcaaattagctaaaattaaatgaattattgtgttttaaaaatgagccttaatatcaaaattrtattggcaaaaaactagaaactgattttcctcctgttaaaggaacaaagttttttttaatgaaaggtttttatttcttgagtgatatgcctagaaaacaaaaattctgcattgtattaagataatttcttatgtttcatgttaagata

SEQ ID NO: 465943 - DNA, 575 bp, Homo sapiens
atttttataaaactataacttgaatgtgttttgtcttaaaggagattcatggaaaggactttaagaagtatagttttctgataactttaagattacaccactggactgagtaagaatttycagaaatctaatgaagaaactgatgagttgatgaaactgctaaccaggatcaaacagaaaaagaattaattacatgtgattgaatgcactgatgaggataaatttttatgatttttcatttgaaattttgcagttttttattttaatattttattttccagaattaagaaagtgttttcttttaagttgtccatagcttatagcaatttggtaaagtatatctttgtaaacagagacaaaacaagtacttttgcccctgcctgatctctccagaatttgtgaatattcttatttttatggaaacatagttatttgctatgtttaacaaaaatctgttctttttaaataagtcagttggaaatattgattataataacaacattttgactggaatgtcatatttgagaatgtgcatagaaaacatgccttcgagggattccttggtcttacaaaaa

SEQ ID NO: 465944 - DNA, 418 bp, Homo sapiens
actttgcaccttcttaggtgaagagtgttgtttttacactaaccagtcagggatagcatgagacgctgtccagcatttacaggaaaaggcttctgaaatcagacaatgcctttcaaactcttatactgaccactggagttgggcgacatggcttctcccctttctaggtcccgtgacagccatcttgccattacttgccttcaggtcgtgtgtttttaacctccttgtcaaatttgtttcctccaggatcgaggccatcaagctacagatggtcttacaaatggaaccccaaatgagctcaactcacaacttctactgaggacacctgaaytgacctgctggccctttgactggcctagagagttcccctctggaggacactacaactgcaggtccccttcttcacccttatccaaca

SEQ ID NO: 465945 - DNA, 418 bp, Homo sapiens
actttgcaccttcttaggtgaagagtgttgtttttacactaaccagtcagggatagcatgagacgctgtccagcatttacaggaaaaggcttctgaaatcagacaatgcctttcaaactcttatactgaccactggagttgggcgacatggcttctcccctttctaggtcccgtgacagccatcttgccattacttgccttcaggtcgtgtgtttttaacctccttgtcaaatttgtttcctccaggatcgaggccatcaagctacagatggtcttacaaatggaaccccaaatgagctcaactcacaacttctactgaggacacctgaactgaccygctggccctttgactggcctagagagttcccctctggaggacactacaactgcaggtccccttcttcacccttatccaaca

SEQ ID NO: 465946 - DNA, 607 bp, Homo sapiens
ttaccttttcccaaacaatatctaacaaagtggctcagatgtggcagatatataaagacatctaagcaaatgagagacattttttacagactgataactttaaagtcagctggaggaagctacttcttcccaaactttatattgtctccttgattcattggaccaacgtgactattttaaaaagtgacattatggagatattttctggatctatgagaggggagaaaggcatgacaatgtctttccagtcaggacagattagtctcatactagcattgctggagtgcccaatccaatttaattcrctattgtcaaatgatcagtctgattacacttgagtgtgtgtgtgtgtgtgtgtgtgtgtgtgcatgtattttaaaggagtatttgaagggacatgctggttgatgtatttccctgtggaaattagccagtggttgaaactatgaagttatgtgagtatatgtgtgattctgtgtgtgttagttatctatcaccgtatgtagaggcttaaaaacaacataaacatatcactgttcctgaggctaggaatttgggagcagcttggcttgattgttctggcttcaaggctctcatgagaaagcaa

SEQ ID NO: 465947 - DNA, 633 bp, Homo sapiens
cttgaccccacctaaatctcacgttgaaatgtaatctccaatgttggaggtgggctgggtgggaagtgattggatatgggggtggatccctcatgaatgatttagcactatccctttggggctgcctttgtgatagctagtgaattcttgygagatctgtttgtttaaaagtgtgtggaaagggtgggaagacggtgagtgatgaaacactacaaattgggttcagtgtatactgcctaggtgatgggttcaccaaaaatctcccaaatcacaactaaagaacttacttgtgtaaccaaataccacctgttcctcaaaaacctatggaaataaaaatttttaaaaatgttccaagattaaaaaaaaattatgtggcacctagcttgctttctctctctctggctcctgctttcactttgcgatgtgcctgctccccctttgccttccaccatgattggaagcttcctgaggcctctccagaagcagataccagtatgctttttaaatagtgtgcagcacagtgagccaattaaacttcttttctttataaattacccagtctcaggtatttctttatagcaatgcaagaatggcctaaacacagaaaatttcgaagtagagaaaatagtggaa

SEQ ID NO: 465948 - DNA, 556 bp, Homo sapiens
gtaattggatatatttaagccaactcaccaacccaccccgcataccttaggaggaaattctaggtaagaagaatggtgaggatagtaaggcatgtgtttagagtcacatttaaaccatctgcatgcagattcaaactctcatctatattttcttttagaaatgaatgtacatctaattgaacacagtttacaaaatgctttcattatgtttcctcagatcctyatggccacactgcgaaatgggtatgattatcaccattcgtgaaaagttctttgcaaaaatagccccaataacgttttctttgcaaaaatagccccaatacccttttccatctctgcattttgccctcctgctcatcaaaagatgagtttatttctttactcttgaatctgggatggccttgtgttttgccttgaacaaagcatgcattggaaatgatgctctgttacttctgagtctaggcttcaagaggttttgcagcttccgctctcaccctcctggaattctgtgctacctcattgaagagggttatatatcctgaaattgctctgttgt

SEQ ID NO: 465949 - DNA, 550 bp, Homo sapiens
ctatatcctttgtcaacaccattattttttatgtatccttaatagggatttcttttaaaaattctaatgaggaattaaaaaaaacttttctaatgaagaaaatagtagctaaaaattaagactagatagcttttctaatatcatataagttgataaatattttacataaaaactcattcaaattattgtgactacactaatcaattagctgaagaattatcaaacctccatcayagtttatgacatataaacaacacctgagttgtaggggatgaagaagacacctaaaactaaaatacttggtactctcagctaacttgtacttagcctatttcccaggaaatattgggaatatttgaggcactgaaatttggtacattcaaggccaagaaaattatgaacaaaacacgaggaaatctcaggacactaacaatacctgtggtaattttaaaaatatgtttacacattctttgatattcttcccttcaagaaggagagcctaattttcttcccattgaatgtgggtagacttagtaacatgtctaatgaa

SEQ ID NO: 465950 - DNA, 585 bp, Homo sapiens
atcctgccttttttcccttcaacagcactcacctggaaatccgcagtgaccacggatcctgctgtgacccatctcccatggggctgggggcagactgtgcatgtgggcggtgctgcctcttcctacctgggctgctcaccactccacctccagcccccacagcagtgtctgcatgaagatgaggctccatacgtgtggaatgcaggcatgagcatggttcagaggctcacaggactcggcacgtgaytccagtcagtccaaggggtactgatgtagctcaaaccagttccttcagaattcttcctgggaagcagaagggaagaaagcttcctctcccctttaggtcacgatctgtaaggacagagactttgggctgccagcagccgtctctccctccagatgaagaagcccatttgcggcccaagggcccagtggcagcggaaggagaggagtggcactgagggatgaagacttggaaggaggaagagacagccccggaatccagctgttgtgaaagctgcccttggaagtacaaggtccctaaatcaatcaatttgcctcttggctggggattccaatacttgc

SEQ ID NO: 465951 - DNA, 628 bp, Homo sapiens
tcttcagcttcactctctactttgtgcttgggttccatttctggttcatataggtatttaccttattttttaacttgactttgcctttttatccctctgtatgtttttatttatgttgtatattcttttatgtgtttgaaagagaaggggagtgtcctgttatgaacatgctataccatcttgactaagaacccctttgctgatacccaatgggattcctttatctggtctaactgactagatattttatcatttatttttcagtcaaggtttattgagcacaatatgatggtgtaggcatctttggagatatgctatctgcaggttcagctttggagattcagaagtgacatgcacatgcctctgacactctcatggagttcacagttggaggtaagctgaaccatttggcaatctacctcacagattgaacamaattgccaaattgaccgttccccaactcaggttcatttccatcatgacaaactaatctttccatttcagtaaagtttcatggtacctctttgcctataggaagccatgcaactcatcaaaatctacttgttatctaagttagtttttttctaacaataccctaaatatatagttcttctacaactttgatgat

SEQ ID NO: 465952 - DNA, 547 bp, Homo sapiens
cagccctcatcctgaggctctcctggagcccaccaagagcatcctcattagaacaaaagatgytcctctcactcaggaaattcccagggatttagatgctctgtgtcagatgcttctatcactcaggacattgcaaaagccttgggagctctgtgtcagaaattagggtcaaagaccaaaggttaaaacaaaagattctcctagcaccctatttacaagggttttaggagctctgtgtcaagaactaggggcagagaccaaatatatatgtcttattatataacaatatcacagctagcatatatgaaatcttcttgtgaacacaggttgggtaggccaggagtcagccacaccgactcacttctattctgggccccgagtgtaatagtaattaatgtccagggctcatctctgccttgaagatgccatctgttttgcagaactgtaatctcccatacctctgtggcaccagtatatccatggtgtacagatattgggcatggttcacatcaggggaaaatctcttggtatcaccatatgggaagtc

SEQ ID NO: 465953 - DNA, 547 bp, Homo sapiens
tagttacctcactaacgtaaacccaggtgtgtttcaaggggcccaccacaaataacaaaaacactcctatctgttcagaaatcccagggtttaaaggcttcctctcagaaactgaaaccaacgtccagccaaatttttcacacaacaaaaaaatcataatccttttatgaaataaaatcttaggaatatcttttttaattaggaaagctaggtaaaagcagaacttctgtgatcaaagcctgtggttattgttttgcatcattaaatgagtgaaaaatgaaatgtccaactcaaaaaacaaatagatttaaaacatcagatatttgaaagtgggggtcacctacattcctaaacactgatgacaagatttttgtagaaatcttagttgtgaaagcaaacgaaaataacagagtattctacyaacagtgcctaaagggataaattccatgtgcctaaaaggatgtggaaagagctgaggaactggaaagcatgagagaacaaaaagatggaaaagagaaaagcatttcttctgtttggatccagaagt

SEQ ID NO: 465954 - DNA, 587 bp, Homo sapiens
tatgtttgtgtaatttcaagggattcatggaactaggagctctataaaatctatatttaaaaatctatagtccaaatgaaagcattccctttttaaatgaaaacttcgtggctcagaaaatggaaagaatccaatgtcaattaaacagttaaaaggaaagagcaagattcgcttctttgtctgctaattcccggaatctgtatacttcctactatgtcacattacctctctgggaaggagaaacagcaagccatgttccttcaaaattctcttactttctctcaagttataatmaaatatggaaacacatagaacagtattttacacagtgacataccatggcacagttaatgaatgaagaaaagatgagtttattggttaattgccacatcttagagattaataaagaacctcaacatactaaaggttctgagaagtcctgcaataaacaaactgcattttacattgattaacataatttcccaaacttatttgagcatgaaacaatttttaacacacacttattaactagtattcttgtatacaatattctaaaggatgccaactggggaaacactgcaattggt

SEQ ID NO: 465955 - DNA, 509 bp, Homo sapiens
  misc_feature (1)...(509): n = A,T,C or G
nnnaaatgtagacctgagactcggagaagtcaagatatcaaaccaaggccacagaccaagaaagggcagatgcagacccatgttgtcacgtggactgcacactggacaaatctgccttgtgtaacactaggatagatggacacagcatctctgtgtaatgctgaagttgttcaaataggaaaaaaaattgattgtggcttagttttcagaacaacccatacagagagagtggaaacacagctgtgccttgaggcayagagaatatttttcataaataaaaatagaatattgaaagaatcatgaagtcagacttcaggtaaaagactagcctgatgtaaatttaatatcatgttgagtttagtaggaaattgccctagagatgaaggcagtagttagagaataaaagtgtaacactaaaaattcttgactttgtttgtaggtcagtggggaactatcatagcattttgaataaggcagacattggtttgctcaaaggaaggatttagaaa

SEQ ID NO: 465956 - DNA, 588 bp, Homo sapiens
tgagtcacccaggctggaatgcagtgacatgatctaggctcactgcaaactccactttctggattcaagtaattctccttcttcagtctcctaartagctggaattacaggcacatgccaccatgcctggctgatttttatattttttgtagagacgaaattttgccttgttggccaggctagtcttcaactcctgagctcaagtggtccagctgcctaggcttcccaagtgctgggattacaggtatgagccacagcacttggcttaagattggttttaaatagaaataatttatgtatctaagtccacaaagtcccttggtggggatgggggaactatgtgttattttcatgatgttgctaacaccagaaactttccagaagttctctttgtgaaggcagaaagcacatgttcaaaacatcaacctgagttcaagttctaaattactacctggctgaccttagcagttcatctaatctttttgggtgtttccttggctgtaaaatgacaataatactactacttatgtaatgttgtgagaattaattgggccaacaatgaaaaatgcttggtttaggactaggcgt

SEQ ID NO: 465957 - DNA, 430 bp, Homo sapiens
ctgtgatatgtgatagagcgtcctgcttaatactctgggctgggcaacatgtggaaatatgacagaagaaaagccaagtacttattagttattagttgctgcatcttccaacattgttttgttgctagctgtagaaataaattctggtggatttgagtgaaggattatttattttaaggatattgggtttcctacagaattattaggaagactggagaatcaggttacacttgtgcaaccaggagcaacattcaaaatcatgttgcaggccagtgtggtggctcacgcatattatcgtgttctatccygtgtagtattccttgtatacatgtcttcccacatggaaaggacttatgttgcattcatctctgtgttcctttagtggccagtgaagtgcctggggtgtagtcatgtggcaagaggtttgggg

SEQ ID NO: 465958 - DNA, 510 bp, Homo sapiens
ctaatactgaatatgctctgcttgcagcaacaattgttttttcaggtaaaaactttttttcaggtaaaaaccattcagtggtaaaaatctgtattacatttggcaatgaaatgatgaggtttgtggttactaaattattaattacagccaaatgtaccaattttgttttatcacaatttccttctctacaggagcattcctttaagcttatatacatgctataattttttgcaacttaaaaaaacgctttcttgacctcatrtccactttcacctactcttatttctctgttccactttacagaaaaaaatttctttagagggttgtgtatactcccttctccattccttttgttaactcctaaaccctctacagtaagattatgtcctctcctctccacatcaccataaccagtcaatatctttgggatcttggcattgctgattccagtggtcaattcctagtcttcagcttacttgacccatgagctacatttgacagatcacgtcc

SEQ ID NO: 465959 - DNA, 576 bp, Homo sapiens
tcaaaccccacattttgtgatcaataataatgcatcattgttgccactaacactatttccaaattaagagtraaatcaggttgcctgcaacagaatacagggcattttccattttctgtggaagtggttacctctaccagtattctgacgtgctattttctttatttgatcttatcctttatttttctttctttccattttgttaatttctttttcattttcaaaatgtccttctcttccactcgcttgtaataaattcacatcagagatttttaaaataggaccaaaattggttaagaaaaatgaaatatcttccatctattcacatttttggaaaaaaagatacttttaattttaccatatttggttaaatatatagctgccacgaaaaggccagtttaggcttttttttatatacaatttttatttttaagttttgtgggtacatagtaggtgtatatattatgggatacttgagatattttgatacaggcatacaatgcatagtaatcacatcagggtaaatggggtattaatcaccacagcatttatcctttttatttgttaaaaacaatc

SEQ ID NO: 465960 - DNA, 576 bp, Homo sapiens
tcaaaccccacattttgtgatcaataataatgcatcattgttgccactaacactatttccaaattaagagtgaaatcaggttgcctgcaacagaatacagggcattttccattttctgtggaagtggttacctctaccagtattctgacgtgctattttctttatttgatcttatcctttatttttctttctttccattttgttaatttctttttcattttcaaaatgtccttctcttccactckcttgtaataaattcacatcagagatttttaaaataggaccaaaattggttaagaaaaatgaaatatcttccatctattcacatttttggaaaaaaagatacttttaattttaccatatttggttaaatatatagctgccacgaaaaggccagtttaggcttttttttatatacaatttttatttttaagttttgtgggtacatagtaggtgtatatattatgggatacttgagatattttgatacaggcatacaatgcatagtaatcacatcagggtaaatggggtattaatcaccacagcatttatcctttttatttgttaaaaacaatc

SEQ ID NO: 465961 - DNA, 576 bp, Homo sapiens
tcaaaccccacattttgtgatcaataataatgcatcattgttgccactaacactatttccaaattaagagtgaaatcaggttgcctgcaacagaatacagggcattttccattttctgtggaagtggttacctctaccagtattctgacgtgctattttctttatttgatcttatcctttatttttctttctttccattttgttaatttctttttcattttcaaaatgtccttctcttccactcgcttgtaataaattcacatcagagatttttaaaataggaccaaaattggttaagaaaaatgaaatatcttccatctattcacatttttggaaaaaaagatacttttaattttaccatatttggttaaatatatagctgccacgaaaaggccagtttaggcttttttttatatacaatttttatttttaagttttgtgggtacatartaggtgtatatattatgggatacttgagatattttgatacaggcatacaatgcatagtaatcacatcagggtaaatggggtattaatcaccacagcatttatcctttttatttgttaaaaacaatc

SEQ ID NO: 465962 - DNA, 567 bp, Homo sapiens
tttcttgtggcatgcattcccctacaccctaccctagtagggtaggtaagtctctgattcctgtgatagatgctatttkcctgcttgactttgaatcagcctcagtaaaccaagcacgtgcacattaatttgaattatcacaagaaagactccatacctctcttccctaccttgatttcatacgtcatcgaccacgtaaggagatggaggagggaagggtaaggggttcactgcaattaagtgttgatagtttcttttgagcactttctttggatttattgaggttgagcctgttaacccaaacaaggaaaaaaaagtgactaattatctttaattttggaattggatgtaaactctactgttgaaaaatacatttaataacacttcctcttaacctatgtgaatttgaaaagaagttacttcttgtgctctaggaacttgctatggtttggatgtttgtctccccagatctcatgttgaaacttgatccccagtgttggaggtgagacctaaggggaggtgcttgagtgattcttgggtatagatctctcatgaatggtttggtcc

SEQ ID NO: 465963 - DNA, 567 bp, Homo sapiens
tttcttgtggcatgcattcccctacaccctaccctagtagggtaggtaagtctctgattcctgtgatagatgctatttgcctgcttgactttgaatcagcctcagtaaaccaagcacgtgcacattaatttgaattatcacaagaaagactccatacctctcttccctaccttgatttcatacrtcatcgaccacgtaaggagatggaggagggaagggtaaggggttcactgcaattaagtgttgatagtttcttttgagcactttctttggatttattgaggttgagcctgttaacccaaacaaggaaaaaaaagtgactaattatctttaattttggaattggatgtaaactctactgttgaaaaatacatttaataacacttcctcttaacctatgtgaatttgaaaagaagttacttcttgtgctctaggaacttgctatggtttggatgtttgtctccccagatctcatgttgaaacttgatccccagtgttggaggtgagacctaaggggaggtgcttgagtgattcttgggtatagatctctcatgaatggtttggtcc

SEQ ID NO: 465964 - DNA, 567 bp, Homo sapiens
tttcttgtggcatgcattcccctacaccctaccctagtagggtaggtaagtctctgattcctgtgatagatgctatttgcctgcttgactttgaatcagcctcagtaaaccaagcacgtgcacattaatttgaattatcacaagaaagactccatacctctcttccctaccttgatttcatacgtcatcgaccacgtaaggagatggaggagggaagggtaaggggttcactgcaattaagtgttgatagtttcttttgagcactttctttggatttattgaggttgagcctrttaacccaaacaaggaaaaaaaagtgactaattatctttaattttggaattggatgtaaactctactgttgaaaaatacatttaataacacttcctcttaacctatgtgaatttgaaaagaagttacttcttgtgctctaggaacttgctatggtttggatgtttgtctccccagatctcatgttgaaacttgatccccagtgttggaggtgagacctaaggggaggtgcttgagtgattcttgggtatagatctctcatgaatggtttggtcc

SEQ ID NO: 465965 - DNA, 567 bp, Homo sapiens
tttcttgtggcatgcattcccctacaccctaccctagtagggtaggtaagtctctgattcctgtgatagatgctatttgcctgcttgactttgaatcagcctcagtaaaccaagcacgtgcacattaatttgaattatcacaagaaagactccatacctctcttccctaccttgatttcatacgtcatcgaccacgtaaggagatggaggagggaagggtaaggggttcactgcaattaagtgttgatagtttcttttgagcactttctttggatttattgaggttgagcctgttaacccaaacaaggaaaaaaaagtgactaattatctttaattttggaattggatgtaaactctactgttgaaaaatacatttaataacacttcctcttaacctatgtgaatttgaaaagaagttacttcttgtgctctaggaacttgctatggtttggatgtttgtctccccagatctcatgttgaaacttgatccccagtgttggaggtgagacctaakgggaggtgcttgagtgattcttgggtatagatctctcatgaatggtttggtcc

SEQ ID NO: 465966 - DNA, 523 bp, Homo sapiens
ttttgatgcctgctgtggcatggatgaaacttgagaacattatactaagtaaatgagacaggcacagaagacaaatactgtatgattctacttctgtgaggtgcctaaaatagtcaaatttatagagaaataaagtagtttaggagaagaaaaactttccctctatcctgttaggttctctatctggggcacactcatcaaattgagaaaagacagattamcagtagaaaaggcatgcaaattttaatatttttacatgtacaggtacttcacagaaaagaagtgaaaacccaaagaagtggttaaactctagcctgggtgacagagtgagactccgtctcaaaaaaaaaaaaaaaaaaaggagtggttagactcaagggtttatgtaccattttaacaaagggcgataggttgtggagaagtaactagaaagtgaaaagaacattgggtttctaacgatggtaaattgttggaaggtactaggaaatgtatggtagatacagaatgtttagtaaggtttgtt

SEQ ID NO: 465967 - DNA, 578 bp, Homo sapiens
aattttgatgcctgctgtggcatggatgaaacttgagaacattatactaagtaaatgagacaggcacagaagacaaatactgtatgattctacttctgtgaggtgcctaaaatagtcaaatttatagagaaataaagtagtttaggagaagaaaaactttccctctatcctgttaggttctctatctggggcacactcatcaaattgagaaaagacagattaacagtagaaaaggcatgcaaattttaatatttttacatgtacaggtacttcacagaaaagaagtgaaaacccaaagaagtggttaaactctagcctgggtgacagagtgagactccgtctcaaaaaaaaaaaaaaaaaaaggagtggttagactcaagggtttatgtaccattttaacaaagggcgataggttgtggagaagtaactagaaagtgaaaagaacattgggtttctaacratggtaaattgttggaaggtactaggaaatgtatggtagatacagaatgtttagtaaggtttgttatgcagtctcatctcagtgctgtttctggtcttcctggtacaggacacgggaa

SEQ ID NO: 465968 - DNA, 586 bp, Homo sapiens
cagcaaactatagctgacagctaactctaggctactgtatgattttgtaagtaaagttttaatagaacaaaactacagctayaactgctcttccatgacaatggcagatttgagtaactgcaacaaaaccacatggctcacaaaattaaagaaatatttaccacctagcactttatggaaaaattctgtcaacccttccttattacagcaataagcaatatccatttgcaacaacctttgaagccatatttaaagacgatgtcctatatgaaagaagcttgaattcttaaatgacagtgtggaacaaacttctcctaccctcactttatgtgagtaaaaaatgatattttgtcatgtaatgccatagagattttagaattgtctgttacagcagcaagcatcactttccccagaagatcgcaaggctatatgaatatgcctatgtgctcttgactaatcgttctgattgttaattggcctgcaaactggaaatatgtctccttataatggaatcataaaaaaacatcttccttatcaatgcccatgaaagtatacatactcccataatctttaactacacaggacc

SEQ ID NO: 465969 - DNA, 586 bp, Homo sapiens
cagcaaactatagctgacagctaactctaggctactgtatgattttgtaagtaaagttttaatagaacaaaactacagctacaactgctcttccatgacaatggcagatttgagtaactgcaacaaaaccacatsgctcacaaaattaaagaaatatttaccacctagcactttatggaaaaattctgtcaacccttccttattacagcaataagcaatatccatttgcaacaacctttgaagccatatttaaagacgatgtcctatatgaaagaagcttgaattcttaaatgacagtgtggaacaaacttctcctaccctcactttatgtgagtaaaaaatgatattttgtcatgtaatgccatagagattttagaattgtctgttacagcagcaagcatcactttccccagaagatcgcaaggctatatgaatatgcctatgtgctcttgactaatcgttctgattgttaattggcctgcaaactggaaatatgtctccttataatggaatcataaaaaaacatcttccttatcaatgcccatgaaagtatacatactcccataatctttaactacacaggacc

SEQ ID NO: 465970 - DNA, 505 bp, Homo sapiens
aacactttttcctgaagccccggaagctgaagccagaaaatttgatacaaacttggaaaaaaatcatcacagcaacttaatatatgaacagactctgtgcctgttgataaatagactgctcagaaagctcactggaacacctgaggcaaactacaaaccaggaaaaatgtgtcaggttgccactatctgctctcacttcctgaagatgcttcaagcccaacatctaaaaaccttcatgattggctgccatgtggactcaaaaaaaatgagtttatagtttgttctaaccactaacatttgtttttcttttatttccatagaaacatctcttaataaayatctggttgctcagatcatatagaggccttactttggtggacggccatctacaacatcactgcctgaaatgaaacacagatgttaactgtttaattggactggcctattcatgggattgaaaagattggttcagctgcttataagatggtccaccaattcaatttct

SEQ ID NO: 465971 - DNA, 384 bp, Homo sapiens
agaattactgctttggaataattatatcttttaaaaaatagtttgaggcacttgaatattaggaagttgattttttcaacagcatctttttgggccaaaaagagttatttcagctggattgcctcctgcctattgttcagtggtcaaggagattttaagcagcaaggacaaggagatcttctggtatgacttccaacacttccatgcatgtctttggaaaagaaacaawtagtccaaatgtctttagacagtttatgcaggggcttaatgtttgcatcagtttcccttgttctgtaagtcacatggggttggtgcacacatgggcccaggaaaatatggtacacataggatatgtgtcactgctgagaaaccctgagtttaaaa

SEQ ID NO: 465972 - DNA, 582 bp, Homo sapiens
gtatgttttctgaaccctctgtcattgagactgtctttttgttatcttcacatgtgaatgacaacttggcagagctacatccttgtattatttgccttttctccctaaaaattcattgtgtgcttactacatattgcaaagaaaaaaatttcaggccagcytaatattgttccttgatggagaggccagtttctttgctttttctgcctagagccttatggactttattttagcctgttaatggggcactttcatagaatatgtagattttgctctgttgatggatatttacttggaaaatagttgagttggccttttaaactaagttataatgtctttaactagctttgacaagttttattcaattctgtcactcaccatggcctctgttacgtgtttctagttacatctttgggaataattgtaattcttaacatagtttcttcattctctgggttccacatccgtcaaattttcattattttttaaatcgtttatcatttttggttgagtttcagatcatcttcctttaataaagtttgtggttgaatctacagttttctatatttccagttcactttc

SEQ ID NO: 465973 - DNA, 582 bp, Homo sapiens
gtatgttttctgaaccctctgtcattgagactgtctttttgttatcttcacatgtgaatgacaacttggcagagctacatccttgtattatttgccttttctccctaaaaattcattgtgtgcttactacatattgcaaagaaaaaaatttcaggccagcttaatattgttccttgatggagaggccagtttctttgctttttctgcctagagccttatggactttattttagcctgttaatggggcactttcatagaatatgtagattttgctctgttgatggatatttacttggaaaatagttgagttggccttttaaactaagttataatgtctttaactagctttgacaagttttattcaattctgtcactcaccatggcctctgttacgtgtttctagttacatctttgggaataattgtaattcttaacatagtttcttcattctctgggttccacatccgtcaaattttcattattttttaaatcgyttatcatttttggttgagtttcagatcatcttcctttaataaagtttgtggttgaatctacagttttctatatttccagttcactttc

SEQ ID NO: 465974 - DNA, 551 bp, Homo sapiens
agaattatctatctaatcactggaagagctggacaaccacaggccatyccacaaagacagggccttactgcgtggcaaagagcagaacaaatgcactctgtctgtaggcaggcatctaggaaagtgaacatagaaagtccggtggacattagattacttcatgctggcttagcactttcttcaaagctcaccaatcagaaaagctatttctcctccctggaaatacatcctcttctcatctgcctacctgctatcattgcctggagtttatgctattgttaattgactctgtaaattgaaatctgtgcaagaaaccaaatgaacaaataaacactgtcaccattatttatctttctttaaatctgtgtttttgtgatgacaatgtgtatatatattgaatgtctatctagtgttttcttctcattaaactagtttttctgtgtttgatatagcattgtaactataaaataaagctttagaataaagattgtatgatgtaaaagttgtgacctctttctctaagaaatatattacatccttatatttcattg

SEQ ID NO: 465975 - DNA, 551 bp, Homo sapiens
agaattatctatctaatcactggaagagctggacaaccacaggccatcccacaaagacagggccttactgcrtggcaaagagcagaacaaatgcactctgtctgtaggcaggcatctaggaaagtgaacatagaaagtccggtggacattagattacttcatgctggcttagcactttcttcaaagctcaccaatcagaaaagctatttctcctccctggaaatacatcctcttctcatctgcctacctgctatcattgcctggagtttatgctattgttaattgactctgtaaattgaaatctgtgcaagaaaccaaatgaacaaataaacactgtcaccattatttatctttctttaaatctgtgtttttgtgatgacaatgtgtatatatattgaatgtctatctagtgttttcttctcattaaactagtttttctgtgtttgatatagcattgtaactataaaataaagctttagaataaagattgtatgatgtaaaagttgtgacctctttctctaagaaatatattacatccttatatttcattg

SEQ ID NO: 465976 - DNA, 551 bp, Homo sapiens
agaattatctatctaatcactggaagagctggacaaccacaggccatcccacaaagacagggccttactgcgtggcaaagagcagaacaaatgcactctgtctgtaggcaggcatctaggaaagtkaacatagaaagtccggtggacattagattacttcatgctggcttagcactttcttcaaagctcaccaatcagaaaagctatttctcctccctggaaatacatcctcttctcatctgcctacctgctatcattgcctggagtttatgctattgttaattgactctgtaaattgaaatctgtgcaagaaaccaaatgaacaaataaacactgtcaccattatttatctttctttaaatctgtgtttttgtgatgacaatgtgtatatatattgaatgtctatctagtgttttcttctcattaaactagtttttctgtgtttgatatagcattgtaactataaaataaagctttagaataaagattgtatgatgtaaaagttgtgacctctttctctaagaaatatattacatccttatatttcattg

SEQ ID NO: 465977 - DNA, 551 bp, Homo sapiens
agaattatctatctaatcactggaagagctggacaaccacaggccatcccacaaagacagggccttactgcgtggcaaagagcagaacaaatgcactctgtctgtaggcaggcatctaggaaagtgaacatagaaagtccggtggacattagattacttcatgctggcttagcactttcttcaaagctcaccaatcagaaaagctatttctcctccctggaaatacatcctcttctcatctgcctacctgctatcattgcctggagtttatgctattgttaattgactctgtaaattgaaatctgtgcaagaaaccaaatgaacaaataaacactgtcaccattatttatctttctttaaatctgtgtttttgtgatgacaatgtgtatatatattgaatgtctatctagtgttttcttctcattaaactagtttttctgtgtttgatatagcattgtaactataaaataaagctttagaataaagattgtatgatgtaaaagttgtgacctctttctctaagaaatatrttacatccttatatttcattg

SEQ ID NO: 465978 - DNA, 560 bp, Homo sapiens
aataacgaaaaaaagagagatgatccaaataaacacaattagaaatgacaaagtggaaactacaaccaaccccaccaaaatacataaaaccatcacagacttttacaaacacttggatgcacacaacctagaaaatctagaataaatagataaattcttggaaatatacaacctcccaagattgaatcagggagacattgaaatcccaaaamgaccaataacaagttccaaaattgaatcagtaataaaaaacctccaaaaaaaaaaaaaaaaaaaagcactggaccagatagattcacagctgaattctactagacatacaaagaagagctggtaccaatcctactgaaattattccaaaaaactcaggaggagggactcctccctaactcattctatgaggccagtgttaccttgatatcaaaacccggcagagacacattgaagacaaaacttctttttaatccccatgatgagcatagacggggcatcctcaacaaaatactagcaaaccaaatccagcagcacataaaaaacaaatccatcacaatcaagtaagg

SEQ ID NO: 465979 - DNA, 560 bp, Homo sapiens
aataacgaaaaaaagagagatgatccaaataaacacaattagaaatgacaaagtggaaactacaaccaaccccaccaaaatacataaaaccatcacagacttttacaaacacttggatgcacacaacctagaaaatctagaataaatagataaattcttggaaatatacaacctcccaagattgaatcagggagacattgaaatcccaaaaagaccaataacaagttccaaaattgaatcagtaataaaaaacctccaaaaaaaaaaaaaaaaaaaagcactggaccagatagattcacagctgaattctactagacatacaaagaagagctggtaccaatcctactgaaattattccaaaaaactcaggaggagrgactcctccctaactcattctatgaggccagtgttaccttgatatcaaaacccggcagagacacattgaagacaaaacttctttttaatccccatgatgagcatagacggggcatcctcaacaaaatactagcaaaccaaatccagcagcacataaaaaacaaatccatcacaatcaagtaagg

SEQ ID NO: 465980 - DNA, 560 bp, Homo sapiens
aataacgaaaaaaagagagatgatccaaataaacacaattagaaatgacaaagtggaaactacaaccaaccccaccaaaatacataaaaccatcacagacttttacaaacacttggatgcacacaacctagaaaatctagaataaatagataaattcttggaaatatacaacctcccaagattgaatcagggagacattgaaatcccaaaaagaccaataacaagttccaaaattgaatcagtaataaaaaacctccaaaaaaaaaaaaaaaaaaaagcactggaccagatagattcacagctgaattctactagacatacaaagaagagctggtaccaatcctactgaaattattccaaaaaactcaggaggagggactcctccctaactcattctatgaggccagtgttaccttgatatcaaaaccyggcagagacacattgaagacaaaacttctttttaatccccatgatgagcatagacggggcatcctcaacaaaatactagcaaaccaaatccagcagcacataaaaaacaaatccatcacaatcaagtaagg

SEQ ID NO: 465981 - DNA, 416 bp, Homo sapiens
ctctgcactagcaaaaggaaagagaagaaagggcaggagaaggtcagagagagcgaccttagttctgaggctcattwctgaggcttttcaatcttctttgttcaaagcactcagcatgccaacatgccatattgtagggtattatcttctgaaccccaacaacacatagcacatattctagctagatatttagtatgctcgtcaagtcagaatatttttagatgatagaatacaagtaaagccctaatttttattaagcctttagagaggtggtgagtttacaattgggccatgtgaaagtaaattatacagcactctggagaggtggggaaatacaaattattcccttttatctttatccttttatcctgacccaaccacaaaagtcagttgtctgtttccttgacaagttaaaa

SEQ ID NO: 465982 - DNA, 416 bp, Homo sapiens
ctctgcactagcaaaaggaaagagaagaaagggcaggagaaggtcagagagagcgaccttagttctgaggctcatttctgaggcttttcaatmttctttgttcaaagcactcagcatgccaacatgccatattgtagggtattatcttctgaaccccaacaacacatagcacatattctagctagatatttagtatgctcgtcaagtcagaatatttttagatgatagaatacaagtaaagccctaatttttattaagcctttagagaggtggtgagtttacaattgggccatgtgaaagtaaattatacagcactctggagaggtggggaaatacaaattattcccttttatctttatccttttatcctgacccaaccacaaaagtcagttgtctgtttccttgacaagttaaaa

SEQ ID NO: 465983 - DNA, 416 bp, Homo sapiens
ctctgcactagcaaaaggaaagagaagaaagggcaggagaaggtcagagagagcgaccttagttctgaggctcatttctgaggcttttcaatcttctttgttcaaagcactcagcatgccaacatgccatattgtagggtattatcttctgaaccccaacaacacatagcacatattctagctagatatttagtatgctcgtcaagtcagaatatttttagatgatagaatacaagtaaagccctaatttttattaagcctttagagaggtggtgagtttacaattgggccatgtgaaaktaaattatacagcactctggagaggtggggaaatacaaattattcccttttatctttatccttttatcctgacccaaccacaaaagtcagttgtctgtttccttgacaagttaaaa

SEQ ID NO: 465984 - DNA, 416 bp, Homo sapiens
ctctgcactagcaaaaggaaagagaagaaagggcaggagaaggtcagagagagcgaccttagttctgaggctcatttctgaggcttttcaatcttctttgttcaaagcactcagcatgccaacatgccatattgtagggtattatcttctgaaccccaacaacacatagcacatattctagctagatatttagtatgctcgtcaagtcagaatatttttagatgatagaatacaagtaaagccctaatttttattaagcctttagagaggtggtgagtttacaattgggccatgtgaaagtaaattatacagcactctggagaggtggrgaaatacaaattattcccttttatctttatccttttatcctgacccaaccacaaaagtcagttgtctgtttccttgacaagttaaaa

SEQ ID NO: 465985 - DNA, 254 bp, Homo sapiens
tgggcggaggctactgcaagcatccagagagtcatggtgagagactgagctaaggcagtggtgstggatatggaggaaagaaaatgtgtctgactggcctgtgtgtggggtgaggggtggggaggggataagtggtgagaaaaattcttccactgataggaagagctagtagtggagttctaggaagaactctagaaagacccttttgggttttgatttaggtgacggaggaggtaatgtatatcattttggac

SEQ ID NO: 465986 - DNA, 254 bp, Homo sapiens
tgggcggaggctactgcaagcatccagagagtcatggtgagagactgagctaaggcagtggtgctggatatggaggaaagaaaatgtgtctgactggcctgtgtgtggggtgaggggtggggaggggataagtggtgagaaaaattcttccactgataggaagagctagtagtggagttctaggaagaactctagaaagacccttttgggttttgatttrggtgacggaggaggtaatgtatatcattttggac

SEQ ID NO: 465987 - DNA, 574 bp, Homo sapiens
cccttttgggttttgatttaggtgacggaggaggtaatgtatatcattttggacatgacaagtctgttgtgccggggtaatcctagtggaggcatcctgtacctgttggatgaatgtagttcagggatggagggtgctggataggctctaagtccaatcccttttcatcaagcagctgcatgtacacagcaatgaatttggctcttagagtggagcctgctgtagatgtactctaaggtaggtgccttctaccacctcctcaccttttagaatacattattggctgctacttttatctaacccgtgtctacctytttagccctactttctactatttttttgtatttatcttttatcctggttactccagacaacatgcagttttatggataattttatactattttatgaatccatcatgctattccaagttcagtgtgttcacaactgtcttctgctttaaattctcttcccactttttacatttcattgaaatttcacttaataactgctttctctaagaagcctgcctggattccctgtctttttaagataactttttgtgcgcagttct

SEQ ID NO: 465988 - DNA, 634 bp, Homo sapiens
aattggtatattaaatgtgaacataaaccttccaattaaagtagacgaacaatgtcattagtatgtacaatgccaattagtatgctgaagaaaagtttgggggtttgggaggatttttttttttttgagacagagtcttgctctgtcccccaggctgaagtgcagtggcgtggtcttggctcactgcaacctctgcctcgcccgttcaagcaattgtcctgactcagcctcctgagtagctgggattacagccatgtgccactatgcctgcttaatttttgtatttttagtagaaatggggtttcaccatgttggcgakgctggtctcgaactcttgacctctggtgatttgcctgcctcagcttcccaaagttctgggattataggcatgagccaccatgcctggctggggttttttgtaaaaaataataataataataactcattaagagtgatcgctcaacctaaagatgtaaggaaaagtcattaacatatgcaaagtgtgatcattcaataaggaaaattatctctatgtgtggcctaagaaattccacgctttattttgtggtcatatctaccacagctgaactgctatcccttctatagtatctaaccctttgaatacttttcttta

SEQ ID NO: 465989 - DNA, 540 bp, Homo sapiens
gtttcatgggtgactgaatgagattattaaatggctcaagaaacttcacagtagtagcaaataaatatataatttgaatttacctttgatctaccaagcccttcttaaagggaaggatgcattcataattagatttgacagagtcgttggttcaatccccttctctttatcaaataaccctgttttttctttttctgttcctttttcctattatygtaaatggtttacaagcaccttcagagatatataatttttttttacttttacaatacaaggtctttgctttcccaaccataattccttctgacacactttccttttctcctataaactctatattctaatctgtgacacctctctcctgtgactcacatgctctctgaattttgcttcctggcagctgcttttctgtgctgccatgcttattctttcgagctattcccgtggtgttcaactcagctgccatgatactgctgtccctggctgttatctgcctcctgaatccagctcacatactccagagccatctttccagcaagg

SEQ ID NO: 465990 - DNA, 540 bp, Homo sapiens
gtttcatgggtgactgaatgagattattaaatggctcaagaaacttcacagtagtagcaaataaatatataatttgaatttacctttgatctaccaagcccttcttaaagggaaggatgcattcataattagatttgacagagtcgttggttcaatccccttctctttatcaaataaccctgttttttctttttctgttcctttttcctattattrtaaatggtttacaagcaccttcagagatatataatttttttttacttttacaatacaaggtctttgctttcccaaccataattccttctgacacactttccttttctcctataaactctatattctaatctgtgacacctctctcctgtgactcacatgctctctgaattttgcttcctggcagctgcttttctgtgctgccatgcttattctttcgagctattcccgtggtgttcaactcagctgccatgatactgctgtccctggctgttatctgcctcctgaatccagctcacatactccagagccatctttccagcaagg

SEQ ID NO: 465991 - DNA, 540 bp, Homo sapiens
gtttcatgggtgactgaatgagattattaaatggctcaagaaacttcacagtagtagcaaataaatatataatttgaatttacctttgatctaccaagcccttcttaaagggaaggatgcattcataattagatttgacagagtcgttggttcaatccccttctctttatcaaataaccctgttttttctttttctgttcctttttcctattattgtaaatggtttacaagcaccttcagagatatataatttttttttacttttacaatacaaggtctttgctttcccaaccataattccttctgacacactttccttttctcctataaactctmtattctaatctgtgacacctctctcctgtgactcacatgctctctgaattttgcttcctggcagctgcttttctgtgctgccatgcttattctttcgagctattcccgtggtgttcaactcagctgccatgatactgctgtccctggctgttatctgcctcctgaatccagctcacatactccagagccatctttccagcaagg

SEQ ID NO: 465992 - DNA, 540 bp, Homo sapiens
gtttcatgggtgactgaatgagattattaaatggctcaagaaacttcacagtagtagcaaataaatatataatttgaatttacctttgatctaccaagcccttcttaaagggaaggatgcattcataattagatttgacagagtcgttggttcaatccccttctctttatcaaataaccctgttttttctttttctgttcctttttcctattattgtaaatggtttacaagcaccttcagagatatataatttttttttacttttacaatacaaggtctttgctttcccaaccataattccttctgacacactttccttttctcctataaactctatattctaatctgtgacacctctctcctgtgactcacatgctctctgaattttgcttcctggcagctgcttttctgtgctgccatgcttattctttcgagctattcccgtggtgttcaactcagctgccatgatactgctgtccctggctgttakctgcctcctgaatccagctcacatactccagagccatctttccagcaagg

SEQ ID NO: 465993 - DNA, 480 bp, Homo sapiens
gaatgagagaacatcaaaggagagggagagaccgaggaatgaaaatcatcttagaagcatagagagcacagtaatatgtagggaagaaaataaaagasaactagtgtttgtgctcaaagcaaattacaaagaagaaagcttataccaaaatgcaaattaattcatttttagaacatataacctaagtgggcatatcatgtgctataaactaactttagagactacaaaattttaggctggtaattaatttaacatttacatttgcaaatttctcagaaatactctttatatttagcactataatcatgcagatgtagttttgtttaattctaactagctaataagataacgggacctagagagacatgtgacatgccagagttcccgcaaaatagagattccacaaaattgaaaacaccatcattcaatcatttgttacacatcttttcattacatcatttttcaatgacaagagtcttt

SEQ ID NO: 465994 - DNA, 614 bp, Homo sapiens
tgtaattaaacctacttgataagagagaaataattctacatgtaagtgtattttaaaagttggatgtgtttttggtaaaataaaaagttaaaagaagacataagaatgtagtttttgttaaaagaaaaataattttatctaattaaaaactgttttaatcattttaaattaaataaaaatagaaaaataaaactaagtatatattaaaagttcaggaaattaaaagtgagaaaaattacaagaggttataaaaggcttataaaaatcttattttatgtggtcaaagctgattgggattagatggatttgtttataagattttgttaaaattagcttaacaataatacgctgrtacaaaggtaaactttttcttttttgaacgagattttttggtagtattaataagaggtattaaaagatatttgtttaccttttgagtaaactacaaaaaaaggggcaagaaagagagatagattcagtgtttgcctcatggtatctttattaggtcttgtgattgttaggaaactgagtcttctatcaaagattaaagattgttgttttttgaaatctttgagttagtgctttggctaaacgaatgccttattttacagagt

SEQ ID NO: 465995 - DNA, 512 bp, Homo sapiens
acctccttcttactcttatttttaatttcttaaatttgttttaagccaaaaaaccctaaccaatatataaattggacctagggtggggttttattatgtactcagcttaggtcagatggttagatgtctagtcttatatctaacagattggctatgaagatgtggaatttgaataaaagtgatagcttctttacacgtccaatcttagagtagggaaatgagcatttcacagcagaaagttttgttctgaacaaaacagagtccmttgtagtgtatatctatcatatatactgcattatgtttggttaggacttgaaaattttatttcattgcatcatgtttttgatcaagaatttgtaggaattttgtgcaacaagaggttataatgttaatacgtattaatattctgaccgaggttgaagtcttcattcttgaaagaaaaaaaaaatgcaaaagtattctgatctcagcagatatgaaaactatcactcttcagaattactggctttggt

SEQ ID NO: 465996 - DNA, 525 bp, Homo sapiens
catccaaagcagcctactttttcctctcccaaccagtttcttccagacaactatggttgaaggataacatcaagcagatgaaaaatggcccacatatttatagaaagtatgcttatcccgctctccaaaaacggagtgggaggctttgcaaagtcgttagctgttgtcactggcagaaatcaactataggttctgcagcatgtcggggatatgggaatgaagattccttgcattttcaatggttctttgcaatgctgtaattctaccgttgtgtaagtcatggcctttatacggctgatgamccagttaattttcttgggtagaagtattcagaaaattagaaagatttatctccctgtaacttacacagcatgctcttcagagggaaccattgagtttgggaggtagaaaccactgccttcaatagttataggttatctggcactctgataagaagaaagcttctaaaccccttgtctctcatttttattgtagttatctcacaaatattcattgttatataag

SEQ ID NO: 465997 - DNA, 652 bp, Homo sapiens
gccctggcactgcagacctcatgtgtggggtaaacccatgcatgatcctgagtcagacctctcgtccaactagtgggactgtttgtggtggagcrtgatcatggtcttccacttcatctaactctcctggatgtgaccagaccttcccaggttatttgttttagcctgtaatgccagagtctttttgaactgatgatgtctaggaaaattgcatatctttggctccatgcatttgatatttcttgctttggcttcccagaagcttaaagctatgttggtgcttcattttcttagcctaggatttccgaactaaggttttttttgttttgtttttttaattgttactacttagttttaatctcattatagttgttttaatttttttactttaatgtatatgcacttttattataagtaggttatccttttggttactgtcaagaataaataaatacatcttataataatatatatgatcttgagtatatattggtgaccagtctggcctaattcagggttcatctactcaaatttgagaattagctttttgtagtaatggagaatatagtgtgggacttcagaataagtagctgaaaggaaacatcaacacagtccaaagattgtctgtgttcccatccttgatgattgctga

SEQ ID NO: 465998 - DNA, 613 bp, Homo sapiens
catgtcctttacatttagtttcaacatcatcttctcaagggagcactttctgatctacctccccttcccaaattaggctatgtgcttctttcgtataggtagtggcccattagagccaattataattgccaatcatccgtaagcttarggaagacagaaaccattgcactgcaatatttaacctctatttcagggacataatagctactcaataatttttttattgaagggattgggagggggagctgcatgatgagaaattacttaattggtacaatgtatgtcatttgggtgatgaattaaaagcccagggttgggcgcagtggctcacgcctgtaatcctagcactttcagaggctgaggtgggtggatcatgaggtcaagaaatcgagaccatcctggccaacatggtgaaaccccgtctttactaaaaattcaaaaattagctggacgtggtcgcgcgcacctatagtcccagctactctggaggctaaggcaggagaatcacttgaaccagggaggcagaggttgcagtgagctgagatcgtgccactgcactccagcctggtgacagagtgagactccatcaaaacaaacaaacaaacaaaaaatc

SEQ ID NO: 465999 - DNA, 410 bp, Homo sapiens
acaggttgatggatgcagcaaaccaccatggcacgtgtatacctatgtaacaaacctgcatgttctgcacatgtatcccagaacttaaggtataattaaaaaaaaaaaaaagaaagaaaraaaaagaaagtggcatttgagtaaaggtctgtaggttaggtaagtgggactaaagggtgtctcaggctaaggaaagaacaggtaccaaggccctgaggtgagagcaggcccagcatgttcagcaaataattattgcctaatgtatacattttccaaatgtgactctgtaaactcctaggttggagggacccagtctgctgagtaaatatccattccctaatatcaacctacacaagcacaccaagcatcaaggaatctcaaaagacaggcaaccctttgcgaatgcctaa

SEQ ID NO: 466000 - DNA, 607 bp, Homo sapiens
gctccatgcaattccaagtcctcgttgaaccactttgttattgagcttgctccaactsatctcctgtgtctctggccatcccatcgtttcagtagtgccccagtttgaaagtccacttcatcatcaggcatccagtgccttccagcctttaattgtctcctatcaaactggaaacaattagtctgagaaaatcatccatgccagtgaattaatttattgaatttgttgtcctgtgtctttctgtgagggtgaaaggctgtatttgtgccataagagaatgctggctgtctctagaagagctgagggaaaggttgaatgagatcaacgcctggctcttacaatggcctgcagcagtcttcctcagccttgacttgcctaggaaacttgcaaacatcagattctcaagtctacctccagagattctgatttaatcactctaggctgggacccagtcattggtattttttaaaagctccttagaataaatctaatgtgcagccaaggttgggaacctctggatggaaaatacatgatttggtcccctctaacctcacctactgtttattatccttccacctcccactgctatagacatgctgtcttcctt

SEQ ID NO: 466001 - DNA, 607 bp, Homo sapiens
gctccatgcaattccaagtcctcgttgaaccactttgttattgagcttgctccaactgatctcctgtgtctctggccatcccatcgtttcagtagtgccccagtttgaaagtccacttcatcatcaggcatccagtgccttccagcctttaattgtctcctatcaaactggaaacaattagtctgagaaaatcatccatgccagtgaattaatttattgaatttgttgtcctgtgtctttctgtgagggtgaaaggctgtatytgtgccataagagaatgctggctgtctctagaagagctgagggaaaggttgaatgagatcaacgcctggctcttacaatggcctgcagcagtcttcctcagccttgacttgcctaggaaacttgcaaacatcagattctcaagtctacctccagagattctgatttaatcactctaggctgggacccagtcattggtattttttaaaagctccttagaataaatctaatgtgcagccaaggttgggaacctctggatggaaaatacatgatttggtcccctctaacctcacctactgtttattatccttccacctcccactgctatagacatgctgtcttcctt

SEQ ID NO: 466002 - DNA, 607 bp, Homo sapiens
gctccatgcaattccaagtcctcgttgaaccactttgttattgagcttgctccaactgatctcctgtgtctctggccatcccatcgtttcagtagtgccccagtttgaaagtccacttcatcatcaggcatccagtgccttccagcctttaattgtctcctatcaaactggaaacaattagtctgagaaaatcatccatgccagtgaattaatttattgaatttgttgtcctgtgtctttctgtgagggtgaaaggctgtatttstgccataagagaatgctggctgtctctagaagagctgagggaaaggttgaatgagatcaacgcctggctcttacaatggcctgcagcagtcttcctcagccttgacttgcctaggaaacttgcaaacatcagattctcaagtctacctccagagattctgatttaatcactctaggctgggacccagtcattggtattttttaaaagctccttagaataaatctaatgtgcagccaaggttgggaacctctggatggaaaatacatgatttggtcccctctaacctcacctactgtttattatccttccacctcccactgctatagacatgctgtcttcctt

SEQ ID NO: 466003 - DNA, 645 bp, Homo sapiens
acttccaaactggctaaaggtccttgttctaaccattctttttgtttaaaattgctaaccttaaaaatgatttcagagttggcaccagatgcattggaggctgctaaagtacacttaggaaagactttaaagccattaaagttatatgacagtattttgaagttgtcttttaaatatgacggacccagttgtttgaccatacatgatacataatatgatatagctccagagtggcattatttggaacagagtttatgaatcatttaaaaattgtacctataaccaatgcaaaagctataattcatgtaaagctataaataatctatctcaaaatctacataagatagattgacagagtgctatttggagtttatgggtcttttgataaactttgattaatattctcaagtcaatcattgttgaatgaagtattttaaaattatttggtgaaaattatrtatgttttccagtgttttctaaagactttcactttctaatggaaattcagagccacctagtgaccaaaagtaaaatgtctaaagtataaaacatgacaacaaaaactcccagcaaaagagaaaagcaatcatttgaccccgggctttgatgtccagagataaaattgtatccagttcaggtctacaa

SEQ ID NO: 466004 - DNA, 626 bp, Homo sapiens
cgtttcttgggggagcatatgttagttttgaactggtcttgaaccagttcaccttttcaaaatatgtgaatgatttgattttggtcagcaaatcactagtaaatctttagcatattgcttagcatattggtgagcatatgatttgcatattgaaatattttgaaaagatgacttttcaaagccattttgcccaactaatagaaatatgtgaaaactctcctctaggttctaaatcctgagtgcatccatttctttctgggttcaggtctgtaaactcttccttgctacagtaaragttgatgatggtgagtgcttaccgtgtacctggcagttgagtaagcattatctcacttaatcctcccagtaaaaggtactatgattacccctgtattggtgaaggtagctccagcagctggaacagataaacaagtctcagtgactcagcccagaaattgtttatttttcactcatgtagcaatcctatttggtgttcccagtcaggtggccaggggtgattcagagaccatcttcaatatgtggtttccaaggttgctcaggaggacatctccagtttatctgtcaacagggagaagagcttggagggccaagggtggagttttttatgg

SEQ ID NO: 466005 - DNA, 626 bp, Homo sapiens
cgtttcttgggggagcatatgttagttttgaactggtcttgaaccagttcaccttttcaaaatatgtgaatgatttgattttggtcagcaaatcactagtaaatctttagcatattgcttagcatattggtgagcatatgatttgcatattgaaatattttgaaaagatgacttttcaaagccattttgcccaactaatagaaatatgtgaaaactctcctctaggttctaaatcctgagtgcatccatttctttctgggttcaggtctgtaaactcttccttgctacagtaaaagttgaygatggtgagtgcttaccgtgtacctggcagttgagtaagcattatctcacttaatcctcccagtaaaaggtactatgattacccctgtattggtgaaggtagctccagcagctggaacagataaacaagtctcagtgactcagcccagaaattgtttatttttcactcatgtagcaatcctatttggtgttcccagtcaggtggccaggggtgattcagagaccatcttcaatatgtggtttccaaggttgctcaggaggacatctccagtttatctgtcaacagggagaagagcttggagggccaagggtggagttttttatgg

SEQ ID NO: 466006 - DNA, 504 bp, Homo sapiens
actatagtaactccaaataaccaaactcygagtagctggggaattaggagttcttagttcatattttgtcgaaaattccaaaagcacttaaagcaaatgacaaatacagttaggtaactttgattgtgtggatttaacagtcagtcggtgtgaggcatttgaagtgtgaattacaattttaaactaatttagaacggataattcctagcttcttgaggacattagcaggataaaagagtgaaacatggacccagaaaagtggactttcgttcctattgagctatgagtggttcttggtaatgagatgtaaccgagatgaaagaataaaaaatccctgtgtaaagaatggtttatcatatcagcagcaacagcactttgtctttggaaaattgtactaagtggctgaagctgataatatttagaatatttacaatttgtatgtaggtagtgccttctacagatgtccaaaaatagtctgtaaaatctctttacctagaaatgctt

SEQ ID NO: 466007 - DNA, 507 bp, Homo sapiens
ttttagccatgctttctgttcttagttacatcatttctatggtaagagaagttgaaggagtgtagggaatgagggctccctgctctatgctgtgatttgggaaatgaccctcaacttcatagtggtcagctcaggaaagtattcaggacaaggacagtctcatggcagtaaatggtccatgttcccatgaagtttggggggaaaaaatgaagtacatgaggaatcatctggggatgggtagagagttctgrggctctggctggcaggaagccaggctccccacactgggcctctgctgctgagcctccctcactgcccagacccccccaggtgatgcaactcaagcagctgttaatgggtggagatcaccgcagccctcatgccctatgatgtaggtcaggagccagccttgggtggcgggggtggggatgttgtcagctgtcaccagcaagatacagggcacatcagtgtcccaggaatgctgttttcaacaagaaggtggacagt

SEQ ID NO: 466008 - DNA, 503 bp, Homo sapiens
ttttttaaagccatccatgttttaagtacacataattcacaattcctgtacttcactgtgaggaatcaaagtccttcatttgtggtcctcagaccgcaggggggtccctgggtaactttgagaaggtctgtgaagtcaaatctattttcatgaaaattagaagacactatttgccttttttgctgtgtagacatttgtactgatggcttttttgctgggtagacgtctgcacaaaagcagtggtgagtaaaactgccagagccttaatctatcaaattatgctrgtagtcactgtactcttcacagctgtgacctcacaggaccaaaattgctagtttcacttgtgaatttcctcaatgaaacattaaaaaataaattaatttaattaaatcccaaaccttgagtacacacatattttttaatactctgtgatcaaatgggaagtacgcataaagcatgtcttttgcattttgaagacgaagcattatctagaagtaaaagca

SEQ ID NO: 466009 - DNA, 443 bp, Homo sapiens
atcccttctttataactacaaaagacaatctcacgtgcacagagtaatcaactcatgagtaaatatttaacatttcagtaaagacagtaagcacaaatgaaattttttaaatttttgtaaattttagggggtacaagtgcagttttgttacatggatattgagtagtgrtgaagtctgagcttttagtgtagccatcacctgaatagcagacattgtacccaatgggtaatttttcattccttaccaccctcccgccttcccaccttttggactctccgatgttattatttcactctctgtgtccatgtgtacacactgtttagcccccacttacaagtgagaccatgtggtatctgattttccatttttgaattatttcacataggataatgatctccagttccatccatattgctgcaaaagctgagtagtatatcacggt

SEQ ID NO: 466010 - DNA, 542 bp, Homo sapiens
tgccagtttggtgagagtagggaccagggtctgtatcattttgctcaccattgtatctcccggttctggtgcagtacctgatgctcaaagagtggttttagaattaataaaccctaaaggcaagagtcctgcacaaagcatgrcactttgtagtggctcaataaaaataaataaacggagggccaggtttagatttttggaggtctgaatctgaagaaaggctattgtcaggaggcaggaagccatatttgtttgctagaagaaggtgaaggacactaaagtcaaggagcaccatattgtacttcatacacagtaagtacttaatacaaagtgttaagacaaaataaaaatctaatttttatgcatgactgcttgggatctataaatattggttgaactaaagcatgaatggagagaggcagaggagaggaatggggcactaaaagcctctgcaaaactgcattgggtagatcagccaacagtggaaccattggaaccgtaggttctcctccatgtggctcaaagactagaagttgggctcc

SEQ ID NO: 466011 - DNA, 426 bp, Homo sapiens
tatatgaacaccactagatacttcggaatcaaacatcagtcaacatactctaaagaataactccaagtcttggccaggcgcagtggctcacacctgtaatcccaacactttgggaggccaaggtgggtggatcatctaaggccgggagttcaagaccagcctgaccaacgtggagaaaccccatctctactaaaaatacaaaattagccgggcgtggtagcgcatggctgtaatcctggctactcargaggccgaggcagaagaattgcttgaactggggaggcagaggttgcggtgagcccagatcgcgccattgcactccagcctgggtaacaagagcaaaactctgtccaaaaaaaaaaaaataaaataataactccaagcctttaaaaaatatcatctgaaactgttacatcagatttctgg

SEQ ID NO: 466012 - DNA, 608 bp, Homo sapiens
caagcaatttgaattaaacagattaagtcgtagtattgctattccaattgcttgtcattacacaggaggttatggttacagctgactatacagcactacctgagccatacattttacatttgcaatyggcctattatagatgaactgtgaaaattggagagagctttttatgataattggaagatgttttccttgaagtatgtaaagcccttgagagaacttgaattacttgcttgtaattttgttataagctttaatcctatttatttaacttgaagtttattgctcctgaatatattttcctatgtctttctattgagtgacatacatgctgtattttcaatatttttatttgaatatcattacaaattttattttgctttttgttttcaaactcaaaaagttgttttcccttgggcatgattcatagataaatgaagttacttctgggttttaaattaggaatatcaatggaaatacaaagacagcctctctttgattgtacttggttctttctgtgttctgagtaaacctgacctaacatttcagataccaactgggaatctgtaggtgatgtgtgcaacattttatgccacacataattgtgt

SEQ ID NO: 466013 - DNA, 612 bp, Homo sapiens
tatagtattaggggcttttaaaatggatttccatccattgataaagaaataaatacccaaaagaagcaagaccagaaagtaactattactaagccgtcttgtattatttctcttggtcaaaatttattaaaagtttgaaagctcattgtcccattaaatgttggtgttaagacttcagttctttattcagaatgattggaggttatattttacacttaacattttccagctggggaactgaggtcacgacaagaatggccactcaagaattctgttggtccagcagttaaggtcatatatgggcttcttttgtggctcaggcagtagactgccattgttttcatatttcaatttgattttcttgttcataattcaagttgggagtgaactaagtggtatattttctccataagcccattgagaggctgagaatctgcttttctgcctctagattctaagttaagaagaacaagggcagggtgcatgtcattcctcttcaccattatatcaccagtggatagcatgggacctggaacacmatatatgtttaggatataattattgaataaataagtgttctgtagagaaaggaaagtggatcaaggtggaaat

SEQ ID NO: 466014 - DNA, 471 bp, Homo sapiens
gttaaaactggatcactgttgcatctgcattccagcccatgggaaggaaagaagaaagagaggttatggaggtcaagtattttcatttctaagaatgtgaagcagaagatgctcacatcaattctgcttatatccttttggctagtcacatagtcacacctagctgcaagaaaagctggcaaatgtagtctctaaataggcaggcgtgtgtctagccagaatgctgtggtccaaatgttggttttccccygaaattcacatgttggaacctaataccaaataagatagtattaagaagtgggggcatttgagaattgattaagtcatgagggctccaacctcacaagtggggttagtgcccttataaaagaggttcaagggagcacccttgccccttctgccatgtgaggatacagcaagaaggctccatctctgaagcggagagcaagccctcaccagacactgaatctg

SEQ ID NO: 466015 - DNA, 471 bp, Homo sapiens
gttaaaactggatcactgttgcatctgcattccagcccatgggaaggaaagaagaaagagaggttatggaggtcaagtattttcatttctaagaatgtgaagcagaagatgctcacatcaattctgcttatatccttttggctagtcacatagtcacacctagctgcaagaaaagctggcaaatgtagtctctaaataggcaggcgtgtgtctagccagaatgctgtggtccaaatgttggttttcccctgaaattcacatgttggaacctaataccaaataagatagtattaagaagtgggggcatttgagaattgattaagtcatgagggctccaacctcacaagtgggrttagtgcccttataaaagaggttcaagggagcacccttgccccttctgccatgtgaggatacagcaagaaggctccatctctgaagcggagagcaagccctcaccagacactgaatctg

SEQ ID NO: 466016 - DNA, 631 bp, Homo sapiens
taaatttaggagatccgacagcccagagttccttcaggttgcagcatttttgatatgaaaaaacctaaagacagagtagaaagaagcagggatcatggggatattgtattttctccctaggttttaaaaagaagctcaaaatacacatgatccttttcagaacattttccttggaatttatgggaaatagaccayctttgaatgagttatctgggcattttagaagtattcactcccttggatggtcatcaaaataagtgaatctccactggggcctattggaaggtggaaggtgggaggaaggagaagatcaggaaaaataactaatgggtactaggcttcatacttgggtgatgaaataatctgtacaagaaacccccatgacacaagtttacctatgcaacaaacctgcacatatacacctgaacttaacataaaagttaaaaaataagtgagtctcttcaacgaattcctctctataacagaatgcagtccagcataatagttaaggcacaggttttggagtcagactctcgctttaaatcatggctctgacacttactagttgtattactttagacaaattagttaagttctctaaatctcagtttccgtatccataaaatggaga

SEQ ID NO: 466017 - DNA, 631 bp, Homo sapiens
taaatttaggagatccgacagcccagagttccttcaggttgcagcatttttgatatgaaaaaacctaaagacagagtagaaagaagcagggatcatggggatattgtattttctccctaggttttaaaaagaagctcaaaatacacatgatccttttcagaacattttccttggaatttatgggaaatagaccatctttgaatgagttatctgggcattttagaagtattcactcccttggatggtcatcaaaataagtgaatctccactggggcctattggaaggtggaaggtgggaggaaggagaagatcaggaaaaataactaatgggtactaggcttcatacttgggtgatgaaataatctgtacaagaaacccccatgacacaagtttacctatgcaacaaacctgcacatatacacctgaacttaacataaaagttaaaaaataagtgagtctcttcaacgaattcctctctataacagaatgcagtccagcataatagttaaggcacaggttttggagtcagactctcgctttaaatcatggctctgacacttamtagttgtattactttagacaaattagttaagttctctaaatctcagtttccgtatccataaaatggaga

SEQ ID NO: 466018 - DNA, 604 bp, Homo sapiens
gggttgtgatggcctcctctggagtggtttcacagatgcctttgcctgaatattagacgagtcaccatattcaaactagattttatatctattaattggctgtagtttctacaactcaaaggttctagtcactctcaggtgacctaaagcctgggtccagcagtgaattacctacaagaccctaagccagctagcagaggttttctggtagctattcaaacatgatgcattgcttttctggttctggcttccacataggtaacctaagtcaagctccttggtttttaccaagcttgtgaccttgacaaaagtcagaggcagatttaccwtgtagctaatgaagcttaggtttcagggcctcatgtccatgggctcccttcatggcccaaggaatggccctacatatgtgtgcacatgttcatgggttttagtgaaattgaaaagtaagataatttttaaggagagctttccaaattgtatgactttcaggtcccagaaaggttgaaactgctcatgctcccaacatacgaggcattagatcctcatcacctaagataagttgtgtttagagtccaggtccttcacattttgtaaagcttcaatt

SEQ ID NO: 466019 - DNA, 634 bp, Homo sapiens
tgatttatcatcacctctcaggaactgtgtgaagccctaggcaatttatatcatctattggtcttatctgtaaaatgagggacctcaagtacacgacttttaagatcccttttcagacttaatgtgctgagtgtgtgaaaagctctgtgaaggtagaccactcttgatgctgaacctcagaactgctctcacccaagtcccagtcctacattttccaaagattgcttcgcatttctacttaaatatctaactgccagcgttcamcaactaatccaaactactcttccctccaacattgattttcttctggccaatatctctggaatcatctttacctcttttctctctccagtcccccatctcccgcaagattgtcttcttactttttcttatatctatcctctcctttcaagcctgataactatcaagattaatcatgctccttatctacttgcacttgaatggctgacttggcttgctaacttggctcttgcgactcctattcctaatgttttccagttgtcatgttaccacctactgacctccatccacctaaacccataacctcaatcctgctcaaaagtcttcaataactcctcactcccttcaggggaaagtctaaggtcctttgcct

SEQ ID NO: 466020 - DNA, 634 bp, Homo sapiens
tgatttatcatcacctctcaggaactgtgtgaagccctaggcaatttatatcatctattggtcttatctgtaaaatgagggacctcaagtacacgacttttaagatcccttttcagacttaatgtgctgagtgtgtgaaaagctctgtgaaggtagaccactcttgatgctgaacctcagaactgctctcacccaagtcccagtcctacattttccaaagattgcttcgcatttctacttaaatatctaactgccagcgttcaccaactaatccaaactactcttccctccaacattgattttcttctggccaatatctctggaatcatctttacctcttttctctctccagtcccccatctccygcaagattgtcttcttactttttcttatatctatcctctcctttcaagcctgataactatcaagattaatcatgctccttatctacttgcacttgaatggctgacttggcttgctaacttggctcttgcgactcctattcctaatgttttccagttgtcatgttaccacctactgacctccatccacctaaacccataacctcaatcctgctcaaaagtcttcaataactcctcactcccttcaggggaaagtctaaggtcctttgcct

SEQ ID NO: 466021 - DNA, 618 bp, Homo sapiens
agagtgaaaataatttgtggaaatgacagcaatgcctagcagttaataccatgagttctggaatcrgccaacattggtccaaatcttgacttccccacttattggctgtatgaagttagataattgaattaacacataagtgctgtttttatttaaaaatgttttgttcataaagaaaaaaatggaacaaaatgaaaagtccatttatattacatagttgctttaaaaaaaaagatacagagaccaatgtattaacatagaaaaaatctccaagacatattgttatgtgagagggaaaacggatactatatactatagtggaatcctatttttgtacatatatttatttatagatggatgggtaaagatctggaaggatgcatgatgaagagttaaccgtgatcgtctggggggttgagactgatggtgggcttgtggaaaatagaacatggatttttaattcttatacattgctgtactaattaaaatttttacaagtttgcattattgtatattgagcattttcaaaggaaaaaactctcctaagagatgttttgttctcatttgaagccaaagtcttactacttccaaataaagataaaccctattccaaagcat

SEQ ID NO: 466022 - DNA, 684 bp, Homo sapiens
tttggacatggacttttgggttaatcctggaatgagttaagactttgggggactgttgggcaggcatgattgtgttttgaaatgaaaggacatgagatttgggaggggccggaggagaatgatatggtttggctctgtccccacccaaatctcaccttgaattttatctcccataatccccatgtgtcatgggagggacctggggggaggtaattaaatcatgggggctgttacccccatgctgctgttcttgtgatagtgaatgagttcttctgagactgatggttttgtaaggggcatttccctctttgctttgcacttctccttcctgccaccatgtgaagaaggatatgtttgcttccccttccaccatgactgtaagtttcctgaggcctccccagccctgtggaaatgtgagtcaatcaaatctctttcttttataaattacctagactcaggtatgtctttattagcagtgtgagaacagactaatacacccagaaacaaatccacayacctacagcaaactcatttttgacaaagatgccaagaacacatactggggaaaaggcaatctcttcgataaattctgctgggaaaactggatatccatatggagaagaatgaaagtagaccccatctctcactgtatacaaaaatcaaatcaaaatggattaaagactt

SEQ ID NO: 466023 - DNA, 590 bp, Homo sapiens
attcttatgcacataaacattgagaatcataggcatatgtatatagtcttcagctcctgctactgtggccaagggtatatttgaaagtcaaacagaactacaaattaggcaatgcagaggactttttccagttaagtcctccctcttactacctgaaaggctcaaaatgtaaggcattataattactacatgtcacctaagaaacttctatcagggccccagcaagacacagatggcatcctccagctgagtaaccttaggtttcataaagggaccgtctgcaaaggcgtgggcagagttatggggaagctgcaggggatggtgtagtatkgcagggctagtaaccctgggggagctgttaccactccaaggcctgagggacaggaggaaggagcagttatagaatctaaaaatagaggctgggtggaaagggtccttctacaggactgtgacgtctggtggaggaagatggctagacttcagcaatcctgaaatgtgggagatgggaaataaacttcactcatcagcttcactcatgccctaccagaggcctcctgcaaatgttcccctgctggccaaatgaaccagag

SEQ ID NO: 466024 - DNA, 538 bp, Homo sapiens
agcatcttgatcttggacttggacttgatcttggactgtaagaaatgaatttatgttgtttataaaccaccaatctatggtatcttgccatagcaggtgggtcagactaacacaccagrgtgtgcagaaccataggccacaacatgcttcctggagggacttcaacttgcatgtcacaccacgcttctctaggtcagagctcctttccaggtgacagacggttgttgtctaaggacaagccccttcctgttctctctctcccaagggagggttacattttcattctatgaagctgcctaaggagagaagctagatataagagagaaaggttgttgcaagaactgagacttcagaagaccttcactccaaattctattgcacctggcaaaagcacatctcagatgagcctgcatgggaaatttgctgaagcaccatctgtctatttagcaccacaggtcatcatgggagatggtgtttcaccaggaagcagcttcacactaaatcacttgcatttagaagtgactctaagaaaagtaat

SEQ ID NO: 466025 - DNA, 662 bp, Homo sapiens
gtgggtctcattcagctcctgaagctccctggtggaaggctaggctcagggaaatggctgtgagaagggaagggatatatatgaaggagggaaggtgtctgacttctgctcttctttcttccctaacactctactgagtcagaagcagctcacaggctgctccccacagctcccctgtacctgtcaggtaaagtgagtttagaccgaaacacctgtggatggggaattccytcaccatggttggggatttagaggttagcatacaccaataagccctgcagtgattttagagggctcctgacttgacttgctggggttcaccccaccctctctcttagctatcttgcttcccttctccctacccttctaatttgcccagtagctgacgggtttcctaggtccctgaacccttcttttttacccaccatagatgaagccttcactgctcatctgcactgttgtgtgtttcagctttggaggttcatggaaagaactatttttctaccttattgaactcttcctaagtcaagagaattggattcaacctccctgcccttttcacctcattaacctctatcctttccttagatctcagttcattttcaagccttccctgacctgcatcaccaggtcaatccctgcatcagaggcttccatagcat

SEQ ID NO: 466026 - DNA, 560 bp, Homo sapiens
aaaacagacccctgcagatgaaagtgttgctcgtaagaaaaaaaaaaaaattgaccagaataattcacaccatctacatcagttgacctcaccagaaactctagggaaaacggcctctgggatcatgatctagggacctaaaggttacaagaattgcattgctgagtgttgggctggaacctaatggaaatggctgagaccccacagggacctccaccatgagtaaggtcaactttaaaattgaatcaggttagaagagtcacgttatgctttggagccaggcagataaccctgactagcaaatgaagcttcagtgagaggcaaaactcagcaattttcacttcattcttttccaatatatagctaaagtgccaacgtagcatgacatttaaaccttacaataccatattaagagaacacaaatgcagcacagcaagtatttttcaaagggggctactaagaggctgagcttggagatttagagtcaagttgatttacagttacctaattatagrtaggaaccctgatcaccattccttgggccccaaatttgctgtctt

SEQ ID NO: 466027 - DNA, 620 bp, Homo sapiens
atgatttttactacatgttcgttatgccacaaagttcataagatgttaacagtctagtttcaccagagcttgctttgcagtgttttggttggcctgtcttttcctcctgccccatctcatccctccttggatggccaatgctagccagggtgctgctgggagagaggaagtctgagctgcagcaacatttgaaggcttgcttttycattcacttctgagggatgaggttacagtgtgtaaacacaatactgtatttcatagctatcccggggctttgggcttgatccttccatgatagtggtgtcctcattaccaattcatgatgctgccaggcagtcatcatgaataatcagcttccccctaaatctggaccatccgttctgagtttctggcatgttgcttcaatgagaagtgagagatttttatctcatttcagggaggaaactctgtgtatgactttatatccaactctgggactaaataaatgcatttaatactgtgaccctaagaataaaaggtggtgaagagttctagaggttgtttgtactcacactcataaggccaggaaaaggggtgatgggaagatttaacatgatcttctgtcaatcatacctcaggac

SEQ ID NO: 466028 - DNA, 631 bp, Homo sapiens
tgactctggggatcagaagtcctggggcaggcagcttggagccacctcaggtgatagcatgagtttgacaaaaaccagtattaagcatagaggtagggccagggtggtagctcacacctgtaatcccagcagtaagggaggctgaggtaggaggatctcttgagtccaggaattcaagagcagcctgggcaacagagtgatacccagtctctacagaaaaattaaaaattagccaggtgtggtgacacacacctgtaatcccagctacttgggaggctgaggtaggaggatccctttagcccaggagttcaaggttgcagtgagctgtgatcatactactgcacttcagcctgggtgtgacagagggagacactgtctcaaaaaaaaaaaaaaraaaaaaagaaaaggcctgaaagcaatcatgattagtgcaagttgtggaggatttcaagctcttcacagatgacatttataaacatgatgagcttcagagggttggaaaaaatgcatttcagagttagataccttagttgggttggttttaatgatcaaacaggcatggtgggcccacagagtcttgggttagtcagcagctcccttatttgcaaactggttaaaggtatgaaaatgg

SEQ ID NO: 466029 - DNA, 612 bp, Homo sapiens
gaaactaatatcagactcaatatctattataccataaactccttcacaaagggtcagaataccatcagttatttctactggttgtccttcctcttgttaatatattttaactcctcatgacatgaacaagtagcctttaacatagaaataagaacgtgatgtaatttctaatatcctagggaataggaatttgtttttattgattcccacttagcttttcacaagcatccctcttcttttcttagtctgtatwtaataaaaggtttataggtttctgtttttcttagttgggagaccagaataaaactaaaattgccatttccagtaactcaatatggcgtgtgtgaataggctgcacacatatgtcattgtaatgtgttttataatcaatgtctattttctttcattgctctaccttcctattcaaaatttaatctatttccttagaatcttgttttcatgaatatattaatttcaagaatgtgtgtttttgcactatggttgtaagtaacttgtaaaatcaataaaatggtttctgttgactgaactagctattgagaactgagaatggcttcatatataagttgtcagatcctgtcagatgctgtcaca

SEQ ID NO: 466030 - DNA, 548 bp, Homo sapiens
tcaaacagcaaggtgtttgaagtcaggcaggtctacgtgaccttagcgaccttaagcaaggcactcagcctttctgaacattgattttcttgtccatgaagtggcagtaattattcttacctcatagggttgtttttaagatcatgtatgtaaatatcacacctgaaggtgctttataaactataaagctgcatatgaaggtgaatcactatcatcatcattrtaattccaaggtatggataggagcgtaaactccccttatatttatctctagaatctgcctgaggaagtaggctttcagatgtagcagagaaggcctaagatcaagtagccattggcctgacaatctttctagaattgtagcaaaaattagagaatgaaatcctgggagctaggagggaatttatggatcactggtgaaactacagtccccactttttatcttgttacagatgaggaaaccaaagttcagtagggaaagggatgtggccaatgtcatactataaattagtggcacagtgaggaatttcctggcctgacagctgcat

SEQ ID NO: 466031 - DNA, 490 bp, Homo sapiens
cctgttccttttgggaagacagtaatttggtcctgaccttgtaagagaacagctctcaaccaaactgtgcttctctcctccaggccccagctgacatcttgtaattatgccaaatcccagtcacttcacaaagggtcaactcactctcacagggtcatcctgattcatggcaaactctttaaagtagtgaacaaagttgccttttcaaaaaattcggggaaaraaaaagatacaaccaatacagcatcttttcttcttttcttcatgctatctcatgccaagactctaattttataggcaagttgtgaatctctgtgaaaataaagtaaattccctataagtgaggtcttatggatttattgcaatggcatttttaagtacacaaatgtcttgtttattccaaattatctatgggtttatggaagtaagaatattttagtatactgagcactagcaacaacatgccaggcaatgagctggtgcctctatt

SEQ ID NO: 466032 - DNA, 490 bp, Homo sapiens
cctgttccttttgggaagacagtaatttggtcctgaccttgtaagagaacagctctcaaccaaactgtgcttctctcctccaggccccagctgacatcttgtaattatgccaaatcccagtcacttcacaaagggtcaactcactctcacagggtcatcctgattcatggcaaactctttaaagtagtgaacaaagttgccttttcaaaaaattcggggaaaaaaaaagatacaaccaatacagcatcttttcttcttttcttcatgctatctcatgccaagactctaattttataggcaagttgtgaatctctgtgaaaataaagtaaattccctataagtgaggtcttatggatttattgcaatggcatttttaagtacacaaatgtcttgtttattccaaattatctatgggtttatggaagtaagaatattttagtataytgagcactagcaacaacatgccaggcaatgagctggtgcctctatt

SEQ ID NO: 466033 - DNA, 576 bp, Homo sapiens
actggtttcagtgttgaggcatccccgagggaaagacattcagggtagaagaggtggccgtaattgctgcttgtcattaatatttttaccaaatggatttctccatatggcagttcctttctgtcatgggttatttataatccttccaatctttaccaccaaagctaatctataccacattagtaaaaacattcctaggccattgagttgagttcccttattttatttccaggaggcagggctattaaagtgaaggctgaataagcacagacctgcatgtggctttgttggctaatatcaaataggattcttggatgtttctggacagaactggttttttgatcagttttgtgtgaccctttaaaaaagaatggagcctgtttctgatcccatcaagctcattcatctttcatttgaacttacttctgaaaattctattctcccatttattgyctcatttagtattgatgagctcctgctttatgtcaggtcctgtgctaggcactgggactgaaagaagaataggacatacttcctgcttatgaggagtcctagctcctccactagctagcaggt

SEQ ID NO: 466034 - DNA, 541 bp, Homo sapiens
ttgggagttcaagaaaaaacaaagtagcaaagcacagatttgagtgtctgctgcagagaaatgataattgaagccacgagaggggatcagatcatacaagaaggctgtggagaacgaraagagaaggcagcctaggacggaaccctgaagaattctaagatttgaacattagataagaattgctaacaaaactgactggaagggtgtggtggaggagatagaagggcactcagcagaatgctatgtcacagtagcctatggaaaatagtgtttccagatgaagaggatggtcagcagtgtcattaaaaaaacagaacagcatttgctgaccttgaccagagaagcttctgtaaagttgagtggggcagatgccaatctgtaaaggattgaggaattagtgtgaaatgagggagtggaggtagcaaatatagtaaattcttttaaataactttgtgaaagaaaagtcagcaaacctagaggggacatggggttaagaaagttattttttgttttattttaatatggaagagactttaccaaa

SEQ ID NO: 466035 - DNA, 490 bp, Homo sapiens
agttcatactctttgactccatttatatttatatgaagtatttatagaaagttcaagaacagacaaaactaatatgcagcaatggaatcaaaagtggctgcctatggaggggcagagagtgaatagacagaagaactttctgaggtgataaaaatattctaaatcttggtagggatggttaaaaagatgtacacattatcaatgcccatggaatcaaatgcttaagttcagtgcattttactgtacataaacctcaaaaaaagtgtatgtggctagtgggcagtttgtttggcttgtgaaccccatgcactgacaccagtatacaaagacttgcctcctttgaataggctggggcagtgcgcccaatctctaggaacctaaaaggcagggatagcwctcttctctgcctggtgtttctccatctatgcaggcctctgatgatgctgggcaagatctctgcattgagagaatgatcaaggcttgtgtttgt

SEQ ID NO: 466036 - DNA, 530 bp, Homo sapiens
gtttgatcattaaatgccttgaagtagtcttcttttggttaaatatgctaggtgttttataacctacttgtacttgaatattgatagctttctcaacatttggaaagttctttgttattatccttttgaaataaatgttctaaccctatttttctacctcctcttgaggctagtaagtcttagaattgcccccttttgaggatacttcccyagtcttgtaggtgtgctatattattttttattctttttctctcttttgtctcttctgactgtgtattttcaaatagcctttcttcaagctcactaattctttcttctgcttgatcaattctgctattatgagactctgatgcattctttagtatgttaattgtatttttcagctccagaatttctgcttaattcttttcaattattttaatctttttgttaatcttgaatttatagaattcttaattccttgtctgtgttatcttgaattttgtcaactttcctcaaaatggcaactttgaattccctaaattgtcaca

SEQ ID NO: 466037 - DNA, 575 bp, Homo sapiens
aacgtcattgttctttaagtcacagtactgttgggtttccttgactattattaacacatagggaaacatacttgagaagacagctgaaggagaggaagcttaggagaatatggcagctgcttgaagatctctccatagttcccttgaggcagaaggggcagataagtcccacatgtacccagaagcagaaccagaacagatgcacaagtaggaccyagagacagagtttacttccataaaaggaggaacttccttttggagttgttttactgtatgagagatgtctttcaaggtaatgagttccttgtcagttcaggtatggcagcagggactggatgatctgataaaagtgctacagtcagggctcaagctttctttgtagggttgaactatatgacccttaaggtcccttccatccctgagagtctagactgcagaagaaaacaaatctcatccaattaagaacatcagaaaagtgagtgatgactcactgatgaagaagatggctgtgcttggatttcaattgccataataatcatcatcatcacagaagttctactggctttttctccctt

SEQ ID NO: 466038 - DNA, 618 bp, Homo sapiens
atggggacactaagactcagagaagttacatgcgtctcccaaggtcacagggctagtaagtggcaaagcaagtattccaacccagtctggtttgagtccatgcttttaacccctatactaagttgatccatcacttcctcagggtgacctttatgatcaagtgatctcccttatgtatatgacygcacatgtcactccattgttaataagtatgtaatgctatcttccctgctagtctgagagctctgggaagatgaggatacaacctttcttgtccattgctatacctccagcctccagcataccttgtaaattcagtaaatggctttggatttgattaatacatatacaaataggaatcagttttctaatatgtaaaattagaaaagttgatcttggtctacatttttttatattgctttaaataagaaacagtcctaatctgagatgctggccttgatacatgttggaaaactatcatagtgaagaccatttcaactatttaagccttagctgttcccactgtagaagactactggactagctgctctttaaagacaactctagagtacctgaagtgtttataaccactgcatattataggatgtgagcatggga

SEQ ID NO: 466039 - DNA, 550 bp, Homo sapiens
cttatcttatgacaactacatgctcttatgttaagtatgtaccacagtgcctagtatataagagactcttaatagatgtctgttctcttcctcacatactccccaaccacctgctcataattctgtctttatgttttttggtctttgtctctctctttcttctccctctctgtctctgggtctctttctctgtctttgtctctatattttccctgcacacagcacctttttaagagagcagatagttagctctgaaacccaggctcactgttatccgtgtcatctttatattcgagcaaaaagacaagaaaattgtactctgaacggcctccacacagaaagggagtcacaggcttccctgtaatctgcctgcttttcacaccattgtacagtagccctcccttatacttggagsgggtgggggagttcctttttttttatgtagcttttttttttcttttattattatattttaagttttagggtacatgtgcacattgtgcaggttaattacatatgtatatatgtgccatgctggtgtgctgcaccc

SEQ ID NO: 466040 - DNA, 472 bp, Homo sapiens
gctaaatatgatttatatatttttaaatgattcaaaacagacaagaaaataatattttgtgacatgtggaaattatgtgaaattccaactgcaatgtccataaatatttattggracacagttacgctcattcattcatataccatctatgcccacttttgtaccacaaaggtggaggtgagtagttgtggcagagattgtttgacctgcaaagtttaaaatatttactctatttccctataagaaaaagtttgctgatctactaatctagtccaaactttagacccaacagccaacttgaaggcagaggttatatgcatgtttaaatcgatattcctgttgcccaggacagggtctaacaccaagaccggccacataatttatggggctctgtgcaaaatgaaaatgcagagttcctttttcaaaaagcagaaaaaaatggcattagaggtactaaaatataaagcctttc

SEQ ID NO: 466041 - DNA, 472 bp, Homo sapiens
gctaaatatgatttatatatttttaaatgattcaaaacagacaagaaaataatattttgtgacatgtggaaattatgtgaaattccaactgcaatgtccataaatatttattggaacacagttacgctcattcattcatataccatctatgcccacttttgtaccacaaaggtggaggtgagtagttgtggcagagattgtttgacctgcaaagtttaaaatatttactctattkccctataagaaaaagtttgctgatctactaatctagtccaaactttagacccaacagccaacttgaaggcagaggttatatgcatgtttaaatcgatattcctgttgcccaggacagggtctaacaccaagaccggccacataatttatggggctctgtgcaaaatgaaaatgcagagttcctttttcaaaaagcagaaaaaaatggcattagaggtactaaaatataaagcctttc

SEQ ID NO: 466042 - DNA, 514 bp, Homo sapiens
gatctctgttgtttttgacattaccctttggcataaatttcactacaagctgttccaaatgaactcaatccccttatgcagtgttgtggagttatttgttcttattgcttgccattctccctgaacagaacctctatgccactgccctagaactgggggcagggacagtgcccacttctcctagagtgtcacccctgctctatgagctaggctctgggtagggacagtagcccctggtcttcttgtcttgcccatcttggcctgaaacctctgtcctgcaaattagctgggccgagggcatttggcttctaatactcttggtctaccatgcctggtttagagttttcattctatgagtaaggtctggtgggggaaggaagayttatttcttagcagcatccaccttgaatagagcttcttcaatatagaatggggatgggggctatgtgagaggtgcttgtggcctgcccctcccaaggtgaaatcatagctatagactaggaagtaggtagag

SEQ ID NO: 466043 - DNA, 513 bp, Homo sapiens
aattaactgtccctgtatagtcaagaagaccaaaaatttcccaaagacagtggcatttgagctggccttgaaggatgactaggacttcaccagcaacagaaaaggtgaacagcatgtaccaaggcatagtggtacaaaaagccatagcatgttccaaatgcaacaaaagatttatggaggctgaaatgtggggagaatgggtagtatcttcaggaatgtgaggattagaagagatgaagctgaagaggttagtacaaagtcttgaatgtcatgctaaaatgtttctttttcwtactccaggtaataataaataacaaataagtaaaacagaaaaataacacgatagagatttcctcacggacgaatcagtctgctttacagaggaatttggacttccagtgtaagactgatttaattggtttagtgtggggtcagatctttgatattttttaaatctttgcaggtgattgtaatgtgcagcctgggtagagaaatactgagatatatgaaagt

SEQ ID NO: 466044 - DNA, 545 bp, Homo sapiens
agctatctgctctactaaattagatgtcccttgtcttgaaaacagggaattatgaaataatcactgttacatttttaatgcttgacatattaacatacaataaatattcattgatttgagtttttgagttaagtgtagaatgaatgaataaataaacgagtgaatkatgaatgaaggtgatgggggcagcagaattatgatgatagtgacagtggtaagtactcacaggtcttggtgacttcccatttccagattggagagtgaaaacaggcaagaatgccttggccatatgaaatcaatcaagggaattaaggaccatgaagtataaggaaacacagtggattttggaaatagtgctcagtgagttttctaccattacattctaattattagaaaactctgccaatgaagtagtgtgtgtgtgtctttgtgtatgtgtgtgtgtgtgtctgtgtgtgtgtttaaaaaaaaaatgtaaaccgaacactacaatatggctctctttttgagacccacccttttgtttggacttgacaaaataagcc

SEQ ID NO: 466045 - DNA, 561 bp, Homo sapiens
agagggtacatggaggaagagtgtttctgtccatttagtaactggtttatttgtacaatagctgtcatttttatggstgaaagaatttgtctagctcccaatcctgtcatgttgttgcctaccaactttgcaaatctttaaacatggcacctcatgctttagtattagagattttgcttaacttgtttttgaaaactgataaccaagatcatttttagttcaccatatattagtttctacatctcagtgtcatcttttggtacctatgcaaccatttggagaaatatttgagtaaaaatcattgagatggcacttaagtttttggggctcaattttgttatcataaaaaatacagggaacaatttctgagaattaaattagactatataaaatacttagcaagtgctagttttatagtgagccctcaacaaataatagccattgttattgttgatatcccacatctgccatgagattgctgtgcaaccttgggtaagtcacttagatgctgccatagtgcctgcaggacccataaaagacatctaacaaatcattatagaa

SEQ ID NO: 466046 - DNA, 614 bp, Homo sapiens
aggttaagtaacaactggaatagctgattttcataatgttgaatggctgtatggctgtgaagccagacggatctgagtttgaatcttggctctaccattatgtataagctgcacgacatgggaaagttatttacctccttgaggctccatctgctcctctataaaatagagattaagggactaaatattattctattgtgactacttgtattgttatcatgattatactgttaatattatttggttatattataatagcaatgccagactctgggctasagcagtgagcatccaaaaatgtacaagacatagtgcttaccctctaggagtttccagtctgacttagcatataaccacatagctactaaataacaaaggtgtaatttgagccagagctatggaattttaaaacacttttctattacctaccgtatcgctttattgtagcatatgtctgatattattgtcattaattatttatatttgtcttccccactaaagtgagtctgtcacggtaggaatttgcatctccagtgtccagcacaggccctgccatggagtcatcctgagtacatttgctattttcagccaaaggtcctatgttttgccacata

SEQ ID NO: 466047 - DNA, 528 bp, Homo sapiens
atgtacaagacatagtgcttaccctctaggagtttccagtctgacttagcatataaccacatagctactaaataacaaaggtgtaatttgagccagagctatggaattttaaaacacttttctattacctaccgtatcgctttattgtagcatatgtctgatattattgtcattaattatttatatttgtcttccccactaaagtgagtctgtcacggtaggaatttgcatctccagtgtccagcacaggccctgccatggagtcatcctgagtacatttgctattttcagccaaaggtcctatgttttgccacatagctccctgcttcctcacatgccagtcaggaccactatttcaatatttttgtctacttctctgtgttccacttcccctccccctctccccattacagttctgcagtgagtgattccctctgtcatctcgctgtaaattgatgactcgggcctgctgatgcastgagccacatggctaatacatcagctaaatggatgccgaaaacaccacct

SEQ ID NO: 466048 - DNA, 307 bp, Homo sapiens
cgcctggccaaaagcaaatttttttaaaaggcagggccaggcatggtggcttatgcctgyagtctcagcactttgagaggccaaggctgggggatcatgcgagccaagaggatcccttgagcccagggggtcaagtctgcagtaagccatgatcacaccactctaatctagcctgtgtgacagagcaagaccctgtctctttaagaaaaaagaaaagaaaagaaaaaagaaaagccaaactcggtagctaagcattcaaggccagattctgatcaatctggctggaacacactcacagcagctctcc

SEQ ID NO: 466049 - DNA, 307 bp, Homo sapiens
cgcctggccaaaagcaaatttttttaaaaggcagggccaggcatggtggcttatgcctgtagtctcagcactttgagaggccaaggctgggggatcatgcgagccaagaggatcccttgagcccagggggtcaagtctgcagtaagccatgatcacaccactctaatctagcctgtgtgacagagcaagaccctgtctctttaagaaaaaagaaaagaaaagaaaaaagaaaagccaaactcrgtagctaagcattcaaggccagattctgatcaatctggctggaacacactcacagcagctctcc

SEQ ID NO: 466050 - DNA, 659 bp, Homo sapiens
tgagataagaaggcaagcagctagcacaggaagaactgatacttgtctgcagaagcatatgtgttacccagacttgaagggaaggaagtgggtatccaggtacagggggaggaaaagtttcactagaaaaacagctgtcaaaaaacagggtttcaagagactcaagattgaacatttcaggaaacatttcaggagaatgtctgtttgttaacctgagctggagttgggactgacggtaaagtgatgctgcttccctccactaacttgcattaccaatttacaaacaccctttcttaaytctgcccaaatgcataccctcatgaacaaatggcccatgctccgcaatcagaaaattcagtgaggcataggggttagtttcatctgcttgctgtccttccccatctcctacccagctgaaaggaaacaggaataaactctactccttctccttaggggacagcacccctacccagccacacaaggaacccagaattattactcaatggctcctccctcactgcaccactgaccctcaaactgggggacaggccaccaagtcaagtcctctttcacgttctgagaaatcctttaactctggcctcttctgtccaatgccacagcctctactctacttcattactcatcatcttccacactaa

SEQ ID NO: 466051 - DNA, 659 bp, Homo sapiens
tgagataagaaggcaagcagctagcacaggaagaactgatacttgtctgcagaagcatatgtgttacccagacttgaagggaaggaagtgggtatccaggtacagggggaggaaaagtttcactagaaaaacagctgtcaaaaaacagggtttcaagagactcaagattgaacatttcaggaaacatttcaggagaatgtctgtttgttaacctgagctggagttgggactgacggtaaagtgatgctgcttccctccactaacttgcattaccaatttacaaacaccctttcttaattctgcccaaatgcataccctcatgaacaaatggcccatgctccgcaatcagaaaattcagtgaggcataggggttagtttcatctgcttgctgtccttccccatctcctacccagctgaaaggaaacaggaataaactctactcctyctccttaggggacagcacccctacccagccacacaaggaacccagaattattactcaatggctcctccctcactgcaccactgaccctcaaactgggggacaggccaccaagtcaagtcctctttcacgttctgagaaatcctttaactctggcctcttctgtccaatgccacagcctctactctacttcattactcatcatcttccacactaa

SEQ ID NO: 466052 - DNA, 527 bp, Homo sapiens
caaattttctctctcttcttgagctgtgacttctatctcttaaaaaaataaaagcaaatttaaaataataagagctaacgtctcctactggggaggaaattaagaacaaatgtctgggaagcgggtgctctttaacaccatttaggttttttgatttgttgtttctaattaagatattggtttctgctgagggcatgcgtaaggtaggttagattttaaaatacttgccagcctttgaaggatgagacatattagctagtaagccagtttattagtgatgtaacatkaaacagcttacttaccctttttaagctacattacaataaatgtacttcctcctaaggtcaacacttaaaagtcaaaacactcatactggatgtttgtttacaaacaaatttctgatggcagtgctgaggaccagaatatgctgctccaaaataatggttttttggcataaggattattttgagctgattattttgagaaactgcagacacaggagaaattctgaaaacagagtactagaa

SEQ ID NO: 466053 - DNA, 405 bp, Homo sapiens
aattggccattaagtacttaaaaaagattctcaacattattagtcattaagcaaatgcacaccaaaaactacagtgagataccaccatatctcatggacaaaaacaagtattggccaagctgttaagaaattgggaatctagtacattattggtgggaatataaaatcacatagctggccgggcatggtggctcatgctggtaatccaagcactctgggaggctggggtaggaggattgcttgagcctrggagttcaagaccagcctgggcaagatggcaaggcaccatttctacaaaaaataaaaattaaaaaaatcggaaaaatcacacagccactttggaaaacagtctagtagttcttcaaaatgtcaaacataaagttaccacataatgtagcaattcca

SEQ ID NO: 466054 - DNA, 552 bp, Homo sapiens
atattttagtacaataattaatccattgtgtttttacatgtttacagtttacaaagggatttgtatgcataccgtatacattgccttatttcatcttcaaaatgacctctgcaacatgtagggaaaatattttaaccattgaatttcacttacacataaaataattgaacctagggacatgaattggtttgaagaagattacagaattacaaaaaatatgtattctagatcagtcttatgccatcttgctatagagctttgaatattcccactaccagcagttcaatgtctaaagtaatttgctgaccaagtacctgatgtgcctccttcaaaccaagtgcatttgttattgtttataacttcataatwgttctccagacctgccatgctgattcagctggagacactatcattgtagtacagatatgctataggacatcctcacagtccccagggagtagacaaccttaaattctgagtcactgagttttgattcaaactgaatttaagatactgattttttctcttctttcctactaataagacagtaag

SEQ ID NO: 466055 - DNA, 584 bp, Homo sapiens
ctctccatcttcttgcctcaaaagagtattttgagaaagagcagctaaagccaagttcattgagctaagaatggtttactacagaatgctgtgataggaaaaacatccgtgggagacgtggagtgtggattacatttaggcaggatatttgttgttaacagggttgtaaagaacagccctaaaaaagaaatcatgaacactgttacacaatatacccatgtaacaaaccttcatgtgtaccccctgaatctaaaataaaataaaataaaagaagaagaagaggaacaagaagaaggagaatgagaaggaaaagaggaaaacaccatgggaaaaagattgtatgaaaggtgatgattaaaaggacctgagttatctctatttggataagtgtgtccctgtgaaacragatggcacttgctccaatctcctctctcagtacccattgctttccttcatcaccatatctagccacatgtgtcctgaaggatagcaagacccctcctccctgaaaggatgaattctctaacaatcagtgaactaagggcagctctaacttgagaagaatattcatttgataaagtgtt

SEQ ID NO: 466056 - DNA, 540 bp, Homo sapiens
aaaaaaacatcactgcagtgtatctcccaaattctctctctctctttctttcttttttttctctttgtagctaaaattctgggaactgagaagtcagtttgtagacttctagaaaaaaaatatttctctgataaggcaaccctcatacctcctgttaatttcttttccccctggaaaaacagcagaggctagaaggaaaacccaatctaatgtttgaagagaaagttaaggggccatatggcatggattaacttgtgcagttgtgaatttagccaaggaccacttacttctggagttctggtyagctcaaggtatttgctttgtttctgttacatgcagcctgggacaatatagagttatcaaatatcataactgaaaaatcattgcaaattctacagtatacatcagtgttttcttcatacttgtttgcgtattagaagcacctgaggagtttaaaaaataacaacagcagcaactaatctatagatctaagccacattttgtaaattagctgtgacagagccgattaatgaaaagctt

SEQ ID NO: 466057 - DNA, 518 bp, Homo sapiens
ctatgtaagccttgtctttggtatgtaaatctgcatctccaacctagattatgatgctgtaaatatatatcttgccatttcaggtactatgtcctattgtgaggctcatttatgtccagttccaactgaatcttcaaatcaagctctttctactgcctctgcaggaaacacagatagaacacttcctttcttgttcttctccagtcacttttaaatctaaagctagaagtcaattcatgatgcatcatttatccccttattyattctaggaaggagttcagaaataatagtaagaagtggtttatagctgaatattgctatataacagaatcttgctgtaagcttagaaagtcttaaaataatatcttgagtgagaaaaaatatcaatttcaaattactgaaatctcccacttaacaaaattttatcccgattctctaacctggctttctcagaagagtacaaaaacctttctactctatagatggtatgtctgataccttcgggcaatacatccatt

SEQ ID NO: 466058 - DNA, 586 bp, Homo sapiens
tataccacattttcctcattcattcacatatacagraacatttaggttaatttcataccttgcctattgtgaaaagcacaggaataaaatgggattgcagatgtcacttcagcatatcacatttactttctttgcatataatgagattgccgcatcatacaatcattctatttttgaggactgtccatactgttttccataatggctgtaataatttacatttctcctaacagtgtataagcattctcctttctgtgtgtccacgcaagcatttgttatttctttttgtcttaaacctgtcattttcagcaatatgaataaacctgaaggacattatgttgagtgaaacaagccaggcacagaaagacaaacaccatattatatgtggtatcttaaaaagttgattttggccagaagcagtggctcatacctgttctctcaccactttgggaggccaaggtgggaggaacacttggcccaggagttggagaccttcctgtgcaatatatgaagaccccatctctacaaaaaaaaataaaaattagattagctttggtggtgtgtacctgttgtcccagctactcga

SEQ ID NO: 466059 - DNA, 586 bp, Homo sapiens
tataccacattttcctcattcattcacatatacagaaacatttaggttaatttcataccttgcctattgtgaaaagcacaggaataaaatgggattgcagatgtcacttcagcatatcacatttactttctttgcatataatgagattgccgcatcatacaatcattctatttttgaggactgtccatactgttttccataatggctgtaataatttacatttctcctaacagtgtataagcattctcctttctgtgtgtccacgcaagcatttgttatttctttttgtcttaaacctgtcattttcagcaatatgaataaacctgaaggacattatgttgagtgaaacaagccaggcacagaaagacaaacaccayattatatgtggtatcttaaaaagttgattttggccagaagcagtggctcatacctgttctctcaccactttgggaggccaaggtgggaggaacacttggcccaggagttggagaccttcctgtgcaatatatgaagaccccatctctacaaaaaaaaataaaaattagattagctttggtggtgtgtacctgttgtcccagctactcga

SEQ ID NO: 466060 - DNA, 552 bp, Homo sapiens
ctttggtggtgtgtacctgttgtcccagctactcgaggtggaagatttgcttgagcccaggaggttgaggctgcagtgagctgtgattgtgccactgcactctagcttgcatgaaaaagcaagaccctgtctcaaaaaataaataaaaactaaaaataaataaaattaaaaagttgaaatcatagaagtgcagagtaaaagagtggttaccagaggcttgagagtgtaagagggttggggcactaaaaagagttcatcaaccagtacaatgtcacagttaggaagaataaattctggtgttctattacacagtagagtgactacagcaaataacagcgcagtgtatgtttgaaaatagctagaaaagaagattttgaatgttgttgccagaaagaaatgataaatatttaaargaataaatatggtaattacctcaatgtgatcaattatgcaatgtatacatgcattgaaacatcaccctgtactccataaatatgtccaattattgcatatcaattatatataaatacaaaattaattgataaaaatata

SEQ ID NO: 466061 - DNA, 625 bp, Homo sapiens
ccatctgggttgctataacaaagcattacaaactggatagcttatatattacataaaatttatttcttacagatctggaggttggcaagtccaacatcgaggagcaagcagattcaatgtctggtgatggtctgctttcttcataaatgtatgtcttttcactgtaaccttatggaagaaagggctatccatttctctggcatcttttgtataaggggattattcccattcattagtttggagccctaatgacctaatcaactaccaaaggccccatattctaataccatcaccttgggggttaaattttaagacaatattggagggaacacattcagatcatagcactagctccagaggtaatgatttgtattctcttcccttggttcctcttatggttgcagaactataaatattgaagtactatcaaatgttggaactggaccctattttcttttttgttatgytcttgtcttttgtgatataatttcaggtgtggttttaaaaacccacttacaactgacttccatctgtttacctcctgtattgaactttcttctaagctccaactgctttcttgatatttttcacttgtagaacaacatgccaaatgcagaattcataa

SEQ ID NO: 466062 - DNA, 575 bp, Homo sapiens
gatataatttcaggtgtggttttaaaaacccacttacaactgacttccatctgtttacctcctgtattgaactttcttctaagctccaactgctttcttgatatttttcacttgtagaacaacatgccaaatgcagaattcataattaattctcttactgtgtcacacaaactttctctgcttctgtattatacatttcaaaacatatcctgtgagacaggtattttctgtaatctgggaagcatccataaagtcaatctctcaaaaatatattctgaagctatccatttccatctgttttcattgctgcttccctaacttaagccaccattcttatcctctagactcctgtcaaagaagctagtgggtctacttsattccacttttcactagtgcattgcattgtctacatggagttcagagagaattagatcaattcactcttttgctcataatactgccaaggcttatcttactagctattatcaaatccagtctcattgacaatattcatattgacctcttgtaatctgacacacacctggatctctgaatttatctcatgttttacctct

SEQ ID NO: 466063 - DNA, 593 bp, Homo sapiens
ttatatttaaatgtgaaatacaaaacaatcaagtttcaaaaataacatagaagaaaatttgcatgatcttagcatgtagggaattattgaagaaacaaaacagcaaattaggtaataaggaaaatactgattaaatcaragttattagtatgcttgttatggactgaattgtgtctgcaaaatttgtgtattgaaaccctaactcccaatttgactgtatttggagatagggcctatgatgaagtaattaaggttaatgaggtcataaaggaataaaccaatatgactgatattcttataagaaggaacatcagggcgctttttctttccaagcacattgaaaccagtcacgtgaacacacattggctgcccataagaatggaagaaagccctcaacagtaaccaaataggccagcaccttggtcgaggacttctggtctctaaaacagtgagaaaatacatttatgttgtttaaaccatccaatatatactattttgttaccacagaatgaggtaatataataataacataatatagtataatataatatagtataatatgacacaatttatctgttcatttatcaatgaat

SEQ ID NO: 466064 - DNA, 593 bp, Homo sapiens
ttatatttaaatgtgaaatacaaaacaatcaagtttcaaaaataacatagaagaaaatttgcatgatcttagcatgtagggaattattgaagaaacaaaacagcaaattaggtaataaggaaaatactgattaaatcagagttattagtatgcttgttatggactgaattgtgtctgcaaaatttgtgtattgaaaccctaactcccaatttgactgtatttggagatagggcctatgatgaagtaattaaggttaatgaggtcataaaggaataaaccaatatgactgatattcttataagaaggaacatcagggcgctttttctttccaagcacattgaaaccagtcacgtgaacwcacattggctgcccataagaatggaagaaagccctcaacagtaaccaaataggccagcaccttggtcgaggacttctggtctctaaaacagtgagaaaatacatttatgttgtttaaaccatccaatatatactattttgttaccacagaatgaggtaatataataataacataatatagtataatataatatagtataatatgacacaatttatctgttcatttatcaatgaat

SEQ ID NO: 466065 - DNA, 593 bp, Homo sapiens
ttatatttaaatgtgaaatacaaaacaatcaagtttcaaaaataacatagaagaaaatttgcatgatcttagcatgtagggaattattgaagaaacaaaacagcaaattaggtaataaggaaaatactgattaaatcagagttattagtatgcttgttatggactgaattgtgtctgcaaaatttgtgtattgaaaccctaactcccaatttgactgtatttggagatagggcctatgatgaagtaattaaggttaatgaggtcataaaggaataaaccaatatgactgatattcttataagaaggaacatcagggcgctttttctttccaagcacattgaaaccagtcacgtgaacacacattggctgcccataagaatggaagaaagccctcaacagtaaccaaataggccagcaccttggtcgaggacttctggtctctaaaacagtgagaaaatacatttatgttgtttaaaccatccaatatatactattttgttaccacagaatgaggtaatataataataacataatatagtataatataatatagtataatatracacaatttatctgttcatttatcaatgaat

SEQ ID NO: 466066 - DNA, 609 bp, Homo sapiens
tgtcttctgtggacattatcagctccttaagaaaagctaattagtttattatttttcagtctacattttatttttattcttcaatgattattaactctgtaataaagatgacagttataaatatgccagttgtattaataaagaacctaagtatttaggcagaattgtggagatagaaaactgaataattgaattatcagtttatttgaggaaaagtataatagtaatttccaacatagtaactgctccaagccaatttactgctaggattttattttagtgtattaccatatataaccaaggaaaatacaaggaagtggactctgtcattgactttccctttatctctgtgaagttttcacagagaagagataaaataccatattttttactcaaatatttcatctccytctttggttttttatttttgaaaacccaggtgctcttttcaatgtatctgaacacacacaaaaaatgactcctttagtttagatttctggcagaatagtgtcttgtgaattctaaaaacatgtttagttaaaagaaaatcaatgattaaataagttattttggttatgagatttttaaattgaataccataatgaaatt

SEQ ID NO: 466067 - DNA, 596 bp, Homo sapiens
gggtagctatgaaactcccgcttgaaactcatgaggaacattgctcaccacttcactggctgaatttgtctcacactgtctcaagccaaaggttcggcttttactgaagagcgatgtcttctcaacatatgaaatgttaataacccctgcagtaggagactaacacttatctaggaaacactaaaagtttctcaatattctcctctttcagcatataaaaaagatggttttgatctcaaggaacwtaggattgaaagcacagtgtatgattctgacagactccctgaaaacttaaccattttcaaacactcagatatacagggatatttcttgctgtaaatactacatctcaataaaattagcaaaatcagaagggattgttgcagaacaataccactttttaaaaaataaaaaaatgttgattttgacactttgaaaataataacatcaaaggaaattctgaatgggagcaaactctgagatgattacgtgagggttatgcaaagttagttaggttagtgaggttatgtgaagcccaatagcttgcctagcaaatagtacaaatcacatggtattcaatatgcaatatgaattat

SEQ ID NO: 466068 - DNA, 570 bp, Homo sapiens
agactgatctccgaattgcttcttactaagttaccatcctttcatgttctagcaggatcacaaagtattctgtcaaaattcaggaaagctgtgggtcaagcctttccttgatgtttttttataacttcatagagtgcgctacacaaattgcttacctgttccaactctcctgggtcctaaggagaggtatctgcagtaaaagactgcaagtcctgctgtctctgaaatctctacaagaagtgagagataatggaaaccttacctacctggtgaagctttgaaaaaataaagaaggatggtattccggaaagccaacctgaagagatgaagagggagagtggtgaatgttaggagcagctggagggtatgtatttgccttaaacttagtccctggagactttctgaactaatttggaggaaagttagcacttaaaaagcccyccttgattgtgatgattgaagtaagaagagtaatagtgatttattgctatgattttgtgtcttctgtatcctcagattcatataatttgggaattatgcatgtagttcttttctaaaagaataaattag

SEQ ID NO: 466069 - DNA, 547 bp, Homo sapiens
aaatgtgttggtcttccccaggatcacctctgtgagccacttaaaactctagtagacagagcactggagagtgtcccccagagaattgttttaactggcgatctgcctscccaccatctacccctaaatcctaatgagactaaatagtcttttgtttttatacgtgtgtagaagctattccaaagctttttagatttcattgactagtaaatttccaaaagaatttttgaagccttgcttaaagtttttaatatttttattttctcaggtaaaaatagttttttaaaagagattgtcattacagatttttttttcccagaaatatttactgtagcagatattcctctctcctccctttttggcaaaactttaatttcatgtgggagtttatccctttcccatgtgagttaaagttaaatcttgacaagtcgaagcctctaagtcaatatccttgacagtgattggcttaaggggaggcatgagatccttttctggactactatgtacatgggaagatctgttaggggtttatgctggtctgtttcca

SEQ ID NO: 466070 - DNA, 538 bp, Homo sapiens
aatttggtcacctacattcaccagctccattttaaaataatttttggtttattttaagaatcaaatacaccttcttcttggtataaagrtttataaccattgagactattctaaaggaatgtgctcttggctctggaggcaattccaaaggaggaatttccaaaatattttgagctatgactgcatcattgtgtagtgatgcccagtggaaaaatattttttaaagcagtagaactgttccttaaaagttactcatagttacgagaggctgagcaaccaattcacgattgtgacttcctttgttttgggaaaagttagcagaataaacacttcagtttgtccaagaacaataatttgtgtaatgagcgtcatcctcaatgttactttaaatgtaggctgagaagtaatgtgttctgtttaacataaatagagtccatttttagtgggacattgtccttgctgcatctttgaatatggatttagattttagtgactgtctctgaaactgtcttggaaggtgtgtgtgtgtgtgtgtgtg

SEQ ID NO: 466071 - DNA, 561 bp, Homo sapiens
cattttgtaaacctgcaatgaactggaactaccaagcatctcccggccttcctgctgaatcagagcagattcctccaacggaggatcttgcccctcttttctcccaccactctacagggcactggttcctcctctttttcttggaaatgcttctaaaatcaacaagatcataggcatcgagccccagtcatgccaacatcaggcgcctggaaccctgagccctgcaggtcggtcattctcatcggccccctcgcatgatccagagcaattacttgcttaaaattcaaagccaggtygcacagggccccaacgtgggaaaatgtcatgatttttcccatgtgaacaagtgacacaaaatatgaaaatagcagagggactccaccccaccgctgattggtctcgcacagctaaaaaggagaacacggttttatgacgggacaagatcaacaatgaattggcttgtagggaggaaaagagatgatataatattttcttgagctaaagggactaaaaatagtgtgaggttttccaagtgatggtggtggtggtacttcgggatgt

SEQ ID NO: 466072 - DNA, 561 bp, Homo sapiens
cattttgtaaacctgcaatgaactggaactaccaagcatctcccggccttcctgctgaatcagagcagattcctccaacggaggatcttgcccctcttttctcccaccactctacagggcactggttcctcctctttttcttggaaatgcttctaaaatcaacaagatcataggcatcgagccccagtcatgccaacatcaggcgcctggaaccctgagccctgcaggtcggtcattctcatcggccccctcgcatgatccagagcaattacttgcttaaaattcaaagccaggttgcacagggcccmaacgtgggaaaatgtcatgatttttcccatgtgaacaagtgacacaaaatatgaaaatagcagagggactccaccccaccgctgattggtctcgcacagctaaaaaggagaacacggttttatgacgggacaagatcaacaatgaattggcttgtagggaggaaaagagatgatataatattttcttgagctaaagggactaaaaatagtgtgaggttttccaagtgatggtggtggtggtacttcgggatgt

SEQ ID NO: 466073 - DNA, 561 bp, Homo sapiens
cattttgtaaacctgcaatgaactggaactaccaagcatctcccggccttcctgctgaatcagagcagattcctccaacggaggatcttgcccctcttttctcccaccactctacagggcactggttcctcctctttttcttggaaatgcttctaaaatcaacaagatcataggcatcgagccccagtcatgccaacatcaggcgcctggaaccctgagccctgcaggtcggtcattctcatcggccccctcgcatgatccagagcaattacttgcttaaaattcaaagccaggttgcacagggccccaacgtgggaaaatgtcatgatttttcccatgtgaacaagtgacacaaaatatgaaaatagcagagggactccaccccaccgctgattggtctcgcacagctaaaaaggagaacacggttttaygacgggacaagatcaacaatgaattggcttgtagggaggaaaagagatgatataatattttcttgagctaaagggactaaaaatagtgtgaggttttccaagtgatggtggtggtggtacttcgggatgt

SEQ ID NO: 466074 - DNA, 505 bp, Homo sapiens
cacctctcataatttaatacaataccctccatagagcttcttcggtgaatgtgaggtattcaggttgcttcactcgtgtctagtcttttcactgagtttatcctgttaagtatctaaaatcaatgtcacatcattgttgcatatctgagaaagaggttttagaaaacaatccaatcccctcaaaagcttatttcaagtaccgtaacaacaattatttgacatcatgtatagtggagctaatattgagtcacaggagaatttgttatttaaaatccattttattgccttttattaggttggtgcaaaagtrattgtggtttttgccattacttttaatggcatacatgtgccattaatacatgtacgatttttattacctctatgttaaataatatatatttaggagttcccaagtcctagaagtcagcatctacctctctcctaatctatagaagtcctttgcacagtcagtctttcattggacttagagaagtcagtgtacatg

SEQ ID NO: 466075 - DNA, 588 bp, Homo sapiens
atgcacgtgcatcacacagactctctctctctctctctctctctctgaagattaggcactgtgattaagtcgtagaggtttatgaagtcaaatctgcwgttcgtcggccagctggcaagttacacctgcacacaaaacatcatatctttctcttttccacctgagtctcttacccaggcattcctccattataatttttgtggttgatgctttctgattatggccttcctaaaccctcttggcttctctgtcttggcttttcagagagtatgttgttgttgttggcagtgttgggtttttttttgctttttcatttttagttatgtgcactaacctggagtatgaggtccaggacccaatgtgcctttcttcttccaggtattattttagtttagggtctataaatcttttgcctcttgattcttcactcctaggtgcacataaattctctactgtgccaagattttaaccagataccaaaagtaagagacaactctgggtctgaccctaatctgcaccttctgtagaaccctaggtacttaaggctgaacttagagtatttttaaaatttgtatggtgtaacaacaa

SEQ ID NO: 466076 - DNA, 592 bp, Homo sapiens
gatactactagttgataatcaaggctgttgctggcccagagggcgatattgcatgaattagaaaaaggcattcccttcctgcattcagatgcagctctcagcagctctactcaggctctatacaggacactatccaggttcccacacagggtcttcagttgtcatctggtagaacacaaatctgtgtatcactgatgaagcttgactgagaatcactccactttttgtmcagttaagatttatggatttgctaattctgcctagcagggatgctcaggatttcagggtcacttttctgttttcccactctaatcagcactttttctctttttttgtggtgattaacataaacatgacctggctagggtaagctttagagagaattcctccagtgctttcttaaaaccttcatcaatgttagactttcttatgtccagatgttcctctcttatatcacattagaatataccatatcccataatgtagtgtggtaaattttgtgtgtcaactggactgggccatggagttctcagataaacatatggttaagcattattctgggtgtgttcgtgagggtgtttctggatgagat

SEQ ID NO: 466077 - DNA, 605 bp, Homo sapiens
tgttacctctgcttctatttttgaggagactgtggaaaattagcatcaatctttggtagtattcaccagtggaaccatctgggcctggtgcattatttttttgaaaggtaattattgattcaacatcttaaacagaggtaagcctattcagattgtatcartttctccctgttttggtagtttgtgtcttttgaggatttagtccactttatctaaggtaacaaaattgcaggaatagttgcttgtagcatttctttatcatttaaacctccttggaatctatagtaatgacccctctctctcatttctgatattggtaatttgtggcttttccttattattatttttggctagcctggctaaagatttatcagttgtattgatcatttcaaagaaccagcttttggtttcatttcttttctttgttttctttctttccattgcattgatttttgctcaatttttttttattatttcttttcttctgttgctttaggcttaacttgctcttttttaatttcctatggtggaagcttaaattatttagatgtttttttctaatatatgcacttgatgctacaaaatatttctaaggactgattttt

SEQ ID NO: 466078 - DNA, 534 bp, Homo sapiens
aacttgctcttttttaatttcctatggtggaagcttaaattatttagatgtttttttctaatatatgcacttgatgctacaaaatatttctaaggactgatttttctgtatcatacattttaataagtagtattttcrttttcatttaaaggtattcttcagagttctttgacccatgtgttatgtacaagtgtcttttaatttctaaatatttgacattttctagctgtctttctgttattgatttctactttaatcccattgtagtctaagtacattgtataattcttattaaagtttttgaggtgtcttatggcccacagatgtggttctattttggtgaatgctccacgtgagtatctagaagaatgtatattttcctgttgctggatgccatattctataaatgtcaattagattaagttgattggtagagctgtttgggtcaactgtatcattattgattgtctgcctgcttgatttaccaattattgaaagagagctgttaaagtttccaacaataatagtgaattg

SEQ ID NO: 466079 - DNA, 619 bp, Homo sapiens
gtgaattggtccatttctccttggaattttatcagttttgcctcttattttgatgctttgtggttaggtacacatacatcttggattgttatgtactcttggagaactgacctatttawataatgctctttatcccagataattttccttgttctgaagtcagtttcgtttaatacactacttctgtttcttttgattagtaggagcacagtaaaattttttccatctttgtttttaagccgaatcttgatctttaagtgggttttcttgcagatgacatggagttgtgttttgtttttgtatttttaattcactttaaaatgttctataattactgcatttaaccataaatatttaaagtaatattgataaaactggattaatatctaccatatttgaattgttttatatttgttacatttgttcttggttcttttctgccctctctagatttagttgaatatttatatgattcaattttagctcctcttttggaatatcagttataccttattaaattttattaaaaattaaattttgcaatatacataattcactaataaagtccaatttcaaataccactatattgcttgatatgtggtgcaggtattttaacag

SEQ ID NO: 466080 - DNA, 529 bp, Homo sapiens
ctgcttcagccttcactgtctccagaactattaaaacagcccacaaactgaccttgctgccaggcttggccccatcaaatccagcttcaagacagtttttagtgatccatctgaaaaacaaccctgatcatgttgctctcttgatttaaaaatcttcagaggcttcagtgacttatggaatggagtccaaccgctttagccttgatgaagaagttctccatgatctgattgtctcctacctcctacctcatcccaccttgtacttggttccagtaatgtcaaagcccttgaaatagacctgttagacctgccgcatcaggcattataatgcctcctttacacatttggtctcatttcatccttatatcaatttgtgacataaatggaattatttgcatttttagataagatttgaataataagctaataagcggtaaaatctagacttaaacatgaacctgaagcccttgcccttccatactgcaaacatatttcttactcaccrtgctatttcctaccttcatgccta

SEQ ID NO: 466081 - DNA, 596 bp, Homo sapiens
tgagttgcagattttgagtgtatagagtaagtgtagctagctatgagcactgtgtacatgagaagtatctatcactgtgtctttctccattccacagctcttgcaaaccacagaactcaacatccatgcaactccttaactgatgtgcctgtttggatattcaaatactttctaaaaaaccaaaaattatgcattagcttgcagcacctacactctagaaaaatcaaccctcagggtcttttggtaccatggtctggagttgcttttattttcstagcttttgtcagcatactgctaactcggttgataagtgttctttctgtttaatgatttatgcttcagagggatttgtataggcaaaatagataaagccatatatttccttataggacatattttagatgacattactttgaattcagaacctgtgctctcactgtgggtatcaatgacttcctcaaaacaattcaataatttcaagggcactgtctcatttgtgaaggtcttttacagttaatatgactacctcagataattacaatactgcttctggtatgctacagtatataatagaatccagtgttattaactgaaat

SEQ ID NO: 466082 - DNA, 596 bp, Homo sapiens
tgagttgcagattttgagtgtatagagtaagtgtagctagctatgagcactgtgtacatgagaagtatctatcactgtgtctttctccattccacagctcttgcaaaccacagaactcaacatccatgcaactccttaactgatgtgcctgtttggatattcaaatactttctaaaaaaccaaaaattatgcattagcttgcagcacctacactctagaaaaatcaaccctcagggtcttttggtaccatggtctggagttgcttttattttcgtagcttttgtcagcatactgctaactyggttgataagtgttctttctgtttaatgatttatgcttcagagggatttgtataggcaaaatagataaagccatatatttccttataggacatattttagatgacattactttgaattcagaacctgtgctctcactgtgggtatcaatgacttcctcaaaacaattcaataatttcaagggcactgtctcatttgtgaaggtcttttacagttaatatgactacctcagataattacaatactgcttctggtatgctacagtatataatagaatccagtgttattaactgaaat

SEQ ID NO: 466083 - DNA, 606 bp, Homo sapiens
tctaatcaaggattaaggtcctctggcatatttctagttacaaaaacatcatcaactgggaggccaaggcgggcggatcacaaggtcaggagatagataccatcctggctaacatggtgaaaccccgtttctactaaaaatacgacatattagccgggtgtggtggcaggcgcctgtagtcccagctactcaggaggttgaggcaggataagaatggcatgaactcgggaggcggagcttgcagtgagccgagattgtgccactgtactccagcctgggcaacacagcgagactccatctcaaaaatcattgaacttctaaataaagacccaaaacacctctaatagtaaacactgaaataaatgtgaactctctaactctctctctctctctctatatctatctatctatctatctatmtatctatatgtctatatggttaacaaaaactaataaaaatgagtgagataattacccaattttttgtgaatcagtgagtgacagcagttgttgtagtgaattaaatcaaggaataaatgtttgcaaagcagaaattttaaggagctctccctaccaccatgcagtccaaaagcaaataatcacaaa

SEQ ID NO: 466084 - DNA, 606 bp, Homo sapiens
tctaatcaaggattaaggtcctctggcatatttctagttacaaaaacatcatcaactgggaggccaaggcgggcggatcacaaggtcaggagatagataccatcctggctaacatggtgaaaccccgtttctactaaaaatacgacatattagccgggtgtggtggcaggcgcctgtagtcccagctactcaggaggttgaggcaggataagaatggcatgaactcgggaggcggagcttgcagtgagccgagattgtgccactgtactccagcctgggcaacacagcgagactccatctcaaaaatcattgaacttctaaataaagacccaaaacacctctaatagtaaacactgaaataaatgtgaactctctaactctctctctctctctctatatctatctatctatctatctatatatctatmtgtctatatggttaacaaaaactaataaaaatgagtgagataattacccaattttttgtgaatcagtgagtgacagcagttgttgtagtgaattaaatcaaggaataaatgtttgcaaagcagaaattttaaggagctctccctaccaccatgcagtccaaaagcaaataatcacaaa

SEQ ID NO: 466085 - DNA, 606 bp, Homo sapiens
tctaatcaaggattaaggtcctctggcatatttctagttacaaaaacatcatcaactgggaggccaaggcgggcggatcacaaggtcaggagatagataccatcctggctaacatggtgaaaccccgtttctactaaaaatacgacatattagccgggtgtggtggcaggcgcctgtagtcccagctactcaggaggttgaggcaggataagaatggcatgaactcgggaggcggagcttgcagtgagccgagattgtgccactgtactccagcctgggcaacacagcgagactccatctcaaaaatcattgaacttctaaataaagacccaaaacacctctaatagtaaacactgaaataaatgtgaactctctaactctctctctctctctctatatctatctatctatctatctatatatctatatrtctatatggttaacaaaaactaataaaaatgagtgagataattacccaattttttgtgaatcagtgagtgacagcagttgttgtagtgaattaaatcaaggaataaatgtttgcaaagcagaaattttaaggagctctccctaccaccatgcagtccaaaagcaaataatcacaaa

SEQ ID NO: 466086 - DNA, 634 bp, Homo sapiens
  misc_feature (1)...(634): n = A,T,C or G
cacaggcgcagaagattgggagcatattttgcacactttctgggccttagttttcttatctgggagttgaaaggcataaaccagttgagctccaaggttcttcttgatcatcggctattgtataacttgtgatagtccctaacatctcctgacttagaaattctacaagtcgatgattctgttacatcagttgctattcaggaatgctctgtggatccctggaggttgtgtgaargtgccctgagggcttctgtggcatgtggaagaggggcaagggaagccaagctggctgcttcaatcagaacagctcactttgatctattttacatattggtctttctgaataagatttcatttgaagaaaggattctatagttaaaaaaaaatttgtttggaaacttctgtactagattaagaaaattcctttaaaaatgtgtgaaaacacattgatggtgattatagatcccaaacagatgatgtctagaaataagaaggattgatttgttaagtagtaatcaattagtcgaaaatattttgtaaaagtaatttggaattgtcttgacagaaatancagttttagacattgtttgaataagaattgagctggcatgtcaggataaggagactaggcagg

SEQ ID NO: 466087 - DNA, 558 bp, Homo sapiens
cttcgagtggtaatttggcaatatgtatcagaagccttaagagttcgcacatgctttgatccagcagttccttctggaacagatcctaaagaaacagagatgtatgcagaaatttaattataagtgtatttaccaaaacattgttgatggtagtgaaaaagcaaaagcaacttaaatgtctgacgattgagctggttatatatcatagtggatttctagggcagtcattaaaaaataatgttgtggaataatatttaatggcatggaaagatgyacatgataaagtattaagtgagaaaagcaggttacaaaacagacgaattactgggggagataagacacatgtataaacaactcaaacataagttggagcctagcatagtaggaagaaaaacacatactctgggaccagattgtccagattcaaaccccagctctgctaaaaactagctgtgtgagcttggacaggtgactcaactgctctgtgccttagcctttcatctgtaaaatggagattcagctagcgtctatctagataaatcagcatatacaaagtgc

SEQ ID NO: 466088 - DNA, 354 bp, Homo sapiens
gaaactgcaagtgcaaatgccttgaggtgggaacaagcttgtcatgttcagaaacaactagaagggcagtgtgactgggcctacggactaggtggaacaaggtgagattacggttacagagacaggcaggggccagatcatgtaggscttgtaacagcattttaaccttcagtaattccaggttttagctgggctgcagattcaaatggaatatttcttggaaaaagcccaggatccctaggttctcaggatcctgagaaaatgggctgtggctggtttggtttgcctcagctgcagaagcaaagaggttttcagtggccccctacacttccagccatatatcttaccttatca

SEQ ID NO: 466089 - DNA, 354 bp, Homo sapiens
gaaactgcaagtgcaaatgccttgaggtgggaacaagcttgtcatgttcagaaacaactagaagggcagtgtgactgggcctacggactaggtggaacaaggtgagattacggttacagagacaggcaggggccagatcatgtaggccttgtracagcattttaaccttcagtaattccaggttttagctgggctgcagattcaaatggaatatttcttggaaaaagcccaggatccctaggttctcaggatcctgagaaaatgggctgtggctggtttggtttgcctcagctgcagaagcaaagaggttttcagtggccccctacacttccagccatatatcttaccttatca

SEQ ID NO: 466090 - DNA, 354 bp, Homo sapiens
gaaactgcaagtgcaaatgccttgaggtgggaacaagcttgtcatgttcagaaacaactagaagggcagtgtgactgggcctacggactaggtggaacaaggtgagattacggttacagagacaggcaggggccagatcatgtaggccttgtaacagcattttaaccttcagtaattccaggttttagctgggctgcrgattcaaatggaatatttcttggaaaaagcccaggatccctaggttctcaggatcctgagaaaatgggctgtggctggtttggtttgcctcagctgcagaagcaaagaggttttcagtggccccctacacttccagccatatatcttaccttatca

SEQ ID NO: 466091 - DNA, 559 bp, Homo sapiens
ctcttctttaaaatttctagcagtgcaggtatactggtgataaattctctcagattctcgtttgtttcgagaaagtatttcttcatttatctgacggataatttcattgaatatagagttctagattcttttactttcaaaggtctaaatattttcctctgttctctttcagtttgcatagattctgatgagaagtccgatgtatttcttatccttgtwcctctataggtaaactgttccttttcctctgccgttttcaggatttttgtctttgtctttctgcaatatgaaagtgacatgtctagggatagctgttttgggattcttcctgcttggtgttctctgagcttcctggatctgtgttttggtgttattaattttgaaaaatttctggcctaatggaatagttcttctgttccctctttcttctccttctggtattccaattacctgtttgttgcaacttttgagttgtcacatggttcttgaatattctctttcttattcttttgttctttttgcatttcagtttgagaagcattcattgacgtattttcag

SEQ ID NO: 466092 - DNA, 601 bp, Homo sapiens
gtttgttgcaacttttgagttgtcacatggttcttgaatattctctttcttattcttttgttctttttgcatttcagtttgagaagcattcattgacgtattttcagtttgtgaatcttcccttgcctatgtctaggttaagaatcagcccatgaaagacattcctcatttctgttacaatgtggctttttttatttatagygttttcttttgatactttcttagcattcgtctctctgcttatattacccatctgttctttcatgttgtttacttttttcattcttagttcgataattccaaaattttgctatgtctgtgctctgatgattgctgtctgatgattgctgtctatttaaataattttttcttgatttttattatgctttataattttttgttgaaagcatgacgtgatgtatcaggtaatagaaactgaggcaaataggcctttagtgtcagattttgtgttaacctggctgggagttgggctgtgtttaatgtttgctgtggctgtaggtgttaaagtcttccatttcctcgagtgtactcattatttgtttcacctgttgtttttagacttccctaaaaaccccttctt

SEQ ID NO: 466093 - DNA, 601 bp, Homo sapiens
gtttgttgcaacttttgagttgtcacatggttcttgaatattctctttcttattcttttgttctttttgcatttcagtttgagaagcattcattgacgtattttcagtttgtgaatcttcccttgcctatgtctaggttaagaatcagcccatgaaagacattcctcatttctgttacaatgtggctttttttatttatagtgttttcttttgatactttcttagcattcgtctctctgcttatattacccatctgttctttcatgttgtttacttttttcattcttagttygataattccaaaattttgctatgtctgtgctctgatgattgctgtctgatgattgctgtctatttaaataattttttcttgatttttattatgctttataattttttgttgaaagcatgacgtgatgtatcaggtaatagaaactgaggcaaataggcctttagtgtcagattttgtgttaacctggctgggagttgggctgtgtttaatgtttgctgtggctgtaggtgttaaagtcttccatttcctcgagtgtactcattatttgtttcacctgttgtttttagacttccctaaaaaccccttctt

SEQ ID NO: 466094 - DNA, 585 bp, Homo sapiens
aggagccatagaagtcaccttaagaacaccagatgctgggcctcataaggctgcacaactaagtccgacccctgtctgtgctggaaagaaacagatgcttatggcctcccttcccccattaggatggtctccaggaatgagaagaccccagctctgaagaagggccctgttgttagctgctcagccagcctaaggttggtcctggaatcccagtgacccccaaattcccttgccttttccatatccttctgttttgtcccttctaaaccytgttttcatcttcaacaggctctcacccgcctaattctcttgattctcttcatccatcctcccaaccttgaccccatggtcaagggctcacagcctccaagcatcttttatgctcctccaagcatcctgactgcctgtgttctgcaaatcctgaacgctggaagaaccattctcctgcttcttttccttcctgagcagagcaaggaagccttgctgattgtctccagaagatggttatttggaggcccaagttggagccctctctgatcctttcattttgagtgcccctggatgagagccctagtatgactaccc

SEQ ID NO: 466095 - DNA, 585 bp, Homo sapiens
aggagccatagaagtcaccttaagaacaccagatgctgggcctcataaggctgcacaactaagtccgacccctgtctgtgctggaaagaaacagatgcttatggcctcccttcccccattaggatggtctccaggaatgagaagaccccagctctgaagaagggccctgttgttagctgctcagccagcctaaggttggtcctggaatcccagtgacccccaaattcccttgccttttccatatccttctgttttgtcccttctaaaccttgttttcatcttcaacaggctctcacccgcctaattctcttgattctcttcatccatcctcccaaccttgaccccatggtcaagggctcacagcctccaagcatcttttatgctcctccaagcatcctgactgcctgtgttctgcaaatcctgaackctggaagaaccattctcctgcttcttttccttcctgagcagagcaaggaagccttgctgattgtctccagaagatggttatttggaggcccaagttggagccctctctgatcctttcattttgagtgcccctggatgagagccctagtatgactaccc

SEQ ID NO: 466096 - DNA, 608 bp, Homo sapiens
acccagctaagccaggcctggactcttgacctacagaaactgagataataaactatgcttttcttgtttgttttctgtttttgtagggacagggtctcactatgttacccaggctgatctcraacttctgggctcaagcaatcctcctacctcggcctcccaaagtgctgggattacagatgtgagccactgtgcccagctgtatgttgtttgaagttgctaaatttgtggccatttgttacttagcaataaaaaatgaatacaacatttgggctcagaaaatgtccccagatgtggtgtgttgacatgctaaaaggaagaagcagcctcagggtttctctttgaccttctgctgcctccctgtctctctgattctctttttttcctcaaagaactaggagagggctttctctggaagttcccttatctgactaagaaaacttcttccaaaataaatgtaattgtcttaaaactctcttcttagggctctcattaaataaccaggaaaggttaaccaccagagaagagaagagactgggagttgtcaccatgctcagacagacttttcatctatttttctgagggccatgctgagagattacctggga

SEQ ID NO: 466097 - DNA, 509 bp, Homo sapiens
tgacatgtctttcatagacaggaagggtctgcagaccaaggcaaagtccctcaaagggcatcacatgtgaaggaggaattcttgctstgtgtgtgctctggtgccaggggcagctgaaggacagtggaacccagagtccaggacactcagcctaatgaagccagggacctcaccctacaaaacaaacctgacaatatctctcagagtttccaatgatgatttttgagaaactgctcaaaaactggagctgcaggcagctgaaaggccatctcaggcatcacatataccgcagaacatctcattcatcatttcaatggaatttttatgtgccttctataaggcaagcattagaaatacagaggtgaaacagaccaaataagtctttctctccatggattttattttctagtaggtgaggctggaggagaaagtacagatgacaaacataaagtttaaaagacataattaaggcccccataaagaaatgaagaattagagtctaattaatt

SEQ ID NO: 466098 - DNA, 656 bp, Homo sapiens
gaacaactttttatcagagatattgtactttgtacaactggggaaggaaggtacatgtagaatcatttttcctacataacatgacaggattcgagtcccaagaaaaagcaaaagttcatggttctcttrtttcttttaacttggtcctgtttcatttcaagccacattaattcacatcatcaatgtatgtgaatgccctccaaatgcctagatctgtgctagatgctggggtgccaagatacaaagaaaagatcattcagactggagaatgaaaagcctcagaaggttatagcaaactactagacctgtgtctgtggcttatgaggatatattagcatttaacctgtcttctcaagaaagcacggtaaagctaaagcataatagtgcgtttatattacggtttaaggagaccggtgtcctgatgaccactcaggcttctctgtccatgaaatccagcaggtttttctctttgcccaagcctccctttttctctctaagttttttttctcatatcatttcttttcaatctattaatttaaaatatatttaaagtgcattggtttattacacacagcatatattttttcacatagaagtcgtaatgattaagtgctttattttaggagttgaggcaggagaggaaaacattttccttt

SEQ ID NO: 466099 - DNA, 522 bp, Homo sapiens
ctggctaagttttgttaaattttaatcattaaaastcatctttagccaagtgcagtggctcatacccctaatccaagcactttgggaggctgagatggaaggattgcttgagaccaggaattcaagaccagcctgggcaacagagtgagaccccatctctacaaaaaattaatgaaaaaaaaagccaagcatggtggtgcacacctgtagtcctcgttactcaagagaatgagatgggaggatcactttagccgaggagttcgaggctgcagtgagctgtgattgcaccactgcactccaaactaggtgacagagcaagactccgtcacttaaataaacaaacaaaaccttatctttaaaactaaaaagttattttaaaataggattttgttttgtatcctatgcaaggtttttacttttgtaacatgtttttttttttttgtttagtgtctaaatatgaataaccaggatgctgctgtttactcacctttttagatctctagtttctaggaatttacaacc

SEQ ID NO: 466100 - DNA, 522 bp, Homo sapiens
ctggctaagttttgttaaattttaatcattaaaactcatctttagccaagtgcartggctcatacccctaatccaagcactttgggaggctgagatggaaggattgcttgagaccaggaattcaagaccagcctgggcaacagagtgagaccccatctctacaaaaaattaatgaaaaaaaaagccaagcatggtggtgcacacctgtagtcctcgttactcaagagaatgagatgggaggatcactttagccgaggagttcgaggctgcagtgagctgtgattgcaccactgcactccaaactaggtgacagagcaagactccgtcacttaaataaacaaacaaaaccttatctttaaaactaaaaagttattttaaaataggattttgttttgtatcctatgcaaggtttttacttttgtaacatgtttttttttttttgtttagtgtctaaatatgaataaccaggatgctgctgtttactcacctttttagatctctagtttctaggaatttacaacc

SEQ ID NO: 466101 - DNA, 546 bp, Homo sapiens
caaaagcctttttattttattttatttttttgagacagagttccactcttgttacccaggctggagtgcaatggcatgatctcggctcactgcaacctctgtctcccaggttcaagcggttctcctgcctcagcctcccaagtagctgggattacaggtatgtgccaccacacccagctaatttttgtatttttagtagagacagggtttctccatgttggccaggctggtctcgaactcctgacctcaggtaatcttcccacatctgcctcccaaagtgcrgggattacaggcatgagttaccgcatctggcctaaagtcttaacttgttccagcatcaactctaaagtctaaaattgaaagtgtcatctaaatatcatctatatcagacaaaggtgagactcaaggtatgattcatcttgaagcaaactgctcctcagttgtgtacctgtgaaaccaaacaagttatgcacttccaaaatacaatggtgggacaggcacagtatagacatttccattccaaaaaagggaaatggaaaagacgaa

SEQ ID NO: 466102 - DNA, 482 bp, Homo sapiens
cagttaatgcccgggccaaggagacaactgtcgccgccttggtgacggatgccccctccctgggcccccgccctagtccccatggggggagcagcgcgccagaagggagtaggcgttgttgggaccctctgggggtctggaatgccagcgacacttctcttcccagccgcaggggccttcctgggacaggccaggtagmccccacccccccgaccccgttcgtcagggcaacaggttgggtgcaagctgtcaagagatggccttctccctgggtcctcaaaacgcgccaagaacgtggctctgccacttggtggcggaaggcgggaggcacagggcaggaaggtggaggaggggctgcattcgtgacgacgggggagcagagagggaaggacttagggactccccagagggcagacagacctggccagcttggcaaatcataaatccctctccctggaccctcggcctaaacctacccccag

SEQ ID NO: 466103 - DNA, 563 bp, Homo sapiens
accacttcctgacttatatcacaatagatctgtttttcctatagtctgttattagacttcagacaakatcaggtgcattcagggtagtacggctgtagacctgttgtcagacttcaaataaatggaatcacacaggatgtactcatttgcatatggcttgtttcacttaaaatgttttcaagatgtatccatgttgcatgtatctgagttcattctttttgatcgctggctagtactgtattgtattgtatgaatacaccaaaatgtgtttcatctacctttttcttagtaacaattatattttttctttttatatacttaagtacaaaagcagtaagtacttaaagttatttaaagtatgtaatacataatgtaaaaaattatagaaaataaggaaaaaagaaaataaatgtccataattccactctctagacataaccattactaataacttgtggatcccctttgaacttttgtttatataagttatcttcttatattatatatttatcataggtagtataaaaattcttattttaggttcaagttttaccacttagacc

SEQ ID NO: 466104 - DNA, 563 bp, Homo sapiens
accacttcctgacttatatcacaatagatctgtttttcctatagtctgttattagacttcagacaagatcaggtgcattcagggtagtacggctgtagacctgttgtcagacttcaaataaatggaatcacacaggatgtactcatttgcatatggcttgtttcacttaaaatgttttcaagatgtatccaygttgcatgtatctgagttcattctttttgatcgctggctagtactgtattgtattgtatgaatacaccaaaatgtgtttcatctacctttttcttagtaacaattatattttttctttttatatacttaagtacaaaagcagtaagtacttaaagttatttaaagtatgtaatacataatgtaaaaaattatagaaaataaggaaaaaagaaaataaatgtccataattccactctctagacataaccattactaataacttgtggatcccctttgaacttttgtttatataagttatcttcttatattatatatttatcataggtagtataaaaattcttattttaggttcaagttttaccacttagacc

SEQ ID NO: 466105 - DNA, 563 bp, Homo sapiens
accacttcctgacttatatcacaatagatctgtttttcctatagtctgttattagacttcagacaagatcaggtgcattcagggtagtacggctgtagacctgttgtcagacttcaaataaatggaatcacacaggatgtactcatttgcatatggcttgtttcacttaaaatgttttcaagatgtatccatgttgcatgtatctgagttcattctttttgatcgctggctagtactgtattgtattgtatgaatacaccaaaatgtgtttcatctacctttttcttagtaacaattatattttttctttttatatayttaagtacaaaagcagtaagtacttaaagttatttaaagtatgtaatacataatgtaaaaaattatagaaaataaggaaaaaagaaaataaatgtccataattccactctctagacataaccattactaataacttgtggatcccctttgaacttttgtttatataagttatcttcttatattatatatttatcataggtagtataaaaattcttattttaggttcaagttttaccacttagacc

SEQ ID NO: 466106 - DNA, 500 bp, Homo sapiens
gctgctcggggaggtggcagggcggaggaactgcttgggaagaaactccaagaagattggaatgcttccaaagcaagaatctttctcagtgaaatctcattatacaaagagaaccttatgcaacctgacaaaccactgaggtcatggtgactcagtgatcagcagatggtacttcaacagcaatcccctgtcaaacctcagaacttgaggctgaaacattgcttccacccaccatcagtgaagatgtaactagcatgttacaagagtgaataatctggacttcagagattaagtcaccaatagtgatctcacaagyactcaccggaactcctataatgtctccactttgtccatgccatttagcaatctcatctcctaaatggactgtgcctatgattcttaaggagaaagtgaatcattggtagatatcctgcacaagcagctggactttccagtaatagctttcttggggctattaggaaaattaaacaagaaatgag

SEQ ID NO: 466107 - DNA, 557 bp, Homo sapiens
cagtgaaatctcattatacaaagagaaccttatgcaacctgacaaaccactgaggtcatggtgactcagtgatcagcagatggtacttcaacagcaatcccctgtcaaacctcagaacttgaggctgaaacattgcttccacccaccatcagtgaagatgtaactagcatgttacaagagtgaataatctggacttcagagattaagtcaccaatagtgatctcacaagtactcaccggaactcctataatgtctccactttgtccatgccatttagcaatctcatctcctaaatggactgtgcctatgattcttaaggagaaagtgaatcattggtagatatcctgcacaagcagctggactttccagtaatagctttcttggggctattaggaaaattaaacaagaaatgaggctttctgggtctgcctgtatgtcttctgcataagamaaagaagagacatcgaatcaaccaataagaagagcccaaataagcatcctcaaatcttttgggatttggcacttggggacatgagtagttgtctgggatacgtcat

SEQ ID NO: 466108 - DNA, 578 bp, Homo sapiens
ttgcataatccattttgagttagtttttgagttagtattgaggttcaggtgaatttttttcctttggggataaaaaaaaaattgtgtaaaaaaaagttgtttctacacaatttgttgacaagagaatgccttctccactgaatcatatttgcacctttgtcaatccattgggtggttgagactggtgagaggactgtcctggtgtttggacagagagacagggcatgaagtagggtggttcttatgggaaaaattaaggaagacacatttttscatgaggaataggaaatccccaagcacaattgggggtaccctctaccagcatgttgtagcacactcatctctgctctacctgtcctgctgcaaaagcttgggtgtgcatagacactgaggttgagtggtgtctttgggcattttgagcattgacaccaaagttccagcatcaaatcttagaatatcaagcagccagatggatcacctgaggtcaggagttcacgaccagcctgactaacatggtgaaaccccatatctactaaatacaaaaaaattagccaggcatgattgtgcatgcctgtaat

SEQ ID NO: 466109 - DNA, 578 bp, Homo sapiens
ttgcataatccattttgagttagtttttgagttagtattgaggttcaggtgaatttttttcctttggggataaaaaaaaaattgtgtaaaaaaaagttgtttctacacaatttgttgacaagagaatgccttctccactgaatcatatttgcacctttgtcaatccattgggtggttgagactggtgagaggactgtcctggtgtttggacagagagacagggcatgaagtagggtggttcttatgggaaaaattaaggaagacacatttttccatgaggaataggaaatccccaagcacaattgggggtaccytctaccagcatgttgtagcacactcatctctgctctacctgtcctgctgcaaaagcttgggtgtgcatagacactgaggttgagtggtgtctttgggcattttgagcattgacaccaaagttccagcatcaaatcttagaatatcaagcagccagatggatcacctgaggtcaggagttcacgaccagcctgactaacatggtgaaaccccatatctactaaatacaaaaaaattagccaggcatgattgtgcatgcctgtaat

SEQ ID NO: 466110 - DNA, 617 bp, Homo sapiens
tatggtacaagggcagcaagtgttgaactgaaatacttagattatgcaactgactcaagggttcaacacaaactgtcctgctaaaaagttatgatcagggcaaagtcagcatttagggcaataaaatagttaatgatttacctggttatgtttccaagaagcctctttctgctgttcactctcgtgtgctgcagcctctacaaattgcacacattgtttggcatcagccagttggcgctctttctgtcgtaccaccctctggagcttctgtatttcaagttggctgcagaataaagcactctgaagatcaagcagagctacctgttgctgagctggagaagtaccctctgagctctgaaaagagagtagaaatcacaatcacaaggagggcaagcactgagctcccacaaagactraaaataaaatcaagactgcaaccaaaatggcacatccccaactgaagtctctcatgtcctatgtgaccctcacatacgtgaagttgtccaagctggctttggtgcagcatttctcgaagctttgccattgtgtcattttgaccttcaattacctggtacaactcctcagtctgaaaatgagagagggaatatcaaatatgt

SEQ ID NO: 466111 - DNA, 617 bp, Homo sapiens
tatggtacaagggcagcaagtgttgaactgaaatacttagattatgcaactgactcaagggttcaacacaaactgtcctgctaaaaagttatgatcagggcaaagtcagcatttagggcaataaaatagttaatgatttacctggttatgtttccaagaagcctctttctgctgttcactctcgtgtgctgcagcctctacaaattgcacacattgtttggcatcagccagttggcgctctttctgtcgtaccaccctctggagcttctgtatttcaagttggctgcagaataaagcactctgaagatcaagcagagctacctgttgctgagctggagaagtaccctctgagctctgaaaagagagtagaaatcacaatcacaaggagggcaagcactgagctcccacaaagactgaaaataaaatcaagactgcaaccaaaatggcacatccccaactgaagtctctcatgtcctaygtgaccctcacatacgtgaagttgtccaagctggctttggtgcagcatttctcgaagctttgccattgtgtcattttgaccttcaattacctggtacaactcctcagtctgaaaatgagagagggaatatcaaatatgt

SEQ ID NO: 466112 - DNA, 556 bp, Homo sapiens
ctgtgtttaagaagcatatagtctaatgcttgaactstaactttaaaagattaaggttttccttctttgtcattttgtaagaatccccagtctgaaaatatgaaagaatggttcttaaacttggtgtgcctgagaagcagctgtggagattataggagctacctcctggtctccaatcccaggagatttagttggtgtgagccctagaatctgcatttttttaatataagcaccccaggtgattccattacatgtgggcttcagatcacagtttaaaaaaacagtgttctataacattgaatcaaaactaaaactacatttaagaaccttgaatcaaaaagtatgtcattccataaacattgatataaaaattttgaaatattccttgggaaaagttcttagctacatgcttttgattcccaagattaaaataagctatcacttcacaattatgtactagaaacatttaaaaaataaaaacaggtagaaggtggagtaagatggtagaatagaattctccggcaatggtctctctgaaggaacatcaaattaaaca

SEQ ID NO: 466113 - DNA, 556 bp, Homo sapiens
ctgtgtttaagaagcatatagtctaatgcttgaactgtaactttaaaagattaaggttttccttctttgtcattttgtaagaatccccagtctgaaaatatgaaagaatggttcttaaacttggtgtgcctgagaagcagctgtggagattataggagctacctcctggtctccaatcccaggagatttagttggtgtgagccctagaatctgcatttttttaatataagcaccccaggtgattccattacatgtgggcttcagatcacagtttaaaaaaacagtgttctataacattgaatcaaaactaaaactacatttaagaaccttgaatcaaaaagtatgtcattccataaacattgatataaaaattttraaatattccttgggaaaagttcttagctacatgcttttgattcccaagattaaaataagctatcacttcacaattatgtactagaaacatttaaaaaataaaaacaggtagaaggtggagtaagatggtagaatagaattctccggcaatggtctctctgaaggaacatcaaattaaaca

SEQ ID NO: 466114 - DNA, 662 bp, Homo sapiens
ttcattgtctggccctgaactagaaaagctatgatgggagggatgtggtcccttagtaaacagcaatgagctctggcccatgtgcaatttccctttctatctaaattcaaagaacagaagatctttgccttaaaccttgcaatgccaaggtctgctcctttgtgactatggtaaatttatcccactcttattttagttatgtgaagtggatcaggccctttggaagatgttggcattagatgctggtaaaagattaggcctttaattttatggtagtcaatggttcttgtctgtctcctattattaacaatagggttgacaattatagcagtttgagatctataactcactactgtgaggactagtaagtgccaagaaaactgctgttaacacaaaaagtctaaaaactggccttagcctaaaaaaaagtctcatattgtgcaacactaggcctggaagcggttctcttttctgatactggaaagcctttgtcctaattctgagtcamaagtgacttaatttaaaattatattatcatttccacatgattttagtacctgagtgtctagagagtaacactgattctaccaaatcaggtattacttatttcatgggctacactatcattgtaggagtgactgttttatgtacttgatacttca

SEQ ID NO: 466115 - DNA, 390 bp, Homo sapiens
gcaactgtggagacccagaacccatctttttcccctccttctccgatgggaggggacagtaacaggtgtcttcaggaagaaatgctccacctgagggctgagatccaccagcacttagaagagaagaggaaagctgaggaggaactgaaggagctaaaggctcaaattgaggaagcaggattctcctcagtgtcccacatcaggtagracattcttcccagggaaggggagcttgcgggtcatgaggcaccacagccaaggggtgcctatcccaggctccatgcattaatatttctacaaattctttagataaaagtaagtaatattggctaatggtaatcactttctgttattcaaataatcctggtcttaattcagtataacagtgcc

SEQ ID NO: 466116 - DNA, 645 bp, Homo sapiens
ctgcctcccaatcccacttgcttggtgtcagccattatttatcacatggaggaagggggaaaggcacccaggaagtcccaagtcctgttctcacaatcatctggcctccctgggcaaagggaaaagagggaaggcaaaaagaatatagcactacggtttgcggaaatttccccttggtacaggaaactctggtaaactgagagagtatgttttccatgagggaggcctcaagggctcttctctggccctaagcccaarctggattttgactcattttctgaggtgcaaatgaaatgataaaagttgatcaaaggagagggcacagagaaagaggatgactcctctctcgcaggtccaccttccttggtgttgcttgagggatcagaaaaaatgccttaacataggtgtgtgggaactatggctgctaagtatgaactcagttacctccagttataagctagtgtgaggttccatggtgtaatggtgagcactttggactctgaatacagtgatcagagttcaagtctcactgggacctttctgtataattccagtgaggttcttctctattgctccataagcagaatgggggaaattgcccaatcgtggtcacagaccctccatgccactggctgtgtgcaattg

SEQ ID NO: 466117 - DNA, 645 bp, Homo sapiens
ctgcctcccaatcccacttgcttggtgtcagccattatttatcacatggaggaagggggaaaggcacccaggaagtcccaagtcctgttctcacaatcatctggcctccctgggcaaagggaaaagagggaaggcaaaaagaatatagcactacggtttgcggaaatttccccttggtacaggaaactctggtaaactgagagagtatgttttccatgagggaggcctcaagggctcttctctggccctaagcccaagctggattttgmctcattttctgaggtgcaaatgaaatgataaaagttgatcaaaggagagggcacagagaaagaggatgactcctctctcgcaggtccaccttccttggtgttgcttgagggatcagaaaaaatgccttaacataggtgtgtgggaactatggctgctaagtatgaactcagttacctccagttataagctagtgtgaggttccatggtgtaatggtgagcactttggactctgaatacagtgatcagagttcaagtctcactgggacctttctgtataattccagtgaggttcttctctattgctccataagcagaatgggggaaattgcccaatcgtggtcacagaccctccatgccactggctgtgtgcaattg

SEQ ID NO: 466118 - DNA, 645 bp, Homo sapiens
ctgcctcccaatcccacttgcttggtgtcagccattatttatcacatggaggaagggggaaaggcacccaggaagtcccaagtcctgttctcacaatcatctggcctccctgggcaaagggaaaagagggaaggcaaaaagaatatagcactacggtttgcggaaatttccccttggtacaggaaactctggtaaactgagagagtatgttttccatgagggaggcctcaagggctcttctctggccctaagcccaagctggattttgactcattttctgaggtgcaaatgaaatgataaaagttgatcaaaggagagggcacagagaaagaggatgactcctctctcrcaggtccaccttccttggtgttgcttgagggatcagaaaaaatgccttaacataggtgtgtgggaactatggctgctaagtatgaactcagttacctccagttataagctagtgtgaggttccatggtgtaatggtgagcactttggactctgaatacagtgatcagagttcaagtctcactgggacctttctgtataattccagtgaggttcttctctattgctccataagcagaatgggggaaattgcccaatcgtggtcacagaccctccatgccactggctgtgtgcaattg

SEQ ID NO: 466119 - DNA, 564 bp, Homo sapiens
ttgtgaaacattctggcatgttccacttgatacaacttatttaacaatactgtcacaaaggtagatgtgatctagaaggcrttttttagaaagcctgctactggtcaacgtcattccagaaatttagagcttgataagtgacattgttgatggccacttgaaatttttggaaagtagttctatggtatgtatactgtctatcacaataagaacctaagcagaaaacaggagaaaagtttttaaatttacacaaaattatgagaagcagcatagatgagaaacagcatagatgaaagtgtcatgaaaggtaaaaagtcagtgcattttcattttgtataaaatgttaagcactgtatgcttaacactgtgtacttcttttcttttgctttttctttcagtggagcctcgcagctaaatttgggctttacagtatttctgtgactagacataggtgttacaaattaaacatggtgttttcatattagggtctaaaattagttgggccaggatggatgggaaataaactcgtccccccagcccgccaccaaatatgaccaatattgt

SEQ ID NO: 466120 - DNA, 529 bp, Homo sapiens
tatttgttttttgtatcatgatgaaaattattttctataaaatactgaaatctgcagaaaattacttaaaaaaaaaaccctggagtctctggtgtaaatatttctggatygtagtcaactacttacctctgcttccttctcacacctcactaaaatggctgggacgaaagaccatacaggacataaaccacttaggaaatgagaacagaaaagaaggtggtaacagcaaaatttttgaatctggtagtcatatgatttagcaaaccggagaaggctgaaacttaagccaggaagtgatggggtagcatgaaagcaattcaggagaaagccaatgtgtgaccacagaaccacagaaatgctcaagaattggaataacaacatttaatgtgggaggaggattggctatagatcccaggtgccctccgtactccacatatttgaaggattgcctcttctaaactgtaagaagaatgaaggcttgctctcaagatgaactggagagactcaggacttgagaattcccagtaca

SEQ ID NO: 466121 - DNA, 416 bp, Homo sapiens
  misc_feature (1)...(416): n = A,T,C or G
atatatcctaccaccttttttctatggtttgtgaagccaaatgttttttgattcaaatagacattatactacttcctgtgtgacatcagtgaatctattcttcttcagtaggaggccagaattatttctgctaaaccactctagtcattgtgtctgaactacaatagcgtgagaaatttgttattttttattaaatttttggttttgcgtatgctgcccttcttcctagattgcatcatcatctgattgtcagattcttatacattntttaaaccatatttcctccccatgtgttccatgaagttaccytagatcatttgtaaaagttgtccactccctcccattgtgtgattactacaacttgtctatactaatattcttcattcagacatcttatgaatttcgttcagtaagga

SEQ ID NO: 466122 - DNA, 551 bp, Homo sapiens
ggcactaattcaaaatagaatcttgctctgtcgcccgggctggagtgcagtagtgcaatctcggctcactgmagcctctgcctcctgggttcaagcgaatctcctgcctcagcctcctgagaatctgggactacaggcgtgtgccaccaagcccagataagttttgtatttttagtagagatgggatttcaccatgttggccaggctggtctggaactcctgacctcaagtgatccacttgccttggtctcccaaagtgttgggattacaggagtgagccatcacgcccggctggcatatgaccttcttcatagtaagtttgcccgctaacttcattggttgatctaggacaagtggggtttgttgttttgcaagctctaatggtcattattttcaatatacaaaaccagcataacatctatgacagatattcctattaattgagacattttatactcaaattcagaaccactgtttttctggctgcttttgactagaaggtgaacattccagatgtagtgttgatgtttgtcccctccaaatgtcacgtt

SEQ ID NO: 466123 - DNA, 551 bp, Homo sapiens
ggcactaattcaaaatagaatcttgctctgtcgcccgggctggagtgcagtagtgcaatctcggctcactgaagcctctgcctcctgggttcaagcgaatctcctgcctcagcctcctgagaatctgggactacaggcgtgtgccaccaagcccagataagttttgtatttttagtagagatgggatttcaccatgttggccaggctggtctggaactcctgacctcaagtgatccacttgccttggtctcccaaagtgttgggattacaggmgtgagccatcacgcccggctggcatatgaccttcttcatagtaagtttgcccgctaacttcattggttgatctaggacaagtggggtttgttgttttgcaagctctaatggtcattattttcaatatacaaaaccagcataacatctatgacagatattcctattaattgagacattttatactcaaattcagaaccactgtttttctggctgcttttgactagaaggtgaacattccagatgtagtgttgatgtttgtcccctccaaatgtcacgtt

SEQ ID NO: 466124 - DNA, 551 bp, Homo sapiens
ggcactaattcaaaatagaatcttgctctgtcgcccgggctggagtgcagtagtgcaatctcggctcactgaagcctctgcctcctgggttcaagcgaatctcctgcctcagcctcctgagaatctgggactacaggcgtgtgccaccaagcccagataagttttgtatttttagtagagatgggatttcaccatgttggccaggctggtctggaactcctgacctcaagtgatccacttgccttggtctcccaaagtgttgggattacaggagtgagccatcacgcccggctggcatatgaccttyttcatagtaagtttgcccgctaacttcattggttgatctaggacaagtggggtttgttgttttgcaagctctaatggtcattattttcaatatacaaaaccagcataacatctatgacagatattcctattaattgagacattttatactcaaattcagaaccactgtttttctggctgcttttgactagaaggtgaacattccagatgtagtgttgatgtttgtcccctccaaatgtcacgtt

SEQ ID NO: 466125 - DNA, 637 bp, Homo sapiens
  misc_feature (1)...(637): n = A,T,C or G
gattggcttaatgtttaaattttttcgtacaaacnggatatcacaatgttgcccaagctggtcttgaactcctggccttcaggaattctcctactttgggctcccaaagtgtttggatcacagatgtgagccactgcgcccagccttcgtccattttgtcatcaagacactcatcctggctgcttgtcctcattgtgtccccagaagaaacaaagtgaaggataacagtaaaagcaccaaagaaacccacctagggcagccccaagagcaaaggtggagagcaccagtgagaaggcatgactgttccctcttccaggctgttccagcaatgcttagccytgcctgactccgcaaattacctgcccccagaagccaagaaactgccctctgcttgaacagcaagttcccgatcccccactctgcatgaccatgccccccttgaatcttggattccctattatccttcccacttgttaccagaacaaatttggaccagggacatctaactcaaagctctcattcactctttctcctgcacctggagtctgggtcaggtttagacatttgatgctgtattttgttcttctggtttcacatgttggtatgatgcttgcctactgtttgcacatccttggac

SEQ ID NO: 466126 - DNA, 574 bp, Homo sapiens
  misc_feature (1)...(574): n = A,T,C or G
ttgatggaaggcttgcatgctttggatgacatcagaattaaaacattgcatgtaagtattagaacataaagcgaagcccctccttttagatgaggaaactgaaatccattgagaaaaagtcatttctgcaggtgattcaattagctactggcaaaaccaagataagaactctctcttgactcgcaatctagcactctttctacattacacaggaaattaaaaagtgtatttaggcagaattcattcattttttccaggtggtattatttgttcaaattatactttgctgttccttttaatagtaataagcaattagttgattagtatttaatctacattagggtggtgtgatagttaatattaggtgtnaacttgattggattgaggaatgccggatgactgatgaagtattgtttntgggcgtgtctgtgagggtgttttcagtaraaattgacatgtgagatagtggactgggagaggaagatgcactatacatgtgggtgggtattattaaattagctggaagggcagatataacaaaataggtggaggaagtatgtatttagattgataa

SEQ ID NO: 466127 - DNA, 566 bp, Homo sapiens
ttagtgtctgctatggtctcaatgtttgtgaccccccaaatccacatgatgaaacctaatggccatagttaactatgaagaggtggggcctttgggagatgattaggctcagccctcacgaatggtattagtgctcttgatgagtggagcttctttaccttgctactacgcgaagacacagctagaagatgmcatttatgaatcagagatcgagctctcaccagacattaaatctgctggtgccctgatcttggacttctcagccccaagaactgtaagaaataaatttatattgttgtaagctactcagcttatgatattttgttataacagctcaaataagccaagacaataaccaaaacatgtaaagaactcatacaactcagtagccaaagaaaaaaaaatgacccaattaaaaaatgccaaagaacctgaatggacattttttacagaaaacatagaaatgggcatacaaatacataaaaagatgcttgacatcacgactttctgtgaaatacgaatcaaagacataataaaataccactttgcatctcttggagtggtta

SEQ ID NO: 466128 - DNA, 649 bp, Homo sapiens
ttttctagatacacgaatgcctagagatataataaatgccaaattatagtttcctttatcaataatttactgtatcattttttgctatataactccatgctcataaacctaagggcatacatgataaaatctatatgaggccagattaaaaaaaaaaacaactgtgaaactttcccgattttcgtcaaggctrtagtgcttcatgcatgcaactatggtctgatctccccccacctagtttggcactgtaatttatcaggtttcatgactctttgaaagctgagtgccatatctgtagctgtagatttttattggatgtgcatttgtactaacttcatctctggcttcaatatggccattttaaggccatattattgtttttctttctcatccattttttttctaaaaggaaatatcttcattgctttattcagttacaaagttaatttgtgctgcaagaaacaacattcaaatgatattaaaaattaaagaagaacctgaaatatcccaataatctcacactgacctctactccctgagaatgttagtgttctcatcaacttttaattagattttcatgtctgtcttaaagcatgtctttctaagctgccataatgtcttctgcaatatggtagtgtactactgaata

SEQ ID NO: 466129 - DNA, 538 bp, Homo sapiens
aaagtacattttcatgaaatattgctacacgaggtggatataataattgatgaaggaaattatagttttctagatacacgaatgcctagagatataataaatgccaaattatagtttcctttatcaataatttactgtatcattttttgctatataactccatgctcataaacctaagggcatacatgataaaatctatatgaggccagattaaaaaaaaaaacaactgtgaaactttcccgattttcgtcaaggctgtagtgcttcatgcatgcaactatggtctgatctccccccacctagtttrgcactgtaatttatcaggtttcatgactctttgaaagctgagtgccatatctgtagctgtagatttttattggatgtgcatttgtactaacttcatctctggcttcaatatggccattttaaggccatattattgtttttctttctcatccattttttttctaaaaggaaatatcttcattgctttattcagttacaaagttaatttgtgctgcaagaaacaacattcaaa

SEQ ID NO: 466130 - DNA, 539 bp, Homo sapiens
agctaaactttatgcttataatttaagaacctagaaatacagtagctaaagaaaaccctgtaggttcatttaaaagaattagaacagacattacattggggcaaggagtgagtgaaactgctggtttccagagtttactttcttgaaatatggttttgagtcatttctgcgagatataaacatactactttatgtttcctatcatttttttrttatgcacataatttaacagtttgtaatagttgaagccacatgtctctgtggacttgtttattattgaaatggcttcactcaaggaggagacttttaactgtataattcaggtatgtatattttctttgaacaaagtgtgtgacattcaacttgtcaaaaatgaacattttgcttgactgaacagctttgctctgtgttttccttgtctgctgaggcaaagaaaggctgacaagagggcacatccagtgaaagatcaagaggggaatgaagcaggatttgagtcaactatcagaaaattccattcttgctgaacattttataataaa

SEQ ID NO: 466131 - DNA, 570 bp, Homo sapiens
ggcctgtttctgccttaactgatgatattatcttgtgaaattccttctcctggctcatcctgcctcaaaagctcccccactgaacaccttgtgactcctggccctgcccgacaaagaacaaccccctttgactaatcttcctttacccgcccaaatcctataaaacggccccacccctatctcccttcrctgactgttttcagactcagcccgcctgcacccaggtgaaataaacagccttgttgctcacacaaagcctgtttggtggtctcttcacacagacctgactgaaaactagcaaatatgtcatacagaaaataaaaactaaatgaagtccttcagactgaaatggaaggacactggacagtaactcaaatctacataaagaaatagagtgtactggtaaagataagtacatagtaaatatgaaagatggtattttatggttgtaagtccttttccttctatctgatttaaaagacaactgcataaaacaataattaaaatctatgtgatgggcatataatatataagatgtaatttgcatggcaataacagcacaaaagagag

SEQ ID NO: 466132 - DNA, 570 bp, Homo sapiens
ggcctgtttctgccttaactgatgatattatcttgtgaaattccttctcctggctcatcctgcctcaaaagctcccccactgaacaccttgtgactcctggccctgcccgacaaagaacaaccccctttgactaatcttcctttacccgcccaaatcctataaaacggccccacccctatctcccttcgctgactgttttcagactcagcccgcctgcacccaggtgaaataaacagccttgttgctcacacaaagcctgtttggtggtctcttcacacagacstgactgaaaactagcaaatatgtcatacagaaaataaaaactaaatgaagtccttcagactgaaatggaaggacactggacagtaactcaaatctacataaagaaatagagtgtactggtaaagataagtacatagtaaatatgaaagatggtattttatggttgtaagtccttttccttctatctgatttaaaagacaactgcataaaacaataattaaaatctatgtgatgggcatataatatataagatgtaatttgcatggcaataacagcacaaaagagag

SEQ ID NO: 466133 - DNA, 579 bp, Homo sapiens
cctgtcttcggtctttgccagaggctacacttcccagcctgcagatggccaccttgcaggctgtaaccgtttataagaaayaaagtgtcctttccaaatttatatatttgtgaagaaaaacagtgatctcaaccaaatttcccttgccagtagagagcaataatttgaataatataaaacaaagtgacagaaattcaactctaaccagcttaaacaaaggcaaattttcttagtttaatgagctaagaagtccaggagagactggactttgagcactgctgtatttgggtgccagacaatgtcatcggggacctgtctcctccctctctttagctcagctctcctctggatttacctccattctcagaccagctctccccaagttaggcaaagacagcgaccagcacttcctgccagctttgcaccaccaccaggaggaaagctccaatgtcttattgtttctgcaaaaggtcgggagctgatgctcatttcctttgttggtcaacatggccatgctcacccctaaaccaatcagagatcagtgccctcattggtcgggtttgggtctagactcctaga

SEQ ID NO: 466134 - DNA, 584 bp, Homo sapiens
tggctgggacttcctaacaggcctgaccaagttctgtgacaagaacaatgacacccacaaataaggctcccccaccttgtcctggtgagtcagaagcaccatgggggaaggctggtccaggcttcagaatggaactcaggccaggtttctcccgcagcagacaggcctcttctctgggtggtttgcatcattgcagttcattgattgggggtggggagggggcatgatgcttttcccaaaggtgtactagtttcatgtccaaatttccaaacttactatctcataccagcttggcacgttccccttaagatgattgggttttgtaaatttccacatcaaaggcagagacagatttttatttctgcaggtgcaagtgatgcattaaataataatcattgcagtgaatcttagactgaagcataagaatcaatggggagaagaggtggtattgygccctggtggaaagcttgcagtctgaagctaggctgcctgcatttcattctcagctctacacttaatagttctatgcctctgggaaagtttcttaatctatcagtatctcagtttactcatctgtaaaatgg

SEQ ID NO: 466135 - DNA, 574 bp, Homo sapiens
ctttcatcaggacacaaagaaagaaatgagcccccaaaatatctctcagaagtgacatgggtttatcatttccattatccttgacacttttcaggggttaaatgtctctggctaggcgcatgttattatttgagtattactagccctttaagagcctcgacacttctggaaagcagcccgtggagctgcttcagcaccgagtgggtctgagctacaagagggtgaccgctaatcctaattctaaccccaacctgaatttatgaggtcctgctggtacgcagarggaggactggagggaccagtcaggttggccagctggcccagtggtatagggagccgttggattggggtttgtcacataaactgggaccctgcccaaagccgagacgtcgtaagattcccctgttttgcacaaccctgtggtagtagccacatccttattgtgtaaactcaggtttaaccacagaacaaccagcttatgccttgttagatgaggaggagcttaacccactgaagagtactttcttttaataaggagagacaacttcaaaaaaaattgttttagggcccccaa

SEQ ID NO: 466136 - DNA, 540 bp, Homo sapiens
tccctcaggagcaggttgttcaattttcatgtagttgtatggttttgagtgaatttctttttttttcttttttttttttttttgagatggagttttgctcttgttgyccaggctggagtgcattggcgcaatctcggctcaccgcaacctcctcctcccgggttcaagcaattctcctgcctcagcctctccaagtagctggaattataggcatgtgccaccaaacctagctaattttgtatttttagtagagacgggtttctctatgttggacaggctgatcttgaactcctgacctcaggtgatccgcccgccttggacctcaggtgacctgcctgccttggactcccaaagtgctgggattacagatgtgagccaccacacctggcctgtgaatttcttaatcttgagttctaatttgattgtgctgtcatctgagagactgttatgatttcagtgcttttgcatttgctgaggagtattttacttctgattacgtgatcaattttagaataagtgccatgtggcgagaaggaggat

SEQ ID NO: 466137 - DNA, 540 bp, Homo sapiens
tccctcaggagcaggttgttcaattttcatgtagttgtatggttttgagtgaatttctttttttttcttttttttttttttttgagatggagttttgctcttgttgtccaggctggagtgcattggcgcaatctcggctcaccgcaacctcctcctcccgggttcaagcaattctcctgcctcagcctctccaagtagctggaattataggcatgtgccaccaaacctagctaattttgtatttttagtagagacgggtttctcyatgttggacaggctgatcttgaactcctgacctcaggtgatccgcccgccttggacctcaggtgacctgcctgccttggactcccaaagtgctgggattacagatgtgagccaccacacctggcctgtgaatttcttaatcttgagttctaatttgattgtgctgtcatctgagagactgttatgatttcagtgcttttgcatttgctgaggagtattttacttctgattacgtgatcaattttagaataagtgccatgtggcgagaaggaggat

SEQ ID NO: 466138 - DNA, 602 bp, Homo sapiens
caagttttctgaatgaactgtggggttaattccaccccctccaaacgtttgccacttgtacacttctctccttccatcttctttgcagagcagccttatgcagaaaacaagctcaaaaatacagatttttctttggacaggatctacacccaactcccagtgaaacagaattctaggaggtgagagccaaactgggagaactgaccataaaaacacttgatccatccctctttttaaatggaataaccaagactttgaagaggtaagtggcttgcctgtgtctcagagaaataaacaccaaattcagaacttgaactcaggtcatttatctttttctacaactataattcatgccaaatacaaatcttatggtcagagaagcccttgatgtgagctctggttcatcactttgcacaatgcttggaacaagtagattcctagcaaaagttgattaagcaaatatacgtgaatgagttcccagcttccactctacccctgcttacctcccgtaccagccctttctctcactgcatgtttccttcctgggctaaactacccagyaatgctaatgcaactcttacctgagcagcagcaacagggac

SEQ ID NO: 466139 - DNA, 638 bp, Homo sapiens
tccctagtaaacataatcaagcatttatgattttgggtggcataacgatttccagatttctctatcagggattttgtacactgttgtctaacatgttataaacttctcagggtgttcttgttggggtcatttgagctgtcagctaaattattccttttgtttgcaaagatttcaggaaaacacatgttcttttatggcaagattgcagtggtgattaccagctggcatgggttttgtgtattttatttagtgatttcttacagtcacctgatgataragggaaactggaatagctcagatgcaaggatgatggaacacagattacaaaaagacatttttttctgagtgttactaatgttttcaatttattcattaataaaaagtgcacagtataagccttttatcccaatccaagtactcagtgaaagattaacaataaacactggatggcacagacatgatttgtttggcatgatttaaacatatgaaaacagcaattaacatttaatataccacatgactacttttgcttttaacaaagtaatcatcatatgtggtaacaaatacatatgatttttcatttagaaatattataagaaaaccacacttaatattgcaacaacaaaaatttaacccat

SEQ ID NO: 466140 - DNA, 617 bp, Homo sapiens
gagtcatgcagctggaggctacaagattctgacccttcctaaactgctcctaagatcagtgcttgagatattttgcagactcggcacttgatggatcatctggcaccacccaattgaaaaactggstcaactgatcttgtagcccccacccaggaagtgactcagtgcaagaagacagctccgactccctacgatttcatctctgacaaatcagcactcctggctcactggctttcccccacccaccaagttatcgttaaaaattctgctccctgaatacttggggagactgatttgagtaataataaaactctggtctccaacacagctggctctgtgtaaattactctttctctattgcaattcctctgtcttgatgaatgctctgtctaggcagagggcaaggtgaaccccttgggcggtttgttctgtactggacaaaatgtatttagttgcattgccatgaacagagttgtttgcatcctgcatccagctctagacagaaaacatctacaccatcatcaggcctccccattaaccttcatttctacagagttataaaacagtccagcacttttgtagggtagaattgtaacacacatcattccattgaaaga

SEQ ID NO: 466141 - DNA, 594 bp, Homo sapiens
cagcctctcagcacccaacgatatttgaatctgttcattaaaattgtcaaaaagttttggctgcttgtcttgacctctcctgtccatccccaagatgcattatatatatatacttttgttttgaataaagttattcaagcacaggtgtagtgatctaggcctcccagaaatgtttattctgtgtaaaatgctgaaaaamtatgtctccaagtgctgagttcctttggcctgatttatagagccatgcagactatgtacatttagaagggcagtgcttcagatatttctcatttgtacacatgaatatctatttttctttaatttattcaagccataacttatatcatgttttttttttattatactttaagctctgggatacatgtgcagaaggtgcagggttgttacataggtatacatgtgacatggtggtttgctccacccatcaacccatcatctacattaggtatttctcctaatgctccctccccttgcctcccacccctcaacaggcccactgtgttgtgtttggttttctgtttctgtgttagtttgctgagaatgatgatttccagcttcatccatgtccctgca

SEQ ID NO: 466142 - DNA, 594 bp, Homo sapiens
cagcctctcagcacccaacgatatttgaatctgttcattaaaattgtcaaaaagttttggctgcttgtcttgacctctcctgtccatccccaagatgcattatatatatatacttttgttttgaataaagttattcaagcacaggtgtagtgatctaggcctcccagaaatgtttattctgtgtaaaatgctgaaaaaatatgtctccaagtgctgagttcctttggcctgatttatagagccatgcagactatgtacatttagaagggcagtgcttcagatatttctcatttgtacacatgaatatctatttttctttaatttattcaagccataacttatatcatgttttttttttattatactttaagctctgggatacatgtgcagaaggtgcagggttgttacataggtatacatgtgacatggtggtttgctccacccatcaaccyatcatctacattaggtatttctcctaatgctccctccccttgcctcccacccctcaacaggcccactgtgttgtgtttggttttctgtttctgtgttagtttgctgagaatgatgatttccagcttcatccatgtccctgca

SEQ ID NO: 466143 - DNA, 594 bp, Homo sapiens
cagcctctcagcacccaacgatatttgaatctgttcattaaaattgtcaaaaagttttggctgcttgtcttgacctctcctgtccatccccaagatgcattatatatatatacttttgttttgaataaagttattcaagcacaggtgtagtgatctaggcctcccagaaatgtttattctgtgtaaaatgctgaaaaaatatgtctccaagtgctgagttcctttggcctgatttatagagccatgcagactatgtacatttagaagggcagtgcttcagatatttctcatttgtacacatgaatatctatttttctttaatttattcaagccataacttatatcatgttttttttttattatactttaagctctgggatacatgtgcagaaggtgcagggttgttacataggtatacatgtgacatggtggtttgctccacccatcaacccatcatctacattaggtatttctcctaatgctccctccccttgcctcccacccctcaacaggcccactgtgttgtgtttggttttctgtttctgtgttagtttgctgagaatgatgrtttccagcttcatccatgtccctgca

SEQ ID NO: 466144 - DNA, 598 bp, Homo sapiens
ttaaacactgcattatataacattttaattttcttatttattttatttaaatctgaccgttcctgcaaagaacaataataagtatactgggtaagtataaaactaaagtacaccaaggtgattatccacttcaactccctctcccagcacacacaaaaaacatgttgtttacttttatataaataatggatgcatctctacatttttcttgtttctttgcatattcaattttgaaggtgatcaaatcatttcctatagaaaattaattgagcaacttgattagcatacacagaggtktctcaagctcagcactattgacattttggtcagagaattctttgttgtggaggcttattctgtataagatgtttaacagcatttctgttctctactctctagatgtcagtagtgactcctctctccagcagaaaaccaaatatatttcacaacattgacattatttgtgtctatgtgcatttacatatttttcttggataggaggatttttaatttgtagtaaaatacaaataacataaagtttatcattttaataatttctaaatataatggacaaaccttttattagattctttatgag

SEQ ID NO: 466145 - DNA, 549 bp, Homo sapiens
agctacttttgtgctagtgtcagagttgagtaggtgtgactgagaatgcaaagacttgaaaagcctaaaatatttatyatctgaacttttagggaaaaaaaatgtttgctgacccctagtctacaaaataagattggtgaatgttccctttataaggtacccggaaatacagaaggcctttatctgtttttgaatcccctcctggaaatagctggcactgtggacttcaaagctccggggtgtggtagtgttgacagatctgggtgtatgagcaagtcactcagcctcaccaaacagttccacatagtgagcaatcagtaaatatgacttttcttcttttctctacaaggaagctttatgttgaaaatattaatgtgtaaaccctgctgatgagggaaattaggtgcttaagatcttagagaaagatctttacctagactcaaataaaccattttcataaagtttagtgctaatgtaccagagtagttaaccagtcttcagacatttcctcaatgcttagcatcctgatgttgctccagctaaatttga

SEQ ID NO: 466146 - DNA, 549 bp, Homo sapiens
agctacttttgtgctagtgtcagagttgagtaggtgtgactgagaatgcaaagacttgaaaagcctaaaatatttatcatctgaacttttagggaaaaaaaatgttygctgacccctagtctacaaaataagattggtgaatgttccctttataaggtacccggaaatacagaaggcctttatctgtttttgaatcccctcctggaaatagctggcactgtggacttcaaagctccggggtgtggtagtgttgacagatctgggtgtatgagcaagtcactcagcctcaccaaacagttccacatagtgagcaatcagtaaatatgacttttcttcttttctctacaaggaagctttatgttgaaaatattaatgtgtaaaccctgctgatgagggaaattaggtgcttaagatcttagagaaagatctttacctagactcaaataaaccattttcataaagtttagtgctaatgtaccagagtagttaaccagtcttcagacatttcctcaatgcttagcatcctgatgttgctccagctaaatttga

SEQ ID NO: 466147 - DNA, 549 bp, Homo sapiens
agctacttttgtgctagtgtcagagttgagtaggtgtgactgagaatgcaaagacttgaaaagcctaaaatatttatcatctgaacttttagggaaaaaaaatgtttgctgacccctagtctacaaaataagattggtgaatgttccctttataaggtacccggaaatacagaaggcctttatctgtttttgaatcccctcctggaaatagctggcactgtggacttcaaagctccrgggtgtggtagtgttgacagatctgggtgtatgagcaagtcactcagcctcaccaaacagttccacatagtgagcaatcagtaaatatgacttttcttcttttctctacaaggaagctttatgttgaaaatattaatgtgtaaaccctgctgatgagggaaattaggtgcttaagatcttagagaaagatctttacctagactcaaataaaccattttcataaagtttagtgctaatgtaccagagtagttaaccagtcttcagacatttcctcaatgcttagcatcctgatgttgctccagctaaatttga

SEQ ID NO: 466148 - DNA, 539 bp, Homo sapiens
gctgaataatgattttaatgacttactgaggatgcagcatgacatctsaaaaacttcgggatggaattcagagagctatgagtttgactcctactctacaaactccattttattaatctccctgtgcctcagtttcttcctttatatgtggaaaaataatatgaaatgttctctctctcttttttttttttgagagagctttccattgttttagccctggactcacctcttcataatttaaaccttggaacctccatttgtcctggagttagttatcatattagaccaagtaacagattcctagcttttcagctcaacaggtaaggtctaaatacaagactgaaaaagataaaagtagaattagttggaggataagttgtttcctggttcttctctagtacttccccccatatcctgcccatttgataaagaccatatgatctgaggagtgaaaagagaattggggagtaaggagtccagcaaggaagttggcctgtctcttcattctgtcatcttgctattttagagatacttggagg

SEQ ID NO: 466149 - DNA, 539 bp, Homo sapiens
gctgaataatgattttaatgacttactgaggatgcagcatgacatctcaaaaacttcgggatggaattcagagagctatgagtttgactcctactctacaaactccattttattaatctccctgtgcctcagtttcttcctttatatgtggaaaaataatatgaaatgttctctctctcttttttttttttgagagagctttccattgttttagccctggactcacctcttcataatttaaaccttggaacctccatttgtcctggagttagttatcatattagaccaagtaacagattcytagcttttcagctcaacaggtaaggtctaaatacaagactgaaaaagataaaagtagaattagttggaggataagttgtttcctggttcttctctagtacttccccccatatcctgcccatttgataaagaccatatgatctgaggagtgaaaagagaattggggagtaaggagtccagcaaggaagttggcctgtctcttcattctgtcatcttgctattttagagatacttggagg

SEQ ID NO: 466150 - DNA, 539 bp, Homo sapiens
gctgaataatgattttaatgacttactgaggatgcagcatgacatctcaaaaacttcgggatggaattcagagagctatgagtttgactcctactctacaaactccattttattaatctccctgtgcctcagtttcttcctttatatgtggaaaaataatatgaaatgttctctctctcttttttttttttgagagagctttccattgttttagccctggactcacctcttcataatttaaaccttggaacctccatttgtcctggagttagttatcatattagaccaagtaacagattcctagcttttcagctcaacaggtaaggtctaaatacaagactgaaaaagataaaagtagaattagttggaggataagttgtttcctggttcttctctagtacttccccycatatcctgcccatttgataaagaccatatgatctgaggagtgaaaagagaattggggagtaaggagtccagcaaggaagttggcctgtctcttcattctgtcatcttgctattttagagatacttggagg

SEQ ID NO: 466151 - DNA, 539 bp, Homo sapiens
gctgaataatgattttaatgacttactgaggatgcagcatgacatctcaaaaacttcgggatggaattcagagagctatgagtttgactcctactctacaaactccattttattaatctccctgtgcctcagtttcttcctttatatgtggaaaaataatatgaaatgttctctctctcttttttttttttgagagagctttccattgttttagccctggactcacctcttcataatttaaaccttggaacctccatttgtcctggagttagttatcatattagaccaagtaacagattcctagcttttcagctcaacaggtaaggtctaaatacaagactgaaaaagataaaagtagaattagttggaggataagttgtttcctggttcttctctagtacttccccccrtatcctgcccatttgataaagaccatatgatctgaggagtgaaaagagaattggggagtaaggagtccagcaaggaagttggcctgtctcttcattctgtcatcttgctattttagagatacttggagg

SEQ ID NO: 466152 - DNA, 597 bp, Homo sapiens
tcaactgaataactaactctgctcaggaaagcactccacccctagtgccaaggaatactctccccaaatataagcctcacaacctcaggctgggaaagttgactgggtaatggcaaatgtctcccattgctttaaaggcagtggggaagaaccatactttagagatctcaaatattgtaatatcacacttgtaattgctgatagttctaagatttgaggaagaaggtgccataagcatgatctaaaaggatcagaagccctatggggggctttcagaatctagccgctccatctggttggaagtcccaatgagaatggcatgctctaagtaaccaccttgattatgatgtaaataataacacatgggcctttccaaacatgtcccctcatggaattccagatccttgtatgatgtttgctaatagtaatggcctacgaatttgtgggcaaactggagacatctgtaccaacagcccttgccacaaagatcatctgagatactggccagggcatatwatgttaattttttgaaacttcatttgttgggtggacccttctaattttgcatgtaagattccaaatcgcattgtgaatgac

SEQ ID NO: 466153 - DNA, 633 bp, Homo sapiens
catgagcaggagaaaactgatcggaaggacatgatggccatacaaaccttgtcctgtatattttctaaaattatatatccatgttcagctgaaaattcaatttcgaatactgggtttggtgctgcagtttttcagttatttaattgtatggaatatttaaatattccttaaatttgctggtgtcattgcatactaattgcactctattgtgtaaattctaattttaaaatttgactagattttttagtgaggctttgctattgtcaaagatgctaaagtgattatatgcctggtgtctcatctgtgatgacagctgctctatagccctgccatctagtaggcaatgatacctttaggttatattatgcttactctgataatcttaatttacatgaattaaaaatcaatttgcctccaaactctaaaacaatgaaytaggacacatttttcccattgtatgcagttactccatgtgcttagggaaatgtagtacagtcagcacttcatatctatgggttcctcatccatggatacaaccaatcatggattgaaaatatttgaaaacaaaaaaaattaaaaataagaatataacaataaacaatacaaattaaaaacaatacagtatgacaatta

SEQ ID NO: 466154 - DNA, 594 bp, Homo sapiens
gttatgcagaggagtaattctgtgttttcccagtcatgaacccatggattaaaacaacttgtaaggcatgatgaagtataagaatgttatgactgcaggttaaatgcataagttctttaggttcttaagctagccttgaaagccccaaaggctgaggaaatcgatgtattaccactcatgcgatctctagcacacgagtatcagaaagcttttacctagagcatgctactggttaggcaaagcttgatttgttttgatgaacatttctcacatttatttggttcagatcaggatcgtataacttgaataataattacagagcaaattttcttgctgccaaatcataacaaagttcttaagtagacaaactgatcccctggaaagttgaatagtggcataattatccaattgctctcaggggtattttaaaactgtttgagaagctgcatggttaaaatacttttaaagacttgaatatttggccacaagcaccataatggagcacacaaagaatctcartgtgattgtttcattttgttggctagaagtgttacaagggaaatttggttccagttgttccctaggaaaaattag

SEQ ID NO: 466155 - DNA, 544 bp, Homo sapiens
ccagcacaatgtttggccacaaagagcagatgtgtagtaaaattttaataaaagaatctcttaattctctgattttccagtgcatattgactgatgattattgaacagaaggtataatgcaacaactaattttgatagttttaatagagcttgaaaaatattttgtaatcaaggagactgaaatgaatggctctctaatgtggttacacattgcattttcccaggtaccctttctctcttattaacatgaatactggtataattcaaatgaactggttcaagcagaacattgttcttgagaccacagtaatggccaatacagttttgaatgaagatayggctttttgtggaagaaggaattgaaaagttttttttttaattagcagactaggcaattcatatgaagatagggtcctattaagttttctcatcagtgtctccctgatacttaacacaatgcttagtaaatagtaggtattcaacgtatctatgtggaacaactttatttgccaggaaaacataaacataaccaagaatgaactgg

SEQ ID NO: 466156 - DNA, 544 bp, Homo sapiens
ccagcacaatgtttggccacaaagagcagatgtgtagtaaaattttaataaaagaatctcttaattctctgattttccagtgcatattgactgatgattattgaacagaaggtataatgcaacaactaattttgatagttttaatagagcttgaaaaatattttgtaatcaaggagactgaaatgaatggctctctaatgtggttacacattgcattttcccaggtaccctttctctcttattaacatgaatactggtataattcaaatgaactggttcaagcagaacattgttcttgagaccacagtaatggccaatacagttttgaatgaagatacggctttttgtggaagaaggaattgaaaagttttttttttaattagcagactaggcaattcayatgaagatagggtcctattaagttttctcatcagtgtctccctgatacttaacacaatgcttagtaaatagtaggtattcaacgtatctatgtggaacaactttatttgccaggaaaacataaacataaccaagaatgaactgg

SEQ ID NO: 466157 - DNA, 544 bp, Homo sapiens
ccagcacaatgtttggccacaaagagcagatgtgtagtaaaattttaataaaagaatctcttaattctctgattttccagtgcatattgactgatgattattgaacagaaggtataatgcaacaactaattttgatagttttaatagagcttgaaaaatattttgtaatcaaggagactgaaatgaatggctctctaatgtggttacacattgcattttcccaggtaccctttctctcttattaacatgaatactggtataattcaaatgaactggttcaagcagaacattgttcttgagaccacagtaatggccaatacagttttgaatgaagatacggctttttgtggaagaaggaattgaaaagttttttttttaattagcagactaggcaattcatatgaagatagggtcctattaagttttctcatcagtgtctccctgatacttaacacaatgcttagtaaatagtaggtattcaacgtatctatgtggaacaactttatttgccagkaaaacataaacataaccaagaatgaactgg

SEQ ID NO: 466158 - DNA, 481 bp, Homo sapiens
ccaaaaaccatctgaggcagctattgtgtgtccagcccttcaagtccatgccaccagctcttccacctccaccattgccaaaatttctcacttccccaccttagctttcacccctacagaaaatgcccaaatgggggtgatgccactagggttcaagttcccttcttattgcaggaacttaggcaagtaaagggagacttaggccaattttccaataaccttgatagatatatagaascctttcaaaatttaactcgggtatttgacctcttatggagggatgttatgctgctcctaagccaaaccctaaccacagctgagaagcagccagcagagaaattcagagatgagaaatatgtctcctatattaggcctaaaaggaaaagagaaaatagggaaggtgaagagataatggaaacaccattcccaatacgaaggaaagcagttactcttgacaatcctagttggaacaccaataatg

SEQ ID NO: 466159 - DNA, 588 bp, Homo sapiens
gggtttctgtgaagaccaagtcagctagagcttgtctatcaatcagggattacattttatgtcagcacatttgacataaaattcaaatacagtggtttaaaggagtttatttttctcctataacaagcaagatgagcttatatttatcacagacctaattaattactttcacaagaaaaacagcccaaactgtgcatgtaaccagaaaagcactctttgcttccacaacttctcaattgaagtgataactgcacactccagaagctgttttcaccatcaggcttgggatctcatgcaagctccccaaaagaggcattcagttcacatcctgccctttctataaatgattttatctacttccatggtattactggctgatgacctttaaaccaatgacaytgaccttgtttcaagcactagtctcctatcaacaactgcctatgcaatccttctctcagaatgtcccctgagacttagaattaccatgtcccaatccaatgaactgattatttgccccctactctcaccttccccaccaacgcatcctgcttttctctgttaatagcatcatccatcctcagtttattc

SEQ ID NO: 466160 - DNA, 533 bp, Homo sapiens
aacaaacgctaatcttgaatacttcatttctttgacctaatgagtggcagattcataaaggcgttatcacaatttggcattattatagccaattaaagtgtatgctcttgyaaatatcatggttttggtttttgctttcttatatttaccggtgccagcatttctcaattgggatatgccaacaaatcaattattcaaaaggtatgaaaaagggttcattgtttcatatctagtggctgagtttaagatttggtaaatactgagccagaattttagtgtgtggttttattacatgacaatactcatttttaagttgagatctctttagcttgaccctaagtgtttttatgttttatatactttcctgaacagtttttcttctcaccctgtacaccctggtttatacctgctttcaccttcctggactgactattgaatctcaagcttacttttttgtaagattcaatagtgagcatttacttttttccttttacaacttctaaccatttgaatatcttttctgtcagtcctcc

SEQ ID NO: 466161 - DNA, 533 bp, Homo sapiens
aacaaacgctaatcttgaatacttcatttctttgacctaatgagtggcagattcataaaggcgttatcacaatttggcattattatagccaattaaagtgtatgctcttgtaaatatcatggttttggtttttgctttcttatatttaccggtgccagcatttctcaattgggatawgccaacaaatcaattattcaaaaggtatgaaaaagggttcattgtttcatatctagtggctgagtttaagatttggtaaatactgagccagaattttagtgtgtggttttattacatgacaatactcatttttaagttgagatctctttagcttgaccctaagtgtttttatgttttatatactttcctgaacagtttttcttctcaccctgtacaccctggtttatacctgctttcaccttcctggactgactattgaatctcaagcttacttttttgtaagattcaatagtgagcatttacttttttccttttacaacttctaaccatttgaatatcttttctgtcagtcctcc

SEQ ID NO: 466162 - DNA, 585 bp, Homo sapiens
ttcattgcttctaggtaagaggaaacaatttgagttataatattgagtagacagggttcaaacattaatatagaacatatgagcaagagaggacttaataatggagctaatcagttccacaaaaaagactaaaattcattaaagrgcaattgtagccatccagggctggagcctgcattttttcttaacctgttaatgattttaacttgatctttaagcacttgtgggttttcttctacttgactacaggtgttgatctagaagcagcatgtttcatttaagactgaacaggcaccccctacctcggctgtaagaacatccagggctcatctattctgtgctactagtgaggctaaagagtctatggattagacttctatggatcctactgttgccttccatcctcaatacatcataatgaatatattaagtactgacctttcagaaagaggaataccagcaaaccagaagaagtattcctcttattatagaatttcccatccatgatctttctaaaatgggattgtcatgtgcatgccctccccaattttctcttttggttaaatctccatatgagggcatgga

SEQ ID NO: 466163 - DNA, 607 bp, Homo sapiens
aaaggaatgaaaattagttatcattagtttatacttagagtaaaaactgaattctctttttttgtattctactgcccagcaaatcttacttaaacattgatttaattatctactcatttgaaaaattaaatcccttctattattattctgctgcacaaaataaatatgtatgtttgtgcacatctatgtacacatatacatatatatacatacacacatacatatgtatgtatataktcatctctttatgattttgtcctctttgcacttagccaacttaattttccactgccttcaatatgaaacttccttttttaaaaaaaaaaaaaacactggtctccccactgtccagagaatacatcatgttcaactgtgctgttgcctgtgtttttttttttttttccttgagtggaatacctttatttttctctgcttatttaagttctacacagccttccaggcctaacctacttccaccagctctgtaaagtctttttacactactcaatttttctttccttctgatcttctctgactatgcactcagtgttgtgtacatcttggtacttaatgatgcatttcatatgcattgcttactgtaaaactg

SEQ ID NO: 466164 - DNA, 607 bp, Homo sapiens
aaaggaatgaaaattagttatcattagtttatacttagagtaaaaactgaattctctttttttgtattctactgcccagcaaatcttacttaaacattgatttaattatctactcatttgaaaaattaaatcccttctattattattctgctgcacaaaataaatatgtatgtttgtgcacatctatgtacacatatacatatatatacatacacacatacatatgtatgtatatagtcatctctttatgattttgtcctcwttgcacttagccaacttaattttccactgccttcaatatgaaacttccttttttaaaaaaaaaaaaaacactggtctccccactgtccagagaatacatcatgttcaactgtgctgttgcctgtgtttttttttttttttccttgagtggaatacctttatttttctctgcttatttaagttctacacagccttccaggcctaacctacttccaccagctctgtaaagtctttttacactactcaatttttctttccttctgatcttctctgactatgcactcagtgttgtgtacatcttggtacttaatgatgcatttcatatgcattgcttactgtaaaactg

SEQ ID NO: 466165 - DNA, 569 bp, Homo sapiens
cattttttcgaatcccctcatattccaagcattgttcctttcttcttttcatgtttcatattacaycactatattgatatatagctctcatcatattttattatagtcaattgtttatatgtctctctgcccaattaaactgaggagtcctcagggacttaattttgctgttttttatgacctggtctaccacagcaccactcatttagaacactgttattacttatttgtcttctcaattccagctcagttctctacttgtaataacaatggcatataattcacattgatccacaaattagtcacatgttcttttccatttctattgaatataaacaaattatagctttttcctgatttaaaaaatcctaatctattgttaaaaaaattattcagtgattcttattcaagtaagaaaaaccttattcaggaccactgtgattggtataaggacgatgacagtgggattttgtggtgagggcattagattgggttcaactctgcatacagcattgccaggtggtaatttatagccaaggagtagcctgggggtcagtggatagaaaatt

SEQ ID NO: 466166 - DNA, 585 bp, Homo sapiens
ttgggaactggaacaaaggtcactcttgctgtgccttagcaaggagactggaaggattgtgcccctggtctagggatctgtggagttttgaacgtgagacagatgatttagggtatctggcagaagaaatttttaagcagtaaagaattaaagatgtggcctgagtgcttctaacamtatattatcatatgtgtgagcaaagagataatctgaacctggaacctatatttaaaagtgaagcagagcataaaagtttagaaaatttgcagcctgaccatcttgtagattattaagaaaagttttacctgttttcaggagaggaattccagtcagctgcagaaattcacataagtagaggagccaaatattgatagccaagataatggggaaaatgccttgaaggcattataaagacctttgtgtcagccccttccatcacaggataggaggcctaggagagaagaatggtgtcctcagctgggcccaggtcaccaatgccctatgcagcctcaggaaatgttgccctgcatcacggttgatccagctccaaccatggctaaaaggggccaaggtacagcttaggcc

SEQ ID NO: 466167 - DNA, 585 bp, Homo sapiens
ttgggaactggaacaaaggtcactcttgctgtgccttagcaaggagactggaaggattgtgcccctggtctagggatctgtggagttttgaacgtgagacagatgatttagggtatctggcagaagaaatttttaagcagtaaagaattaaagatgtggcctgagtgcttctaacaatatattatcatatgtgtgagcaaagagataatctgaacctggaacctatatttaaaagtgaagcagagcataaaagtttagaaaatttgcagcctgaccatcttgtagattattaagaaaagttttacctgttttcaggagaggaattccagtcagctgcagaaattcacataagtagaggagccaaatattgatagccaagataatggggaaaatgccttgaaggcattataaagacctttgtgtcagccccttccatcacaggataggaggcctaggagagaagaatggtgtcctcagctgggcccaggtcaccaatgccctrtgcagcctcaggaaatgttgccctgcatcacggttgatccagctccaaccatggctaaaaggggccaaggtacagcttaggcc

SEQ ID NO: 466168 - DNA, 552 bp, Homo sapiens
gggacctggtttgattccatgtctttgcttttattttcatttgtttatgttatctgtgatttcttttagcaatgttatgtagtttttttgtagagatttttcacctccttagttagatctattcctagccattttattttttgtggctattataaatggaattgcatctttcatttagctctcagcttgaatattactcatgtagagaaatgctacagatttctgtatgtttattttgtatgctgaaactttattcaacttgtttatcaggtctattagtctttcaggagtcttttggactttctagctatagactcatactgtcagcaaagagagattatttgacttcttcttttcctatttggatgccttttatttctttctcttgactaattgctctgctatcrtttccagtactctgttgaataggagtggtgaaagtggacatccttgtcttttttgcagttcttaaagaggattcttccaacttttgcctgttcagtattatgttgcctctgggtttgtcatagatagctcttcgtgttttgaggt

SEQ ID NO: 466169 - DNA, 490 bp, Homo sapiens
tgcacattctgcacatgtatcccagaacttaaggtaaaatttaaaaaaaattggttagttttttccctctattgtaggttcaggggtatatttgctggtttgttacataggtaaattgcatgtcgcagggatttggtgtacagataattgcatagcccatgtaataagcatatgcaaactatagaaagcatagtacytgataggtagtttttcaaaattcaccctcctgcctccctccaccctcaagtacattccagtgtctactgttcccttctttgtgtccatatgtactcaattttagctcccactcataacatgcagtatttgcttttctgttcctgcattaactcacttagaataatggcctccagctccctccatgttgctgcaaaggacgtaatttctttttcatgaatgtgtagcattccatggtacacattccctttatccagtctaccagtgatgggcatttatgttgattccatgtttt

SEQ ID NO: 466170 - DNA, 457 bp, Homo sapiens
cactccttgataccaattttctgtattagtttattcttgtacttctataaagaaatacctgagactgggtaatttataaagaaaggaggtttaattggatcacagttccacaggctgtatgggaagtatggctggggaggcctcaggaaatttaaaattatggtggaaggcaaagggaaagcaggcgcatctcacatggctggagcaggaggaaggagagaggaggtgctacacccttttaaacaactagttcccatgagtcctcaatcattattatgagagcagcaccgagaaggaaatctgctcctatgatccaatcacctcccactaggcctatcctccaacactggggatgatatttgacatgagatttggttggagacacagacacaaaacatatcaatayggaaagcagtactgcataaattagaaatgaatttttataaatgaaggctac

SEQ ID NO: 466171 - DNA, 599 bp, Homo sapiens
acttttctttctttcaacaattttgactatctaaactaaatatttctactctatgcacctagcaactgaatgatttttaaatcagttaatctttcaagccctataagggaggggaaaaagagaaaatagtatagaaaaatgagagggagccagctttgaagaaatagctaattatttgccttctgtaaggaaagagaagaaaatttagatgcaataaaagatactttgatgcatatgcataaaagagagagtatcatacacattttgatataatttgggtccttgaccattttatcaagttgtataataaaaaagcctgtacttattaaacctcaaagtatgaaaacaacaaagaaggggatgtttttcacattaaaccaaataatctctcttttaggtaacacttttttttaatgaggttttgttctttctatcttccagtatctacattatctttaaaatgttcagccaaaagttggagttcatatatgggggcaacctctgartcagttttggcttacatctcatatctacaatttcagactttcaataatcaatgaaaatgtggaaaggacattgagtatgtcaatatcagaagc

SEQ ID NO: 466172 - DNA, 447 bp, Homo sapiens
actttacacaaccataaatagtgagtctccagttgcttggaagaagaaattctggtagagaagaatagttaactactcctggcaaattctgtagtggaaaacgttcaaagaatgaaatcatgtgacatgttggactgactgggcgaacccttaacttggatagtccaggaaggactctgaggaagtgacatttaagctgagacctatatgatgaaaagaaaccagtcataggacactagattataataccatttattgtcagaggtaactgcttagggaaagccctaagatgggaataaacttagtgtgtttgaggaacagcaaagagagagcagtaagaggggtcatattatctaagatcttgtagtttatkttctctgaatttaaaaggaagccattagaggtattcagccagtgaatatcatgatctggcttgcattttaaaaa

SEQ ID NO: 466173 - DNA, 442 bp, Homo sapiens
tgctggtaggctcagttatgtggtgaggggcattttctgtttctaagattgcatcttgctatatcctctgaaggagagaaaagctctatccttatatagcactaggcagaagagcaagagagctggtggaagaaatttctaagcagcaaagcattcaagatgtggcctggttgcttctaacagcatattctcacatatgtgagcaaagggaagcaaaacataaaagtttggaaaatttgcagctcagccatgtggtagaaaagaaagacccattttcagkggatgaattcaatctgactgcaaaaatttgcctaagaggagtcaattgctaattgacaggagtcagtgcaagacaataggaaaaaagcctcagaggcatttcagagacctctgcacagcagcccctccaatcacaggcctggaagcgtgtgaaggaagaaag

SEQ ID NO: 466174 - DNA, 570 bp, Homo sapiens
aagctctatccttatatagcactaggcagaagagcaagagagctggtggaagaaatttctaagcagcaaagcattcaagatgtggcctggttgcttctaacagcatattctcacatatgtgagcaaagggaagcaaaacataaaagtttggaaaatttgcagctcagccatgtggtagaaaagaaagacccattttcaggggatgaattcaatctgactgcaaaaatttgcctaagaggaktcaattgctaattgacaggagtcagtgcaagacaataggaaaaaagcctcagaggcatttcagagacctctgcacagcagcccctccaatcacaggcctggaagcgtgtgaaggaagaaagttttccttggccaggcccagggctctgctgctctgtgcagccttgggacacagtgccctgcatcccacctgttccagctcaagttgtggctaaaaagggccaaggtacagttcaggctgattcttcagagcgtgcaaaccataagccttggtggcttccatgtggtgttaagccttcaagcacacacagtgtaaaagttgaggcttgg

SEQ ID NO: 466175 - DNA, 570 bp, Homo sapiens
aagctctatccttatatagcactaggcagaagagcaagagagctggtggaagaaatttctaagcagcaaagcattcaagatgtggcctggttgcttctaacagcatattctcacatatgtgagcaaagggaagcaaaacataaaagtttggaaaatttgcagctcagccatgtggtagaaaagaaagacccattttcaggggatgaattcaatctgactgcaaaaatttgcctaagaggagtcaattgctaattgacaggagtcagtgcaagacaataggaaaaaagcctcagaggcatttcagagacctctgcacagcagcccctccaatcacaggcctggaagcgtgtgaaggaagaaagttttccttggccaggcccagggctctgctgctctgtgcagccttgggacacagtgccctgcatcccacctgttccagctcaagttgtggctaaaaagggccaaggtacagttmaggctgattcttcagagcgtgcaaaccataagccttggtggcttccatgtggtgttaagccttcaagcacacacagtgtaaaagttgaggcttgg

SEQ ID NO: 466176 - DNA, 570 bp, Homo sapiens
aagctctatccttatatagcactaggcagaagagcaagagagctggtggaagaaatttctaagcagcaaagcattcaagatgtggcctggttgcttctaacagcatattctcacatatgtgagcaaagggaagcaaaacataaaagtttggaaaatttgcagctcagccatgtggtagaaaagaaagacccattttcaggggatgaattcaatctgactgcaaaaatttgcctaagaggagtcaattgctaattgacaggagtcagtgcaagacaataggaaaaaagcctcagaggcatttcagagacctctgcacagcagcccctccaatcacaggcctggaagcgtgtgaaggaagaaagttttccttggccaggcccagggctctgctgctctgtgcagccttgggacacagtgccctgcatcccacctgttccagctcaagttgtggctaaaaagggccaaggtacagttcaggctgattcttcagagcgtgcaaaccataagccttggtgkcttccatgtggtgttaagccttcaagcacacacagtgtaaaagttgaggcttgg

SEQ ID NO: 466177 - DNA, 610 bp, Homo sapiens
gcaattccaagatgactcagatgttggaattattagacaaggactttggagcagctgttataactatgcttggtgagttttaaaaagtatgcattcttataataaatggtaagctaggcaatattagcagagaattagaaaatgtaaagaagctcttaaataataaatttattggggaacccaatttcttaaatagaaatcactagagagatgctgtggtctgaatatgtcccccagaattcatatgttagaaagttaattctcaatgcaacagtgttgggaggtggggcccaatgggagatttcrgtcatgaggactctgccctcatgaatgaattgatgccagtataaacaaggcttgctggaatggatttgcccctttctgcttcttgtcatgtgaggacaaagaagaaggtcctcacaagattccagagccttgattgtggacttctcagccttcaaaactgtgagaaataaatttctgttctttataatttactcagtctcaggtgttttgtcataaagcaaaacacagcagcataagtgtgagaaataaatttctgttctttataaattacccagtctcaggtgttttgtcataaagcaaaaca

SEQ ID NO: 466178 - DNA, 610 bp, Homo sapiens
gcaattccaagatgactcagatgttggaattattagacaaggactttggagcagctgttataactatgcttggtgagttttaaaaagtatgcattcttataataaatggtaagctaggcaatattagcagagaattagaaaatgtaaagaagctcttaaataataaatttattggggaacccaatttcttaaatagaaatcactagagagatgctgtggtctgaatatgtcccccagaattcatatgttagaaagttaattctcaatgcaacagtgttgggaggtggggcccaatgggagatttcagtcatgaggactctgccctcatgaatgaattgatgccagtataaacaaggcttgctggaatggatttgcccctttctgcttcttgtcatgtgaggacaaagaagaaggtcctcacaagattccagagccttgattgtggacttctcagccttcaaaactgtgagaaataaatttctgttctttataatttactcagtctcaggtgttttgtcataaagcaaaacacagcagcataastgtgagaaataaatttctgttctttataaattacccagtctcaggtgttttgtcataaagcaaaaca

SEQ ID NO: 466179 - DNA, 556 bp, Homo sapiens
ggattttgtttaatgttttttctgcatctattgaaatcatcatgtgatttttgtttttaattctgtttatgtggtgtatcacatttattgacttgcatatgttaaaccatcccagcatccctggtatgaaacccccttgatcatggtggattatctttttgatatgttgttggatttggttagctagtattttgttaaggattttaacatctatgttcatcagagatatcagtctgtagttttcttttttggttatgtcttttcctggttttggtattaaggtgatgccaactttatagaataaatcagggaggattccctctttctctatcttgtggaatagtgtcmaaagggttggtacccattcttctttgaatgtctggtagaattctgctctgaatctgtctagtactgggcttttttttttgttggtaattttttaattaccatttcaatcttactgcttgttattggtctgttcagggtatctaattcttcctgatttaagctaagagggttgtatttttccaggaatttatccatctcttctagattt

SEQ ID NO: 466180 - DNA, 556 bp, Homo sapiens
ggattttgtttaatgttttttctgcatctattgaaatcatcatgtgatttttgtttttaattctgtttatgtggtgtatcacatttattgacttgcatatgttaaaccatcccagcatccctggtatgaaacccccttgatcatggtggattatctttttgatatgttgttggatttggttagctagtattttgttaaggattttaacatctatgttcatcagagatatcagtctgtagttttcttttttggttatgtcttttcctggttttggtattaaggtgatgccaactttatagaataaatcagggaggattccctctttctctatcttgtggaatagtgtccaaagggttggtaccmattcttctttgaatgtctggtagaattctgctctgaatctgtctagtactgggcttttttttttgttggtaattttttaattaccatttcaatcttactgcttgttattggtctgttcagggtatctaattcttcctgatttaagctaagagggttgtatttttccaggaatttatccatctcttctagattt

SEQ ID NO: 466181 - DNA, 609 bp, Homo sapiens
agaccaatgaaatagagtagagaaccaagaaataaatcaatacatctacagtaaattcatttttgacaatagtgccaggaatatacattggggaaaggacagtctttacaataattgatgctaagaaaactagatatccatatgtaaaaaagtgaaactagacccctagctctcattatatacaaaaaatcaaatcaaaatagattaaagacttaaatctaagacctcaaactgtgaaactacttaaagaaaatactgggaaaattctctaggacattggactgggcaaagatttcttgagtagtaccccacagcataggcaaacaaagtaaaaatggacaaatgggatcatatcaggtcaaaaagcttctgcacagcaaagaaaacaattaaaaaaaawgaagagacaacccacagaatgggagaaaatatttgcaaactacccatctgacaagggaaaacttaaagactccaccagaaaacaaaatatcgggagtgataaacaaattcagtaaaattgcaggatacaaaatcaacatacacaaatcagtaacatttctatatgcaaacagtgagaaatataaaaaggaatatagaatgagctcaaac

SEQ ID NO: 466182 - DNA, 604 bp, Homo sapiens
acatcacaggccctccaaaacctcagagtatctgttcttccattaaacctgcctcacttgtgaattcctccagactgagccagtctgaacttggctcctagactctctactcagggagggagaactagaacctgaggttagtcaggttcacacaccacattaacccttgctgggaacacttggtaattgcaacaggatctgaagagacacagatggtccagtcatctttacatatgcatcatttgcgtctgaaaatcctggcactacccatgaccttgggaatgaacaatgtgcggtcatctaccatgtcacctgctgtcttctttacaacaagactgatctttcagatccttcttyatttttgcgtagctgaggccatttctgaagccaaaaagaaaagaaaaagaaaaacaacaacaacaacaacaacaacaaaaacagctgacacgacagtacagtataaataaaaatgaagaaactttatgttggatcaagctgataaattactgttcaaccagcagcctctctagcaagggcagctatctgagctgaagacacctggactgctctctgactcaactcttatgagttctgctcataccac

SEQ ID NO: 466183 - DNA, 492 bp, Homo sapiens
atacaaaattgcagctagacagaaggaatcagttcttgtggtctacagmactttagggttactgtagttaacaataacatattgcagtttcaatatagctagaaggacattaaatggtcctaatgtaaagaaatgataaatgtttggatgatggttatgcaaattaccctgatgtgatcactacacattagatgtagtgaaatttcgctatgtattccatacatatggacaattattattagtcaattaaaaaataaaattttaaaaagaattttacctgttgtgtcatgcatgaaaaggcctttcacatttgataaaattttcatttttgctaatctctttttacatttagctccttaatctacttggaagcaatttggcatctagtgcaaggctgagaatccttttgtttcttaaagagctaatcaatatccataacacaatgattttcttttaattatcctttcatgctcaatgggaagttcatattcc

SEQ ID NO: 466184 - DNA, 606 bp, Homo sapiens
attaggttgatgaatttttttatgcttgggtctttgaattatacttcaatgtgtgttaatttccatttctttgaagacagggagtatacctttkggtattaccttctgtaatagaaagcaggatcttacctataaaattttattggcaccaatagggtacaaagtaacttggtggtgggtagccaagaggcattggtgttggggtgggacttgaggagcaacacacgctgaatgtttttcagctaagaaactcagatagccgaagttcaatgtcactgcttctcctcctgaaatttaagatggtggggaatacagatgattgctgaagttcctcagagtgagagaggaactgtttattcaactttcagcatagtacctaccatgtagcacagcacttggcactggggatgtctatggctatggctttggttcttggagttcactcaggacagtttttctgaaactttgaggttttaccttaggcaagaagctctcaagtttctcccccagggctaagatgagagtggggatccattggtgacgtataagccagagcacttctccctttgcatccccagcttcagaagatggactaagccctcacat

SEQ ID NO: 466185 - DNA, 545 bp, Homo sapiens
aataatttatattcctttggrtacatatccagtaatgggattgcttggttgaatggcatttctgtctttaggtctttgaggaatcaccacattgtcttccacaatggttgaactaatttacgcccccaccaacagtatatgagcattcctttttctccacaaccttgccagcatctgttattttttgactttctaagagaagccattctgactggtgtgagatggtatctcattgtggttttgatttgcatttctctaataaccagcaatgttgagctttttttaagtatgatttttggccacatgcttcttttgaaaagtgtctgtctgtgttctttgcccacttcttaaatgaggttgtttttgtttcttttatatttctttaaacttcttatagatgttggatataagacctttgttggatgcatagtttgcaagaattttctcccattctgtaggttgcctgtttactctgttgatactttctttcatccataaaaaggaatgagatcatgtcctttgcaagaacatggatggtagtggag

SEQ ID NO: 466186 - DNA, 521 bp, Homo sapiens
gggtcatgtgggcaaacactgacccttttctgattttaattcaattgccaaatgtctcactttatactgtggtaaaattctcaggcattcattttatagtacagatagacaatttttttgcataaaattgctatgtttggttaaatgtgtagccaagcgaccacataatttcctttttaaaaaacatagctgtgctttagcatatgtaagrctgtgatatccattaatatagcctttatatgtatatccacagaagcagttatttttatcatattcatgaagcctgaatattctggtacatgcaaatattctttaaaaccaggagctacatactccacaaatagatatatggagatcagataagttatttttcccctaggtttcatcttatattcttgaaaaaattttgtggtaataggttagattaataaaaattaggtaccaaactaaaaccggcttcttacaactttcctgacaactttccaatcaacaacaattgatttaaggtagaagaaacgaag

SEQ ID NO: 466187 - DNA, 554 bp, Homo sapiens
gactcccaagcattggttcatcatccagctggcaattgttgagcctcagccaatggtggaactctcaaatctagtatctctggagtaatttccatttccaacagaaggagagtgactttcactgactcttactctccatttggatttcaggcataagtgctttatggtggagtgagaatggcttgccctggaagggtcatgttttagaaggagtgatcttcattgtgaagtctaaactgttctggaaatataagctttgaaacccaggtaggcaggtttcattttaagcaatattgcaggatcacaggataattattggtttataaggtgattcttcactgtacaaagtatcttaaatactaaacatgctgatgtgttgcaaatttgattaggttttcacaagacttctctagaatgygtttatgtgtacctatgaggaaaaattattgactcttttaccaggctgccaacagggtctaaaatgagaccacaaggctctccttgacaggagtggtgtgcttaaagacaaagtcacctgcaaggttaataaatta

SEQ ID NO: 466188 - DNA, 588 bp, Homo sapiens
attgcttcctcaaagtagggaggcttttgggcggcctccctgactcacacctgagacgcctacagtgacctgtatgtaggacagatgagacttgggcagagtaagcccagtcccaaggacttcaggggccaggtggcatcatgcttcctgaggaatggatggggtcaccaaaaagacagagcagcagtagttgggttctgtctaaaggactgcttgaagggagagaggaacccaacagcaagaagctcctgagtcctacatgctaaggaaggagtcccaggaaaccatctggaataaaggtgcatttgccttggtgaagaaaaaacacatctccagctaggactcccttaagaactctcaatgataccaacaagataaagaatctacttttatctcattccagatccagagacaacaaagcccctggcaaggcaggagctgccccatcccagtcttctcctccctcattcttccccctccctcctctgaaacagcacttagtgggtgggggagatggggaccggggcagggggcagaactgaccacatyctttccctgaagcaagccccagcttgggaaggctcagaa

SEQ ID NO: 466189 - DNA, 638 bp, Homo sapiens
  misc_feature (1)...(638): n = A,T,C or G
agtaagtcagagtgcatgcattaaagtcaaaatgattggtgccttcaagaggaagatccctgaatcatgcaaggagcttcattcagaaagaagaccttcatctctaccttcagaatgttcttcactgcactggaatgaagatggtgatgataacgatggtcagggctcaagctcaggcccttccctgctgtgtgccataaatcagtgcccgaagggacaggaagcagaggagcccatgatggtggccgtctccagaacagatgctccccattcagccacacttggcctggatgtgcataccatgtgtgaggctattgattcaaatctgggttaaagaacccggcttctccagggctccctgtgaggactagcagggtgctgccctcangtcaggaagtggcttggaatgggggccattcccactgcctctctaacactatggatccgctccatgcccagagatgctgggtgaagaggacaggctttggcmtgcaacaccctggagctcaagtccaggatgtgggctctgaggcgagttagtttagctctgagcctcagtgtttctctctgaaagtggagttagcagtgtcttcgtctgagacttcctgtgagaattcagtactgcatgaaaagcgtct

SEQ ID NO: 466190 - DNA, 500 bp, Homo sapiens
taaccagtcttgcagcagtggacaccagctgtgagtcctccaattcgattccgacactctctccctagtggtagcatcagatcccacagggtgagggctgagacccacaagattgccccctacttctgatggtgattamaagccccaggttattttacctgtgcttctgacagactggctataaattggatttcccatgattccctcctcagtttagttaatttgctaggatggctcacagaactcagggacacacttatgcttagcagtttattacaaagatattttaaaggatacagatgaagagatgcatagggcaaggcatgtgggaagggatgagatgcttccatgactgccccaggcaccaccctccaggaacctccatgtgctcagatatccagaagctctccagacccagtcctttgggatttttatggaagcttcattacataggcatgactgattacatcactggccattgttgatggacttaaccttct

SEQ ID NO: 466191 - DNA, 500 bp, Homo sapiens
taaccagtcttgcagcagtggacaccagctgtgagtcctccaattcgattccgacactctctccctagtggtagcatcagatcccacagggtgagggctgagacccacaagattgccccctacttctgatggtgattaaaagccccaggttattttacctgtgcttctgacagactggctataaattggatttcccatgattccctcctcagtttagttaatttgctaggatggctcacagaactcarggacacacttatgcttagcagtttattacaaagatattttaaaggatacagatgaagagatgcatagggcaaggcatgtgggaagggatgagatgcttccatgactgccccaggcaccaccctccaggaacctccatgtgctcagatatccagaagctctccagacccagtcctttgggatttttatggaagcttcattacataggcatgactgattacatcactggccattgttgatggacttaaccttct

SEQ ID NO: 466192 - DNA, 591 bp, Homo sapiens
cttccttcactgaagtcttgagtccctcaaagtcatccatgagggctgttattaacttcttccaaactcctgttaatgttgatatttgacctcctcccatgaatcatgaatgatcttagtggcttccagaatggtgaatcctttccaaaatgttttcaatttactttgcctagatccatcagaagaatcactacctatggcagctatagccttgtaaaatgtgttacttaaataataagacttgaaaatcaaaactactccttaatgcctgggctgcagaataratgttgtgttagcaggcatgaaaacattcatctcattgtacacctccatcagagcttcagggtgaccaggtgcattgtcaatgagcagtaatattttgaaagaaatcttgttttctgagcagtaagtccaacagtgggcttaaatatatatattcagtaaaccatgctataaacagagatgctgtcattgaggctttgttttatttacagagcacaggcagagtaaatttagcataattcttaagggcctgaggattttcagaatggacaatggcttccacttaaagtccagttagagagtcagcct

SEQ ID NO: 466193 - DNA, 540 bp, Homo sapiens
tacctttgctgggaagctttgtttgtgttgagccatgccttcgatgcttcagcaagcagctgacaactctgcctcagagtttacttcctgcttgcacagagcctcaaagccaaacaaaagttaagctctagttagatctgtcttggacatgtgtacaaccctgcacgtgcacatggccttctaggttcttaagaatatgtcagagcttttccaaagcctctatgaatacctcattccccagtttttccttgtaactgttttggtcagcctcttattagcyccaactggtactgccatctcaggcagttgcaatgtcaaacaatttttgctgattgtttttgacagattccctcaggatagggctgttcacacagactaagctccaaaccatgttaagcaaagacaatccctgggaatgtgtcttttccagggagctgtcagacagatcaaatagtaacaactttctgaggatgggatttttggagagctttaaacctattctgtcctccccagtggctaccaggctgctggttttcacag

SEQ ID NO: 466194 - DNA, 540 bp, Homo sapiens
tacctttgctgggaagctttgtttgtgttgagccatgccttcgatgcttcagcaagcagctgacaactctgcctcagagtttacttcctgcttgcacagagcctcaaagccaaacaaaagttaagctctagttagatctgtcttggacatgtgtacaaccctgcacgtgcacatggccttctaggttcttaagaatatgtcagagcttttccaaagcctctatgaatacctcattccccagtttttccttgtaactgttttggtcagcctcttattagccccaactggtactgccatctcaggcagttgcaatgtcaaacaatttttgctgattgtttttgacagattccctcaggatagggctgttcacacagactaagctccaaaccatgttaagcaaagacaatccctgrgaatgtgtcttttccagggagctgtcagacagatcaaatagtaacaactttctgaggatgggatttttggagagctttaaacctattctgtcctccccagtggctaccaggctgctggttttcacag

SEQ ID NO: 466195 - DNA, 540 bp, Homo sapiens
tacctttgctgggaagctttgtttgtgttgagccatgccttcgatgcttcagcaagcagctgacaactctgcctcagagtttacttcctgcttgcacagagcctcaaagccaaacaaaagttaagctctagttagatctgtcttggacatgtgtacaaccctgcacgtgcacatggccttctaggttcttaagaatatgtcagagcttttccaaagcctctatgaatacctcattccccagtttttccttgtaactgttttggtcagcctcttattagccccaactggtactgccatctcaggcagttgcaatgtcaaacaatttttgctgattgtttttgacagattccctcaggatagggctgttcacacagactaagctccaaaccatgttaagcaaagacaatccctgggaatgtgycttttccagggagctgtcagacagatcaaatagtaacaactttctgaggatgggatttttggagagctttaaacctattctgtcctccccagtggctaccaggctgctggttttcacag

SEQ ID NO: 466196 - DNA, 540 bp, Homo sapiens
tacctttgctgggaagctttgtttgtgttgagccatgccttcgatgcttcagcaagcagctgacaactctgcctcagagtttacttcctgcttgcacagagcctcaaagccaaacaaaagttaagctctagttagatctgtcttggacatgtgtacaaccctgcacgtgcacatggccttctaggttcttaagaatatgtcagagcttttccaaagcctctatgaatacctcattccccagtttttccttgtaactgttttggtcagcctcttattagccccaactggtactgccatctcaggcagttgcaatgtcaaacaatttttgctgattgtttttgacagattccctcaggatagggctgttcacacagactaagctccaaaccatgttaagcaaagacaatccctgggaatgtgtcttttccagggagctgtcagacagatcaaatagtaacaactttctgaggatgggatttttggagagctytaaacctattctgtcctccccagtggctaccaggctgctggttttcacag

SEQ ID NO: 466197 - DNA, 550 bp, Homo sapiens
cacatcttgtcttatggcctgatgccaagtgatgtggcccttatctaatagcacatttgcattttaaatgagtaaagctggttaaacctctttttctaatttcagctattattttatctacaggggcctcatagacattcactccacccaacaaccacagaatatacattcttcctatctgtacacagaacatattctcagatcaaccatatgctgagtcataaagcaagtctcaataaattttaaaaaattgaaattataccaaacacactcttggaccacagtgcgataaaaatagaaactaatatcaagaagatctctcaaaactacacaaatacatggatattaaacaactttttcctgattaactcctaggtgaaaatcaaaattaaggcagaaataaaaaaatctttgaaagtaatgaaaatggagatacaacttaacaaagtctctgggatrcagccaaagcagtgttaagaggaaagtttataacgttaaatgccttcaccaagaagttaaaacaatctcaaattaacagtctaagtttgca

SEQ ID NO: 466198 - DNA, 618 bp, Homo sapiens
tggtggcatgtgcctcgagtcccagcactcgggaggctgaggcaccaggattgcttgaaccctctgcagtcagccaagattgcgtcacggcactccagcctgggggacagagactctgtctcaaaaaaagraaaaaaaaacagctggaattttcttcagtgcttacgctgtgccagatacatgcatttactcacttcacaatgagagggaagccactatgtttatcagtgaagcagggtcatttgggaagcattatccaacaccacctactatgggcccagcccatggcaactggaagcagcactactcagaaggaaaggcatgtggagaagctcagagctgacaggggagtctatacttgattgtaagatttctgtacaaaatgcctttctgtgtgctgtatcatgtagtgaaagataagaaacaatagaatgtccagcaatcagagaaggcttgacatgacaggctactttttaacagcactgagaaaagcttgctatctattaaatattttaaaatcaggtgctaagccgcagagtaagcacctcattatttggaaatgcacttatacattcacagaagcaacacccctggaaggaaataccccagtgatcatgg

SEQ ID NO: 466199 - DNA, 618 bp, Homo sapiens
tggtggcatgtgcctcgagtcccagcactcgggaggctgaggcaccaggattgcttgaaccctctgcagtcagccaagattgcgtcacggcactccagcctgggggacagagactctgtctcaaaaaaaggaaaaaaaaacagctggaattttcttcagtgcttacgctgtgccagatacatgcatttactcacttcacaatgagagggaagccactatgtttatcagtgaagcagggtcatttgggaagcattatccaacaccacctactatgggcccrgcccatggcaactggaagcagcactactcagaaggaaaggcatgtggagaagctcagagctgacaggggagtctatacttgattgtaagatttctgtacaaaatgcctttctgtgtgctgtatcatgtagtgaaagataagaaacaatagaatgtccagcaatcagagaaggcttgacatgacaggctactttttaacagcactgagaaaagcttgctatctattaaatattttaaaatcaggtgctaagccgcagagtaagcacctcattatttggaaatgcacttatacattcacagaagcaacacccctggaaggaaataccccagtgatcatgg

SEQ ID NO: 466200 - DNA, 544 bp, Homo sapiens
aagcagggtcatttgggaagcattatccaacaccacctactatgggcccagcccatggcaactggaagcagcactactcagaaggaaaggcatgtggagaagctcagagctgacaggggagtctatacttgattgtaagatttctgtacaaaatgcctttctgtgtgctgtatcatgtagtgaaagataagaaacaatagaatgtccagcaatcagagaaggcttgacatgacaggctactttttaacagcactgagaaaagcttgctatctattaaatattttaaaatcaggtgctaagccgcagagtaagcacctcattatttggaaatgcacttatacattcacagaagcaacacccctggaaggaaataccccagtgatcatgggattgtagtaacatttttgtttgtactttttatatwccttaaatttaaaattccttatgaataggtgaaaagcctgtccaggaagctttgtagggtcccctgagttcttggtgttctgtcagtggaggctggtttgagtcattcctgtaggagagc

SEQ ID NO: 466201 - DNA, 593 bp, Homo sapiens
tccacagcacttggactctaacaccctgtgctaggccaccgtgcccctgcckccctgcatggccactctttgtcctattctggctctgacatgccatgccaggctcccccacgccagatgggtgccatctggtacatatcccgtgtgcttagcttagactacccgggctatgatggctactgtcccacccatgcccatgtgctgcatgcatcttatgaaggcatctggtttattctccctgctcatcagttcaatcagcatgtgctaccagtgtagtgcaccagcataccatctgtggatctgtgggatgttcagaagatcaaggtctctgtagaccacactataacagaaagctggaaaacgaacatgatctgggagaagacactgactttgtacttctatccttgccaggtgaaagcaaacttctgctggttcttaccgatatagatggggagaaaacacaagctgagtcaatagctacatattaagtgctgagagtggttaagttgttctatgttgcatttagaaaagcagctaaaattggagttactgcctgattaaatttacgacgacatacagtcattctccaagat

SEQ ID NO: 466202 - DNA, 593 bp, Homo sapiens
tccacagcacttggactctaacaccctgtgctaggccaccgtgcccctgcctccctgcatggccactctttgtcctattctggctctgacatgccatgccaggctcccccacgccagatgggtgccatctggtacatatcccgtgtgcttagcttagactacccgggctatgatggctactgtcccacccatgcccatgtgctgcatgcatcttatgaaggcatctggtttattctccctgctcatcagttcaatcagcatgtgctaccagtgtagtgcaccagcataccatctgtggatctgtgggatgttcagaagatcaaggtctctgtagaccacactataacagaaagctggaaaacgaacatgatctgggagaagacactgactttgtacttctatccttgccaggtgaaagcaaacttctgctggttcttaccgatatagatggggagaaaacacaagctgagtcaatagctacataytaagtgctgagagtggttaagttgttctatgttgcatttagaaaagcagctaaaattggagttactgcctgattaaatttacgacgacatacagtcattctccaagat

SEQ ID NO: 466203 - DNA, 504 bp, Homo sapiens
gctgttttgtttataaatcacccagtcttaggtagttctttatagcagtgtgaaaatggactaatacacttccttaatgaactctctcagaaaggattcaggaaatgtaagcttgcaagtttagaaatatccttattctacctttacacttgatattatcgctgagatragcgttttaggttcaaaatatatttccaggagtcctaaaaatatagctccatcttttcagagtcttccatcatcctatgttgttgacaagactgagaatggtctctgtctctcctttcctttgtaggcaacctttctcttcctgctcccacccatggaacattttagaatcttcttttttttttttttttttttttttttggtgttttgaaattttgcagtacctgtctaggtgtggagcagttccccgggcttccttttaatctgtagctctggaatactcttgctattgatgattctatgtgtcgactattttgctcacaccccacccagatg

SEQ ID NO: 466204 - DNA, 486 bp, Homo sapiens
agattgatgttgattttcatactttaacccaatatatctaaaatattgctatttcaacatataatcaatatacaaaattattaatgagacacttcacattctttgtaggggctgtctttgaaattcaatgtgtaatttacacttggcacatctcaatttgtgccagttctatttcacgtgctcaraagtcacatgtggcccatggccaccacactggacagctatggtttcattgtccaaccccaccttggaacccaaatccttggaacccatgatcctcactgtacaaacatggaaactgagaccaaggactatgagacagtgcgtgtaagaattcagatctgttgactgaaaagcctgtcttctttctacgagttcacactgaacctttacacctagagctgaaaaggcccgggaagagttgaatggagctcagactcatgctggaacagaagcccgggaggtgagactgagcagagactcatc

SEQ ID NO: 466205 - DNA, 569 bp, Homo sapiens
tgggcaattcttttttaagtgaccaatttgaccacaattataacattttcttccaaaaaaaaaacttgccctcctaaaaaaaaaaatgttattgcttgagccataagcatagctttatgcatagctcctcagattccatcacaggcttttacatattctgagattacatctgatcccgcaggaacctttccttttaatggcttaatggctgattgacactcaggattggcgttttcatatgccatcaactccactatgaccttacgggctttttcatcggcaattgacttttgagcaacatcttggagccttgccacaaaatcaggatagggctcttttgaaccttgtcttactgtattaaatgaggggcaggtacttcctgggtcttggattttttcccaggctctaaggcagatagctctaacttgytcaatggcctcattttgcattaatgcttgttgactaatagtactccaattttgacctattcctaatagttgatctgcatctatgttaactggaggattggcagccctatttcttcggacctgttcttgtaccccatcaat

SEQ ID NO: 466206 - DNA, 538 bp, Homo sapiens
tatctatggatatgggctacactgaactaacagtggtattttggcacattttctaaacctccatgacaaaacaacaacaacaaaatatcattgtgctgtgacakctgttaaggataaagatgaaaaaatgattccagaaaagagaagtcctattaaaagtgtatctgtgcatatagaacaatctgtccctatatatattttcctctccttctctctattaccattatccccaatccctgatccaggcatactagagtttatttttcattgaggatcatggttttgttctctctgtacgtggtgatttggctctgttatgggttgacaattgtgaaataaagaatccctctatttccccttttgtggctgtttattcctttccctatctccaatatatcaaatagttggtacttcatgctctttcaacttgcacactattttttctctttatatactatctgggctgaagtattgatattgttttgcttctgacctttagagggggaaacgtaattatgcattctccaaaggcaggtga

SEQ ID NO: 466207 - DNA, 630 bp, Homo sapiens
tggctacaaataataccaataattctagaaggatttcagtgactaagctgggtgtgatggttatggaataacttttagaaggagagaaattttaaccatacttagaggaaagaatgtgtcatgtgtgaaagctagacaacagcacatacttagctgtaacaaagagctatgcctagggaacaagacatgacagcagttagaggaattaagcacattaccaggagttggagaaggacttacaccacccccaaagtcttctaaataagcaacataattgttatgtgtttatatatttgatgcagaggaaataagaaagttaaggcagatgaatcaatgaggaaatggctgttgtatttcagacataagatggtagatgcctggctgaggctgtagctgtgagagaggatgaggtaattcaggaagcattacagaggaatacatttgttgggggtgaaagaaagggcatggtaccctacatcatcacctaatgatgacaacgcctcatgcagaaaatgatgagcattcccaaaactcatctcaggcagaaacatgaccccacattggacatggcaygattaatggaaatgcaaatgagattccttcagcactgatttcaaaccaaacaataca

SEQ ID NO: 466208 - DNA, 598 bp, Homo sapiens
atcaaaagccacaattcatgaacaaaataagtttgacaaaaatagaaataattataaataagaaaaatcctagaaataaaaatacaataagtgaacaaaaatatttagtagaaaacttcagtagcaggcttcctaaatcataataaagaatcagtgagctccatgacaggatattggaaattatccagtcaaaggaacaaaaagagaaaagaataaaaaagaatgaagaaggcctrtgggagttacgggaaaccatcaagagaactaaactttgcgtagtaggtgtttagaaggagaagagagagaaaaggccaacaaagcatttttaaggaactattgagtgaaaatttctcaaatcttgggaaaacaccaccatccaggtataggaagctgatatggttgggatctgtgttcccaccaaaatctcatgttttaattataatttccaatgttggaggtggggcctggtgggagatgattggatcatggggcatatctcgtgaatggtttagcatcatccctcttgttactgtcctcatgatagtgagtgatttctcatgagatcttgtcatttaaaagtgtgtagcaacaagccctt

SEQ ID NO: 466209 - DNA, 573 bp, Homo sapiens
ttttcttttcttttttctctcctcctctttattaattttttgccttatttgcaccttgtttgttgaattagattgataggctagttcatagttatagaaacaaatatatctaggtttcagtaagtcagttttgtttttcattataccttaatggtttagtaaatataagcaaatgatagcacagttagataaaattataattcccaaagcttaattttgtaaaaaagaatgagtctgtgacaacccaaggaatgaaaaagttttaaaacatttttattaactactcaaattaaatataaaataatattcaattaaatatataaaagaccaaaagctgaaaaagattatgaatgttttccatctcagtgaatggcatcaccatttatccagttcagtcctctccaccatctgaaacaatttggctaagttgytgtaacaaaggaatccaaaaaatgctctatcacaaataaaaaatgcaaaatgagtagaacaaaggcagtggggaggctctgctccacaagactattcaagaatctgggctttgtctatcttgtcctaatgttcaagtctgca

SEQ ID NO: 466210 - DNA, 486 bp, Homo sapiens
atgagcccaacacagggggtgagggaaagctgctgacagtgacaagaatgctagagcaactcaaatgttaaatgagtgcagggactcatccctggcacctgaagcccaaagagtgaatagaagtaaaggtcgtacttaaaaatgcgtaacctttgggtttgattcctgaagattctacctactagttatgtattctgagtactaaaaaataggctctgtgagaaggacccatgcacttccatttcaaagtaaytatttttaattaaaataatttttattactgtaagagcaggttttatacaattacagattcagggatacatgtgcaggtttgttatgtgagtatattgcataatgctggggtttggacttttatggaacccatcacccaaatatagtgaacatagtacctaatatgttgtttgtcaacccttgtatccccatcctttcctctcctttcttagagtcatgaatgtctattgtttt

SEQ ID NO: 466211 - DNA, 544 bp, Homo sapiens
taacctttgggtttgattcctgaagattctacctactagttatgtattctgagtactaaaaaataggctctgtgagaaggacccatgcacttccatttcaaagtaactatttttaattaaaataatttttattactgtaagagcaggttttatacaattacagattcagggatacatgtgcaggtttgttatgtgagtatattgcataatgctggggtttggacttttatggaacccatcacccaaatatagtgaacatagtacctaatatgttgtttgtcaacccttgtatccccatcctttcctctcctttcttagagtcatgaatgtctattgttttcatctttatgtctacatattcccttkgtttagctcccacttgtaagtgagaaaatgtggtgcttgattttcggtttctgtgctgattcactttggataatggcctccagcttcacccacgttgctgctatggacatgatttcattctttttaacagcggcttagtattccatggttgtgtatgtaccacattttctttatctaa

SEQ ID NO: 466212 - DNA, 577 bp, Homo sapiens
ctgcataatgatatttcagttaatgaaagactgcatatacagtgatagtcccataatattacaaaagaactgaaaaattcctatcacctagtgatatcatagccattgtaatattgtagttgagttgatgctattgtaaacaaaaygattgccctgtcagctgtataaaaatatagcacatacaactatggacagtacagaatacttgataatggtaataaatgactgtgtaactgatttatgtatttatatatttcctatactatacttttcattattattttagagtgtacttattctacttattttttaaaaaagtaaactgtaaaacagcctcaggcaggtcctttaggaggtattccagaagatggccttgttatcatagaagatgacagctccatgtgtgttattgcccctgaagaccttccagtgggtcaagaccatggtacaagacagtgatactgacgatcctaacctcgtgttggcctaggctaatatgtgtgtttatgtcttagcttttaacaaaaaagtttaaaaagttttaaaaaagcaataaaaaatttaaaaatagaagaaa

SEQ ID NO: 466213 - DNA, 602 bp, Homo sapiens
ttgctttttcaaaatttatgtaaatttacaagctctgccttttaattagtatttagacaatttacttttaatctaattatcagtggagttgggtttcaaacccagcatcttgctgttcattcattaatttgtcctatctgttctgcgttcctttgttcctcttttctttccttctttttgaatgagcattttttattattgtactttatctacaccaataatttaatagctatactttgttttattttttaccrattgtcttagtccacttgggctgctgttaacaaactaccatagactgggtagcttataaacaacagaaatttagttctcacagttctggaggctgagaagtctaagattaaggcaccaacagatttggtgtctggtgagggcctgtttcctcgtttatagataggtcttctcactgtgttttcatagggtagaagggatgagccatttctcctgggcctctcttagaaggacactaatctcattcatgaaggctctgcccccatgaactatcacctcccaaaggccttatctcctaattccatcatcttgggagttaagattttaacatatgaattttagcaggacac

SEQ ID NO: 466214 - DNA, 635 bp, Homo sapiens
gacctgagttctcgcatttcttttccgccaggctcagcgcctccctgcctacccttcttgtccttctcagtggctccaggccctcggtctctcctccccaggttctgagtcctaacataaggggaacaactgagggtacagtcccttctttcttcccctttcttccagggctggatccagtgagctcaggttgcagagtcaaagggaaaggttctgagttgtggggttacagcgattagggatcataagctatgaagtatgcgggtgcttcggaatttgcccggaagaaaaatatctttgggtaagtcactgaatggatatggtgttctcactcagcttctgatgtgagtgagaacaggagactcggcaggggctgggcagcagaacatgtgtggactgagttcaccaggctccaggcacaggcagtgaggacctactgagggtagtgtgaacacacccmctgagcaacaaagagacccaagtgcaaggccacgaggactcaggagcccagcagggaggctcctagtgagctaagactgggagtaggggtcaggggatccacagcttggtgtctgagtcaccatgcctttgaagcccagagaaggagagggatggtaatgacatccacctgcccc

SEQ ID NO: 466215 - DNA, 567 bp, Homo sapiens
ctggggccaaggtcttgccctttatgatggagttgttcttctcaagagtttttatcttcccatcctttggaaagtttgtgagtttatttctgtgacatgcacctcttggggtatcygtccggcatctttgggagctactctctctacccacaggggtggatttcctggagctacatttggtcacagctgactgaagcaaggcctcacacaaagtgagctaatcaggtttctgctcttgggagttgggaatttgaactgatggaacaggagactgggatgcttgcaacagagtcacattaatagcatcatgggctggttgcagtggctcacacctgtaatcccagcactttgggaggccaaggcggtgggatcacttgcggtcaggagttcaagaccaatctggccaacatggtgaaaccccgtctctactaaaaatacaaaaattagccgggtgtggtggcacatgcctgtaatcccagctacttgggaggctgaggcaggagaatcctttcaacccaggaggcaggaggcagaggttgcaatgagccgagattgcaccactgcatc

SEQ ID NO: 466216 - DNA, 552 bp, Homo sapiens
gattctaacttcaaaagcaaatttagctgtattttgccacaaggtaaattattcagttcatgtaaatctttagtggatctgatcattcccattctcattcccattgattggtttattttattattattattattattattttgrgacagagtctctctgttgcccaggctggagtgtagcagtatgatctcagcttgctgcagcctccgcccccaggttcaagtgattctcccacctcagtctcccaagtagctgggattacagatgtgtgacacgacacccagctaatttttgtatttttagtagagacagggtttcaccatccaggcaagtctcaaactcctggcctcttgtgatctgcccacctcgacctcccaaggtgctgggattacaggtgtgagccaccgaacctggctaattggtttattttaagtcaatcttccttcctcagatctgtaattccctgcaactccaccccagtgtatcacaggaagagagtccctgctgtgatcatacacacagttgttgacttccactcactagatgaagtca

SEQ ID NO: 466217 - DNA, 516 bp, Homo sapiens
gcatttctagttttaaatattgtacagaaaagccaccatttcatttaggaagctaccttttggctctcagggtatatccaaataaatggttgtttactgactactgacatagacatatctcattaaaaatgttgccaaatgagaatgactgccagaaacaaggatcactagatagtgtatgtggttttggttattaccacccatttcaatccacgtgctgctgtggataaataactgttttagaattaattcaatttgattgacaatatcagaacaacctagctgtgttaaacaraaacaaaactaacaaaataatttgctttataattcacaaaaaagttataaggcattaaattgtccgttatggattaaattgtgttctactgaacttcacatgttgactccttaatctgtaatgtgtatttgaagatacagcctttaaaagggcaattgaggttaaataaagccataagggcacagccctaattcaacaggactggtgtcaaaaggagagag

SEQ ID NO: 466218 - DNA, 659 bp, Homo sapiens
aagcctaatggtggagagtttcaatatcttgggtttgcagagagagagagaagagaaatgcctcctttccttgtgtagaaacttaaaaacagttcccagatctcttcttaaacacatcaacactgtgagcaccagggttctccaagggtgctttagctgattcttcacttcttttgmcttttgaaatatatttaaagaggagaagtttgcggttggctatctggcataaaatagggtttactagctcttaagtcagtaacattagctctgttttaagagaaaatctaggaggaagacagagaggtttcgtatatgttttctgattttccttgtttttgactctggtttgatggagctgaaattagagagtaaaataaatttattaagatttttagttctacatttttaaaaatgggggtcaaatcttagatatctttttttcctgttgcatctaggaaattgtgcataagacagttaacaaaaacatgtgttgaaagtatgcctgttttagtgtaatggcaaagttaatgctatcatacctcttttatgaattgaattggctttccataaaattgtagtttttattatatgtattattactatacaacacagattctgctctcacatgcttttgtgatgtaaccttcaaatctacccct

SEQ ID NO: 466219 - DNA, 659 bp, Homo sapiens
aagcctaatggtggagagtttcaatatcttgggtttgcagagagagagagaagagaaatgcctcctttccttgtgtagaaacttaaaaacagttcccagatctcttcttaaacacatcaacactgtgagcaccagggttctccaagggtgctttagctgattcttcacttcttttgccttttgaaatatatttaaagaggagaagtttgcggttggctatctggcataaaatagggtttactagctcttaagtcagtaacattagctctgttttaagagaaaatctaggaggaagacagagaggtttcgtatatgttttctgrttttccttgtttttgactctggtttgatggagctgaaattagagagtaaaataaatttattaagatttttagttctacatttttaaaaatgggggtcaaatcttagatatctttttttcctgttgcatctaggaaattgtgcataagacagttaacaaaaacatgtgttgaaagtatgcctgttttagtgtaatggcaaagttaatgctatcatacctcttttatgaattgaattggctttccataaaattgtagtttttattatatgtattattactatacaacacagattctgctctcacatgcttttgtgatgtaaccttcaaatctacccct

SEQ ID NO: 466220 - DNA, 606 bp, Homo sapiens
taatttctgccttaaagaattcataatgcatgctttgtattaagtgaacaattttaatgagaaaaccgtatctatttgactggggaataactgttgattcgatttgaatgttattttgaatgaactagcatgrgattaacaagattttactatattgttttcccatttatatcccagccttatttttggtcataattatttattttacattatagtaagttgagaaagtgacaaggaactgagagaatgggctttaattagagtaaatgatagaaaatgtacagaggagaataattaaagagaataaataacatacaagcatgaacctgtttaattgggtgtcttttcaattctttctaaccttgagattctgtggataatagctatgtagcaggtctactcctcaatatggaaaaacaacaaggtcctcatagcattgatccgcccttctttgaatcatttatcagccaaaactttacatttacttgtgagactattggaataatggtgtaactacagtaataaatagaaaatgtagagaatgcataatgaaaaactgagtaatacattagtacaaatagagtataaaatcacatgagaacagat

SEQ ID NO: 466221 - DNA, 561 bp, Homo sapiens
tagtgaaattttaaaagtcaatacttaatcaagacaacacatgccaaaagatagaccagtattttcatctgacaaacaaaacatcagctccaggatcattattgtaaaacagagttgatgctacaattcccagcacactcagataaaaatttaccactaaagtctaattcgatttccttatcaggcaattagtatattattaaaaattcacagcagggtcaatctcctgttgatttgcataattaagttaccttctccgttaaattaagggagttttgtactcatttctagggcagattttttaggatgaaaaagattttttttcacatcataaatggaagtatccrtggctatattcttttctttttcccttttaatctttcataaagttcaagctgtcagattctggcaagagatacccagttctttctattctgttttctgttctctcactctcttgtgctctctcagaaatatctacaaataaaatgtttttttaatacatgctaaaagcatagttagtgcttcccaaaactgcaattactttttcaccaaccttat

SEQ ID NO: 466222 - DNA, 571 bp, Homo sapiens
catttccctcttgatggcatatttttattgtgggcgtttagcttattgaatgtttaaaattgtgtgttgaccacttgagtatgtgtgtatcctcccttggtatgggggtttattctagatttgggtgattgtccggccagtgtcactttggaggaagactatttgagaaaaaaatgtttgagttttttatgctcatgactatttgaactcataatttctctctctccccacagtctgcattgtagtattattttgttcagyatccttttttaatttttttggttctatatagaattataaatccctagaataactttgttttgtccatgaaagtctcagtcatagacttgttggttttttaaggagcaaccaacatatttaaaagtcactaagttatattaccttggctacatcatgttttatttcacactttgtggtactccatatgttataataaagggttaagtttttatccaagtaatagtttatgtataaagttatgcatacaatagcaaagtaaaaaggaatttagaattggtgtttaaatatttaattgatatatgaaataaat

SEQ ID NO: 466223 - DNA, 603 bp, Homo sapiens
aaagttgtttcttctttttcttttgaagaagtactgggctgaaaataataaaatggaagatagaatctgatttcctggaactgtaattgaatgttgaatagaaccatgaaatttttagttcagtaaggtggaagactaacaataccttaatttcttctaacttcctactaaaatatcagtgaagatacacaggtaatgtttgtgaagctataagttaaattagacctagaatgatgtaggtgaacaaaaatacagacatataaacttaggcatacacttcatgtcttcaaatgtagcctcaaaataacaaatcatttacatgtatttattgaagactgctaagtaaacagagaccataacatttttcatttctcttttcctttgccttcatataccacaactgttctaactactttaagaaattaattttcttaacctaaagaatttcattcaacaactgtaragcatccaatattttaacctacttgcaagctaagatgttagctttcacagtttcgtggatgctggcagaggatgtgaaacttcctctggatcaaagatgaagaatattttattactcacagaagtaacaatagccagagc

SEQ ID NO: 466224 - DNA, 532 bp, Homo sapiens
gcttccctgtggaatttatatataaatactgttgcctatatttgcttccagcctggtaacatgaaagtgaagttgaaaaggaaggagtagggcaaaaggcaggacagatttactctccagaaattgaatcaagaaaccagaaagtgaagaaccaaaccctgttgtttctatctaatctctttctctcttgctcatcctaaggtatttcatgtattttctcaattctcttcttttccaagtcagatccaccttaggctccaaataaggccatcttagactaaattttctatgaaatagattctctccgtgatctcctccaaattagggtgaagtatatggamaacagggaattctcttccagtgctctggaaagagaagatatttgttttaccagataaatagactgtctattcatagcaaaatacaaaaaatgtcaaaaagattgataaatagctaattgagtaatgacctcaaaaataagaaatgtattttaaaataaaacattgatattttcttattgtgatcactctca

SEQ ID NO: 466225 - DNA, 654 bp, Homo sapiens
gatattaatgatctaatatggttctagcgacaattaaatgagataatgtttgagaacactgagaaatgaaaaatgagagcaaattatttgataattctcaaatctagattccctgtatttgtggctactttgtacatttgttcagatagcaatgattttaacacctctgtttgttctctttttatgaagaaatataactatcaactaagtctgatccaatttttacatctgaaaacatattatcctggggtatagagccagcacagtaaatcagaacaaaggcttcatcgctgaacaatttttaaacataaagaaaaatttagtagcataatttatatgctctaaaatttgatgatcatctattatgtcctctgtattattcaatcagaaagtattattttagagaaaaactcatagaccttattctcttactcatgttgaaaatactcagaaacacaattatagggagaatatccattctacacattcacagttccagtgaattatagatgtcttcaacagtagatggccagggtgttgaacaagaaacaayttcccctggtatctttcatgacattcctgagacagacctcctctctctcatgttagaccctctacaaagggaacttgaaggctctaaatatttgttacaaa

SEQ ID NO: 466226 - DNA, 595 bp, Homo sapiens
tattttaatagctcagccttttatggagaataatttgttattcacattgaaaccccttagctctacaatggaagcaagagcttttactgataaggtacctccttgctgccatagcacacgcctaccttagaaacagttttagtaaaatttactttgaaagaacatatgatgtgtcaaaaagaaaaataatcacgaggtctatgaacctagaaagtctgaagattttagtaaatgtgactgatgatatgaacttaggtgattgcatagaatatayattttattgataaattagaagttgagaataaatctttccttgtgttgcgaaaaatagccttaggtctttagtttctgtccaggtgtgcaaatagaattgccaatttaggatggtctccttttatctatcctttattaaaaaaccgaaagccagtagagtcgagggcatagtttctctatgtgtaaataccaaagtggaaaacagcatgcttctatgcagtcccaagcctctctcaaataagtaatataaaaacctgactttttgtgcttgcttttagcaatatactcaaaagcaaacaaaagagagcatgcatacatgcaa

SEQ ID NO: 466227 - DNA, 428 bp, Homo sapiens
tctatctcattctatgaggctatttttctaatgccatcaccaccatagcaaaaacaaaacaacaacaaaaacctgtagggaaatatctctcataaacaaaaagcaaaaaaccttaacacaatattagtgatactgacaaatgaatcctaaaatttatatgaagaggcaaaagacccagaatagctaacacaatactaaagaataaagttggaagactgtcacaacctgacttcaagacttactaaaaatctacagtaatccagacagcctggtgttggtgaaacaaaagatacaccgatcaacagaatagaagattagcactataagacagggtgagaaaaaaaaaaaaattagaagagcccagaatcagacccacatmaatacagtcaactgatctttgacaaaaaagcaagggcaattcaatgggg

SEQ ID NO: 466228 - DNA, 591 bp, Homo sapiens
aattgaaactgaaagccataaaagtaaattatagaaaagctgcccaggtaggtggtgagagttccatacctgtgagtaagacacttgtcttcagaaattacttcaagtggattacccataatagaactactctagtggatgccatgtggctattaccatttacagatcccatatattgaagacattttaattactcaatcccaaacaattcaatgaggggaagtgctaactgaagcggtttttaaatgccccataaagtggggcagtaagtctcttcaatttaaggatagaagaaaaaacacaattaaatatagaaataaccacgcactyagtcacatcaaaggtcttttgttgcaatacagatttatgccaaaataggtctatatcatataattttaatggataattaaaaatatgcatttgttccaaatcaaagtgtttctctcctttccttgttctattcttatttcacgtttcatttctcatctgtaaagtcagcttcctcttgtcatttatgacttgttgaggctgtgtcttttcaataaagtaaaatatactgaaagtgttaatgacatgtaaataaaatataat

SEQ ID NO: 466229 - DNA, 600 bp, Homo sapiens
gcaattaacagtctacataataaaatgtgaaaagtaaatgtaacattccttcttggaagacaatggagaagtggaaagaatatgggctttgcaacctaattacctgaatgggaattgcagctcaaattacttagcctcactgagtcttagtttcctcatctgtgaagtgagaaaaacatttattttcctgctttaagggacatttcattatcattactgattgatgtcagtaaattggtttgtattatattcaggactgaaaygttatgtaactttaagcaaacaactctctagtcttttacgataccatttttctagttggcaactgaaaatggatgataggggctgacatgtgaagatttatttattcagaaactctaataaccttggagataactttagactaaggaataaaataaagaacacatgtttagaattacagatttgtcctttgtttcattcaatgctattaagcagaagggtacaaaacctaaattttgagagctatacacaaagaagaaacaaacaaaaaaacctatgagatgactctgcatattaaccaagaatatcaaattctagaacattattatgtgaaccaaa

SEQ ID NO: 466230 - DNA, 544 bp, Homo sapiens
atcacttcaaccccgggagtggaggttgcagtaagccgagatcgtgcctcttcactccagcctgggcaacaaagcaagattccgtctcagaaaaaaaaaaaaaaaaaaaaaaaaaaaaaaaaaaaaaatggtatgttgaatggccaaggtggaagtaggaaattcagtgaggaggtcttcgtgatgcatcaggatggcacttggcaactgcatttctatagcaagaatctcaaacagacctgccttatgctgagtttttcctttascaaacagtttgataggcaggctacagtgggttttgtatttagaaaatgtttttctgtttgatggtttttagttaatagtccttagttattggcaactcacccccttcctttctgaggagcagccagttctgcagccttctgtgtgtgaaaataaccccttgggtctcccatcttgtgctcacgcatgtggaatggcagctactggagttcgtactcgcggtgaagcctagtcatggccgtctttgacatgatggccagggacatgtggcactataccc

SEQ ID NO: 466231 - DNA, 544 bp, Homo sapiens
atcacttcaaccccgggagtggaggttgcagtaagccgagatcgtgcctcttcactccagcctgggcaacaaagcaagattccgtctcagaaaaaaaaaaaaaaaaaaaaaaaaaaaaaaaaaaaaaatggtatgttgaatggccaaggtggaagtaggaaattcagtgaggaggtcttcgtgatgcatcaggatggcacttggcaactgcatttctatagcaagaatctcaaacagacctgccttatgctgagtttttcctttagcaaacagtttgataggcaggctacagtgggttttgtatttaraaaatgtttttctgtttgatggtttttagttaatagtccttagttattggcaactcacccccttcctttctgaggagcagccagttctgcagccttctgtgtgtgaaaataaccccttgggtctcccatcttgtgctcacgcatgtggaatggcagctactggagttcgtactcgcggtgaagcctagtcatggccgtctttgacatgatggccagggacatgtggcactataccc

SEQ ID NO: 466232 - DNA, 544 bp, Homo sapiens
atcacttcaaccccgggagtggaggttgcagtaagccgagatcgtgcctcttcactccagcctgggcaacaaagcaagattccgtctcagaaaaaaaaaaaaaaaaaaaaaaaaaaaaaaaaaaaaaatggtatgttgaatggccaaggtggaagtaggaaattcagtgaggaggtcttcgtgatgcatcaggatggcacttggcaactgcatttctatagcaagaatctcaaacagacctgccttatgctgagtttttcctttagcaaacagtttgataggcaggctacagtgggttttgtatttagaaaatgtttttctgtttgatggtttttagttaatwgtccttagttattggcaactcacccccttcctttctgaggagcagccagttctgcagccttctgtgtgtgaaaataaccccttgggtctcccatcttgtgctcacgcatgtggaatggcagctactggagttcgtactcgcggtgaagcctagtcatggccgtctttgacatgatggccagggacatgtggcactataccc

SEQ ID NO: 466233 - DNA, 596 bp, Homo sapiens
cttaaaaacaacctggcaactgactttcacaggtaactcaggagagagctcttcccactggaggaatcaaagacatagaagtcaaaatctaagcagtgacagcaaaggaagggaactaacacatgttgaacacgcactccccacctggccgtcatagacattatttcatttcaccctcataataaaccccaagctaattgggaattactaagaaagcttaggtcacaacgcccataccattgcatactatgccatgctgcctcaataaggtaaacggggaggacagacgtagtcaccaaatcctgggatgtgagtacgcacactgaaacacgaggaaggtcgttctgacrtaatactatgcataccaattaaccaaacccactcctgtttcaatctaatctattcagatatctctgcaacaaatattgttgggttcaaaggaatctcttgattcaggcatatggctcagttccttggaattacatgtctgcccacgaaaggagcccaaccaagatggcaagttgcctgcaaattctcacaactccctttctggcaagaatgagttctgaggcatttctctgaattctccagctttt

SEQ ID NO: 466234 - DNA, 562 bp, Homo sapiens
agtaaccaaaaattagacaaatatcaattaagtaaatatacatgtacacacacatatacagaaatcacagatgcacaaacacacatacatacacacataccctattgtgcttttctagagaaccctgactaacacatgcccagttgsttcagcaaacaccagtctagatgttgtggggaaggtattttttagatgtgataagcatagtttgaggctttgagtaaaggacattacattccaccctccatagtatgggcaggcctcatccaatcagtgggaagcctaaagagaaaagattgaggtcccctcgaggagaaaggagttctgcctccagactaccttcagattcaagactgcaacatacacacacacatcatgatggttctatttcactcaacaatgctaatccaaagtttgctaccaagaatagctctacaggaacaaaatcttaagaataaattttctggattggctctgaggtttctggaattggttctgctaatctgattagatttaaagacatcaattactctatttccattggtgaagacagcactggcat

SEQ ID NO: 466235 - DNA, 562 bp, Homo sapiens
agtaaccaaaaattagacaaatatcaattaagtaaatatacatgtacacacacatatacagaaatcacagatgcacaaacacacatacatacacacataccctattgtgcttttctagagaaccctgactaacacatgcccagttgcttcagcaaacaccagtctagatgttgtggggaaggtattttttagatgtgataagcatagtttgaggctttgagtaaaggacattacattccaccctccatagtatgggcaggcctcatccaatcagtgggaagcctaaagagaaaagattgaggtcccctcgaggagaaaggagttctgcctccagactaccttcagattcaagactgcaacatacacasacacatcatgatggttctatttcactcaacaatgctaatccaaagtttgctaccaagaatagctctacaggaacaaaatcttaagaataaattttctggattggctctgaggtttctggaattggttctgctaatctgattagatttaaagacatcaattactctatttccattggtgaagacagcactggcat

SEQ ID NO: 466236 - DNA, 548 bp, Homo sapiens
tcttatttcctaacttgaggggaaatggtaaggagacacccttgccttattatcagagttcataattgaagggggttttaggaaaagttcctcctcagcagcttacatctctctcctggttatctgctgtttctcaataatgtttgtcatcaacaaattaatctcaacatttattagatcctactttaaaggagactcttttctgctacctaagtkgtttcctgttgtctctttttaaaacttatttttctaacaattacccagagttttgtggcttaaaagaaaaacatttattttgttcatgaacctgtggtttggaaaaagattggccaggacagcttgtctctgctcccctcaggttccctaggaagttggagaaattgaatcatctgaagctttgctcacccatgtgtttgatggttgatgctggccactggctggaacctcggctggggcaggcagcatgaacaccgacactggcactcccaggctgtctttgtggactgatctctctcacaatctgggggctgagttcgaagggaaagcag

SEQ ID NO: 466237 - DNA, 342 bp, Homo sapiens
ttgtcatcaacaaattaatctcaacatttattagatcctactttaaaggagactcttttctgctacctaagtggtttcctgttgtctctttttaaaacttatttttctaacaattacccagagttttgtggcttaaaagaaaaacatttattttgttcatgaacctgtggtttggaaaaagattggccaggacagcttgtctctgctcccctcaggttccctaggaagttggagaaattgaatcatctgaagctttgctcwcccatgtgtttgatggttgatgctggccactggctggaacctcggctggggcaggcagcatgaacaccgacactggcactc

SEQ ID NO: 466238 - DNA, 342 bp, Homo sapiens
ttgtcatcaacaaattaatctcaacatttattagatcctactttaaaggagactcttttctgctacctaagtggtttcctgttgtctctttttaaaacttatttttctaacaattacccagagttttgtggcttaaaagaaaaacatttattttgttcatgaacctgtggtttggaaaaagattggccaggacagcttgtctctgctcccctcaggttccctaggaagttggagaaattgaatcatctgaagctttgctcacccatgtgtttgatggttgatgctggccaytggctggaacctcggctggggcaggcagcatgaacaccgacactggcactc

SEQ ID NO: 466239 - DNA, 342 bp, Homo sapiens
ttgtcatcaacaaattaatctcaacatttattagatcctactttaaaggagactcttttctgctacctaagtggtttcctgttgtctctttttaaaacttatttttctaacaattacccagagttttgtggcttaaaagaaaaacatttattttgttcatgaacctgtggtttggaaaaagattggccaggacagcttgtctctgctcccctcaggttccctaggaagttggagaaattgaatcatctgaagctttgctcacccatgtgtttgatggttgatgctggccactggctggaacctcrgctggggcaggcagcatgaacaccgacactggcactc

SEQ ID NO: 466240 - DNA, 489 bp, Homo sapiens
tggcctcccaaagtgctgggattacagatgtgagccaccgcacctggtgagaaaggatcttttttttttttttttttttttttttttttttttacaaagttagagtctcacataaaccaacagaacaggcctcatgggaactggatctcttgagatgggaatctgtgggagattgattttttctctctcatactgcccctctgtgttactggggccttcttaagcaccgttctaccattttcctctctgacttaraatctctgcttccctgtaaccttggctctcctctggcactgactctgatcccaactttttatgactttccagacaagtactttaacagctaactagttcatgtccttagggtcacagattcaaaatataagatcagacatctgatcagcccattcaaagacaggcccatagtccagtcaactgtggctaggaaggcatgaatgtgtaggggagacaaaattatatctctaccct

SEQ ID NO: 466241 - DNA, 489 bp, Homo sapiens
tggcctcccaaagtgctgggattacagatgtgagccaccgcacctggtgagaaaggatcttttttttttttttttttttttttttttttttttacaaagttagagtctcacataaaccaacagaacaggcctcatgggaactggatctcttgagatgggaatctgtgggagattgattttttctctctcatactgcccctctgtgttactggggccttcttaagcaccgttctaccattttcctctctgacttagaatctctgcttccctgtaaccttggctctcctctggcactgactctgatcccaactttttatgactttccagacaagtactttaacagctaactwgttcatgtccttagggtcacagattcaaaatataagatcagacatctgatcagcccattcaaagacaggcccatagtccagtcaactgtggctaggaaggcatgaatgtgtaggggagacaaaattatatctctaccct

SEQ ID NO: 466242 - DNA, 522 bp, Homo sapiens
  misc_feature (1)...(522): n = A,T,C or G
nnnnnnnnnnnnnagcattaatgtctgcaatattcataatctatccacttctcagcaggaataacctaaaaggcttctaggcattcttatgagcagatgactatttgtggtatagatataaaaaaagagttaaaaaaacttctgaattctaaaattcaactctataattgagggatttatattatctatagactatatattatgaaccaatatatgctgtcttgaaaaccttgaaatctttatgaaaatataytataaaaaaggagttaaagctcaaatacttataaggatgaaggaggttacctaagtaagtgaagtactcaggtgggcacagtagcaaactggagaatatgtgcctcctacccagggcaacctctgcgcagcagaccaagcagtgatgtggttctggggacaccagatttgtttcttaagcctgaggtccagacttctgcatgagtccactaaagtttacatgttgactcaattcaaagaggcaaagaacaaatctatacgccacattta

SEQ ID NO: 466243 - DNA, 369 bp, Homo sapiens
tccacaggtttcaccaactagctatatttaaatgagacaaattcattttaattctatgtatttaaatcaaatccatttcatgctgaaagagttggctactatataccttcattaaaggtgtcctgtttagtctgtcacagatgtygatctggcatcttctgtgcagcaagagagtgaccacttgcacacggccatgggcacaggccaaatgtagaacagtcctaggagagcgagaggggttttcagcaaatgtagtgcaatatctcaaaacctacaatggtccatgtcattgtaaacattgaatggcattattcctctgccttcaaaacaaataattttcttttgaagaaagtacaatatttattagct

SEQ ID NO: 466244 - DNA, 369 bp, Homo sapiens
tccacaggtttcaccaactagctatatttaaatgagacaaattcattttaattctatgtatttaaatcaaatccatttcatgctgaaagagttggctactatataccttcattaaaggtgtcctgtttagtctgtcacagatgtcgatctggcatyttctgtgcagcaagagagtgaccacttgcacacggccatgggcacaggccaaatgtagaacagtcctaggagagcgagaggggttttcagcaaatgtagtgcaatatctcaaaacctacaatggtccatgtcattgtaaacattgaatggcattattcctctgccttcaaaacaaataattttcttttgaagaaagtacaatatttattagct

SEQ ID NO: 466245 - DNA, 369 bp, Homo sapiens
tccacaggtttcaccaactagctatatttaaatgagacaaattcattttaattctatgtatttaaatcaaatccatttcatgctgaaagagttggctactatataccttcattaaaggtgtcctgtttagtctgtcacagatgtcgatctggcatcttctgtscagcaagagagtgaccacttgcacacggccatgggcacaggccaaatgtagaacagtcctaggagagcgagaggggttttcagcaaatgtagtgcaatatctcaaaacctacaatggtccatgtcattgtaaacattgaatggcattattcctctgccttcaaaacaaataattttcttttgaagaaagtacaatatttattagct

SEQ ID NO: 466246 - DNA, 369 bp, Homo sapiens
tccacaggtttcaccaactagctatatttaaatgagacaaattcattttaattctatgtatttaaatcaaatccatttcatgctgaaagagttggctactatataccttcattaaaggtgtcctgtttagtctgtcacagatgtcgatctggcatcttctgtgcagcaagagagtgaccacttgcacacggccatgggcacaggccaaatgtagaacagtcctaggagagcgagaggggttttcagcaaatgtagtgcaatatctcaaaacctacaatggtycatgtcattgtaaacattgaatggcattattcctctgccttcaaaacaaataattttcttttgaagaaagtacaatatttattagct

SEQ ID NO: 466247 - DNA, 446 bp, Homo sapiens
tggcatgagccacctcaccaaccaggtgttccatggaatggtttgagaggcagttctacacagaagccagaagggctgggtctgaatcccagatctaccagatactagcygtgcgaccttgagcaaattaattttctgtgtctccggttctttatctatgaaatggagagaataataccatctacttcactgggatgttgggaagattaaaccagggactgacatgaagcacttagaagagtatgtggtgcatggtgagctacaggtaagatttgcttagaagcacttagaagagtacatgtacatagtgagctacagacaatatttgctattagcatgataattttcactgttttttatctcttgaccattgtatgtgttagggaggtggcattccaatggaagtggccttctatagatgcactgaatcattcttcacaccactg

SEQ ID NO: 466248 - DNA, 610 bp, Homo sapiens
tgagccacctcaccaaccaggtgttccatggaatggtttgagaggcagttctacacagaagccagaagggctgggtctgaatcccagatctaccagatactagccgtgcgaccttgagcaaattaattttcygtgtctccggttctttatctatgaaatggagagaataataccatctacttcactgggatgttgggaagattaaaccagggactgacatgaagcacttagaagagtatgtggtgcatggtgagctacaggtaagatttgcttagaagcacttagaagagtacatgtacatagtgagctacagacaatatttgctattagcatgataattttcactgttttttatctcttgaccattgtatgtgttagggaggtggcattccaatggaagtggccttctatagatgcactgaatcattcttcacaccactgaaagtggcagcaaatggggagtgtataatttatagcttactcttctctctgtgtgactcagtgggcaacagtcacgtatgtactacaatggaaacagcacctcctggattgagtagtacataaccgacatgaccagcagagacaggctgagccacggagctgaaaaccc

SEQ ID NO: 466249 - DNA, 446 bp, Homo sapiens
tggcatgagccacctcaccaaccaggtgttccatggaatggtttgagaggcagttctacacagaagccagaagggctgggtctgaatcccagatctaccagatactagccgtgcgaccttgagcaaattaattttctgtgtctccggttctttatctatgaaatggagagaataataccatctacttcactgggatgttgggaagattaaaccagggactgacrtgaagcacttagaagagtatgtggtgcatggtgagctacaggtaagatttgcttagaagcacttagaagagtacatgtacatagtgagctacagacaatatttgctattagcatgataattttcactgttttttatctcttgaccattgtatgtgttagggaggtggcattccaatggaagtggccttctatagatgcactgaatcattcttcacaccactg

SEQ ID NO: 466250 - DNA, 610 bp, Homo sapiens
tgagccacctcaccaaccaggtgttccatggaatggtttgagaggcagttctacacagaagccagaagggctgggtctgaatcccagatctaccagatactagccgtgcgaccttgagcaaattaattttctgtgtctccggttctttatctatgaaatggagagaataataccatctacttcactgggatgttgggaagattaaaccagggactgacatgaagcacttagaagagtatgtggtgcatggtgagctacaggtaagatttgcttagaagcacttagaagagtacatgtacatagtgagctacagacaatatttgctattagcatgataattttcactgttttttatctcttgaccattgtatgtgttagggaggtggcattccaatggaagtggcctyctatagatgcactgaatcattcttcacaccactgaaagtggcagcaaatggggagtgtataatttatagcttactcttctctctgtgtgactcagtgggcaacagtcacgtatgtactacaatggaaacagcacctcctggattgagtagtacataaccgacatgaccagcagagacaggctgagccacggagctgaaaaccc

SEQ ID NO: 466251 - DNA, 610 bp, Homo sapiens
tgagccacctcaccaaccaggtgttccatggaatggtttgagaggcagttctacacagaagccagaagggctgggtctgaatcccagatctaccagatactagccgtgcgaccttgagcaaattaattttctgtgtctccggttctttatctatgaaatggagagaataataccatctacttcactgggatgttgggaagattaaaccagggactgacatgaagcacttagaagagtatgtggtgcatggtgagctacaggtaagatttgcttagaagcacttagaagagtacatgtacatagtgagctacagacaatatttgctattagcatgataattttcactgttttttatctcttgaccattgtatgtgttagggaggtggcattccaatggaagtggccttctatagatgcactgaatcattcttcacaccactgaaagtggcagcaaatggggagtgtataatttatagcttactcttctctctgtgtgactcagtgggcaacagtcaygtatgtactacaatggaaacagcacctcctggattgagtagtacataaccgacatgaccagcagagacaggctgagccacggagctgaaaaccc

SEQ ID NO: 466252 - DNA, 567 bp, Homo sapiens
gttttgtttaggcagtcagttgagttactggaaaccctttttgtgtggctttgttcatactytgataggctgggtttatgatggcattgagcttaatcttagggcatggtccttttgctaagatgtagtgttcactcttctgtagtttcattgaaatgccaaggtgttccttaaggtctctcctctcttagtagccagaagtgctcacatacctctcagcccaagcagatgacctctgctaggctcaggaagcctcagcctgtgtaattagacttgctcttgctcactattacatgttgaaatctgtggtataatatgaaaaaatatatctgctctttgtccccagttcttgacacagtgctcctaaactcttagaatatcctgagtgacaagagtgtcttatgtcattcataacaagccccttttcatcacacctgaacttatggtaatgaggtgacttagggtgaaccccaagacagcctcagcatgggactagttcgcagaaacaccaaattattagagagttggagctttctgccctaatatccaacctccagggaagggatg

SEQ ID NO: 466253 - DNA, 498 bp, Homo sapiens
aaacctagagatactgagatatagagatttttcagtaaaatagcccaatcagatcaccccacagtgaaggccaccaatcaacaatccttaccatgcctagcctcactctcaatacaaccaagagtcacctttgagggaaacttccaccatgaaaatgagattaaaataaactaacagaataagagaacaccagaggaaacatggacaaagtaggatggggttcaggaaaaaaaatgtttttctatgaactgtcttgaaaattctcataaataagggaaggtattatagcatccataatagacaggaatctataagaagaaacacttgggagtaaaataaaggatatcttagaattaaaactaagcagaaattttaaaaatccataaagtatttgaaaaataaagatgaggaaatttcccagaaaaccaaaccaaaagacagaaaaaygtagataaaaaataagaaaatttatctgctcaggggaaaaaaaataatcaa

SEQ ID NO: 466254 - DNA, 532 bp, Homo sapiens
cctcaaatgcatgactactacagtttgagggttgactggtcttagatccaggctgtgagttgggttcaggtctgttccttgtgcattttttatctgggggctcagactaaagagacagtgtccacccagccctgctcttctcgtggctatcacaggaagtaggaggtcaagccacactctgtggaagcaggtggaatggcacttgccgtggccaatggagtgtcaacaggttgcaagtatacggccaaggccaatgtccctggagcagggaaataaacttcacccacaaaggaaggggtaacagagtgaatatttgctgaataaacctaactctcaccagactcccaaatttgttctttcagaagctatgaaacttggttgctggatcgttacmctgaggctaataatgaaaggaaggcggaataaagggccttggttagctacaggatcctatcggacaggaaggattgctgtttggcagagggtgggcatttctgaagatcttcagggtaagctcattttgtcttttgag

SEQ ID NO: 466255 - DNA, 582 bp, Homo sapiens
atccctccagttttgttctttttttttaggataactttggctatcctgggtctttaattgttctatgtaagttttatgattgatttatctatttctctgaagaatgtcattggttttttgatagagattgtattgaatctgtagattgctttgggtcgcatggacattttaacaacattaattcttctaatccatgaacatggactatttttccatttttatggtgtccacttcaatttctttcatcagtgttttatagtttttattgtaaagaattttacctttttggttaattccaaggtgtttaattttatgtgtggctactataaatgggatgactttcttaatttctctttcagagtgttcactgttgtcatatagaaatgctactgatttttgtgtgtggttttgtattctgcaactttacttaatttatcagttctaacagcttttgatggagtctttaggtttttctaaataygagatcatattgtctgcaaacaacactaatttgatttttttccttccaatttgaatgccctttatttctttctcttgtctgattgctctagctaggactcc

SEQ ID NO: 466256 - DNA, 331 bp, Homo sapiens
gatatcctgtttcttaagacactgataataaatacactaaaaagggaatatggatgtgtttataggaaaagctaatagtttgcttgtgggcattctaaatggtggatgacaagcttaactttaaacgttttttttttaatatttatgttttttttctagtgagtgggtctccaggcttctatgacttgtgttaccaggctaaagataaagatggaatcctcgttaaatcagaccatgccagtctcaaaattgagagactgaycacaagggagaaattgttaaatgaaataagtggaagaccattgtcccaatgctgtctttctactttcag

SEQ ID NO: 466257 - DNA, 589 bp, Homo sapiens
ctaaatttctggaattgccaccactcatctgagcacgcacatcacctcaagaaaggaaggttagtgtcaagataaaataccttcaagattattttgttctacaccaacaaatccccaagttttccttgaaagcagaaatctgaaattcattcgtgcaaagcagaattccmaaaaatattctacaatgaaggaaataaaatccttagtgtaaaatagaaattatgcattgaagcgatcctcacccagggagaccaggtttctgtagttttctaacatcacgtccctatacagattctgctgagcagggtccagatagctccactcctccggagagaattctatggccacatccctgaatatcaacagtccctggcaaagaaaaaacacatacgtatcaagtggtcatgggcagagttcttaatctgattccaggcacaaagagagacagagagaactggttcttacttatagaagagactgaaatgatcaaataattgtaaacacagaaatattctctaacatattctttaatcctgaagaaagaggatggcataagctccacataaccagtgtacatattctactcttg

SEQ ID NO: 466258 - DNA, 554 bp, Homo sapiens
agaaagtgtcttcactagttgctatttaaatatcttactcatgaaaattttacaaaaaaaatccatgaccacatgaacactttgygaggatctatccaaaggtcgttaaaatggaaataagtgtcctgagatttaaccttcatcataactctgcttctttatcttttttcgttgccctattagattgttatttgccattaacctgcatgatgtcctgtctttaccgcttactatctatatgatttgagtcaagtctgttaaccttgctgagtttctgtttgaaaaatctgtaatatgggggtaaaatgagaatgccgtatttgttcctggggcttttgggagaacggtgtgaggtaatgtaaggttctcagaagtcaacagatagtctccatgaccatggtggatttggtgctgacacagcgatggaggttatcctccatatgctcattggttatgacatggggacaaggaattgaactgacattggatttctcttagactcataagcaaatttttagcaatgcttatgaggtgctttgaggtctggccctgcc

SEQ ID NO: 466259 - DNA, 554 bp, Homo sapiens
agaaagtgtcttcactagttgctatttaaatatcttactcatgaaaattttacaaaaaaaatccatgaccacatgaacactttgtgaggatctatccaaaggtcgttaaratggaaataagtgtcctgagatttaaccttcatcataactctgcttctttatcttttttcgttgccctattagattgttatttgccattaacctgcatgatgtcctgtctttaccgcttactatctatatgatttgagtcaagtctgttaaccttgctgagtttctgtttgaaaaatctgtaatatgggggtaaaatgagaatgccgtatttgttcctggggcttttgggagaacggtgtgaggtaatgtaaggttctcagaagtcaacagatagtctccatgaccatggtggatttggtgctgacacagcgatggaggttatcctccatatgctcattggttatgacatggggacaaggaattgaactgacattggatttctcttagactcataagcaaatttttagcaatgcttatgaggtgctttgaggtctggccctgcc

SEQ ID NO: 466260 - DNA, 554 bp, Homo sapiens
agaaagtgtcttcactagttgctatttaaatatcttactcatgaaaattttacaaaaaaaatccatgaccacatgaacactttgtgaggatctatccaaaggtcgttaaaatggaaataagtgtcctgagatttaaccttcatcataactctgcttctttatcttttttcgttgccctattagattgttatttgccattaacctgcatgatgtcctgtctttaccgcttactatctatatgatttgagtcaagtctgttaaccttgctgagtttctgtttgaaaaatctgtaatatgggggtaaaatgagaatgccgtatttgttcctggggcttttgggagaacggtgtgaggtaatgtaaggttctcagaagtcaacagatagtctccatgaccatggtggatttggtgctgacacagcgatggaggttatcctccatatrctcattggttatgacatggggacaaggaattgaactgacattggatttctcttagactcataagcaaatttttagcaatgcttatgaggtgctttgaggtctggccctgcc

SEQ ID NO: 466261 - DNA, 594 bp, Homo sapiens
catttcttccccagtacatgggtcggcaaccttgggtgtgactctcatatgttccttggccttatttttacttaatatactgagtmtctttaattatttatgatttaacaagctaattactctcctcaagattctctctggttcgtcaatgacctcctcaaatgcatcatttaaaattagcccacatattctaaatgtgctctgaccagggcaaaaaaaaaaaaaatactgaaactataattacacattagggacactgtagttctattaatgcagcatgtctttttggctcctattggatttattgcccactataaccccatgtggaattccctcaaaacaggcactatttcatacaattacaattgaattttgggagacaatggttagatttcatcttgctgtctttgcgcggttctgctagcttgtcaaaatctttttgaacatcgggagtatccactgccacaccagccttccctgccaggtttgtgtcatctgtaaaccaaataaacctgccttctgtgtcttcatccaagtcattgataaaaaggttaaggatactagatcagtcattcactcaacaaacacttatca

SEQ ID NO: 466262 - DNA, 594 bp, Homo sapiens
catttcttccccagtacatgggtcggcaaccttgggtgtgactctcatatgttccttggccttatttttacttaatatactgagtctctttaattatttatgatttaacaagctaattactctcctcaagattctctctggttcgtcaatgacctcctcaaatgcatcatttaaaattagcccacatattctaaatgtgctctgaccagggcaaaaaaaaaaaaaatactgaaactataattacacattagggacactgtagttctattaatgcagcatgtctttttggctcctattggatttattgcccactataaccccatgtggaattccctcaaaacaggcactatttcatacaattacaattgaattttgggagacaatggttagatttcatcttgctgtctttgcgcggttctgctagcttgtcaaaatctttttgaacatcgrgagtatccactgccacaccagccttccctgccaggtttgtgtcatctgtaaaccaaataaacctgccttctgtgtcttcatccaagtcattgataaaaaggttaaggatactagatcagtcattcactcaacaaacacttatca

SEQ ID NO: 466263 - DNA, 635 bp, Homo sapiens
agttctattaatgcagcatgtctttttggctcctattggatttattgcccactataaccccatgtggaattccctcaaaacaggcactatttcatacaattacaattgaattttgggagacaatggttagatttcatcttgctgtctttgcgcggttctgctagcttgtcaaaatctttttgaacatcgggagtatccactgccacaccagccttccctgccaggtttgtgtcatctgtaaaccaaataaacctgccttctgtgtcttcatccaagtcattgataaaaaggttaaggatactagatcagtcattcactcaacaaacacttatcaaacacctacaatatatacrtaaggtgctcaagacagaaaccagaggataaactgtatttgtactgaggcagatcctaaagttgtttgctttctgttaacaatgagatggacttcattccatgaagatttaattcaattcattaggtacttattgatcacttactcttctcttggcatcatgctaagctttgttaaggaaacaaagcaaccaaaagctacaaccctgttctctagaagtttgtcctctcagtagagaggcaagctttggcacacagaaaattttatgatacaagacaggcag

SEQ ID NO: 466264 - DNA, 537 bp, Homo sapiens
accctcccctcccacctcatcaatattactttcaatgaatagggagtgctatctcttgagtagttttactctttgttagatctaataattagaacgacattctagcatttcctgtgttaaatcaaaaattacttccctgtacctttctatctaaagtgtaaacactcagtaattttgttgrataattaaatgaatgaattctaaatctgttctctgaaactggaaaaaaataggtctgatctaatcatttgaaggcaacaattatgtcctcattcagtcttgacttctttatcctaaacatacacaattccttcatttgatatggttttgggacctccccatccccacatcattcttgtcattcatattttgactctgtgcctggcatgatacaagcactcaagatatgtcaactgaattaatacatgaatgaataaactggaaagctccaatatgtcaatatcagcctcaaagagaaatttccataactgaacatattgctgaaaatgtgatcagaaagtgaacctgttgcagttc

SEQ ID NO: 466265 - DNA, 474 bp, Homo sapiens
aataagacaaaaggcacaaatgatatcatctctgggcccaaaggcttggtgcagtggcctgaatacagtaaacatgtaataactgttgtctatttttattgttgttattcttattaaggagacatcaagagttcacatatttatatcatgactagtacaaaggtcttcatgaacatttyccgatttattaatctggcatctctggatgataggcaagaagcacttagaactgcctgagcctttcagattgttttcaaaatcaacagatttgtctcttacacagtatcactaccataaaattcactaccggaattgtttgttgctcttagtttgaggctcagcatttcttttctatgctgaacttttgtcttctagtgtatttgttttgtcttcataaagtagatggagaaataaagacacaggatacttgagccagggataagccagaataagaacttaattctaccaattacc

SEQ ID NO: 466266 - DNA, 474 bp, Homo sapiens
aataagacaaaaggcacaaatgatatcatctctgggcccaaaggcttggtgcagtggcctgaatacagtaaacatgtaataactgttgtctatttttattgttgttattcttattaaggagacatcaagagttcacatatttatatcatgactagtacaaaggtcttcatgaacatttcccgatttattaatctggcatctctggatgataggcaagaagcacttagaactgcctgagcctttcagattgttttcaaaatcaacagatttgtctcttacacagtatcactaccataaaattcactaccrgaattgtttgttgctcttagtttgaggctcagcatttcttttctatgctgaacttttgtcttctagtgtatttgttttgtcttcataaagtagatggagaaataaagacacaggatacttgagccagggataagccagaataagaacttaattctaccaattacc

SEQ ID NO: 466267 - DNA, 474 bp, Homo sapiens
aataagacaaaaggcacaaatgatatcatctctgggcccaaaggcttggtgcagtggcctgaatacagtaaacatgtaataactgttgtctatttttattgttgttattcttattaaggagacatcaagagttcacatatttatatcatgactagtacaaaggtcttcatgaacatttcccgatttattaatctggcatctctggatgataggcaagaagcacttagaactgcctgagcctttcagattgttttcaaaatcaacagatttgtctcttacacagtatcactaccataaaattcactaccggaattgtttgttgctcttagtttgaggctcagcatttcttttctrtgctgaacttttgtcttctagtgtatttgttttgtcttcataaagtagatggagaaataaagacacaggatacttgagccagggataagccagaataagaacttaattctaccaattacc

SEQ ID NO: 466268 - DNA, 635 bp, Homo sapiens
atgaatgaataaattctctgaaacccctctctaaggtctgcctttgttcaaaccttcatctctcacttggaacactgcaatagtctcctgcccactttccctgcctgcaatgttaccccaactccaatccatcctccccactcctcttttgaaaaaacagactgaataacatcacaatcctgtttacaaacttctgatctgactttccacaaccatcagagtatattcaaataagatatacaaaatccttcacattttggcgttaatcttactctcactcacaccaggatctcagtgctccagagcaacactacaatccagcccttcctctcatgcctggatacaaccctaccctgcaactcagtacagactaagctgcattttctaacaacatactcattttcatttcatcgccggcaagttacctactctgccaagtcctagttacagtttcatacccattgtgaaaccttttctaaatagttccaagtcctttgccctaatacacatatacacaccccaagaggaatgattgcgccagactctatgatctcatagcactttatatctctaygataatattaatgtatattttattttattataggagtttcttatcccctgaggaacctggg

SEQ ID NO: 466269 - DNA, 598 bp, Homo sapiens
gaaacagccctatgggatgtcaggcatgtgcctgggattcagcctggtgaggggagctcctcagagcgagttctctaaggaggctgctccatgcctgccattattccagagctaatgagactctggaaaagcaggatgctggggagactcagagatgaggggtcttctttgtgaagaggtttgcagggagaatgaaagtctgttyaggtgcgggagggtgaggagagaacagatggattgggattgaccttcctggaagaattggaacagtccatcaacaacccctcctttgtcctcagatgttgcctgataaccagcctgagatttgcttggagattgccttttaggtgaggagttccacgtgatgttatcaggagagggaaagagcttgctctgagtgatcttacattaattaccttgctttgcaaaagcaggcagaggacctgtggcttggagttaaatggcggagtttttgaccaagcgaaaaggagaatagggaagagggatgactggaagcagaactctgttaacctgaatgtaagacggtgagttgaggctggatccacagtatccaacaggaatatgatgtcagccacct

SEQ ID NO: 466270 - DNA, 546 bp, Homo sapiens
atgattgatagcaattctcatttccagcctcaggagaatgaacagccagtggccctacaaccatatgctccaaaccagggtgaacacaatgctcaaagattgagattataatcaccctgtcctgactgggccactaaagtcacgttagacagtgctatactacatgatgcagtgtttgtaaagaaaagycaaaaaaaaaaaaaattaagtgtggctgatgttattctttcttggaagaaataaactcagacctgaagagaggagttgggggaaaaaagcatacaattaggaagttaagaaggaggatagcatcagtaagataatgcatgtgaacatactttatgaggtgcataggaattctgtacatgtaactggacattgttatcattattgctgataactccaccttacaggaggggaaacagggctttgaacagtaaagagatacagagaggtaaagggaggaacttacctgagcccaagatttgggctctgaagtccatcatcagccaaatgcaaggcatgccacaattgtgtcaataatta

SEQ ID NO: 466271 - DNA, 546 bp, Homo sapiens
atgattgatagcaattctcatttccagcctcaggagaatgaacagccagtggccctacaaccatatgctccaaaccagggtgaacacaatgctcaaagattgagattataatcaccctgtcctgactgggccactaaagtcacgttagacagtgctatactacatgatgcagtgtttgtaaagaaaagtcaaaaaaaaaaaaaattaagtgtggctgatgttattctttcttggaagaaataaactcagacctgaagagaggagttgggggaaaaaagcatacaattaggaagttaagaaggaggatagcatcagtaagataatgcatgtgaacatactttatgaggtgcataggaattctgtacatgtaactggacattgttatcattattgctgataactccaccttacaggaggggaaacagggctttgaacagtaaagagatacasagaggtaaagggaggaacttacctgagcccaagatttgggctctgaagtccatcatcagccaaatgcaaggcatgccacaattgtgtcaataatta

SEQ ID NO: 466272 - DNA, 518 bp, Homo sapiens
atgaacagcattacattgcattaatcaggaatttttctaaatagtgtttttcagattcaccaaaactataagggtggtcactccgatgatactttttaactttgaaaacatacttacacatttatgtttgaaaggtgcatgttcataaattatttatatgcatttaaaataatgtttgatatgttgctcataaaaaagaagaaaagcaaacaaaaacaaaaacaaaacaaaaaaaacaacccaygcaaatccagttatactcactgagataaaaaatatctggctacttcggaagctgaggaagaaggatcccttgagccctggaatttcaggctgcagtgagctatgacaaggacactactgcacaccttcctgggcaattgaatgagaccgtgtgtaaaaaaaaaatctatttatctgtctatcatcttatatctatctaacaagtgggaaacaaaggtcctccaatatcctagcagacctacaaatgtttgtaattatttaattgtttgggactg

SEQ ID NO: 466273 - DNA, 518 bp, Homo sapiens
atgaacagcattacattgcattaatcaggaatttttctaaatagtgtttttcagattcaccaaaactataagggtggtcactccgatgatactttttaactttgaaaacatacttacacatttatgtttgaaaggtgcatgttcataaattatttatatgcatttaaaataatgtttgatatgttgctcataaaaaagaagaaaagcaaacaaaaacaaaaacaaaacaaaaaaaacaacccatgcaaatccagttatactcactgagataaaaaatatctggctacttcggaagctgaggaagaaggatcccttgagccctggaatttcaggctgcagtgagctatgacaaggacactactgcacaccttcctgggcaattgaatgagaccrtgtgtaaaaaaaaaatctatttatctgtctatcatcttatatctatctaacaagtgggaaacaaaggtcctccaatatcctagcagacctacaaatgtttgtaattatttaattgtttgggactg

SEQ ID NO: 466274 - DNA, 482 bp, Homo sapiens
gtttttgaacaaaaaataataataataaagtcaacatttttaatcaaattaaaatcctggctatatttattctaggcattggcggtaattcaacataatttaagaaagtgaaactgtttttgagaaggaagtatgtagtatgctttcaatttacatagaagattctgaggaccctaactcagaaatcaagtttactcattagaaggtggcatttcagcatgtggtctgagattctctgtgagtcatctgcttcagtggtgacrcacacactgttttattaacagcatcaagacatgaaaagcaattgtgttttttagaggctctttctattaacacagtgtaaaagactccagttttacttaaaatgaacaaaacaaaaatgcgatcgaaaaacgaaatgttcccactcaaatgtatgcttctgtttcatcatgtttgtttctcactttgatgcttagattgaacagtttcacaagtaaata

SEQ ID NO: 466275 - DNA, 609 bp, Homo sapiens
atgtaattatcatgaatccttataattttatgttgttttgtcatccactttgaatatagattaacttttttgtaccacaagtagggwtcagtcaaccttgacatagtttccagttttttgtctcctcccaattcctcaaggtggttgacctatatatttacctgtacaactgcctcctggtgacccctccctatgtaagagctagatacaacctacttaactcaccccactgaccttgatatcccacataaattatgtagacatatggcaatggccactagtcagagcatgaccccatggaacctgcccctgcctgctctaaagccaccaagtagagctcccccaggaaacttgcttgggtaacatgctggaccccaagaaaggccttgatccacaggcctcttgctcaaacttgctcttctctctcacacacacttcttacctgctggttgagcacacctgtcctgtctgactttcctgtttccatcgactccgtgaggtgtgctgccctcttccctctgatctgtaagaaatacactgttcctgttatttcatgtgttttgttgagttgctcctctgtgtctcacctgaccaactcacccaaaccta

SEQ ID NO: 466276 - DNA, 609 bp, Homo sapiens
atgtaattatcatgaatccttataattttatgttgttttgtcatccactttgaatatagattaacttttttgtaccacaagtagggatcagtcaaccttgacatagtttccagttttttgtctcctcccaattcctcaaggtggttgacctatatatttacctgtacaactgcctcctggtgacccctccctatgtaagagctagatacaacctacttaactcaccccactgaccttgatatcccacataaattatgtagacatatggcaatggccactagtcagagcatgaccccatggaacctgcccctgcctgctctaaagccaccaagtagagctcccccaggaaacttgcttgggtaacatgctggacyccaagaaaggccttgatccacaggcctcttgctcaaacttgctcttctctctcacacacacttcttacctgctggttgagcacacctgtcctgtctgactttcctgtttccatcgactccgtgaggtgtgctgccctcttccctctgatctgtaagaaatacactgttcctgttatttcatgtgttttgttgagttgctcctctgtgtctcacctgaccaactcacccaaaccta

SEQ ID NO: 466277 - DNA, 609 bp, Homo sapiens
atgtaattatcatgaatccttataattttatgttgttttgtcatccactttgaatatagattaacttttttgtaccacaagtagggatcagtcaaccttgacatagtttccagttttttgtctcctcccaattcctcaaggtggttgacctatatatttacctgtacaactgcctcctggtgacccctccctatgtaagagctagatacaacctacttaactcaccccactgaccttgatatcccacataaattatgtagacatatggcaatggccactagtcagagcatgaccccatggaacctgcccctgcctgctctaaagccaccaagtagagctcccccaggaaacttgcttgggtaacatgctggaccccaagaaaggccttgatccacaggcctcttgctcaaacttgctcttctctctcwcacacacttcttacctgctggttgagcacacctgtcctgtctgactttcctgtttccatcgactccgtgaggtgtgctgccctcttccctctgatctgtaagaaatacactgttcctgttatttcatgtgttttgttgagttgctcctctgtgtctcacctgaccaactcacccaaaccta

SEQ ID NO: 466278 - DNA, 412 bp, Homo sapiens
tctgtggcctacttggctcatgcacacagaacagtttattgaatgaactaaattacataggrggcagcataaagccactttattctttcccaaaattgtcctgtcattgatttagtctctcagcttgcttttcttacacaggataaaagatctggtttgtcagtcattagaaaaccatattctattgcgttaataataaaataaagagacatgaaaattccaaactttttgtaagttaagtgaaattcacggctatccaaagccagaaaaatcacaatggggaggaaggacttggtgcttcctttttctttttcttgcttaatctcatcctctatcttagccgttgtttgtggctttactatatttgggacaagaggacagagaggcaggagaggtaggagacataactgcg

SEQ ID NO: 466279 - DNA, 617 bp, Homo sapiens
tattagtacatgaacatttaaaacatttatatgtaaaaatatagtataagtacataaatatacgttatattttggtaacattactttcaagaattttggtacaacattttatgtgtgttatcaaggagaaattaagtaactgaagagactaagagaattccttaattctaacttatgtacatataaaagggtacatgttaagtattattaattttctgaaactttattttttcatatgttttaattattcatttttaaaaatacttcaacttttactttagatttagggtgtacatgtgcaggtttgttacatgggtatattgcatcatgctgaggttttagtacaagtgctcccatcacagaggtagtgagcatagtacccaataggttttcaaccccttctcccaccttcccttcccctctagtagtctccattgtctattgttgacatctctatgtgcatgagtacccaacttttaactccctcttaagtgagaacacttgstatttgaatttctgttcctgcattaattcgcttaagataatggcctccagatacatccatgttgctacataggacatgatttcattccttttatggctgcttgtattccatg

SEQ ID NO: 466280 - DNA, 581 bp, Homo sapiens
tttacttcagttttaaaaaataactaattaaaagaacttggacaagtccattatttttatattgttctttcttaatggatatcaccacttctatccctaataggaatctcttgtagttagtgtaaaatgatagaaattgcagcattaaggaaactgtactataatgaagtgaatttttttagctatggaaatgtttgtaattaaaaataactatactaataaactattagaaggaatataataaactctgtcaccgagttatctatcgacttaaaagggaatttcttatattacaataaaactttgattaacagttttagtaatgactatgctccaaggttatttattgcctcctcaaaatatttttaatcgtgtttaatagcattttagtttttaaaattattttgctatgcattgtaattgcttatgtagctttcaaaaatggataatagttatatggcataacaattacaaaatctagaatgtatcaaactattattattgaatatytgtcgaatgtgaagtgagttttgaaatacattaaccacataaatctaataaaaataagttagcaaaatcta

SEQ ID NO: 466281 - DNA, 579 bp, Homo sapiens
ctggtgacaatgtggagcaacaggaactcattcattgctggagggaatacaaaatggcacagctactttggaatatagctttgcggtttcttacaaaattgaacatactcttactgtattatctagtaatcacctttcttaaattacccgaagaaactgaaaacaccaaagcctacacacagatattcatagcagctttttttttcataactgccaaaatttagaagttaccaagatttccttcaataagtgaatgggctaataaactgtgatacatatagatgacagaatattatccaacattaaaaataaatgagctatcatgccatgaaaataaatgaaggaaacttaaatgcatgttattaaataaaagaagtcaatctgaaaaggctacaaactgtagaatttcaagtaattttatagaacactctagaaaagaaaaaaacatggagacaataaaatgattggtggttgctaggagttgggttgagggaggaatgactaggcagagcacggaggatttttaggacacggaaaayacactgaaatgacactataatggcagatatgtgaataaac

SEQ ID NO: 466282 - DNA, 623 bp, Homo sapiens
ccatttgtatagcttctttggagaaaaatctcaagtattttgcccatttcttaattgagtttttttttattattattaggttgtagaagtcctttatatattgtggatattaaccctttatctaatatatgctttgcaaatattttctcagattatgttggttgccttttcactttattgtttcctttgctgcacaaaatattttaagtttaatgtagtataatttattttagtctttttcacctgtgcttttggtttcattggaccttctaatgccctgaagcttttctcttatgttttcttctaggagttttatggttttaggccttatgcataaatctgtgagttaatgtatatatatgttgtaaaataagacccatctccatatttggcatgtggatattcagtttcccaaacaccacttgttgttgttttatgtttaactttactttcaccagtttagtataaaggatacaattcaggaacagccaagaggaagagatgtaaatggcraggaaagatggagcgagtaggtaaccctgctaaatagccatgattgagaaaatcccccttcagttgtgctctccaagagcagcttactgcaaagagacatgcttaccatt

SEQ ID NO: 466283 - DNA, 576 bp, Homo sapiens
aattctccaatctgaaaaaaaagaaaaacatatttttatgaacgtttgcaacttaccagtttatctaccacactttataatgggaatgtattcatttttctgcagctgtaatgagaaagatacgtttcctatttcttttcctgggtagcattctcaaaattaagccctgggattctgttcaaaattaccctaaaacagaccagacttcagaaccttgccacaatcactctatgaaagaaaaaaggtaaattaaaatatttaacaaatgrattataagactagatacttattgattttcttctttgcaatttttaactaatttatttatgttaaatttcaacttttattttagattcaggaagcacatgtgcaggtttgttacacaaatatattgcataatgctgaggtttggggttcaaatgatcccatcacccaaatagtgagcatagtacccaatgggtagtttttcagcccttgacccactccttccctacaccctctaggagactccaaggttcatgtgtgtccaatgcttagttccctattttaagtgagaataggtgggatttggttttc

SEQ ID NO: 466284 - DNA, 394 bp, Homo sapiens
gattctgtttattctgttgttgagagttgctgaatcacaatagctgtatttgaatacatatattcctaatatgtgtaatctcagcctaacatagaaaactaatgaccaagtaaaacaaaacttcaagccttatactctaaaatcttcaattttttcaacttttccactcacaaaactaaatcaggtaaatagatataggttattgacaattkatgaataggtgtatacttaccagacactgttttcacgacgttagctccaataggattgcatccaaatctttgctgccgtgaaagtagcaccatattcctggggaaactgccaataaaagtaagaatcaccattaaaaacttaaaggattcaggagtggcagtttttaatctcttacttaatt

SEQ ID NO: 466285 - DNA, 589 bp, Homo sapiens
cgttggtttcaggaggaaaaagtggagaagcccatgtttgggaaccatgatgtcttagattccactgagactaaaaaccaaaggacattcccagtgatatgaatgttgtatagcccctgctaaattagtataaccctagggatgttaatagactttaccattgtcaccaagtttaattgcttgcctcgtcttttgtctatctatctatctatctatctatctatctatctatctatctatctaatctatctatcatctatctatgtgcatgtctttgtgtgttaacatcccttgagggaaaaaattcyatattattttcattagggaaaaactcagatccactactttttagcacttcttggggtatattttagaactgttggaagcagctgccctaaacccagtgcactatgataatttaaaccgaaagtttatattcaatatttggaagactatatttttctgatattttccttgattgatcacttcactactaagtaaaagtattcaaaattactcagtttgtattaaagctatactacttcactatacttgaaatttagctaattttcaaccccaattaatttat

SEQ ID NO: 466286 - DNA, 590 bp, Homo sapiens
tgagtccagtggtccagggcattatgaggtattccttctaaggtgaaaaataggwtgctacatctggctcctcttgcaactgaaaaagaagcatgacacctagtgggcctcttaggatttaagaggcaatatagccctcatttggttatgataaagcaagctgtttcaaaagtgaccccaaaagctgcaagctttgagtagggcccggaacaagagaaaacgtccaggctcccatgcaaactgcaataactattcgtgataaatgtatctcagatatcaaaataagctaatattttgaggaggcaataaaagttacaacttcttataaattttgtaatattagtcaaatatggagattttcctgttgtaagtttgttaatgttgaatgcttctttatacacctcagaagataattaaaaatgcaaattgataatatgtttgttgctattatttctgcatattacatcttatcatgggcaggtgactatatgctttttatgactatactcaaacaaatgacagttgctttctgcctttttacgtaaagattttaaaataaatgatttattgaaatatcactttttttttgc

SEQ ID NO: 466287 - DNA, 578 bp, Homo sapiens
gaaggctgaggcaggaagatcacttaagtccaggagttcacagctgcagtgagttgtgtttgcaatccagccagactgggttacagagtaaactcctgtctcaaaaaataaataaataaaaataaaaataatggggcttgtcacagtgggtcacacctgtaatcgcagcactttgggaggccgaggcagtcagatcacatgagaccaggagttctagaccagtctggccaacatggtgaaaccttgtctctactgaaaatgcaaaaattagtttagagtgatggtgcatgcctgtagtcccagctactcaagaggctgaggtgagaaatcgcttgaactcgggggatggaggttgcagtgagccaagatcgtgccactgcactccagcctgggcaacagagcaagactccttctctgaataaataaataaatttgaaaataatagagcacagtggttatttwatatcagagatggtagatttcagaataaaaaatgttactgggaataaaaaggctcatttcaaaatgacaaaggggttgattcactaagaaccaataacaatcttaaacattcgtga

SEQ ID NO: 466288 - DNA, 602 bp, Homo sapiens
cctaaagtagtgttcaacttgctcactaaaaacataggcagctcaaaatgcatagaaatatttactacttaattttaatgaacaactcaattacctaacgcttaaattaaaaaaaaaccttttcattggcattaatttatatataatattaaacttccaaagataaataaaatgtagtaggtgtatatatatatattcaaaatacttattaataaaaaatattcattattaatttgtaaactgaagggtcctgtatattgcattgaaaagaaaacaagaatagtttacttggttmtgtgtaaactaggaagttcatcttattagtatgatatatataaaccgtaacacatttgtgtcaatttgcctcttgtgtcatatctctttactgtaataatcacatgcaatcatgatcagtttttcaaagtaaaccattcatgaagagttaaattggaatgtcttggccttaaaagaatctaattaactattacaaatgcccagaatgattatcctttacttccttgattgaatcgcttaaatagttgatgattaatcaatgtgaatgtttagcttgcctatgcctatcgacttcaaccaaagaatta

SEQ ID NO: 466289 - DNA, 566 bp, Homo sapiens
atctaattaaattcaaaaagtgatttttggactgggtgctgtggctcactcctgtaatcccagcactgtgagaggctaaggcatgcggatcatgaggtcaagagatcgagaccatccgggccaacatggtgaaatcccatctckactaaaaatacaaaaattagctgggcatggtggtgcgcatctgtagtcccagctacttgggaggctgaggcaggagaatcgcttgaatccagaaggtggagcttgcaataagctgagatcgtgccactgcactccagcctggagacagagtgagattctatctaaaaaaaaaaaaaaaaaagaaacccccccaaaaaagcagagtttttcccagagcctctcctaactgcccagccacctgaaagctacttcaatttttgccttaataaacattgagcaaagacactagtcaggtcaaacttgacttctgacaaacaaaactgaattggtgttgctttaaaccagtaagagttaaagaataataacaaccttaaaatatatcaaatggaatgaaataaaacagaaataaataaaatgtcctt

SEQ ID NO: 466290 - DNA, 566 bp, Homo sapiens
atctaattaaattcaaaaagtgatttttggactgggtgctgtggctcactcctgtaatcccagcactgtgagaggctaaggcatgcggatcatgaggtcaagagatcgagaccatccgggccaacatggtgaaatcccatctcgactaaaaatacaaaaattagctgggcatggtggtgcgcatctgtagtcccagctacttgggaggctgaggcaggagaatcgcttgaatccagaaggtggagsttgcaataagctgagatcgtgccactgcactccagcctggagacagagtgagattctatctaaaaaaaaaaaaaaaaaagaaacccccccaaaaaagcagagtttttcccagagcctctcctaactgcccagccacctgaaagctacttcaatttttgccttaataaacattgagcaaagacactagtcaggtcaaacttgacttctgacaaacaaaactgaattggtgttgctttaaaccagtaagagttaaagaataataacaaccttaaaatatatcaaatggaatgaaataaaacagaaataaataaaatgtcctt

SEQ ID NO: 466291 - DNA, 631 bp, Homo sapiens
tttatttaagtaaacattaacttgctgagttaaatatgagccagtatttaggggggaaaacattttcttcttaatttgaaaagctttgatttaagctatcttcagcaattcaaatagaatccaacaatagcacctgtgaaaccaaatgcaaaaatcactatttttttgtttgagaatttagtcttttacaaaattgcaactaaatacatctgtctcaccctacccccaacctcaccacaactgagaaaatctccagagacatcatcaaaagcttacactattatataaactccacagagcccagaaaacaaaaatgcttgtatataaaaattagataaactgtcagagcagtgtcatggtacacaatagctcactgtcagaacctcaccagaatgcgctgtaccagctgttacagcacttcttgattaactctctccaagcccagtgactgagaacatgacaaatacaatcacccagcactattagtattggtgctcatcagaatgracattattgttggctatgtgtgaactactgctcaataattcagacaacatcaattacattaaataacatcactatccatttgattcagaaacagcaaaaaaaaaccaaaaaacaggctaaacag

SEQ ID NO: 466292 - DNA, 631 bp, Homo sapiens
tttatttaagtaaacattaacttgctgagttaaatatgagccagtatttaggggggaaaacattttcttcttaatttgaaaagctttgatttaagctatcttcagcaattcaaatagaatccaacaatagcacctgtgaaaccaaatgcaaaaatcactatttttttgtttgagaatttagtcttttacaaaattgcaactaaatacatctgtctcaccctacccccaacctcaccacaactgagaaaatctccagagacatcatcaaaagcttacactattatataaactccacagagcccagaaaacaaaaatgcttgtatataaaaattagataaactgtcagagcagtgtcatggtacacaatagctcactgtcagaacctcaccagaatgcgctgtaccagctgttacagcacttcttgattaactctctccaagcccagtgactgagaacatgacaaatacaatcacccagcactattagtattggtgctcatcagaatggacattattgttggctatgtgtgaactactgctcaataattcagacaacatcaattacattaaataacatcactatccatttgattcagaaacagcaaaaaaaamccaaaaaacaggctaaacag

SEQ ID NO: 466293 - DNA, 556 bp, Homo sapiens
ttaccaaaatcttcactttcaccctcctccccaaaagtagctactggccataatttggtgtgcatcattgcactccccttccttcacattatcatatgtgttatatatgatattcctatcatataatgatatatgattatccctattaacatataataactttttttttggatacagggtctgcctctgtcacctaggctggagtgcagtggcacaatctcagctcactgcagcctccacctcctggctcaagccatcctcccacacccagctaatttttatattttttgtagagtcgggattttgccatgtggcccaggctggtctgcaactcctgagctcaagcagtctgcccgccttggcctcacaaactgcttgatgataggcatgagccaccatgcccaccctcttctgtacagttcatatcaataaactattatttaaccattcctctgtagtgggcatcatrtagattttttttttttttttttgctattagtaacagtgctatggaggacagtcttgtgcagaaatatttgtgcccatttgttagtat

SEQ ID NO: 466294 - DNA, 449 bp, Homo sapiens
gcctcacaaactgcttgatgataggcatgagccaccatgcccaccctcttctgtacagttcatatcaataaactattatttaaccattcctctgtagtgggcatcatgtagattttttttttttttttttgctattagtaacagtgctatggaggacagtcttgtgcagaaatatttgtgcccatttgttagtatttctgtaggtaaagtctagaagtgaaattgacaagtcagaggatgtacttatttttaattttgataggaagtaccaaaatgtcttccaaaattctttacacacattctcacatgaatactattaatctttaaaatttgtagcaaagtaatagaggtgaacgtctggttttttttctcttgtgtattctttgtttatggkttttgactaggttacctttgcttgtcaaatgttagtaactttttattaatatatt

SEQ ID NO: 466295 - DNA, 531 bp, Homo sapiens
agaacaaataacaattcaacaatatttaaagatttcaataccccattctcaataattgacagaaaatctaaacagaaaagcagtgaggatataaaagacttcaacaaacacatcaaccaactgccctaactgacatttatagaatactgtaacctactactatcagaatacatgttcttctcaagcacatatgaaaaattgttcaagatacatcatatgctaatccataaaataaatcctaataaattaaaataactgaactcatacaaagtgtgttttmcagccacaaaggaattaaattagaaatcaacagcagaaacaaatttgagacatctccacattcggaaattagacaacatacttctaaacaatccatgatcaaacaacagatcaaatgggaaattaagatagttttaattgaataaaaaagaacacagcatatcaaaatttatgtggtacagctaaagtagtacagggagggcaatttatagctttaaaaatctatattagaaaaaataaaggtttcaacca

SEQ ID NO: 466296 - DNA, 625 bp, Homo sapiens
cagctacaggtaaaatcccaagaacttatttggctgcaaaacttttccaatgatgctaataaacagcaccttcactcaaaaacaactctttagagatgttaatagctcataatattaaattctcattawgaatagttgcataactacagttagcctatgtaagagaaaatcagagaaaatggatctatttttaagataactaataaccaacaacatagtttcatttacacattttccaggaatttttaaaaagttatagattagctacatattctatattcattagttttcctatcaagctgtgtaattaatggtatccagtgacaattgtattaataattaacctttctctgctccgttgcaatttcctcaaaatgtcttactttatgaaaacacagtctacaaacatatgagaacactgattagggtcttagaggaaatttgggcttcaggttccacatctgtaaaggaagtaagtcattttaatggtttcttagagttttgatagtaacacattgttccaaagcaattaaaacaacttacacaaaagtacgaagaaaaagatgagatagaagtcaacgagaaagctgaaatagaatagctattaggaaaggtatatgaatgg

SEQ ID NO: 466297 - DNA, 625 bp, Homo sapiens
cagctacaggtaaaatcccaagaacttatttggctgcaaaacttttccaatgatgctaataaacagcaccttcactcaaaaacaactctttagagatgttaatagctcataatattaaattctcattaagaatagttgcataactacagttagcctatgtaagagaaaatcagagaaaatggatctatttttaagataactaataaccaacaacatagtttcatttacacattttccaggaatttttaaaaagttatagattagctacatattctatattcattagttttcctatcaagctgtgtaattaatggtatccagtgacaattstattaataattaacctttctctgctccgttgcaatttcctcaaaatgtcttactttatgaaaacacagtctacaaacatatgagaacactgattagggtcttagaggaaatttgggcttcaggttccacatctgtaaaggaagtaagtcattttaatggtttcttagagttttgatagtaacacattgttccaaagcaattaaaacaacttacacaaaagtacgaagaaaaagatgagatagaagtcaacgagaaagctgaaatagaatagctattaggaaaggtatatgaatgg

SEQ ID NO: 466298 - DNA, 416 bp, Homo sapiens
atacaatgaggcaccataattatctttagggatttcatgtgtagattatttcccctactttkgttttaaatagactttaatttttagagcagttttaggttcacagcaaaattgagtagaaagtagtttccatatacccctctccctacatgtgcacagcctgttccactatcaatagcccacaacagagtgatacatttgttacaccgtatgaacttaccttggtacatcagagtcacccaatcaatgaacttacactggtacatcgaagtcacacaaaatccatcgcccataaaataaaaccaagtatgttttattactctatctcctctcagagccatgaatacactgtatgtcactggcttggtgaaggacagagagtacactatagtaaacgctatttccaaatatacatg

SEQ ID NO: 466299 - DNA, 395 bp, Homo sapiens
atctttagggatttcatgtgtagattatttcccctactttggttttaaatagactttaatttttagagcagttttaggttcacagcaaaattgagtagaaagtagtttccatatacccctctccctacatgtgcacagcctgttccactatcaatagcccacaacagagtgatacatttgttacaccgtatgaacttaccttggtacatcagagtcacccaatcaatgaacttacactggtacatcgaagtcacacaaaatccatcgcccataaaataaaaccaagtatgttttattactctatctcctctcagagccatgaatacactgtatgtcactggcttggtgaaggacagagagtacactatastaaacgctatttccaaatatacatg

SEQ ID NO: 466300 - DNA, 638 bp, Homo sapiens
gttgcagtgagccaagattgtgccactgcactccagcctggccaacagaaggagactctgtctcaaaataagtaagtcactgaggctaggccatattcacaagaaagaaagttagatttcacttcctgtggcagacatgtcaaagaatttggagacatgtttaaaaccaccacatgtgtgtataatgcaagagagagagcattttagaaagatagagcaaaggacacagaatgcacaaaagagcacagtattacaggacacagtagggaaagttattgttcataactgggaatcaatgacagtacaatttgactgcacatagcatgacttttgagaagtaatgagagacacaaaaatggtggtggtatgaagcaakgtctctcatactagcatctgtagccctcattccccagagcttgccctacttttccctccacctgtaggcctcattgctacgcttgttcacagatcaagcctaacttactgcaggaggtacttaagacttgcaatcttagcatctaacttgtattgtttcattcctatgttataaattgttgagcctgcctccttgaccgttatcttgagtctcagttcatatgtatggactcctgcttttattttaatcacatccttttctg

SEQ ID NO: 466301 - DNA, 496 bp, Homo sapiens
ttatgtttctcttcccagtgctggctttcactttgaatgctttaaaagtgtctgacttcacactctgaacagagctactgggagtgttttagatgctacagagtgacctactttagattatctaaacttgaggtgtgagaaaaaaattaaaatcaattttggtaactaaaaggaggaagtagaggtatagaagatcacagaaagctgttagttgcactttcatgctgacagtctgtgggaagatccaaagaaccatctgtttgtaaagtctctaggcatgttttaacagtcatgcatacaggcagccttagataatcaccacaaaaaaagattctatcacactgacatcatttaggagtactaatggtatttgaaatcatataagaataggcttaaaaatgaaaggtacacatagtcatgtctaaagtactataccaaatkgttttttgaagtctgttatgaacatactatttgaatacatttttgatgttttatt

SEQ ID NO: 466302 - DNA, 512 bp, Homo sapiens
gtttgaattgcaataaaaggcttatgggattcagggaagggagaaatctacttcatattgaagtagaaaaaggaaagttccaagggcatttagatgaaaagtagaagtgatggcacagatgtttctgaaagcaatcaggaaaggatataccaaacaggaagtaagagcctgggtatagagggatgaaattaagcttatttaggggaaatgaaaaaggtgaaattaggatgccttgttatgagtaaccgaggaacacagaattttgttcttkgctagacaattctcaattcccacaaagtcaccagaagaagtgtatgctcagaggcaatgatcaatcaaagaataatcttcattctgtgaggatgtggcttcaaacacttgtataatgcctttgtgagctagtctgacctagatagagaacacttcctcataggctaaacgcagcctccaacctagagcaaaagtatgcaaaatgctgtattctcaccttttgctagaagctggcttctagc

SEQ ID NO: 466303 - DNA, 572 bp, Homo sapiens
gatgggaatgcctgtatgtgcttattatatgacctaacagtyccactactgggtatttacccaaaagaaataaaacaaagacttatacatgaatatattgatatatactccagtcacctccaatagaatctagaacacagtaggggcttagtacatatttttaaatgaatgaagactaatgtttagtttaaactaggattgacctattcttatcctcggcagggacagagaataactaattaccacttgtcacatattgagacttcagtacctaaaaggcactattaggtcacctgtaagtctgttttcccccaaagtaaaaatcccaattccattgcccttttcacataagcctcattttctaacctttttagtttggtttaacgaatttcctatttcctctgaattctagagttccaaaccagactcagcacaagcctaacagggcaacctatacagataaggacagcccaggcacattgcacacggcaagttgcacctgttttaagagtaaaaatgaggtcaatgccaccttgtactgcaggtacctcaatgagacaatgccacccctt

SEQ ID NO: 466304 - DNA, 572 bp, Homo sapiens
gatgggaatgcctgtatgtgcttattatatgacctaacagttccactactgggtatttacccaaaagaaataaaacaaagacttatacatgaatatattgatatatactccagtcacctccaatagaatctagaacacagtaggggcttagtacatatttttaaatgaatgaagactaatgtttagtttaaactaggattgacctattcttatcctcggcagggacagagaataactaattaccacttgtcacatattgagacttcagtacctaaaaggcactattaggtcacctgtaagtctgttttcccccaaagtaaaaatcmcaattccattgcccttttcacataagcctcattttctaacctttttagtttggtttaacgaatttcctatttcctctgaattctagagttccaaaccagactcagcacaagcctaacagggcaacctatacagataaggacagcccaggcacattgcacacggcaagttgcacctgttttaagagtaaaaatgaggtcaatgccaccttgtactgcaggtacctcaatgagacaatgccacccctt

SEQ ID NO: 466305 - DNA, 532 bp, Homo sapiens
aaaaaagacaaagagcggcattatataatgataaaargccttgtccaacaggaaaatatcacaatcctaaacatatatgcacctaacactggagctcccaaatttataaaaccatcactaatagacctaagaaatgagatagacagtaacacaataatagtgggggacttcaatatgtcactgacagcactagacaggccaatgagacagaaagtcaacaaagaaacaatggatttaaactataccctggaacacatggacttaagacatatatacagaacattccatccaacaactgcagaatatacattctattcaacagtgcctggaactttctccaagatagaccacatggtaggccacaaaacaagccgcaataaatttaagaaaattgaaattatatcaagcactctctcagaccacagtggaataaaactggaaatcaactccaaaaggagctttcaaaaccatgcaaatacatggaaattaacctgctcctgaatgatcatgaaatcgagatggaaattaaaaa

SEQ ID NO: 466306 - DNA, 532 bp, Homo sapiens
aaaaaagacaaagagcggcattatataatgataaaaagccttgtccaacaggaaaatatcacaatcctaaacatatatgcacctaacactggagctcccaaatttataaaaccatcactaatagacctaagaaatgagatagacagtaacacaataatagtgggggacttcaatatgtcactgacagcactagacaggccaatgagacagaaagtcaacaaagaaacaatggatttaaactataccctggaacacatggacttaasacatatatacagaacattccatccaacaactgcagaatatacattctattcaacagtgcctggaactttctccaagatagaccacatggtaggccacaaaacaagccgcaataaatttaagaaaattgaaattatatcaagcactctctcagaccacagtggaataaaactggaaatcaactccaaaaggagctttcaaaaccatgcaaatacatggaaattaacctgctcctgaatgatcatgaaatcgagatggaaattaaaaa

SEQ ID NO: 466307 - DNA, 569 bp, Homo sapiens
gatacaaaggcataagaatgacacagtggactttggggactcaaggggaaagggkgggaagtgggtgagggataaaagatcacaaatagggtgcagtatatactgcttgggtgatgggtgcaccaaaatctcacaaatcaccactaaagaaattactcatgtaaccaaacaccatctgttccccaataacctatggaaatgaaaatacaaaaaataaaaggaaaactcaagctggaaactgtttagggcaaacctgcctcccattctattcaaagttatctctctgctcactgagataaatgcatatctgattgcctcctttggaaaggctaattagaaactcaaaagaatgcaaccttttgtctctcttctgtgacctagaagccgcctcccccactgcaagttttcctgcctttgcttcaagttgtcccgcctttccagaccgaaccaatgtacttcttacatacattgattgatgtctcatgtctccctagaatgtacaaaaccaagctgtgccccaaacaccttggtcacatgtcataaagacttcctgaggctatgccaggggc

SEQ ID NO: 466308 - DNA, 569 bp, Homo sapiens
aataaataaataaataaattttgagagccccaaacaggtcagacgctgtgctagatggtaagaataaaacaatgaatgcaatgaatgagactgggtctctgcctttaatggctttacattctcatcatctctaattttaatagagagacactaaggcagagatacgcagtggctgctctgggtacacagtggataggggattgaaagaataaaaattaaccataattgataacatttattaagctttaattgtgtgctaatctctttgaatacttaattcacctaatccttacaaccctatgaagtaaatgttatactcatttytaagaaaaggaaattgagcttcagaaagattaaataattttcccagagtgacacacacagctgagaaagaaatatagccttgaaccgtttaattccaaaatctatgcttttactttattttagtagagttttgtaggtgactcagtttatgacttgtttctgaagctagctacttgctcaatttacccacaaaggacaaggtgcttggtattttagttctcaaagttagatatgctctactccca

SEQ ID NO: 466309 - DNA, 523 bp, Homo sapiens
gagagaggggtcggggagacgcgagggtggttcagggggcgtgcaacctgggccgattgtgccccagcacactggttgtcgggagccccgcctccgctcgcggttgacagctcagctggtgccgagcaactcgtgccagccagtcgtgtctcagcctggagagtgcgcgcaccgcckcccgggcagccgctggctccagctcacgaaacagccccgggcgccgcgccgctccgagtccagcctcctactgagaacagtccctccctcgtgcgggtcgcacggctagccgcaggttcggccacgtcaaatccattttctaaaaaagcagggagcagagctctctcttcgccgccgacgcagaaaggagctggggaggaaaaagctgctgccttttgcgctggagattcgtgggcaaggcttctcattttcccaggctgcttcccctcccgggtgaggagcgtcctgagactaaggaaagagcctggaaaatggagcagacctggacgaggtaggtgggctgttt

SEQ ID NO: 466310 - DNA, 523 bp, Homo sapiens
gagagaggggtcggggagacgcgagggtggttcagggggcgtgcaacctgggccgattgtgccccagcacactggttgtcgggagccccgcctccgctcgcggttgacagctcagctggtgccgagcaactcgtgccagccagtcgtgtctcagcctggagagtgcgcgcaccgcctcccgggcagccgctggctccagctcacgaaacagccccgggcgccgcgccgctccgagtccagcctcctactgagaacagtccctccctygtgcgggtcgcacggctagccgcaggttcggccacgtcaaatccattttctaaaaaagcagggagcagagctctctcttcgccgccgacgcagaaaggagctggggaggaaaaagctgctgccttttgcgctggagattcgtgggcaaggcttctcattttcccaggctgcttcccctcccgggtgaggagcgtcctgagactaaggaaagagcctggaaaatggagcagacctggacgaggtaggtgggctgttt

SEQ ID NO: 466311 - DNA, 601 bp, Homo sapiens
caccacaatcttagtggcttaaaacagtacaaatgtattgccttaaagttctggaggtcagaagtctgaaatttggtcttctaggttaaaaccaaggtatcagcaggactgtgctccttctagaggctctaaaggagaatttgttccttgcccttcatggcttckagagactgcccacattctgggttcatagccccttccagcaatgccatcactggcctctgcttctatcatcacatctcctttgatcattctgaccctccagtgtccctcttactaggacccttatgattacattggacccaaccagataatccaggataatctcctcatctcaaaatctttagtcacatctgcaaagccctctcttgctatggaaagtggcatatacacaggatctggggattaggaatgtggacattcttataaggccattattttagtctaccacatcgttcaatgctgaaaaagtcattactaattatcttccccatttcagtggaaatgttctggtttctagcatatgagaaagctgagtaaacatcaggtgaatcatatatgaaccttatacaacttccccgaacacataactcaagaaaag

SEQ ID NO: 466312 - DNA, 601 bp, Homo sapiens
caccacaatcttagtggcttaaaacagtacaaatgtattgccttaaagttctggaggtcagaagtctgaaatttggtcttctaggttaaaaccaaggtatcagcaggactgtgctccttctagaggctctaaaggagaatttgttccttgcccttcatggcttctagagactgcccacattctgggttcatagccccttccagcaatgccatcactggcctctgcttctatcatcacatctcctttgatcattctgaccctccagtgtccctcttactaggacccttatgattacattggacccaaccagataatccaggataatctcctcatctcaaaatctttagtcacatctgcaaagccctctcttgctatggaaagtggcatatacacaggatctggggattaggaatgtggacattcttataaggccattattttagyctaccacatcgttcaatgctgaaaaagtcattactaattatcttccccatttcagtggaaatgttctggtttctagcatatgagaaagctgagtaaacatcaggtgaatcatatatgaaccttatacaacttccccgaacacataactcaagaaaag

SEQ ID NO: 466313 - DNA, 574 bp, Homo sapiens
cttagttgagaacacagaaatacaaagagtcctgtgtgaaaaataagtatcggtgttaagataaagaagcggcagtggaagacagtggagggactgtctgttagggggaggaatttattgyggtgtcggcaaagccttctttggactgaaggatgaattatgattagaagttcattaagaggaggagggaaggggactacaggagtcattccaagccaaaggaacaaaagatacagggacagaaacagcaagatatgtttgggggaatctcaagttagtcaatactgttattgtgtgaagttcacaacaggggcagggaggacaggagatggggcccaatgacgaaaaggccttgtatgtaccatgtttagaagtttgaattttatcctataggagtcagggagaggttctatgggtaggatttcccatcccaacaggattgtaaactcccacatccaattagtcacacctccattttttttttctgtttctttaacattgtctcggattcattccttctgaaatctaccttattagttcaggtcttcttaaatttgtgcctggactgttcacc

SEQ ID NO: 466314 - DNA, 610 bp, Homo sapiens
actacaggagtcattccaagccaaaggaacaaaagatacagggacagaaacagcaagatatgtttgggggaatctcaagttagtcaatactgttattgtgtgaagttcacaacaggggcagggaggacaggagatggggcccaatgacgaaaaggccttgtatgtaccatgtttagaagtttgaattttatcctataggagtcagggagaggttctatgggtaggatttcycatcccaacaggattgtaaactcccacatccaattagtcacacctccattttttttttctgtttctttaacattgtctcggattcattccttctgaaatctaccttattagttcaggtcttcttaaatttgtgcctggactgttcaccaactcttgactggtcctggggctccagttcacctcttgctcccccaacaatcaattttctacagaattatcagagcaatcttcctttccatcaatctcaactctgttcaaaaactttcaatagttttatgtgacctaagaggtagctgcctccccaccctttcagcttgccattcaaggctgcataatttggtcccaaccccctttccgtccttgactcctctcactgcta

SEQ ID NO: 466315 - DNA, 610 bp, Homo sapiens
actacaggagtcattccaagccaaaggaacaaaagatacagggacagaaacagcaagatatgtttgggggaatctcaagttagtcaatactgttattgtgtgaagttcacaacaggggcagggaggacaggagatggggcccaatgacgaaaaggccttgtatgtaccatgtttagaagtttgaattttatcctataggagtcagggagaggttctatgggtaggatttcccatcccaacaggattgtaaactcccacatccaattagtcacacctccattttttttttctgtttctttaacattgtctcrgattcattccttctgaaatctaccttattagttcaggtcttcttaaatttgtgcctggactgttcaccaactcttgactggtcctggggctccagttcacctcttgctcccccaacaatcaattttctacagaattatcagagcaatcttcctttccatcaatctcaactctgttcaaaaactttcaatagttttatgtgacctaagaggtagctgcctccccaccctttcagcttgccattcaaggctgcataatttggtcccaaccccctttccgtccttgactcctctcactgcta

SEQ ID NO: 466316 - DNA, 594 bp, Homo sapiens
atgctcactcgagaatgtgcttttgattactaccaagcacacttttttttctttttgaagatatgtgcaaacaatgaaaacccttcttgctgaaattacaatacagccgtacattttggttgaaatgtttatttggagatttcaaagtcaaggttgatatagccaaaagataatacagattagactatcatggaaacaaaaagaatctaaaatttgatattgtttgtacactagggtcacygctcatgttaacatttccttcattgcatccactttctcggagctggtgttgtagggttagatgtgagtgtgaatgagcatgcgtacagtggacaaaatccccccattctgtaaatgcatgtgcctattattctgggcagtgaacccagcctgctttaagtctttgttatttgaatagtgtcccagattctcctttgaaatgtgcggttcacctatttttattaaccttaatatggagctttctgatgcttttttgatagattcttggtcgtgcccaggtacacttcctttcgttttaaacaggtcatatatttctctgtgctggccttcaggtggtgtgccatataaattaga

SEQ ID NO: 466317 - DNA, 594 bp, Homo sapiens
atgctcactcgagaatgtgcttttgattactaccaagcacacttttttttctttttgaagatatgtgcaaacaatgaaaacccttcttgctgaaattacaatacagccgtacattttggttgaaatgtttatttggagatttcaaagtcaaggttgatatagccaaaagataatacagattagactatcatggaaacaaaaagaatctaaaatttgatattgtttgtacactagggtcaccgctcatgttaacatttccttcattgcatccactttctcggagctggtgttgtagggttagatgtgagtgtgaatgagcatgcgtacagtggacaaaatccccccattctgtaaatgcrtgtgcctattattctgggcagtgaacccagcctgctttaagtctttgttatttgaatagtgtcccagattctcctttgaaatgtgcggttcacctatttttattaaccttaatatggagctttctgatgcttttttgatagattcttggtcgtgcccaggtacacttcctttcgttttaaacaggtcatatatttctctgtgctggccttcaggtggtgtgccatataaattaga

SEQ ID NO: 466318 - DNA, 536 bp, Homo sapiens
cctcaattaaggtggtgcctcatatatcctttcagttaaacaaaaagccttctacaatcttgggcaatgcacctctccattggacaaaagagtttctaagaattttaaggttctgttatcccatgtcrgactcacagttagtccaagcaaggtgaaaaagctggcttcagaatgaaatgtgggtgtggcttttgcctagtaaagttcattatcaattagtatataagacgccttaacatttttaagtgaattataccagcatggactgactgaaaaggatgaagagagtacaaagtgaaaagatgcctttggaccctcaacctgcctcagagaagcaggctgagaaagttacccagccaaaaacaaggattacttcttagggaaaaagaagaacggctcaaagaatggaaccaagagcccagaggactgatggatagccagagggaatcactcccaggagcaggactgggccctaatcaaggaactggtaatatgtactcagctagatttcaaaattgctgtggactactgaccgc

SEQ ID NO: 466319 - DNA, 536 bp, Homo sapiens
cctcaattaaggtggtgcctcatatatcctttcagttaaacaaaaagccttctacaatcttgggcaatgcacctctccattggacaaaagagtttctaagaattttaaggttctgttatcccatgtcggactcacagttagtccaagcaaggtgaaaaagctggcttcagaatgaaatgtgggtgtggcttttgcctagtaaagttcattatcaattagtatataagacgccttaacatttttaagtgaattataccagcatggactgactgaaaaggatgaagagagtacaaagtgaaaagatgcctttggaccctcaacctgcctcagagaagcaggctgagaaagttacccagccaaaaacaaggattacttcttagggaaaaagaagaacggctcaaagaatggaaccaagagcccagaggactgatggatagccagagggaatcaytcccaggagcaggactgggccctaatcaaggaactggtaatatgtactcagctagatttcaaaattgctgtggactactgaccgc

SEQ ID NO: 466320 - DNA, 368 bp, Homo sapiens
caccgtccttcacctgcatgctcagacatgtgggttctttcaaacatactggacttcctccttaggttttagttgtgttagtcaatagttgaatgttgaaggagaggatgccaagggatattaaagaaggtaaaagagataagtgacagcaaacattatttatttttaattatctctcagaatgacttttagatacccttccctactacmttttgatttttgctttagcatagctggtgagttttggaatcagagagactgggctctgatttgtactagctaagaatattagacaagccacttaacttctttaagtctcagtacccgtatttatataatgggaataatagtaatatctaacttgcagg

SEQ ID NO: 466321 - DNA, 368 bp, Homo sapiens
caccgtccttcacctgcatgctcagacatgtgggttctttcaaacatactggacttcctccttaggttttagttgtgttagtcaatagttgaatgttgaaggagaggatgccaagggatattaaagaaggtaaaagagataagtgacagcaaacattatttatttttaattatctctcagaatgacttttagatacccttccctactacattttgatttttgctttagcatagctggtgagttttggaatcagagagactgggctctgatttgtactagctaagaatattagacaagccacttaacttctttaagtctcagtayccgtatttatataatgggaataatagtaatatctaacttgcagg

SEQ ID NO: 466322 - DNA, 584 bp, Homo sapiens
tatttcatgataccgcataattttataatgtccctaaatccgaatttcatttctcatgatgtgaaaggattctctttatttctgtttggttagctgcatcagagcatgacagaaatggagcagaatttgagtattctttccccagatgggtcagttagcttttcttaaagctattctgtgcttacattgttaatcagttgtccctggttcctagacaggatgttgatmcatgtgaaataggcaggaatatgtgtctgactcagcttaactcatcacaactttcatatgtcctgctagtgggtctataatgtcaccctcgtttacaggcgtttttaattttctgatgtctatttcttagtatttttcctcagccatttttaatgtctcaagccatagttcttcctgagtggcctgaagtgattttgctgctctttaaagcttccttaaggtttttcaagagcgtacaacataggctgcttctaagtgtatttttatttcctagctcttagcatttctcaccttatcattataactttaaatttaaacagaatacaaattgtgtacacagatgggtgtgtcactat

SEQ ID NO: 466323 - DNA, 584 bp, Homo sapiens
tatttcatgataccgcataattttataatgtccctaaatccgaatttcatttctcatgatgtgaaaggattctctttatttctgtttggttagctgcatcagagcatgacagaaatggagcagaatttgagtattctttccccagatgggtcagttagcttttcttaaagctattctgtgcttacattgttaatcagttgtccctggttcctagacaggatgttgatccatgtgaaataggcaggaatatgtgtctgactcagcttaactcatcacaactttcatatgtcctgctagtgggtctataaygtcaccctcgtttacaggcgtttttaattttctgatgtctatttcttagtatttttcctcagccatttttaatgtctcaagccatagttcttcctgagtggcctgaagtgattttgctgctctttaaagcttccttaaggtttttcaagagcgtacaacataggctgcttctaagtgtatttttatttcctagctcttagcatttctcaccttatcattataactttaaatttaaacagaatacaaattgtgtacacagatgggtgtgtcactat

SEQ ID NO: 466324 - DNA, 584 bp, Homo sapiens
tatttcatgataccgcataattttataatgtccctaaatccgaatttcatttctcatgatgtgaaaggattctctttatttctgtttggttagctgcatcagagcatgacagaaatggagcagaatttgagtattctttccccagatgggtcagttagcttttcttaaagctattctgtgcttacattgttaatcagttgtccctggttcctagacaggatgttgatccatgtgaaataggcaggaatatgtgtctgactcagcttaactcatcacaactttcatatgtcctgctagtgggtctataatgtcaccctcgtttacaggcgtttttaattttctgatgtctatttcttagtatttttcctcagccatttttaatgtctcaagccrtagttcttcctgagtggcctgaagtgattttgctgctctttaaagcttccttaaggtttttcaagagcgtacaacataggctgcttctaagtgtatttttatttcctagctcttagcatttctcaccttatcattataactttaaatttaaacagaatacaaattgtgtacacagatgggtgtgtcactat

SEQ ID NO: 466325 - DNA, 556 bp, Homo sapiens
aacctatgtttttaatcaacagcttcacctgctggttaagcctctcagtgcacagtgtgggcatagtaattctcttacttcctcccagaaacagtattagacttcagagtgagaaagaacttcactatcaaatctcttttcctattcataaattaattttgggatggggcacagaaacaaagaccagtggacataaatttgagtctcrgtctaactggcgttttctgaactacaccattaaaaaaaaaaaaaaagaaaatattgtaatccttcaaataggtttccttccttggttgatcagaaatgtcctcattccccaggtctcttcatgctaaatatggtaatagctggcagacagccagcccagtaaattccaatgatacttaagaaagcattcatatggcctgaaattactctgaaccaaacacttgagacctgcagggcttcagcatagagcagttcagctggagcaacgaatgtcaaaaccagcggggtgccttaaaaacacaaaagcttggaaaaaaagcaatctactcttctttattgctacattctt

SEQ ID NO: 466326 - DNA, 510 bp, Homo sapiens
acagaaaaagcaaaattttaagtgaaagcatcatgggagaaagattatatatggaaatgcaggagagctaaaagtggcctggygaaccacatattagctgagcatgagtcattcatggattgatattttaaaaaactagagacacttgaatttgagaaactaggacaaggatataaaatttttttctgaacttgggtaatacgaaagaatgtaccaacatatattaccactttgtgtgtgtgtgtgtgtgtgtgtgtgtgtgtgtgtgtgtccatgcttggagtctgtctctaccataccccaattctccttgcactttggtttatcaaatgttgtcacaaattgcaaccccttagacttatactctgtgtttcttcactctgagccccttcccttggggagcgtcagattcctttgtaacttgtggagcagctgagtgagcccctttctctggcaataagagagggaacttgagctgttaatagagctaaagtgatttcttaaaaatct

SEQ ID NO: 466327 - DNA, 510 bp, Homo sapiens
acagaaaaagcaaaattttaagtgaaagcatcatgggagaaagattatatatggaaatgcaggagagctaaaagtggcctggcgaaccacatattagctgagcatgagtcattcatggattgatattttaaaaarctagagacacttgaatttgagaaactaggacaaggatataaaatttttttctgaacttgggtaatacgaaagaatgtaccaacatatattaccactttgtgtgtgtgtgtgtgtgtgtgtgtgtgtgtgtgtgtgtccatgcttggagtctgtctctaccataccccaattctccttgcactttggtttatcaaatgttgtcacaaattgcaaccccttagacttatactctgtgtttcttcactctgagccccttcccttggggagcgtcagattcctttgtaacttgtggagcagctgagtgagcccctttctctggcaataagagagggaacttgagctgttaatagagctaaagtgatttcttaaaaatct

SEQ ID NO: 466328 - DNA, 510 bp, Homo sapiens
acagaaaaagcaaaattttaagtgaaagcatcatgggagaaagattatatatggaaatgcaggagagctaaaagtggcctggcgaaccacatattagctgagcatgagtcattcatggattgatattttaaaaaactagagacacttgaatttgagaaactaggacaaggatataaaatttttttctgaacttgggtaatacgaaagaatgtaccaacatatattaccactttgtgtgtgtgtgtgtgtrtgtgtgtgtgtgtgtgtgtgtccatgcttggagtctgtctctaccataccccaattctccttgcactttggtttatcaaatgttgtcacaaattgcaaccccttagacttatactctgtgtttcttcactctgagccccttcccttggggagcgtcagattcctttgtaacttgtggagcagctgagtgagcccctttctctggcaataagagagggaacttgagctgttaatagagctaaagtgatttcttaaaaatct

SEQ ID NO: 466329 - DNA, 510 bp, Homo sapiens
acagaaaaagcaaaattttaagtgaaagcatcatgggagaaagattatatatggaaatgcaggagagctaaaagtggcctggcgaaccacatattagctgagcatgagtcattcatggattgatattttaaaaaactagagacacttgaatttgagaaactaggacaaggatataaaatttttttctgaacttgggtaatacgaaagaatgtaccaacatatattaccactttgtgtgtgtgtgtgtgtgtgtgtgtgtgtgtgtgtgtgtccatgcttggagtctgtctctaccataccccaattctccttgcactttggtttatcaaatgttgtcacaaattgcaaccccttagacttatactctgtgtttcytcactctgagccccttcccttggggagcgtcagattcctttgtaacttgtggagcagctgagtgagcccctttctctggcaataagagagggaacttgagctgttaatagagctaaagtgatttcttaaaaatct

SEQ ID NO: 466330 - DNA, 566 bp, Homo sapiens
gaggtgacatgatcagattttcctcttagaaagatccttttggcttccttatggcctctgcataggaggagtagtctagaggcagagaaaacagttgcagtattccaggcaaaggttggtggagatgccagtataaaaattagagaaatggacaggtgaaagaaatttcagaggcagaattgatagagctaagccattgactggatgtagaaccagtgaggctgaagaaacccaaagaygactgatcaccaattcatctcttcactcacatcctacccactgtcatcttgtcgtaaacttccagactaccttcacctctctcttcaataacgtgagttatttgttcaaagtctgccttttctgttagaacatgagctcactatagcagggacagtggttgtcttttcacttctagatacagtgattagcataatgcctggtacatagtaggcatgcccttttcttttcttcttttttgtttgttttgaacgaataaatgatgtcaagttttcttgcttggtcaactactaggttatgccctccactgagaaagagaacaactggaa

SEQ ID NO: 466331 - DNA, 538 bp, Homo sapiens
ttttcaattttcttgggtatataactaggaaaggaattgctaggccacatggtaactctttgtttaaccctttgagagccaactttagtttattcatcttgaaaatgaagaaaacaatttttttttttttttttttacatagatccaggttgtcagatcctttagggtcaccaccaggaagattatttacagtgaaggacactttttgaaaaggtatagggggcctgaggtagaagagggaatacccagttgcaagtgaatcccaggctcagaagggtcatacagtctcatgattaaggmcctgatgcgtatgcagtatggggtcgaactgttggagttatagtctgtgctcctccgctttctcagtgaacaagtcagttaacctcctgatgtctctctgtcctaggcagtaaaatggggatcatcatgtcttcctacttcaaaggttgtggtaaagataaacgaaataatacacatggaagtactttgtacattgtcaaaaccaatgtagatgattgttgttgtgaagatagtataa

SEQ ID NO: 466332 - DNA, 538 bp, Homo sapiens
ttttcaattttcttgggtatataactaggaaaggaattgctaggccacatggtaactctttgtttaaccctttgagagccaactttagtttattcatcttgaaaatgaagaaaacaatttttttttttttttttttacatagatccaggttgtcagatcctttagggtcaccaccaggaagattatttacagtgaaggacactttttgaaaaggtatagggggcctgaggtagaagagggaatacccagttgcaagtgaatcccaggctcagaagggtcatacagtctcatgattaaggccctgatgcgtatgcagtatggggtcraactgttggagttatagtctgtgctcctccgctttctcagtgaacaagtcagttaacctcctgatgtctctctgtcctaggcagtaaaatggggatcatcatgtcttcctacttcaaaggttgtggtaaagataaacgaaataatacacatggaagtactttgtacattgtcaaaaccaatgtagatgattgttgttgtgaagatagtataa

SEQ ID NO: 466333 - DNA, 548 bp, Homo sapiens
aaggtatagggggcctgaggtagaagagggaatacccagttgcaagtgaatcccaggctcagaagggtcatacagtctcatgattaaggccctgatgcgtatgcagtatggggtcgaactgttggagttatagtctgtgctcctccgctttctcagtgaacaagtcagttaacctcctgatgtctctctgtcctaggcagtaaaatggggatcatcatgtcttcctacttcaaaggttgtggtaaagataaacgaaataatacacatggaagtactttgtacattgtcaaaaccaatgtagatgattgttgttgtgaagatagtataattgtatctgattaattttgtaatacaggcccaagtcattcaaaacagccaggaattaaactttttatttgtataattcagattttatgagaacagcatagagacgcctagacacagagatgtattataaataaaatatgtgtatgtaaaataaaccagccgtctcttctycctgccccatctcttcttgtctatccccatccccaatccaaaataagctg

SEQ ID NO: 466334 - DNA, 525 bp, Homo sapiens
aacaggcaagtggtgactccagtgcaggtgacgcagaggtgacactagaatgaagtgaaatattctgttgagggctaagttcatgtttttgctgacagtggtagataaatgtcatggcttccccctgcatagtgcttaggacatttcttttgatatgtgttttagagaaaacataaaacttgtaatcaggaaaatgcaataacggaagaaatgcttacttgagtaactaatgtgagttaggcaaagaagatacaaatacttcccatttcctacttctaaattacagtcaaattgtcctaagcaaatctctcattgtctccatgtaaaagatatagagaagccgttagaaaaaggtggctggaacarctttatacatacagcctgaatgaactgcctcatcatttatatgtttgaggaaagtgtctgtttgataatttaaattaagtttaaactgtcataaacggagagctgtacagattctgtgggagaggatactggggtaccagatactcattactaggctct

SEQ ID NO: 466335 - DNA, 560 bp, Homo sapiens
aaaatgttagttaccaagatatgaacttagacattttcagtaagcatttataggctattctagtggaaaactgtacacaatttcccatgaggctggtgaaggtttcttagcttaagcgactttttagctggttcttggattttattaaataatatttgaatgaacagttttgactaacagcctgaaaatattaatctttcctctcagtctgagcaagtgaaagtagataaattcatattgtatgtctgattctctttgggtttgaaaagaaataaagactctacttctaaattagcatagaaaaaaggagaatttctcttgatttatttctcagtttgggtttgtgcttttgaaaaaggaaaataatgatcctgaaatcagtaggctttgtctttgccaaaaaatgtggacatgttgatcttaggggggctgattatataaaacagtagaaatgtagtcttagatgaaaatctgtaaagatgtaagaatgctgaactaacatgaaaatcaggggctgrgaaaatgctggattgagaataatgtgataatgaaggttttat

SEQ ID NO: 466336 - DNA, 615 bp, Homo sapiens
tcatagcctttttaaaacatccttgggtggtagcaatgaaggctactcacaaggatggggacagaggtcatcagggayaccataatcaatgtactgtgcaaaaatagtgcagaggagattggttagtcctacataaagtccaactacatgtatggctaactattctcaagtcagggttcgcagaagctaaggtcctaacatttggattatttttatattattatctggatcaaataatatgccttcagccaaaatcaaactctgttcacctgtgaatagtattcctgtacccaaattcctgtacacatcactgagaattgtctaaacccaagtgcctcaaaaggtcctaaacccttgactcatagccaggatatttcttttattttattattatactttaagttttagggtacatgtgcacaacgtgcaggtttgttacatatgtatacatgtgccatgttggtgtgctgcacccattaactcgtcatttaacattaggttctaataagctcagaaactagcactgtgagggaaatatctaaatatggagattataaatgcctatcattgccatttccagagaacacacctgaggccaaaaaccttggaacagag

SEQ ID NO: 466337 - DNA, 560 bp, Homo sapiens
ctattccaaccccctttccagaaatttacataccatatttcttgcatgatttcccctctcccaacgtcagatacagataaatagtgggtgttgaaaggataaaggggattgtgtgagtaaattaccaycagctatctgaaggcttggttgtaatttctttccttgaggtttgaggtttttgttatggctgacagacaaggctaaccattgaaagggatggatctgaataaacacacacacacggttcacagtaatcatttattgaatgaatgaatgaatgaacgaatgaatgagataatgcatcagaaatactgtgtacattttaaggcattgtcccagttgtctattcctgcataaacacacacacacacactcacacacacacacttcctcaagacagatacaagatgggggaaatgtccaccttttctgctccctagacctccagccagcaagtgaggaaatccacttattcagcttccttgccaatgctttggtctcacatgataaatcagaaagatgagaaatggaaaatctgggtcactggcctagccctaggg

SEQ ID NO: 466338 - DNA, 560 bp, Homo sapiens
ctattccaaccccctttccagaaatttacataccatatttcttgcatgatttcccctctcccaacgtcagatacagataaatagtgggtgttgaaaggataaaggggattgtgtgagtaaattaccaccagctrtctgaaggcttggttgtaatttctttccttgaggtttgaggtttttgttatggctgacagacaaggctaaccattgaaagggatggatctgaataaacacacacacacggttcacagtaatcatttattgaatgaatgaatgaatgaacgaatgaatgagataatgcatcagaaatactgtgtacattttaaggcattgtcccagttgtctattcctgcataaacacacacacacacactcacacacacacacttcctcaagacagatacaagatgggggaaatgtccaccttttctgctccctagacctccagccagcaagtgaggaaatccacttattcagcttccttgccaatgctttggtctcacatgataaatcagaaagatgagaaatggaaaatctgggtcactggcctagccctaggg

SEQ ID NO: 466339 - DNA, 560 bp, Homo sapiens
ctattccaaccccctttccagaaatttacataccatatttcttgcatgatttcccctctcccaacgtcagatacagataaatagtgggtgttgaaaggataaaggggattgtgtgagtaaattaccaccagctatctgaaggcttggttgtaatttctttccttgaggtttgaggtttttgttatggctgacagacaaggctaaccattgaaagggatggatctgaataaacacacacacacggttcacagtaatyatttattgaatgaatgaatgaatgaacgaatgaatgagataatgcatcagaaatactgtgtacattttaaggcattgtcccagttgtctattcctgcataaacacacacacacacactcacacacacacacttcctcaagacagatacaagatgggggaaatgtccaccttttctgctccctagacctccagccagcaagtgaggaaatccacttattcagcttccttgccaatgctttggtctcacatgataaatcagaaagatgagaaatggaaaatctgggtcactggcctagccctaggg

SEQ ID NO: 466340 - DNA, 568 bp, Homo sapiens
aatgggaccttaggcactcactcacaggagaccgggaatatttttccttctaccagagaaaamtaaaattgttttcatcaatactgtttttaagttaattttttaatcgacaaatagtaattgcatatatttatggggtacaatgttttgatatatgcatatactgtggaatgatgaaaacaagctaataatattttttaattttaaataaaagcactgtattttgcaatcccaatgtatgataaaattttatattgctagcatacttcagtactctactcagatgctaccttctttagaaaaacttctctggtggaatttaattaatcactccctccttcatgttctgcttggtgtagcactttacccgatctggtttgtattatggtttgatgaatgcttgcctggctttccacactagattttaacactggatttctacactagattttagcaatgcctagcacatgctctgtgtttgtttaattaaatgaatgaaggtaaccacactgtccttgagttttaccaactgtggaaataaaattaagtcccgtgagcattagctgcc

SEQ ID NO: 466341 - DNA, 568 bp, Homo sapiens
aatgggaccttaggcactcactcacaggagaccgggaatatttttccttctaccagagaaaactaaaattgttttcatcaatactgtttttaagttaattttttaatygacaaatagtaattgcatatatttatggggtacaatgttttgatatatgcatatactgtggaatgatgaaaacaagctaataatattttttaattttaaataaaagcactgtattttgcaatcccaatgtatgataaaattttatattgctagcatacttcagtactctactcagatgctaccttctttagaaaaacttctctggtggaatttaattaatcactccctccttcatgttctgcttggtgtagcactttacccgatctggtttgtattatggtttgatgaatgcttgcctggctttccacactagattttaacactggatttctacactagattttagcaatgcctagcacatgctctgtgtttgtttaattaaatgaatgaaggtaaccacactgtccttgagttttaccaactgtggaaataaaattaagtcccgtgagcattagctgcc

SEQ ID NO: 466342 - DNA, 568 bp, Homo sapiens
aatgggaccttaggcactcactcacaggagaccgggaatatttttccttctaccagagaaaactaaaattgttttcatcaatactgtttttaagttaattttttaatcgacaaatagtaattgcatatatttatggggtacaatgttttgatatatgcrtatactgtggaatgatgaaaacaagctaataatattttttaattttaaataaaagcactgtattttgcaatcccaatgtatgataaaattttatattgctagcatacttcagtactctactcagatgctaccttctttagaaaaacttctctggtggaatttaattaatcactccctccttcatgttctgcttggtgtagcactttacccgatctggtttgtattatggtttgatgaatgcttgcctggctttccacactagattttaacactggatttctacactagattttagcaatgcctagcacatgctctgtgtttgtttaattaaatgaatgaaggtaaccacactgtccttgagttttaccaactgtggaaataaaattaagtcccgtgagcattagctgcc

SEQ ID NO: 466343 - DNA, 568 bp, Homo sapiens
aatgggaccttaggcactcactcacaggagaccgggaatatttttccttctaccagagaaaactaaaattgttttcatcaatactgtttttaagttaattttttaatcgacaaatagtaattgcatatatttatggggtacaatgttttgatatatgcatatactgtggaatgatgaaaacaagctaataatattttttaattttaaataaaagcactgtattttgcaatcccaatgtatgataaaattttatattgctagcatacttcagtactctactcagatgctaccttctttagaaaaacttytctggtggaatttaattaatcactccctccttcatgttctgcttggtgtagcactttacccgatctggtttgtattatggtttgatgaatgcttgcctggctttccacactagattttaacactggatttctacactagattttagcaatgcctagcacatgctctgtgtttgtttaattaaatgaatgaaggtaaccacactgtccttgagttttaccaactgtggaaataaaattaagtcccgtgagcattagctgcc

SEQ ID NO: 466344 - DNA, 600 bp, Homo sapiens
gatcctcttgccttggcctcccaagtagctgagatcacagttgtgtaccaccatttccggctacttttaaaaaattattttgtgtagagatggagtcttgctatgttgcctaggctggtctcaaactcctggcttcaagcaatcctaccaccccaccctcccaaagtgctgagactataggcatgagccactkcacccagccaagtctgcttcttaaactgataaatcacaggactactatataaacccagaataacaaattactaatttataatgagaattttaacatcttagggaactagactctcttttatgatcccagcaaaatatctcttggtatatgtgccacatttgagagccaaattacagccaaaaggttgtttttgaaacttgaatctagagcaagaggaattaattagtggattctaaatttcaaataatttgatagcttcagagcatcaaggtgtacacataggttcttttttcctggacagtaagtgtccactgatgattgtcctcccttcttaggtacatctctttttctatctctgatatgctaatattttcagtcagattataatctggtttggggatccttgt

SEQ ID NO: 466345 - DNA, 600 bp, Homo sapiens
gatcctcttgccttggcctcccaagtagctgagatcacagttgtgtaccaccatttccggctacttttaaaaaattattttgtgtagagatggagtcttgctatgttgcctaggctggtctcaaactcctggcttcaagcaatcctaccaccccaccctcccaaagtgctgagactataggcatgagccacttcacccagccaagtctgyttcttaaactgataaatcacaggactactatataaacccagaataacaaattactaatttataatgagaattttaacatcttagggaactagactctcttttatgatcccagcaaaatatctcttggtatatgtgccacatttgagagccaaattacagccaaaaggttgtttttgaaacttgaatctagagcaagaggaattaattagtggattctaaatttcaaataatttgatagcttcagagcatcaaggtgtacacataggttcttttttcctggacagtaagtgtccactgatgattgtcctcccttcttaggtacatctctttttctatctctgatatgctaatattttcagtcagattataatctggtttggggatccttgt

SEQ ID NO: 466346 - DNA, 524 bp, Homo sapiens
ctaataccaaactgatttggttacagtagctttatacgttttgaaatcacgtagtcaaatkcttgagctttgctcttcttattcaaaattgttttcattgtgttaggttctttgaatttccatatacatttcagaattcacttgtaaatgtagacaaaaagccagtggggtatttgattggggttacattgagtctatagatcaacttatagagaattgatatcttaacaacattgggtcttctgatgcatgaacatgacatattatttcatttattttggttaatggttctccgctaagggcaattgtgcatcacaagggacatttgacagtatctagacacaaacaactagagcatcagagcccctttgctgtacccacagtcttgtatttacagtctatacttccattctttcaggaggtttgctcccagaactggtgatataaagaaggaaagtagcagtatgagcactttgagggctaagcaatgggataatatctttctaagggaacagttaaatcaa

SEQ ID NO: 466347 - DNA, 524 bp, Homo sapiens
ctaataccaaactgatttggttacagtagctttatacgttttgaaatcacgtagtcaaatgcttgagctttgctcttcttrttcaaaattgttttcattgtgttaggttctttgaatttccatatacatttcagaattcacttgtaaatgtagacaaaaagccagtggggtatttgattggggttacattgagtctatagatcaacttatagagaattgatatcttaacaacattgggtcttctgatgcatgaacatgacatattatttcatttattttggttaatggttctccgctaagggcaattgtgcatcacaagggacatttgacagtatctagacacaaacaactagagcatcagagcccctttgctgtacccacagtcttgtatttacagtctatacttccattctttcaggaggtttgctcccagaactggtgatataaagaaggaaagtagcagtatgagcactttgagggctaagcaatgggataatatctttctaagggaacagttaaatcaa

SEQ ID NO: 466348 - DNA, 524 bp, Homo sapiens
ctaataccaaactgatttggttacagtagctttatacgttttgaaatcacgtagtcaaatgcttgagctttgctcttcttattcaaaattgttttcattgtgttaggttctttgaatttccatatacatttcagaattcacttgtaaatgtagacaaaaagccagtggggtatttgattggggtyacattgagtctatagatcaacttatagagaattgatatcttaacaacattgggtcttctgatgcatgaacatgacatattatttcatttattttggttaatggttctccgctaagggcaattgtgcatcacaagggacatttgacagtatctagacacaaacaactagagcatcagagcccctttgctgtacccacagtcttgtatttacagtctatacttccattctttcaggaggtttgctcccagaactggtgatataaagaaggaaagtagcagtatgagcactttgagggctaagcaatgggataatatctttctaagggaacagttaaatcaa

SEQ ID NO: 466349 - DNA, 492 bp, Homo sapiens
gttaattatgaggcttttcccactttagtagatgatgaaacaaactacttccagccttgtatgagccaagaggattgtttaatctgattctcttgtgtggttcttaccccaaccttggtagtttcctgatataccratcagtattcagctgaatattcaaggagactctccacagatctctggaattttctattctttctggtactcttccccatgaactctacctgccttggccttctcaaatctctgcatgatctcttcaactcaggcagatcaccaggctctgcctggattccctctctgtgagctctggggcagttaagtaggacagttgtatggcttactttgcttgtttctctcttctcttggataactttcctatgttgtctgatatccagtgtctgaaaataattattttatatatcttgtcctattttttagtaatttctgtcaggggtgaaggggaatgaataccaaccctattaccgcatg

SEQ ID NO: 466350 - DNA, 612 bp, Homo sapiens
agggctgctccttaccaggccttgtgtcatctggcacttgctttgcatgccagtgcattcttctgctccttacttggtggttcttaaaccagaccaacactaaacaactggtaacccctgccccaagggtttgccatgctatttcatgcctctgtgcctttgcttatgctattccttctgcctgaaatgctctcactcccaacaccctggctgcttttccatctgtattcatttcctgttgctgctgtaacaaactatcacaaacttactctttttgaggtcagaagtctgaaatgaggctatttcatgaggctaaaattaaagcattggcagaccttcatacctcctggagctggaggagagacactgttctttgcctcttccagcttctaaccacagtttttgttttttttgtttgtttttggttttggctgatkgtccctcattgtcacatctctttctctgacactcctgcctcctttttctatagggacccctgtgattacatcaggttcgtctgaataatctaatcttcccatcttccttaaacgtagtcatatctgcaaagtcctcattgacatgtatggtaacatttacaagtttgggatgtgg

SEQ ID NO: 466351 - DNA, 612 bp, Homo sapiens
agggctgctccttaccaggccttgtgtcatctggcacttgctttgcatgccagtgcattcttctgctccttacttggtggttcttaaaccagaccaacactaaacaactggtaacccctgccccaagggtttgccatgctatttcatgcctctgtgcctttgcttatgctattccttctgcctgaaatgctctcactcccaacaccctggctgcttttccatctgtattcatttcctgttgctgctgtaacaaactatcacaaacttactctttttgaggtcagaagtctgaaatgaggctatttcatgaggctaaaattaaagcattggcagaccttcatacctcctggagctggaggagagacactgttctttgcctcttccagcttctaaccacagtttttgttttttttgtttgtttttggttttggctgatggtccctcattgtcacatctctttctctgacactcctgcctcctttttctatarggacccctgtgattacatcaggttcgtctgaataatctaatcttcccatcttccttaaacgtagtcatatctgcaaagtcctcattgacatgtatggtaacatttacaagtttgggatgtgg

SEQ ID NO: 466352 - DNA, 612 bp, Homo sapiens
agggctgctccttaccaggccttgtgtcatctggcacttgctttgcatgccagtgcattcttctgctccttacttggtggttcttaaaccagaccaacactaaacaactggtaacccctgccccaagggtttgccatgctatttcatgcctctgtgcctttgcttatgctattccttctgcctgaaatgctctcactcccaacaccctggctgcttttccatctgtattcatttcctgttgctgctgtaacaaactatcacaaacttactctttttgaggtcagaagtctgaaatgaggctatttcatgaggctaaaattaaagcattggcagaccttcatacctcctggagctggaggagagacactgttctttgcctcttccagcttctaaccacagtttttgttttttttgtttgtttttggttttggctgatggtccctcattgtcacatctctttctctgacactcctgcctcctttttctatagggacccctgtgattacatcaggttcrtctgaataatctaatcttcccatcttccttaaacgtagtcatatctgcaaagtcctcattgacatgtatggtaacatttacaagtttgggatgtgg

SEQ ID NO: 466353 - DNA, 612 bp, Homo sapiens
agggctgctccttaccaggccttgtgtcatctggcacttgctttgcatgccagtgcattcttctgctccttacttggtggttcttaaaccagaccaacactaaacaactggtaacccctgccccaagggtttgccatgctatttcatgcctctgtgcctttgcttatgctattccttctgcctgaaatgctctcactcccaacaccctggctgcttttccatctgtattcatttcctgttgctgctgtaacaaactatcacaaacttactctttttgaggtcagaagtctgaaatgaggctatttcatgaggctaaaattaaagcattggcagaccttcatacctcctggagctggaggagagacactgttctttgcctcttccagcttctaaccacagtttttgttttttttgtttgtttttggttttggctgatggtccctcattgtcacatctctttctctgacactcctgcctcctttttctatagggacccctgtgattacatcaggttcgtctgaataatctaatcttcccatcttccttaaacgtagtcatatctgcaaagtcctcattgacatgtayggtaacatttacaagtttgggatgtgg

SEQ ID NO: 466354 - DNA, 612 bp, Homo sapiens
aggtatgggcattagaataaacacataaatgaaaataaacgattccttcctcatgtacgcattaacaataagcacttgaggatgttataagagtttttgtgcacataagcgcatttgtacacgagatggaagcaatgtggacagtgaatgaggcactggacaccagaagaaaggaattctagtctcaactctaattggctctgtgaccatgaacaatgaacatcagaaaatggaggaccraaacagtggctctcctacaaggtcaccaaaccaattaataacagacctggagaagaattctggtcttctggctcctagttcagtgatctgtccaaaatactacacatatggtaggctgacaaagaaagaaaagaagaccttttggtttcaagtcatttgcagagaaagggggagaaacaaaaacaggaaaatcaggaaagggtggaaggaaaatcaatagttcaaatttaggcattcgaactgagacatcaagaaaggaagcatgtaactatggactgtgaacacaatataaagaaaatgatgtaaaatttcttatatccttattcaaatcacgccttgcagttttttactctaaaatcattgcagacgtat

SEQ ID NO: 466355 - DNA, 612 bp, Homo sapiens
aggtatgggcattagaataaacacataaatgaaaataaacgattccttcctcatgtacgcattaacaataagcacttgaggatgttataagagtttttgtgcacataagcgcatttgtacacgagatggaagcaatgtggacagtgaatgaggcactggacaccagaagaaaggaattctagtctcaactctaattggctctgtgaccatgaacaatgaacatcagaaaatggaggaccgaaacagtggctctcctacaaggtcaccaaaccaattaataacagacctggagaagaattctggtcttctggctcctagttcagtgatctgtccaaaatactacacatatggtagrctgacaaagaaagaaaagaagaccttttggtttcaagtcatttgcagagaaagggggagaaacaaaaacaggaaaatcaggaaagggtggaaggaaaatcaatagttcaaatttaggcattcgaactgagacatcaagaaaggaagcatgtaactatggactgtgaacacaatataaagaaaatgatgtaaaatttcttatatccttattcaaatcacgccttgcagttttttactctaaaatcattgcagacgtat

SEQ ID NO: 466356 - DNA, 612 bp, Homo sapiens
aggtatgggcattagaataaacacataaatgaaaataaacgattccttcctcatgtacgcattaacaataagcacttgaggatgttataagagtttttgtgcacataagcgcatttgtacacgagatggaagcaatgtggacagtgaatgaggcactggacaccagaagaaaggaattctagtctcaactctaattggctctgtgaccatgaacaatgaacatcagaaaatggaggaccgaaacagtggctctcctacaaggtcaccaaaccaattaataacagacctggagaagaattctggtcttctggctcctagttcagtgatctgtccaaaatactacacatatggtaggctgacaaagaaagaaaagaagaccttttggtttcaagtcatttgcagagaaagggggrgaaacaaaaacaggaaaatcaggaaagggtggaaggaaaatcaatagttcaaatttaggcattcgaactgagacatcaagaaaggaagcatgtaactatggactgtgaacacaatataaagaaaatgatgtaaaatttcttatatccttattcaaatcacgccttgcagttttttactctaaaatcattgcagacgtat

SEQ ID NO: 466357 - DNA, 612 bp, Homo sapiens
aggtatgggcattagaataaacacataaatgaaaataaacgattccttcctcatgtacgcattaacaataagcacttgaggatgttataagagtttttgtgcacataagcgcatttgtacacgagatggaagcaatgtggacagtgaatgaggcactggacaccagaagaaaggaattctagtctcaactctaattggctctgtgaccatgaacaatgaacatcagaaaatggaggaccgaaacagtggctctcctacaaggtcaccaaaccaattaataacagacctggagaagaattctggtcttctggctcctagttcagtgatctgtccaaaatactacacatatggtaggctgacaaagaaagaaaagaagaccttttggtttcaagtcatttgcagagaaagggggagaaacaaaaacaggaaaatcaggaaagggtggaaggaaaatyaatagttcaaatttaggcattcgaactgagacatcaagaaaggaagcatgtaactatggactgtgaacacaatataaagaaaatgatgtaaaatttcttatatccttattcaaatcacgccttgcagttttttactctaaaatcattgcagacgtat

SEQ ID NO: 466358 - DNA, 558 bp, Homo sapiens
tccaggctaactagtgccagtcagagacctcagccttaccaggaaaaatacttagatctaaaaggaagaaaaacagaggacataaattagtacgttctatctgttctaaatcctactgaagaaaatgaagtcaatgctttgaccaatttgsccaaagattcacagatttgaagacctcagcatttctgtgttctagttctcttagtttaaagacaaggaaattgaaatccagaagggttacctccaaggtaaaagccgtaactgaaaccaacactccactcttgctttagccttttatcagagagaccagcttagcaaacactgcccagttttgtctgattttgtagaatgtggtaaattatagaattagagaatgtgctgcatttagtcttgaaagaatatatggaggcagtaagtatagtggtcaagagcataggctctgaaggcgagaagggggcttgacaagtcacctgccctctctaagagcctcattcacctcatctatcaaggagataacaatgataccaatctacaaaggatgttagggagactaaatga

SEQ ID NO: 466359 - DNA, 669 bp, Homo sapiens
tgttgtggaaataatggggttatttttccacccctcactaatgcctaatccatactgaaaagcggatgagatttgaaacaaagcaaagccagtgaggctttcttctcatcatggaaataaatctgtttaatacatatgaagcactcctggttaaatgtttaccttttgaaccctacactgaaggaaatggtttcttgaagctctggctaatcttttagcaaactgtcaaactaaaaacttgggtgcttcttgatggggattttaactgcactattgattatagtgcagctagaaaccattttcaggcttatcttcatatgatttaattgacactgagasgtgttttaattgaaacgttagacttcctcagtagaactaccctttgtttctagcaaggcaatctagcttttatgtttttaatcgccatctgttgttcaataaatgtcaaatcgttcctaatggtctctctaagcatagggttgtttttttttaatttgcttttgtactcagtgttcgttatgggcaaatgagtccttgccgtaaaagaccgacatttctcatggtgctccagtcccgttagaaggaaaaagtgattagaaataaagagacaagagaaatgttgctgcttttttttttaattcttctcagcagtggagagatttagaaagt

SEQ ID NO: 466360 - DNA, 669 bp, Homo sapiens
tgttgtggaaataatggggttatttttccacccctcactaatgcctaatccatactgaaaagcggatgagatttgaaacaaagcaaagccagtgaggctttcttctcatcatggaaataaatctgtttaatacatatgaagcactcctggttaaatgtttaccttttgaaccctacactgaaggaaatggtttcttgaagctctggctaatcttttagcaaactgtcaaactaaaaacttgggtgcttcttgatggggattttaactgcactattgattatagtgcagctagaaaccattttcaggcttatcttcatatgatttaattgacactgagacgtgttttaattgaaaygttagacttcctcagtagaactaccctttgtttctagcaaggcaatctagcttttatgtttttaatcgccatctgttgttcaataaatgtcaaatcgttcctaatggtctctctaagcatagggttgtttttttttaatttgcttttgtactcagtgttcgttatgggcaaatgagtccttgccgtaaaagaccgacatttctcatggtgctccagtcccgttagaaggaaaaagtgattagaaataaagagacaagagaaatgttgctgcttttttttttaattcttctcagcagtggagagatttagaaagt

SEQ ID NO: 466361 - DNA, 465 bp, Homo sapiens
caggatctggctttatattaaaagcatctccctctggctgctatgttaagaccagattatatatgtatgtgtaggagttgggtggagaatcaggaacagaagcagaaagatcaatgaggatgctattgaacttacccaggcaagagagaataatgtctgaactagggaggtaatggcagagatggtgagaagyggcctgattgtagaaatattttggtagtagagcctatggaatattctgatgaattggatatgggatacaaaagaaagtgaagactccaagatgactccgaggtttttggcctgagtattttattatcaaaaacaaccaatggctcacgcctgtaatcccagcactttgggaggccgtggcaggcagatcacctgaggtcgggagtttgagaccagcctgaccaacgtggagaaaccccatctctactaaaaatacaaaattagccaggcgtg

SEQ ID NO: 466362 - DNA, 618 bp, Homo sapiens
cttactatctagattcagtatttyttttcttttgtggtggcatttgtcctaatctttattcttcaagcttctgggagcacttggagtcctgattttgcagagtgatgaacaaatgtaccattcacagtttcagacatgctgattctattcccctttaactttcaactgtctagacagaatgggttaaaacacaaatttcatgaattaagggaatatcatagatttttctgaacatatctataaaactggttggtgggtgacatattagttacaatctaacccaggcccagaagttcatatttgttctttttacaaaaggcacctcattaaatcactgtctagtccataactggctttattgggacataaattcatttcactaaaccaataaatgttaattcttcaccctggagattctagtcagtctggttttatcctgctcaagctcctgaggctgccatcaattactcatgtttgggtttatatgtcattatggaatcactttagctagaactaatgggaagtgaaagggcaataaagctaagcctcattccaaagagaatatacagaagggggcattcacctgaaccccattattcttttctataaattaaaata

SEQ ID NO: 466363 - DNA, 521 bp, Homo sapiens
atgccactccttcacttaaacttatccatgatttctcagccaaccttccttagggctgtttgcaagctcctgcctcccagtacaaatgcatctcccgtcaggattccctttccacattcccagcccgtagaccttttctacctatatcacaatgcttcctcgggcttccataatcacacggcacctttgcctgactctgggtctttatacaagcatttctgcattccctcactgttctgggctacactgtgtcccctgcaaaatttgtaagttgaagtcctaacccgcagtacctcagaatgtgactgtatttagagagagggtcttagaggaaagttaaaatgaggtcattagggtaagccctaatctgatttgactgatgtccttataagaagaagaaatttgaacacagccacatacagggggaagacaatgtaaagacacaggatgaaggtggccatctacaagccatggagaratgcctggaacagattcttccttcaggaccctcaaaacgaacc

SEQ ID NO: 466364 - DNA, 595 bp, Homo sapiens
gggaaattcagcataaacaaactcggtcactggggaaagtagagaaagggcaatatattagtcagggttctccagagaaacaaaatcaataggctatatagagacatatgaggaggagattcattatagaaattagctcacatggttgtggaggccaggaagttccaccgtctgccatctgaaagctggagaaccagaaaagtcagtcgtgaaattcaatctgagtccaaaggcctgagaaccaagagtgctgctgatatctgacagcaggagaagatggatgtcccagctcaggaagagagagagaatgtgcccttcctcttcctttctgttctatccaggccctccctgggttgaatgatacctgcacacattggtaaggtcctgcccacactgggatgatgcctgacctcaatggactgtatgatcttctctactcagtctacccattcaaatgctaatctcttccagatayaccctcacaggcacacccagaaataatattttaccagctacatgggcatcccttagcccagtcaagttaacacataaaattagtcatcacaggcaacaaacaaaaggagtggctagggag

SEQ ID NO: 466365 - DNA, 651 bp, Homo sapiens
agtctcacaaccaccgaatgagatactttgctattatctaatttccattttacagatgagaaactgaggcacagaaaaactaaaaatcttgcccagagtcacacaactaataagtggctgagctgactgcaaaattcatactctcaacctctaaactattctacctttcaaacacttttcaccaccagcagccctcatttattaggaaagattggagtagaatgttaaatctggccccttagaagcacctttcaatcctgcctgtgctctagctatgcctgtttgtaaccagtggattacaggcacccagaagagaagaatggaggtagaataggaccaagctcgttttctgaattataaagggaaactgtgacagctgcctactgggactttcaacccacttttctctgcccccaggatttcatcaccatagagggggcagggctccaagactccctgttttccaccagaccctcacacactkggtgtctgggtgagattttgatttaacatagagattccagctcaaaaaggtctggaaaccactggggatggagcaatcacccaggtgtcagcttccttaatcgctaagcccttctcattgctgatttacacagttctgtactccctagagaggcaaggcaggcgggt

SEQ ID NO: 466366 - DNA, 618 bp, Homo sapiens
acctactctaggggcagcgtggcaggaccaagaagcatgcacactaggggctggcacacttgagtaggggatgtgactctgtcttttgctagatttgagacctcaggcctgtttctggtcctctccaaacatatttcaccaaatactagatggtgacagtagtaattaccccatagagcagctgtgaggtaaaatacacaaaattacttggtaaatattcaatttaattattcttggtatacatcccctttgatatgttttcccttcttttcctaataaaattaagaattaaaatagggccaggtgcagtggctcacgcctgtaatcctagcactttgagagkccaaggcaggaggatcacttgggcccaggaattcgaggttgcaggtgagctataattgccactgcactccagcctgggtgacagattctcaaaaaggtaaagctaagaaaataatgaaatgctacctacacattagaattaaaattcagcttgcctacagctagcaacggatgtgggaaggggacaggtggactccaaggttcaccttcttggagtcttagggcgatgtccaccaccagcaccactcttctcagggacttgtacttcccctttat

SEQ ID NO: 466367 - DNA, 547 bp, Homo sapiens
cccatctgggaatgtgaaaattctgattcttggggcacagttatgtcaagaccaagctggtaccagggaatgcaaggactgctcctgcctttccttgagttttcttcttraccccttacccctccttgggctttacttatgtcattcattttcacaccaattctgtgaggtatgtattcatgatgcccattttacaaataagataactaaggttcagagaggttaaaaatgtcttcccaaaatgacattgctagtaaatagttgagcaaggacctgaaaatgagactatacagcttcaagtcccaggctctattaccatactggccctagtgtcagatccttcaaggccatactcagatccagactggcccaggaccagggccctattgccagcatccttggtctttgggagtacaagaaaaagtctgaatcccaaagaagggcttcaataatattgttcacataataaagtgttgtggggttgttcgtggaaatagctggtgatgaccgaatgctggacttcctcaatgactcaagagttccaact

SEQ ID NO: 466368 - DNA, 547 bp, Homo sapiens
cccatctgggaatgtgaaaattctgattcttggggcacagttatgtcaagaccaagctggtaccagggaatgcaaggactgctcctgcctttccttgagttttcttcttgaccccttacccctccttgggctttacttatgtcattcattttcacaccaattctgtgaggtatgtattcatgatgcccattttacaaataagataactaaggttcagagaggttaaaaatgtcttcccaaaatgacattgctagtaaatagttgagcaaggacctgaaaatgagactatacagcttcaagtcccaggctctattaccatactggccctagtgtcagatccttcaaggccatactcagatccagactggcccaggaccagggccctattgccagcatccttggyctttgggagtacaagaaaaagtctgaatcccaaagaagggcttcaataatattgttcacataataaagtgttgtggggttgttcgtggaaatagctggtgatgaccgaatgctggacttcctcaatgactcaagagttccaact

SEQ ID NO: 466369 - DNA, 638 bp, Homo sapiens
tgtagcccagtaagttgtaaatggtacttgaaactgacataagaaaacacagtatcagagcagaatccatttcttataggactcctgagccagggaaagagttcgttactctgagtacttctatttagaaggccttttacatctgagagggtgcacttttctctgcaggtggtaagccacagttttacattttagatarttagaagttttcagtacaaagttctctatgtctataatttcaatttcaaaagagagactttaagacataaaatgaaagttctaaaagaagcctttttattcttttccttttcttagtctaggtactttatatttaggctttcaaggaacaaggggacaaggtttttctttttagaaagaaaatccaaacaactgacaactttaaatagatttacacccaaattatacattgtaagtctacaagcaactttataaaatagcatccacatggccttttgtattgtgatcctttgtatgatactgaaactcctgtaggagggagaaaataatgattaggcttaagcaaagtgaaaagatattttctcagctggaagttgttaatacttcagctgatagagacttggagaataactccactgttatgtgtttaaaaaataaat

SEQ ID NO: 466370 - DNA, 589 bp, Homo sapiens
ttcccttttggttacaaccctcagactataagcagttgaaggctaaaggactaygtcttatttctcttggagcaagactgctttggttcaaatctcagctgtgttacttacagcttgtgtaacctgggtaacttgtttaacctctcaatgcctctattttttggggaaaaacatagagataataatagcatcaacttcatagcattgttctgaggattaagtgagtaataatagctgtaaagtgcttagaacatggtgtgatgtgccataatcattgttaacattacagttattattattctttgtattctcagtatctcacatcatctttagctcatagcaaacattaaaaataaaaaagttggccaagcgtggtggctcacatctgtaatttcagcactttgagaggccgaggggagcagaccacctgaggtcaggagttcaagaccagcctggccaacatggtgaagccgtgtctctactaaaacacaaatacaaaaatgagccaggcatggtggtgtgtgcctgtaatcccagctactctggaggctgaggcaggagaatcacttgaacccgggaggcggaggtt

SEQ ID NO: 466371 - DNA, 499 bp, Homo sapiens
attactgttttcctgcctccctcttcctaccagtgtgaatcaatttgcagtttatacagtgagacataattaaatcaaaactcacttccaggagccccaaagtcactccttgatcctgttgtctttagtaatcaaaaagcaaagagaccrtcggtggttggaggaaaggcaaatccaattttaaggaaattctagtacattttcaggagtatggattgtgaccttaattcccatttactcttagcacaatttttcctaaagtaagtacataatccaatgacgctttttctcctccaaagtttaaaatatatgacagtgtaaaatatcttttttattcataggcagcaaagtcaaataaattgatacatgaaagttctagcaggttcactggtaaacaatggtctcatggccagcacatttttctagtgaagattacataatttttacttgaattgaattacaattaacaagtacttattgagcaccctttatatccaag

SEQ ID NO: 466372 - DNA, 517 bp, Homo sapiens
ctcgtcctgctgctcagagcagagcaggtgagacaggaaaggagcagaacctgaattgttggatttggcytgaaatacttgcagggactcagagagccattgaggaacatgaggtgagctggagccaaaagcagagctccaaagaattgcctgagattagcatggaggcggggaagggggagcaaagcctttgtctctgggtctctgctgtgtccaatatggaaagacccattcctttccttgctaaatgctttccctccccatcctcctcacccaaggactgctcaaaggtgaaaccattactagaaattctgtttttatttttccaatcggctggggctttttggtcccagaattaaatatatgctccttaaatgctctcataaatccacagttggtgagaaagccagccaaccatacaacaggtagagaaatgaaaccactctgtatccaacctcaaataattttgcatatcattaagcagaacacagtcacaggtttattttaataatgcatg

SEQ ID NO: 466373 - DNA, 513 bp, Homo sapiens
tgaattagataagcaacaatgggctatgatttgagcacccctcctccctatgaattccacactgcacaatatgaaattcatgtactactcattcctttggcttaatgaaatctcttttaaaatgaaaacatattaactgacagaatatatagccatgtcatggcatgwgaacacttaaggattaatttaagaatttagttaatgagctaaatatcaaaggcttgggctttaaacaatgaaacataagccaagcatcaaaatagaagtaaagaactacactttttagcaaccatccccaatagtattttatacatgccactgttagcatttatttagcattcatttacttttaggtaattatctttgcccgggttccctagagaccagagcctgaagcaaagattagagtccaaggctttagaggaggcaaaatcccactgttgcaacaatgaagggagaaggaaagtgaggtgtagggaaggaggcagacataaacaaagtggtaatttactc

SEQ ID NO: 466374 - DNA, 646 bp, Homo sapiens
gagctttctggcaagattaacacccgagcagcagcaagctttctgccactaattatttaagacatctcctgctttgcttttgtaacatcctgagctgtttatcaaatagktcataacatgagaaagtattcatgccatctttaatcaagaaaaaaatctgcctggatgaggagagaaggaaaaacactgttgcaatacagcaacaatcaaattatgtctataatgggctttaaatctttagaagaaaagatctacagtttagcagcacaaagcagtattattcctgttgttattaaaaagtgccctctaatccttcacacatatgtaatacatctcatccaaggatctaagtccattataaataaacaagaagctacagtttataaaatctggccaatgccacaaaagagatacaactcactggttataagtaagccaacacttttagaaaaactcactagctaatgatataaagtctgttggtctcaccaaagttttgggaaataactggttcttggtatacaaaaggtgttcaataaatgcttataaatacaaagactgatagaggatcccatataggaacgttctagagattagttaattcatatgagttttttaaataaatgtttgttatatataaatgtta

SEQ ID NO: 466375 - DNA, 649 bp, Homo sapiens
gttaattcatatgagttttttaaataartgtttgttatatataaatgttaccattaagtatataatcccttatgaattcactgttatccagcaggtgtggaaatctcagtatccaagcagagaaatattaattaccgccctgctgcctgtagcttatcatctttgcacacctctgtagaatttaactccttataactacatgtctaaatcccagtgaagaaggagcaaagctctcaaaaactgagacaagaacacctaaaaagccaccatgtttaagtagcataaacactgcaattagctgttaaatgtaacccctttgttcattcaacagatgttcactgacaatcatgtatttattcaagcaagaaacatttgaataataatatatgctggaccttatgtttcatactggcttagagaagtgtagaagactataatacatcaaagaataataaaaagtacatttaaactaattaatgcaatctagggtgactatcaacaggacttgtagccctagagcagggtttctcaaccttgacactgctaaaattttgggtcagataattctttgtcgtgagtagatgtgcattgtagggtgtttacctgcatccctggtgtctacccactagataacagtagcactcaactg

SEQ ID NO: 466376 - DNA, 541 bp, Homo sapiens
tgtggtgctgcaccttggtgtgagtctattttcttccattttgcttgatgctcaggggaccttttccatgtggaaacccatatctctctgttctgggaaatttcctgaataatcaggaaatatttgattattttttttcccctgagcagataaattttcttattttttatctacrtttttctgtctttttgtttggttttctgggaaatttcctcatctttatttttcaaatactttatggatttttaaaatttctgcttagttttaattctaagatatcctttattttactcccaagtgtttcttcttatagattcctgtctattatggatgctataataccttcccttatttatgagaattttcaagacagttcatagaaaaacattttttttcctgaaccccatcctactttgtccatgtttcctctggtgttctcttattctgttagtttattttaatctcattttcatggtggaagtttccctcaaaggtgactcttggttgtattgagagtgaggctaggcatggtaaggattgt

SEQ ID NO: 466377 - DNA, 636 bp, Homo sapiens
ctttctcttttttactttacttttctttttttttttaattgaattgtaatggaccttggtatagctttctctatttattttcatttgtaattgttatgtttcttagatacaaagatttttatttttaccacatttgaaaacatttattattccartattttgtcccctttcctatttcagtgatgataattttacataaaatagtgcacttgaaattggaccacagttcactgatgatttgctcttattttcagtcttttctctcctttcctgggcagtttttactgtgtcttcaagttcattaatcttcatttttgtagtaatctcctctgatgtataataatcctattaaatgtatatttcctgccagaaattgtttttttcatcttaacaagtttgatgtattttatctacttaaaaacataatcaaacttaagtttgattttttcttcttaatgtataaatgattatatcttttttgaacacatagaatatagtcatattaactcttttattgtccttgttcactaaatctattgtttttgtcatttctgtgtttgtttctattgacatatttgtattatcattacagattgtattttcttcttctttgtattcatgataaacttggggggg

SEQ ID NO: 466378 - DNA, 636 bp, Homo sapiens
ctttctcttttttactttacttttctttttttttttaattgaattgtaatggaccttggtatagctttctctatttattttcatttgtaattgttatgtttcttagatacaaagatttttatttttaccacatttgaaaacatttattattccaatattttgtcccctttcctatttcagtgatgataattttacataaaatagtgcacttgaaattggaccacagttcactgatgatttgctcttattttcagtcttttctctcctttcctgggcagtttytactgtgtcttcaagttcattaatcttcatttttgtagtaatctcctctgatgtataataatcctattaaatgtatatttcctgccagaaattgtttttttcatcttaacaagtttgatgtattttatctacttaaaaacataatcaaacttaagtttgattttttcttcttaatgtataaatgattatatcttttttgaacacatagaatatagtcatattaactcttttattgtccttgttcactaaatctattgtttttgtcatttctgtgtttgtttctattgacatatttgtattatcattacagattgtattttcttcttctttgtattcatgataaacttggggggg

SEQ ID NO: 466379 - DNA, 533 bp, Homo sapiens
aaatactatgtcttgtactcaataggagtcatactgaggactttgggaaaagctgtattatttgactgcactggaagtccactgctaataggaaaggaattgttcaggattatttcattattactgaaaataactgagtctagttataatgcaaaagatgttgtttgcatttatctagcaaagcaaaccagagtattatttctatgtgtttggattaattttactctcctgtagatttgyccagtctgataaaattaatgaattagaaagagaatataagaatataaccaacctctaataagatgtatatgctaactgatttttttaaattataaacatcttgagtgataggacaatgttgtacttgaactagcagtatgagtacagtgagagaaacaggaattactttaggtattttgaataagaaggacttttatgtagatgattaaatactaacaaaattgttgaaatgtctgtaggatcagccaaaactgtaagtctagaatgagtactagaaaaattaaaacaacaga

SEQ ID NO: 466380 - DNA, 510 bp, Homo sapiens
ttttcccatctcttgaatcaattacaatattgcaagtttaaagcccagtgtctgactggcaagtggtcactcctcttaagctttgcgttaacaggaagtgttttccacactgatgcttttcaatcctctcccctgtcagcctatcccacaggaattctcaaattcataatgatcgaagctggactccctctcctcatacaattagaaacttgtttttcctaggtctctgatcttggtgatttgaaccaataaactcccagttgtccaagttggaaatggaagtgccattcttaaatttgtctraattatctttctgctaaatctggtctggctttattcagtcttgcttcatttcagttctccctatgactgttagatactttttttttctttttaaagtatacatctgatcatatcactcctctaattaaacatgttcactggctccctactgattctaaacttgtaattccatctcccaaaatcctgctaaactgccacatccaattt

SEQ ID NO: 466381 - DNA, 388 bp, Homo sapiens
gataattaaatgccttcttcaaggatatgtattctataactatgttgtactaaatgtacatatcaggtttctattacattttcgagacactctcaaccttattggaaatttagctattaatattttatatatcatactgcaatatgttcaaaaatgagactctaggcatcatcttagtatccctggaarttcactttgattactttgtgctggattagacctatttttctcccagggtctagagagataaaaagaagtttgagaacctggattagataaaggcttttcttattgtctgattgtgtgacatcaggaagacaggatgacactcatttttataacacagggaaaaaagagtctgctaggatagtaaaacaattaaatgaaa

SEQ ID NO: 466382 - DNA, 596 bp, Homo sapiens
gctttattgcactcatcagaaccttcagtgttatgtttactacaagtgtttactctaagtgttgagaccagatattcctgcctcatttttaatttagcagtaaggcattcaaattctcaccattaaatacgatgctacctgtagatttttggagaygtactttatcattttgagaaagatcttttctattcttactttgctgggagtttttatcaagacaggatgttatattttagacaaatgtattttttaatctcttaagataatcacatggtttttatttgtatttttatatatgaagaatatcattaatttctaattgctgagccaatcttaaatacataggataaatcctgcttggttaggagaaattactattttatatcttgttcaatttgatttgttaaaatcttgttatgaaagtttatgcctgttatgggctgaaatgagcccttccaccccaaaattttatatattgacatcttaacctccagaatgtgactgcatttgaaaataaagtcttagaacagataaataaagttaagtaagattattgagggtgggtgttaatccagtatgaccggtgtttttataag

SEQ ID NO: 466383 - DNA, 603 bp, Homo sapiens
gctattctatgaactattctaatgtaagtgcttatttttcctaatttcacagatcagaatcactaccttaaagtcaaaacatctaagcaggctatgtttagtgtattaatattttgatgtatcttggagaacagtataccgaagatttcctttaaaatattccggatgttgcacaatcatttcaaaactaaagatataaaaatgaacaattcatttgatgatgccagatkgaatcaaacgataagctgttgccttactatgttatgttaatgtagatctgctgttacaaaatcaatctgaggaggtctacactaaatttagaaaacaaaaaaaaagaaagaacagaataagaaataaacaagggaaagaaccaagggcaaggaaaaaggtgaggaactgagcagacagggcaaataagttccctaacatgtgggagagagaactttcattgtctgggagccagaactcgtctcttgcatggagagaagtagtctttcattggtgagcctcttagactgatctatcatgggggcttctgcacggaggtgcagtcagcatcaaaattaactggactcttaataaaaagagacatttttctctttt

SEQ ID NO: 466384 - DNA, 616 bp, Homo sapiens
ttgtgggggaggatggtggtgtaatattaaatcatttcttattcactttatcttggattgcagcaccgtgtctggccttgataggttgctgatgtaaaagacataagtcaaaaatttaatgaatcaatggagtgggtacgactaaattgtgaaattgtgatccccccaccccaactaattcacacttctgattttccttcttgccatacatggccttgctaggatacaggtaaactgaggaaataaagatacttttcatgctgataaatatttagaaacctattttraggttaatgtgttgtaattgctattaaaatttaaagcatggtgcattttaaaaagtaattcagattctgaaagaaagaaaacaagtgactgaatttctaaagtgagcacaaaatgaaagaaatgggtcattttgaggcaaaactgtaataatagcttcaatgtttataaaattactttttccagtattgaagagataggtcatattagagagaagaaaagagaatgagaaagagagaagcggcttccagccatatatttattttgttttataaatacctttatttaaaactgtatttcattttaaagtgctcttcagagtactattccc

SEQ ID NO: 466385 - DNA, 441 bp, Homo sapiens
aaaaacgataataaacaactatgttaccagtttacatgtttattatattatactttttcattactttaaagtgtacttattatacttgtgtttttaaaaagttaactctaaaagagttgcaggcagtaccttcaagaattattccagaacaaggcattgygatcacaggagacgacagctccatgcatgttattgcccttgaaggccttctagtgggacaaagtgtggaggtgaacattacactgatgaccttgaccctgtgtaggcctaagctaatgtgtatgttagtgtcttagtttgttgaaaagagattcctatttcatggacactaaatacaagtttataaattaaaaatataaaattaaaagtggaaagagcttatagaataaagaaaaactattttgtactgctgtacaatgtgtttgcattttaagctgtgtt

SEQ ID NO: 466386 - DNA, 441 bp, Homo sapiens
aaaaacgataataaacaactatgttaccagtttacatgtttattatattatactttttcattactttaaagtgtacttattatacttgtgtttttaaaaagttaactctaaaagagttgcaggcagtaccttcaagaattattccagaacaaggcattgtgatcacaggagacgacagctccatgcatgttattgcccttgaaggccttctagtgggacaaagtgtggaggtgaacattacactgatgaccttgaccctgtgtaggcctaarctaatgtgtatgttagtgtcttagtttgttgaaaagagattcctatttcatggacactaaatacaagtttataaattaaaaatataaaattaaaagtggaaagagcttatagaataaagaaaaactattttgtactgctgtacaatgtgtttgcattttaagctgtgtt

SEQ ID NO: 466387 - DNA, 557 bp, Homo sapiens
ctttcaaaattgacaagctaattataaaatatatttaaacgaacaaagataggagagtgaaaacacttttgataagaatgaagttgaatggacttgcatggtcttattttgatacttctgttttactttaaacatgaagacaatgtggtaatagtgtctaagtattgacatataggtaaatataataaaataaagttagatacacacgtatataattaacagattttttctaaaataccaacataatttaaaagagaaaaaaatgtatttttaacaaatgttgttacatttgtattttyatataagagaataaacttttagctcccaccacacacaaaaattagttgttaatgtgtcggagaccaaaatgtaaaagataaaagtctaaattttcataagaaaacccaaaaaattttgtagttgtattaatccattcttacactgctataaagaaatccttgagactgggtaatttataaagaaaagaggtttaattgactcatgattctgcaggctgtacaggaagcatggctggagaggcctcaggaaactttcaa

SEQ ID NO: 466388 - DNA, 616 bp, Homo sapiens
gtgccggtagtccttgctattccagaggccgaggtgagaggatcccttgagcccaggagttcaaggttagagtgagctatgaccttgccactgtattccagcctgggtgacagaatgagatactgtcttaaaaaaaaaatggtgamaaataaatcaccttttcgcaggtaaaaataaaactgaaataaaatgaaattttaaaattctcaatgttaattataaaatattaagtagaagtaaaacttgatttatacaaatattgaattgtgcaaactatatcttagaattaattgaacatggtatttaacataatatgatctcaaaatttacacattaaacctatctatattaacaacttctcttcttccctctttttgcttctaattctcatttttttttataaacttgataaagatcacacatatgtttgcagaatggtgtgtacttacaaatagttaactggtaaagagttcattggtgggaggattcaaaatcccagagaattagccactgggtttcctcaatactttgtgcatctagcaatgcttaaaaattccattaattgttatccctagtgtattccagagaaatgaaaagagaactttagaattagatt

SEQ ID NO: 466389 - DNA, 565 bp, Homo sapiens
gtgcttaaagctcttaaattgctaaatagcaataatcacagactttggcagtgtgccctattagcacatcttcaactgttatataagcagccctaaacgaaaattagcccacgggacccctctaaacactcggctaaaaataaacttcatcatctctcatttcaatgttcatgaggtcataagcattttgtacattccatgcacttgtcatgtcagtacctttgagctcaggaagttgrcacctagaaaaatcaaatattgagatcctaatggattccagaaaatagatttccctcttcaggcctgaaaaacgcatacaacttgaagactactgattatgcaaaatccaggtataaagcaatatagtataaagcatttagcaaaaacgttctcttgctatttttttaattacctgcctgacacatgctcaaagacaggatggagacttgtgtcctgcagaggcttcatatatatttgttattattactataaatgcaagatagagttcatagccaaaaattaaaaagaacctaagacatgcctatcttataatatagtcttgaaa

SEQ ID NO: 466390 - DNA, 600 bp, Homo sapiens
tttcacgactgggccgggtgcagtggctcacgcctataatcccagcactttgggaggccaaggcgggtggatcacctgaggtcaggcgttcaagaccagcctggccaacatggtgaaacttgtctctactaaaaatacaaaaattagcccagcgtggtggcacacrcctgtaatctcagctacttgggaggctgagacaggagaatcgcttgaacccaggaagcagaggttgcagtgagccgagatcatgccattgcactccagcctgggtgacagagcagactccatctcaaaaaataaataaataaataaacaaaaataaaatattttcatgagtgactcaggaaagatcccaagaaaatgatataaatctacaagagggtgcagatttaggaatcttaatttcaaatgactgcaaaaacaagcacctgcactccgggtgagcacgcggagctccgggcgccctgcttttcatgctctctcttcagtcactgcatggatgggcaaagaacctaagcctggaattctggtgctggctccagcgccaacccctgggacgctctgaaaatcagctttgccatcatctgtaagtcagggatg

SEQ ID NO: 466391 - DNA, 539 bp, Homo sapiens
gaagtgtagaagcttcctagatagatttggctctgactttggagtagtctcagaacatttaaactttaaaaataacctctttactcaacaagttataccacgagcatgtctgacacatcaggctcaagatttttctatcatactattttgcttctctgaaaagaaaataaactttcccccagtttctactaaacaaagattcaagtwaaaaaagaagcaacttagctcccaagaagacaccaaatcatacaatttgcacacgtttcttgaatgtatgtcacacttcaataaaagtttttttaataatgcaataaaatgatactgattttagtggattagaaaacaagagatcataaaaactctggaagtctgaggagctggttcctagggagccatttccccctttgttcaaaagcagccttctccaaatctaccataggagttctaactgcttggaaatcctctggagaatttaaggtcttgaccaatatttatctataagactgttcttgtagctaagttaatatgtaaatgtcagt

SEQ ID NO: 466392 - DNA, 539 bp, Homo sapiens
gaagtgtagaagcttcctagatagatttggctctgactttggagtagtctcagaacatttaaactttaaaaataacctctttactcaacaagttataccacgagcatgtctgacacatcaggctcaagatttttctatcatactattttgcttctctgaaaagaaaataaactttcccccagtttctactaaacaaagattcaagttaaaaaagaagcaacttagctcccaagaagacaccaaatcatacaatttgcacacgtttcttgaatgtatgtcacacttcaataaaagtttttttaataatgcaataaaatgatactgattttagtggattagaaaacaagrgatcataaaaactctggaagtctgaggagctggttcctagggagccatttccccctttgttcaaaagcagccttctccaaatctaccataggagttctaactgcttggaaatcctctggagaatttaaggtcttgaccaatatttatctataagactgttcttgtagctaagttaatatgtaaatgtcagt

SEQ ID NO: 466393 - DNA, 539 bp, Homo sapiens
gaagtgtagaagcttcctagatagatttggctctgactttggagtagtctcagaacatttaaactttaaaaataacctctttactcaacaagttataccacgagcatgtctgacacatcaggctcaagatttttctatcatactattttgcttctctgaaaagaaaataaactttcccccagtttctactaaacaaagattcaagttaaaaaagaagcaacttagctcccaagaagacaccaaatcatacaatttgcacacgtttcttgaatgtatgtcacacttcaataaaagtttttttaataatgcaataaaatgatactgattttagtggattagaaaacaagagatcataaaaactctggaagtctgaggagctggttcctagggagccatttccccctttgttcaaaagcagccttctccaaatctaccataggagttctaactgcttggaaatcctytggagaatttaaggtcttgaccaatatttatctataagactgttcttgtagctaagttaatatgtaaatgtcagt

SEQ ID NO: 466394 - DNA, 572 bp, Homo sapiens
tgcctcaacctccttagtagctgggactacaggtccacaccaccacacccagctaattttttttgcatttttagtagagatgggtttcatcatgttggccaggttggtctcaaactcatgaccttaagtgatccacccatcttggcctctcaaagtgctgggattacaggcgtgagccactgcatctggccctgacttcagaattcacttgcatattactatgaatggactcaaataaacctttgctgatttgtttgcatgttcagtaataaaattagcatgctggttaaaattggattttgtgacctttttttccaggacaattgaagtcaaaattgcatacacaaatagctcagacaaggtttttagagtcaatggataccagtctatggaattatgggtataattttctggtagtgtgccttttagcccctaccctttgggtaccaaaacaccaattttgacttcaattgtcctggaaaaaatgtcacaaaagccagttttaaccaacatgcytatttgatacatattaataatgataatgtaccatcatttcaccaaaacacccaaaa

SEQ ID NO: 466395 - DNA, 572 bp, Homo sapiens
tgcctcaacctccttagtagctgggactacaggtccacaccaccacacccagctaattttttttgcatttttagtagagatgggtttcatcatgttggccaggttggtctcaaactcatgaccttaagtgatccacccatcttggcctctcaaagtgctgggattacaggcgtgagccactgcatctggccctgacttcagaattcacttgcatattactatgaatggactcaaataaacctttgctgatttgtttgcatgttcagtaataaaattagcatgctggttaaaattggattttgtgacctttttttccaggacaattgaagtcaaaattgcatacacaaatagctcagacaaggtttttagagtcaatggataccagtctatggaattatgggtataattttctggtagtgtgccttttagcccctaccctttgggtaccaaaacaccaattttgacttcaattgtcctggaaaaaatgtcacaaaagccagttttaaccaacatgccwatttgatacatattaataatgataatgtaccatcatttcaccaaaacacccaaaa

SEQ ID NO: 466396 - DNA, 595 bp, Homo sapiens
ttgtgggatagaaacttgacctactcctctcctaccaataacagtagaattacagaatcatatttgaatggatccctggggcatcctcgtccaacttatgcatgaatctttcagacaatatcccccagtaggcaatcatttcagcttgtggwtccctcagattccggacaatctagcaccactgaagcagatcaatcaaaatttgaggctttggagtctaaattggcctccctataacttctccttaaatttaggtcctgatcttagagccaaagagaatgagatcatcttttccctcttccacaagacaggtttctgagtagtttgagggcagctgccatattctgtgcttcaaggacatttttcagaataagcactagacacctctacttcttttcttcaattctttgtcatatgcatgatttcactctccttgtgataccttcctttctttaaacatatttcaatatgtcaatgccttttaaagctgtagtacagagagctgggcataatattgtctgaacactgtagagaaaaacaggacactggcttccttattctgtactctcatcttctattaaggaagttctaaggt

SEQ ID NO: 466397 - DNA, 444 bp, Homo sapiens
cataacctatcaaaacctttgggatacagagaaagcggtgctaagaggaaagtccatagcattaaatgcctacagcaaaaagtctgaaagagcacaaatagacgatctaagctcacacctcaaggaactagataactaagaacaaaccaaacccaaacgcagcagaagaaaagaaataagaaatatcrgagtataaataaatggaattgaaacaaacaaaaaatacaaaagataaatgaaacaaaaagctgtttatttgaaaaaataagcaaaaatgatagaccattagcaagattaaccaagaaaaaaaagagaagatccaagtaaacttaattagaaatgaaatgagagatattacaactgatactacggaaatacaaaagatcattcaaggctactacaaacatttttatgtccataaactaggaaatctagaggagacgg

SEQ ID NO: 466398 - DNA, 590 bp, Homo sapiens
cttcaatttttgtggaactcacctctagttgccttcagagaaaagcttcatgggagacacatttttctgagactttgcatgtctgaaaatatcttttttttttctctaatcaaacttgactgtaagtatggtgaagtatacaattctaggtttgatataatttctctcagaattgtgaggggattcttcaattttcctttccattcagaatggtagttgagaagtttggcattctgtttctttaaatgtaaccctttttcctttctctgaaggcttttagactattttctttgttcctggtgttctggaaatttccaattatgtgtcttggtatgggcctttttgcttattggactggrtactcaatgggctttttaattcttaaaatatgtgctttcagttttggaaaaaaattgtttctttgataattttcttctcttcctttccctactgtttccagaagtccaggtatttgaatataggacctccccaagtgattatctaattgtctctcctacttttcatctctgtggatttttaactttctcactgaaaaaaaataaaagcctcaacttttatcttcctttgat

SEQ ID NO: 466399 - DNA, 563 bp, Homo sapiens
ccagctcaccaggattttggcacatgggtgcggagtataccacactgctcttttctctcttctggaaagacacaaagtasacaagcaattttgcttggggaaatactcgattttcctattcttttgggtgggggctggtgtggagttgggccttcctctttgtctcctgggcccctcaatcacatttcttaagatctgtgtcaggtggttctagtgagaaagatggcccagcccaggctctgaccctctgcgtagcctgttcagaggattttggcaacattgtcagtgggaaaagcatagctgagttctagtgatgagttctagtgattggtgctgctctattaacaacagggatgtgaacaatttcaggtaggagatcagtgctaatagaaaagcgatttctttttatttcttcaatgtttatagactctgagcaaaattgctaacggaggcatctccaatttgcaggaataacaccttggtaccatgttggaatagagactcttgatacataaatgtgattgggacacaaatgcacagcaagttatggcatctctttcagt

SEQ ID NO: 466400 - DNA, 496 bp, Homo sapiens
cattatcatttctgcaagagtcatagtaatgtctccttgctatttgtattatattttcagccttctctcttcttttttcagtcagtctcaccagaagtttttcaattttgttaatgtcatcaaaaaaccgatgtttgtttttggtaattgttatcgtttgttcctttacattctaatgttaccaattttatttctttccctcaacttttattggatttttctayattttctaactttttgaaaaaatgcttagctcaccaattcttagccctttatcttttctcatataagtttatactaaaagtatctacctaaaaattgccttaattttatctcacaggtttgatatatattttcttaaatgtaaatatgacaatacaaatatttgcaacatctctgtgtctgcttcttcagttttttgtttctgcaaaggacttagaaataagacaacttaattaagttgtcttatttccttgtggatctatttattttttat

SEQ ID NO: 466401 - DNA, 623 bp, Homo sapiens
tttgactcttccagtctgcctcgttatttttggtgtgtaagacatgtcaccatagagatagaacatggaagaaagtaatatactttgactctgtaatgcagattctgctgagatcaccctggcttgagagagtcaaatggaattcacttgaacctttattcctctggcagtgagggacatttacctaaaagtctctgtgcaactcttttaggtaaatgtggtggtgagatgtgctgttttccttcattagctctgtttctctgcttctactgagtaagttcagtgtagtgggattatctcagcctcagcactgggtgtgtgttgctcttttccttattacattattccatgctagaaaccacctgatatgttcttactctcaagaatacttatctgcacagggttgagaggggcctgactttccctgaagtctccaatttacagggggaatttatattacaacattgcaaatcatttaaatcaaattaaaatacccygattttaaaagtccttagaggagactgttacaggaatttctcattgctgttctcccctccccaaactcttctattggctgctttagttcctcgagctcacagccaatttcagttaacacgtagaca

SEQ ID NO: 466402 - DNA, 596 bp, Homo sapiens
gtggggaccacagctttctccacatgaggcctgccaggcagtctttgtgattgcctgtagttgagcctgaaagaacacacacaggattctagccttgagtctgactcctcaagattctttgagaatagtttgaaaactatcataatgcttgataaaatgtaggattgctttctgaaggaaagatgtagacatttggctgttagggagactggagtttaataaagtctgtgctaataaatagtttatacctcattggcatagtaaactcactttaatacactggttggtcatctttttattctttttcttttttttgagagacagttctcgctctgtcacccaggctggtgtgcagtggtgtgctcatggctcactgcagctttgacttcccaggctcaagcaatcctccctcctctgcctcctgagtagctgggactacaggtgcacaccaccacgcctggctaattcttgtattttttatagagacagrgtttcgccacgttgccctggctggtcttgaactcctgggctcaaggggtctgcccacctccaccttccaaagtgttgggattacaggtgtgcgccaccgtgcctgg

SEQ ID NO: 466403 - DNA, 425 bp, Homo sapiens
ggctttaacatattagtgatagttattttaaattatctgtctgataatgccaacaactgtgtcatatctaccttggtaaatattctatgtgtacttgaaaataatgtatatttcactcrcgtctgtgtgaagagaccaccaaacaggctttgtgtgagcaacaaggctgtttatttcacctgggtgcaggcgggctgagtccgaaaagagagtcagtgaagggagatggggtggggccattttataagatttgggtaggtaaaggaaaattacagtcaaaggggggttgttctctggtgggcaggagtgggggtcacaaggtaggggagctttgagtgaggatgagccaggaaaaggaatttcacaagacaatgtcatcagttaaggcaaggaccggccattttcttttcttttgtggtggaatg

SEQ ID NO: 466404 - DNA, 457 bp, Homo sapiens
aactttaccacaaagctatagcaaataagacaatgtggtactgaccaaaaatggacacactgacaaacagaacagactagaaagcccagaaaygaactcactcatgcacagtaaattaattttgacaaatgtgccaagaatacacagtgggaaaacatagtatcttcaataaatggtgctggaaaaactagatattcacatgcagaagaatgaatcaaacccttatctcaaacatatatgaaaataaactcaaaatggattatagtcttaaatgtaagactggaaactgtaaaactacttgaagaaaacacatggggaaaactacatgacattgatctgggcaataattttttgtattaaaccccaaagcactggcaagaaaagatgaatggcattacctcaaactaaaaagcttctgcacaacaaaggaaacgagtatcagtatgaagagacaacc

SEQ ID NO: 466405 - DNA, 546 bp, Homo sapiens
gcccagcttttctctcaaaattcaccaatagcataggtcatcctccaattcacatcttctcagtaaatgaggttgggggaaagcaaatgtcttacagttggaggagctctctctgcatgaaaagaagcatcaggatttggaaagaagtcccccgttccaatgacaagtgcattccattatcttctccttgccctcaactgtttaactaattgtattacttttcaattgctgagtagcaaattatcacaaatacaccagcttaaaacaacayaaatttattatctcacagtttctatgggccaagattctgggcatggtttaactgggtcctctgcaaagctgtaatcaaggtgtctgtcagagcttggttctcacctggaggctcaaatggtgatgaatccacttctaaggtgttgacagaattcatttccttgttgctataagattgagagtcagcttcttgctggctgttggctggaggccatcctaaactcccagaggctgtctgcagttccctgacatctgaccctcttcagaggccctctc

SEQ ID NO: 466406 - DNA, 493 bp, Homo sapiens
acataaattgtgaagatttcatggacatttattagttccctaaattaatacttttataatttcttaygcctgtctttactgcaatctctgaacataaattgtgaagatttcatggacacttgtcacttccccaatcaatatctttatgatttcctatgcctgtctttactttaatctcttaatcccatcatctttgcaagctgaggaggatgtatgtctcctcaggaccctgtgatgattgcgttaactgcacaaattgtttgtagagcatgtgtgtttgaacaatatgaaatctgggcaccttgaaaaaagaacaggataacagcaatgttcagggaacaagagagataaccttaaactctgactgccggtgagccaggtggaacagagccatatttctcttctttcaaaagcaaatgggagaaatatcgctgaattctttttctcagcaaggaacatccctgagaaagagaatgtgtccctgaggggaggc

SEQ ID NO: 466407 - DNA, 545 bp, Homo sapiens
ttccactgatctatttatctatccttatgccaataccaaactgtctttatcactgtagctctaaaataagtcttcagatctggtaccctatgtcttccaactttgtctttttttttttaaggttctttggctaatgaacagaatatatcttgtcaattattattagtattagtattagtattagtattttgagacagggtctcactctgtcacccaggctggagtgcagtggcgtgatcatggttcaccgcagcctcaacctcctggactcaagygatcttctcacctcagcctcctgagtagctgggtctacaggcgcatgctaccacacccagtgagtttttgtacttttagtagagacagggtttcaccctgttgcccaggctgttcttgaactcctgggttcaagtgatccatccaccttggctgtgattacaggcatgagccatcatgcccagcctcttgtcaattattttaagtcttcctatgtctttcaattatgttttgtagtttttagtgttgagaacttgcacattgttcagaag

SEQ ID NO: 466408 - DNA, 612 bp, Homo sapiens
taatgtagtcaaatgtataaatcttttcctttacagctaatggtttttgtgtctagttgaaaaaaatcctttcctaaagctatggagatattctatattctttttaaaaagcactacaggtttgcctttcacacctaggactttaacacaaaaaacagatggtggggatgggggagctggtgagaagtaccagtctaatttcctttttttccaaatgactactcaaaataatttattaaaagtcattaatttcccttctgatcagccacagcacttctttcatggaaatgtctatataagcttgggtgtttactactaggctttctatctactgaccattctggtatcattatcagtgttataattattctattttcctaataaatcttgatatatagtatagcaagtccacctatcttgctttttgtattcaaagcctgtccatatacattctagaatcagataaacaggctaaaaaggctgaaatttttatggaattacattgaatctacaagtcaatttgagcagaacyggtatctttgccatactgcctttaattcatgaataagaaatttctgtcagcatatttagatcttctttagcatccctcaa

SEQ ID NO: 466409 - DNA, 555 bp, Homo sapiens
gttgctgaaaactgggggaccaaatgggatgtcacagaactcaccaggaaactataagtcagctggtgcactgctggtactcatgaaatcacctatsagggtgttgctgaacttgctgtaaggaagtctcctgcaggtgtgccactgaacttgtcacagggaagctgactgctagggtactgctgaaacttgctgggtgtctttttggatagcaggagcaaaaagaaaaagacacactggaaccaggaaaagaactctcttctttctccagtatcctttctgtgctcgctattgaaagcttaacactgtgccaatggacaggagacaaatgttacagtatcacaagcaggcaaaaaagtagatttatagccaagaggcaatgggtaataaatggcagactagttttctgacagattctgtcataaatgggagttgaattttgccaaataacttttctgcatctattgaaaaaattaattggtttttgttttctaatattactatattaattttcaaatgttataccaacttggcattcctgaaacaaactccact

SEQ ID NO: 466410 - DNA, 555 bp, Homo sapiens
gttgctgaaaactgggggaccaaatgggatgtcacagaactcaccaggaaactataagtcagctggtgcactgctggtactcatgaaatcacctatcagggtgttgctgaacttgctgtaaggaagtctcctgcaggtgtgccactgaacttgtcacagggaagctgactgctagggtactgctgaaacttgctgggtgtctttttggatagcaggagcaaaaagaaaaagacacactggaaccaggaaaagaactctcttctttctccagtatcctttctgtgctcgctattgaaagcttaacactgtgccaatggacaggagacaaatgttacagtatcacaagcaggcaaaaaagtagatttatagccaagaggcaatgggtaataaatggcagactagttttctgacagattctgtcataaatgggagttgaattttgccaaataayttttctgcatctattgaaaaaattaattggtttttgttttctaatattactatattaattttcaaatgttataccaacttggcattcctgaaacaaactccact

SEQ ID NO: 466411 - DNA, 487 bp, Homo sapiens
acacatttctctgtcatacacatcaaaagagccaatacttytgtctttttttttttttctttgagatggagtctctgtcgcccaggctggagtgcagtggcatgatctcggctcagtgcaacctctgcctcccagtttcaagcaatcctctggcctcagcctcccaagaagctgggattaaacatgcaccatcatgcccagtcaattttttgtacttttagtagagatggggtttcaccgtgttggccaggctggtgtcaaactcctgacctggaactcctgatccgcctgcctcagcctcccaaagtgctgggattataggcatgagccattgtgcctggcttcaacttacttttttaaaacttgaatcacattctgtagactgaaaaataacagaagttagcacttataccatcacttcattaattccctgtcacagcctaccatgagggttcattatcccttttttacaaatgaagaaaccaag

SEQ ID NO: 466412 - DNA, 573 bp, Homo sapiens
tgccaccaatttttccttttttttaaatagaaaaaagaccagctcaaaaaggtttcctgaggtcactcagtgcatagatgaaggaaagagggtttaatttcattctattaaccgtactgtcccctaaacttacaccacagtgtcccctgcacccctacatcacaggaaaaattagctcttaggagggtttttcttataattgggtgtgtatgtattaaaatccagaagtaatataygaacatatacttatttaaaaattcaatcttgtaggcaaggctgcttctctctgatttctcagcccaggctgaggccaagccctttacctgagatcaccttgtttcagctcgttgctttgtttggatttcgttattaggctgacctgtcccccatgggaacgaatctccaaaagataatgggagtcactggaagcacatgacataaaattaaaaatgatttacagatatttttcatgaatgtgccataaggttatgtcaagttatagaatcagtaactttcccctgccaactggtaaggaattaaaccttaaatttgttcaagtgactattttcagcc

SEQ ID NO: 466413 - DNA, 624 bp, Homo sapiens
caggtgcttcataaacactccttggataagtttttctggaagaaaaataatgtatggtgcaagaacacttacaaactaaataactatgtcatttagttctcatgctatccatataaaggaaaaattattctaatttttaccaaagaggaaaacaaaggcttacagaaggtaagctgttcagtagcaagcctgagagttgcagcaagtctgtccagctctcctgctatgctattaaatgaccttccttcttgctttttacattctctttatattggcctaacccctaaagataaacttagaatcatgagcgccttccattccccacacctgctgcgggttcccaattaataaccgcagaaagcatttgctattgttctgaggagctgggaaatcaatgtgttcattagcgagctccccctccctgcaatcagctaggaagacgaggtgctggggcctgttctccatatttctcttcaaccatctgtgactaaaaatgttctttgaaatttactcttctccaactctcacaattacaatttcatctcatctctacttctcccactacactaataatagcccctctcactgctamaaataaataccccagcaccctaacccaccctg

SEQ ID NO: 466414 - DNA, 326 bp, Homo sapiens
aaggtaacccagctgagacagagatgagatgctgagtttgtctatatgaggaactgaagcctgcagaatcctgtggtcctgcattgatctggatgacatgtatgaggacttttattttactttttycttgaaagaggaaagaatctgagatcagagaccttgaaggaaggaggaggacaacaaaggaagagcatggcatctgcaacctccctcttccacttcatttctggtctgagttggaggctgtatgagcagagaagtgaggtcagaagctgaagccgttgtgtttgtaagagactcagagcacaggccaagctgctgtgagg

SEQ ID NO: 466415 - DNA, 326 bp, Homo sapiens
aaggtaacccagctgagacagagatgagatgctgagtttgtctatatgaggaactgaagcctgcagaatcctgtggtcctgcattgatctggatgacatgtatgaggacttttattttactttttcyttgaaagaggaaagaatctgagatcagagaccttgaaggaaggaggaggacaacaaaggaagagcatggcatctgcaacctccctcttccacttcatttctggtctgagttggaggctgtatgagcagagaagtgaggtcagaagctgaagccgttgtgtttgtaagagactcagagcacaggccaagctgctgtgagg

SEQ ID NO: 466416 - DNA, 589 bp, Homo sapiens
cagctcactgtaatctccacctcccgggttcaagcaattmtcatgcctcaacctcctgagttgctgggattacaggcatgttccaccatggctaatttttgtatttttactggagatggggtttcaccatgttggccaggctggtctcaaactcctgaccttaggtgatctgcctgcctcggcctcccaaggtgctgggattacaggcacgagccaccacacccagctgaaaaggccctttttctgaaccacacatctcctgcattctcagcaggtgaggaagtaagctttaggaaaggtctcattgtcacttggggcatgggggtaaggattaaaaagaccacagattatccctctgctgtctgggagtactatggatccagtttctgactgtggtaggcagaataatggtccccaaagatgtcaggtcttcatctctaaaacctgaaaatgttatctttttaggaaaaagagtctttgctgatatcagtacattaaggatgttgagatggggaaattaccctggattatccaggtcaaccctaaatgcaattgcagtctctttataaaaggcaaaggagatttcaca

SEQ ID NO: 466417 - DNA, 598 bp, Homo sapiens
gaattgcaaaaaaataagcttttgttgctttaagtcaccaggtttgtggttatctgttagaggagccacaggcaactgatacactgatcttgagctgtatccamaatattaagttcagagtttttggacggtccctctgtttggttagtctgtgaccccttccttaactgatgaattggcagggctctgtgttatcatatcagaagatttttaattgtttgtttttctttaaactagtgagtatttagcatattttggtatctttaggctatgagttaattctatagttcttaaagataatacattgttccatctgcccatattcttccactttattcatacatatccatcagccttacaatccacattcttttcttttctggactactaggatgttagaagaaaaatacaggttctggcttatggctctttatctgtgaggttctgtacattgatcacacttctgagtcattttctataatgcaaagataacagtttccctttagttacctataacaaagaaatcagcagatacaagcagttaacacaaggtgtatatatatatatagagagagagacagagagagagagaagaatc

SEQ ID NO: 466418 - DNA, 598 bp, Homo sapiens
gaattgcaaaaaaataagcttttgttgctttaagtcaccaggtttgtggttatctgttagaggagccacaggcaactgatacactgatcttgagctgtatccacaatattaagttcagagtttttggacggtccctctgtttggttagtctgtgaccccttccttaactgatgaattggcagggctctgtgttatcatatcagaagatttttaattgtttgtttttctttaaactagtgagtatttagcatattttggtatctttaggctatgagttaattctatagttcttaaagataatacattgttccatctgcccatattcttccactttattcatacatatccatcagccttasaatccacattcttttcttttctggactactaggatgttagaagaaaaatacaggttctggcttatggctctttatctgtgaggttctgtacattgatcacacttctgagtcattttctataatgcaaagataacagtttccctttagttacctataacaaagaaatcagcagatacaagcagttaacacaaggtgtatatatatatatagagagagagacagagagagagagaagaatc

SEQ ID NO: 466419 - DNA, 598 bp, Homo sapiens
gaattgcaaaaaaataagcttttgttgctttaagtcaccaggtttgtggttatctgttagaggagccacaggcaactgatacactgatcttgagctgtatccacaatattaagttcagagtttttggacggtccctctgtttggttagtctgtgaccccttccttaactgatgaattggcagggctctgtgttatcatatcagaagatttttaattgtttgtttttctttaaactagtgagtatttagcatattttggtatctttaggctatgagttaattctatagttcttaaagataatacattgttccatctgcccatattcttccactttattcatacatatccatcagccttacaatccacattcttttcttttctggactactaggatgttagaagaaaaatacaggttctggcttatggctctttatctgtgaggttctgtacattgatcacacttctgagtcattttctataatgcaaagataacagwttccctttagttacctataacaaagaaatcagcagatacaagcagttaacacaaggtgtatatatatatatagagagagagacagagagagagagaagaatc

SEQ ID NO: 466420 - DNA, 598 bp, Homo sapiens
gaattgcaaaaaaataagcttttgttgctttaagtcaccaggtttgtggttatctgttagaggagccacaggcaactgatacactgatcttgagctgtatccacaatattaagttcagagtttttggacggtccctctgtttggttagtctgtgaccccttccttaactgatgaattggcagggctctgtgttatcatatcagaagatttttaattgtttgtttttctttaaactagtgagtatttagcatattttggtatctttaggctatgagttaattctatagttcttaaagataatacattgttccatctgcccatattcttccactttattcatacatatccatcagccttacaatccacattcttttcttttctggactactaggatgttagaagaaaaatacaggttctggcttatggctctttatctgtgaggttctgtacattgatcacacttctgagtcattttctataatgcaaagataacagtttccctttagttacctataacaaagaaatcagcagatacaagcagtwaacacaaggtgtatatatatatatagagagagagacagagagagagagaagaatc

SEQ ID NO: 466421 - DNA, 588 bp, Homo sapiens
tcttccactttattcatacatatccatcagccttacaatccacattcttttcttttctggactactaggatgttagaagaaaaatacaggttctggcttatggctctttatctgtgaggttctgtacattgatcacacttctgagtcattttctataatgcaaagataacagtttccctttagttacctataacaaagaaatcagcagatacaagcagttaacacaaggtgtatatatatatakagagagagagacagagagagagagaagaatccacaacattctaaataaactaatgacttgataaagccattttagagagcatatgtcataaataaacaagcaaataaatacgaaaacaacaagcagtttgaatccaggcagacctgggtttgaaacttagctcaaccatttagtagtcttctaaatttaggctagttatttatcttttgagtcctttttttaaaatctgtaatataagggtgatactatctgttatacaggtttattattataaagattaattaaaatgtatggaggagctcatgacaatgtctagtatataatgttattgttatgaatatgaa

SEQ ID NO: 466422 - DNA, 469 bp, Homo sapiens
agaatttttgcatatttatttaatgtatcctcaccacctatgacacagrtcctatcaactcgattttgttacgaagaggccagaggttagagaatagaattagatcacccaaagtgatacccctatgaggtggcaaagcacaacttgaactcaggactgtttgactcctgatgccatattcttggtaattggattattcaattcacccaatcctattgcctttctgaagaaaagtttattagttcatgtgaagagaaacaactatgagataaatctctccagtccctaccaaataaaatagaaagaaagctgacactctctacgatctgactttgtctttctagcctgtttcctactctgtctctctatagattctgtattcctaccagctactcacgctgtctattgtgtggccttcaataccctaccatatctctttgccatccattcttcacacatgaatgttcca

SEQ ID NO: 466423 - DNA, 590 bp, Homo sapiens
gtccttaaactttatttcaacaacaagaaatcatttaatgatcaattcttgtgctcctactaagtgccgggcttgtaataggttctgggaataagattcttcaccagctttcaggacgttcacagattagcaagagrgacaaacagatggagagagaataacggtgcaccgtgattggtaaatgcaatgatctagaagcagaggttcatgtgaaactacagataagatacctaacccagcctaatgtcactttttccaaggtgccttccctaactcttcatatgtgaccaggtcactctgtaatatgctaatatgcttgcatggcaccctgagccttttcttcatggcattagtcatggtctaaagtgagttatgtgtatgataatttcatcaatatctgtttggcttctagactctaagcccaggaaaatagggacctcatttgttttgcttaccattatatatccagcacctagcacagtatctgatattttaatttgtggttgaatgaatgaatgaatactgtcatatgtgagcttaattttgaaggacatggaagaagtaacccaggtaaaatgggcaagaggaaa

SEQ ID NO: 466424 - DNA, 590 bp, Homo sapiens
gtccttaaactttatttcaacaacaagaaatcatttaatgatcaattcttgtgctcctactaagtgccgggcttgtaataggttctgggaataagattcttcaccagctttcaggacgttcacagattagcaagagagacaaacagatggagagagaataacggtgcaccgtgattggtaaatgcaatgatctagaagcagaggttcatgtgaaactacagataagatacctaacccagcctaatgtcactttttccaaggtgccttccctaactcttcatatgtgaccaggtcactctgtaatatgctaatatgcttgcatggcaccctgagccttttcttcatggcattagtcatggtctaaagtgagttatgtgtatgataatttcatcaatatctgtttggcttctagactctaagcccaggaaaatagggacctcatttgttttgcttaccattatatatccagcacctagcacagtatctgatattttaatttktggttgaatgaatgaatgaatactgtcatatgtgagcttaattttgaaggacatggaagaagtaacccaggtaaaatgggcaagaggaaa

SEQ ID NO: 466425 - DNA, 596 bp, Homo sapiens
tcgtattattccaacttctacacttttctttgtaagcttgtgcatcgtgactgaaagtgaaacagaaaatgacattccatcctcagagtcatcgacaagacactcaagacactactattagggaaaatctaaatgtactgttttctgaatataagggtctttctctgctcttgcatgtgggcttgactgacagtagaaaggacaagggactaagtcagattaactgggatgctagatttccctcagctacgtgtccttctggggctggagtcaaggtcatattaagcaatgccactaagacttttcacaggaagtttatgagatggttgaggtgaagaaagagaggtttaatcaggagggaggagacctgccatgagcctcaaggttcatggcacatcagagaggctaaaagcaraaacattgagtgccagagttcaagatggaggtaaaaatagaacagactgtatatttcaaagtagagagaatgaagaatattttcagacacagagaagacagtggcaaaaagaggtgtggatataagccaagatccattcaggaacacattgtacaaacagggccgctatgcctctttagga

SEQ ID NO: 466426 - DNA, 596 bp, Homo sapiens
tcgtattattccaacttctacacttttctttgtaagcttgtgcatcgtgactgaaagtgaaacagaaaatgacattccatcctcagagtcatcgacaagacactcaagacactactattagggaaaatctaaatgtactgttttctgaatataagggtctttctctgctcttgcatgtgggcttgactgacagtagaaaggacaagggactaagtcagattaactgggatgctagatttccctcagctacgtgtccttctggggctggagtcaaggtcatattaagcaatgccactaagacttttcacaggaagtttatgagatggttgaggtgaagaaagagaggtttaatcaggagggaggagacctgccatgagcctcaaggttcatggcacatcagagaggctaaaagcaaaaacattgagtgccagagttcaagmtggaggtaaaaatagaacagactgtatatttcaaagtagagagaatgaagaatattttcagacacagagaagacagtggcaaaaagaggtgtggatataagccaagatccattcaggaacacattgtacaaacagggccgctatgcctctttagga

SEQ ID NO: 466427 - DNA, 597 bp, Homo sapiens
tagcactctcattggccagttccaactagaactcagaattcaatgagctcagcttgatggcgtccttaacaattagattccagggcacagagcaaggtggagaagaatggaaaagcaatctggaagggcaaacggaggatgtccagcacaagggtgtatctgctccctttggcacaaaagataggcctagttggagtccactctgtaaaatgggacaccttaaaagaataatggaattttagggctagagaagtccttaagatcattcagaccagaatttataaacttgcctatatctagcattcaggtgtggcttacatggctaatgtagctttaataccaaaaagcaaacactagcaggcaataaacaaaactcaaaatttaacattaatgtccttaggtcaagtatgtagtttccagttcaccacgattatcatcattccctattgtccaacaccccgtatacattcttgcctcccagaagtatttgacatgaggacttgtaaatagaaaagtsaagcttcttcatttttcagataaagaagctgggatggcaaggaaacttgtttgcccatggctgcacagccttggtgggaa

SEQ ID NO: 466428 - DNA, 525 bp, Homo sapiens
gtgaagaaaacaaaggacttgtcctcagggatatcagtccacagggcagaacaaaacaggagaaacaaataacagtagtgccatcaggtttttctaacaggtgaagtgtacttaaggtgctattgatttaaaagagagratttgattctgaattgaagaggagacataatgtctgagctgggttttgaaacataggagataatcagatgacagagagggtattccaggcagagggaatagaatatgcaaagacaaggaggcatgaaacacagtatatgtttgggaaccataagcagatccagaactttgcagtatgaatttatcatgtcaatttcaagactctatttgatgggtgatagagaggaataaaggattttaaacaggagaatgaagtgatcccatttatgttttagaagtatcccctgtggacaatgttaggaggacatggagaaatgaggaacgcctgttagaaagcagtgctagtgatcaaagatgagaaatgatgaaatataaggtgtgtgatgg

SEQ ID NO: 466429 - DNA, 540 bp, Homo sapiens
taggtaaaacacagtcccattttccagggcaactctgtagaccagtgtttctgtcactgagagyctgttgccagttgatccaaaggcagtatgcagttagctgttacatagaaactagtgatggcatgggctttcagagtcacttattttattcccaaacagtttggaaattttagaataaagcagaaaagcaagtgggttaagagaaaggaaactcatatttattgaacagtatcctgttctaggcactagcttgggcatctgcaatagaaataacttgtgcaataatggagacaatgctgcctgttcaatccaaaaggctcatttgctcagcactgaatttatgtcaggggacaacagagatggaggacaattatgatgtgatttttgccatgtcattcaggatatccatgatactatttgggcaaggatagtcacaagcaggcaaaaaatatataaagccaggatattgaaagattacaaccccctatacacatgtgcatagtcttatcactgaggcataactattgacattaagca

SEQ ID NO: 466430 - DNA, 539 bp, Homo sapiens
gtcacaaactgtttgtgctctcagggagattacagtctggcatgagaaggactgaccaatcagaggcaattcaaatgcagtgtggttctgacagcacaaatacaggaaatgaggaagcagaacatctgagttctgggcccactcagaagtgaccagagtaattgattatagctactgacccctaaatctcaacagcttaacataatcttaagtgagtcaggaggctctactccatggggtgactcagggactcaggttgccttcattatacgtctctgacacccctgtggcctcttcagggtccacttctggattcttccttctggcctactgtatatgtaactaacctgcacaaygtgcacatgtaccctaaaacttaaagtataataattaaaaaaaaattaatgtttgtgtttccccaaacacaaacatatgtttaaattctaatacccaatgacagtattaggaagtggggcctttaggaggtgataaggcaatgaggatagagctgtcatgaatgagattagtgcccttgtaag

SEQ ID NO: 466431 - DNA, 419 bp, Homo sapiens
aaaacaagaacaggatcattatttccatttgataaatgctaaggagattgagagagagagatccagaagtttgcctaatgtcacagagttgggctagggacagaggcatattgagactccaaggcccttgacaccttgttcaacatggctcacacctcacctgttttttttcccactttggctccaggcccctaagtccaggctaatttacatgtgaaacctgcaagttcttggtaggtgaccaatatataatgtgtagctaatgagataaagtatagtttcacttctgttacaaawgaaagggaactctcaagggtatcataaaatctggcctttctcagtggaactcagagagttttatggacgtcaggaaacaatccatcctcacaatggaccagtatacctgggaactcccattg

SEQ ID NO: 466432 - DNA, 613 bp, Homo sapiens
atactattaataactaatacaatttatggtgataataataattattggcatttactgagagactgtatatgtactttgttaacttttttttaaaaccttacattaactcatctaatccatttgaaggaggatcaattattaatatccatcagacgagtaaactgatacatagaaaaygtaacttggatgggtgcagtggctccacctgtaatcctagcactttgggagactgaggccagaggatcatttgaggtcaggagtttgaaatcagcctggccaacatagtaaaaccccatctctactaaaaaaaaaaaaaaaaaaaaaattagccaagcgtggtggtgggtgcctgtaatcccagctactcgggaggctgagggaggagaattgcttgaacccaggaggcagaggttgcagtgagccgagattgcgccactgcactccagcctgggcaacaaagcgagactgtctcaaaaataaataaatgaaaaaaaatgtaactcatccctggtcccccagtgagaagctaggagattcaggggttcaccttcatgactgtctgactccagagttggaattcttaatcagtaaaattctgttcctcagttatttg

SEQ ID NO: 466433 - DNA, 613 bp, Homo sapiens
atactattaataactaatacaatttatggtgataataataattattggcatttactgagagactgtatatgtactttgttaacttttttttaaaaccttacattaactcatctaatccatttgaaggaggatcaattattaatatccatcagacgagtaaactgatacatagaaaatgtaacttggatgggtgcagtggctccacctgtaatcctagcactttgggagactgaggccagaggatcatttgaggtcaggagtttgaaatcagcctggccaacatagtaaaaccccatctctactaaaaaaaaaaaaaaaaaaaaaattagccaagcgtggtggtgggtgcctgtaatcccagctactcgggaggctgagggaggagaattgcttgaacccaggaggcagaggttgcagtgagccgagattgygccactgcactccagcctgggcaacaaagcgagactgtctcaaaaataaataaatgaaaaaaaatgtaactcatccctggtcccccagtgagaagctaggagattcaggggttcaccttcatgactgtctgactccagagttggaattcttaatcagtaaaattctgttcctcagttatttg

SEQ ID NO: 466434 - DNA, 579 bp, Homo sapiens
ttgggtcctgggggtggatccctcatgaatggtttgatgccattcttaaggtagtaagtgagttctcactcttgcaagaccaaaccaattctgggggtatgcactagttcctgggagagtgggttgttataatgtcagggtgtgcatcaggcatgatccctctttgtacctgcatgcttccccttggaccttttctgccatgttttgatgcaacacaaaagccctcaccagaagccaargagatgcccacaccatctttcccatatgacttgtagaactatgggctaactaaacctgttttaaaattacccagactcagatattcctttatagcaacataaaacagaccaatacactcctagaagataacataggaaaaaatatagatgaccttgggttgggcaatgacattttagctgtgacagcaaagacatggtttacaaaagaaagaattcattagttagactttactaaaattaatttctgctctgtgaaagacacttgtgaaaagaacaagaccaaaacatggactgaaagaaatttgcaaaataaatatccatttatgaacatatttgaaac

SEQ ID NO: 466435 - DNA, 636 bp, Homo sapiens
tgcttgcaaatctcacagagaaggtgttcaaattttagtttagctaagctggtgtgatggttaacactgagtgtcaacttgattggattgaaggatgaaaagtattgatcctgggtgtgtctgtgagggtgttgccaaaggagattaacatttgagtcagtgggctgggaaaagcagatccacccttaatctgggtaggcaccatctaatcagctgccagcatagctagaatataaagcaagcagaaaaacrtgaaaagactagactggccaagcctcccagcctacatctttctctcgtgctggatgcttcctgccctcaaatattggactccaagttcttcagttttgggactcagactgacgctccttgcttctcagcttatagatggcctattgtgggaccttgtgattgtgcgagttaattcttaataaactccccttcatatatatatatttcattagttctgtccctctagagaaccctgaccaatacagctggtttgggttaacattgcataaaattgtacagagcctttctggggactggtcaataggattatttgggtagtatgttgttcctctccagaaaaggccagctggatgtccatccaaaggtctcagagggacacacgga

SEQ ID NO: 466436 - DNA, 572 bp, Homo sapiens
tttctgctcccctggaacttaatgtctagttagggagtcaacatctttatgatgcttgtatttctgtggctataaaaggaacacatcctcctggtaaaaacaattaaaataatataaaaatgcttacagtaaaaagttacttgactgatttccttcccaagtggcaaatactattccaatctcttccatatttttccagccacagtctgagaatatacacgtgcatgggtttacatattatattcacttttttaatacagtgctccagagtgtatgccctctactgcagcttactttttccactaaataatatatcttaaagatcagactataccagtacatatagaaatacttcattttcctaacaatgtaacaatatattccattttatcaccatattatgatgtatttaattaattcccaawgaacatcattaaggtcgtttccagtattcttaaattactaatgatgtggtaatgaaaatatctttgaacatatgtattatacacacgtggaagtagatctgtgaataaatacctagaagtagaatttgtggctcagaagggatgggt

SEQ ID NO: 466437 - DNA, 590 bp, Homo sapiens
actgctactgatgctgccaactaattgctgtaacctggggcaggggattaacttctcttagcttcagatttctcatcactactatgaggcgagaaagagcatctatctcatagggtcrttgacagctaatacatatacattgcttagtatataatcactgttcttaagtaggagcacttattacatagtatgaattaggttaaaatatgtaacacaccaggcacttgggtgcttgtgtgctagtaaatttcagtgtaatttcatacagaccttggagcatctttacagtcaggtcaggagacctaatgttttctggttaccacatggtcagttctctctttaccatccctctcccgcctttttggcatgtgagaaagatgtgaatgaatcatggccaccagatacctgtgctgtgtgcagcctcctctgtaggtgcaccgtgcctgagtgcttggtgtagtggtactgagggcaccaagagccctgcttatgtcctgataaaatgttttaagatatattgcaagtcctcaataatttggacacagaataactaatgatatggagcagttgtgtttttgcttaattggcat

SEQ ID NO: 466438 - DNA, 590 bp, Homo sapiens
actgctactgatgctgccaactaattgctgtaacctggggcaggggattaacttctcttagcttcagatttctcatcactactatgaggcgagaaagagcatctatctcatagggtcgttgacagctaatacatatacattgcttagtatataatcactgttcttaagtaggagcacttattacatagtatgaattaggttaaaatatgtaacacaccaggcacttgggtgcttgtgtgctagtaaatttcagtgtaatttcatacagaccttggagcatctttacagtcaggtcaggagacctaatgttttctggttaccacatggtcagttctctctttaccatccctctcccgcctttttggcatgtgagaaagatgtgaatgaatcatggccaccagatacctgtgctgtgtgcagcctcctctgtaggtgcaccgtgcctgagtgcttggtgtagtggtactgagggcaccaagagccctgcytatgtcctgataaaatgttttaagatatattgcaagtcctcaataatttggacacagaataactaatgatatggagcagttgtgtttttgcttaattggcat

SEQ ID NO: 466439 - DNA, 581 bp, Homo sapiens
ccagagagatcaatgagaaggccagtcatttacacygggcacacacacagtgtttagggtactcagataggtacccaggcctcaccccaggctgtttggacaccaggagtcatagcactcttccaggccacaactgctacttggggtgggaggagaggatgagacgtggcatttgtggaataatgactgtggccaagcagtgggctctgtatgatgccatcgtcaattctcacagcaattctacaacataggttttgttacttctctctcacgctttaccctaaatttctcctgcctaccacagtgcttggcacacacaaacagaataataatgtgtggaactgactaattcattttccattctgctggtcagggagaaattaatagaggcagaggctattaataaaacattacattacctccaatgagtgtggaataattctctaaaatactgacaatcagtaacttttctggtaacctaaaatttcagtcaacttcttgtgggtgacaatgctatgttgttttattttgatgagttaaattcaacaagcatcgactaatatacacccttagccaggcat

SEQ ID NO: 466440 - DNA, 469 bp, Homo sapiens
ccttgtcttgtttatctctgtattcctgtgctttaaattgggtctggcacatagttggtgcttggtaagtatttataagaggcacaaataaatattactgatcttgggactatgtgatraggtctgtggggtgagccaaggagggaagggacccaacgggattcctcctaagtgtttgctggggatgcagggtgaagagtggtgggagcagcctgaaattgatctgatcagttatccctgccaagttagtccagtctagaatctcttagctagcattccacattttttactagacgatgaaaagccaaactatgctcatgagagaaggcaaagctgagctagagttgcatttctgtaataggccatgggaatctagagcaactgggaactcccagtggccactgggaacacagctaccaagggaggcaagtggggataccaataagaggcagggaacaagaggagatag

SEQ ID NO: 466441 - DNA, 545 bp, Homo sapiens
gttgttgctggacttgcaacagtacccaagctaggtcarcaggctgaaggactcaaatcttcctttcttgctcctcactggcccttccttactagtatctggaggagctgatgtcctggagcaggccctgcagttcccctgtctgatgtggttcctctgttcccttctgtttcaggaggaggaggacactagggccctagctgccggcatgcctcttggccagcttgttcagtatccttgggccctgtgcatgatgttacctatagtcagggctaagctcttgttcagatgccctcatagtgaggccagctgactgtgccatgttcagagaacattctgggcctctagctgtgacttgcactaagcagaaataatcaggtcctactttcatgggaattccttttcatgtgatgttctgaatttagagttagagacatttggggaccagcccttgctgggtgtgtaactctggtcaaggcacagggcctttctgaactttagcagcttcttctgtacaatagggatactggcacttggatcaatgc

SEQ ID NO: 466442 - DNA, 545 bp, Homo sapiens
gttgttgctggacttgcaacagtacccaagctaggtcaacaggctgaaggactcaaatcttcctttcttgctcctcactggcccttccttactagtatctggaggagctgatgtcctggagcaggccctgcagttccyctgtctgatgtggttcctctgttcccttctgtttcaggaggaggaggacactagggccctagctgccggcatgcctcttggccagcttgttcagtatccttgggccctgtgcatgatgttacctatagtcagggctaagctcttgttcagatgccctcatagtgaggccagctgactgtgccatgttcagagaacattctgggcctctagctgtgacttgcactaagcagaaataatcaggtcctactttcatgggaattccttttcatgtgatgttctgaatttagagttagagacatttggggaccagcccttgctgggtgtgtaactctggtcaaggcacagggcctttctgaactttagcagcttcttctgtacaatagggatactggcacttggatcaatgc

SEQ ID NO: 466443 - DNA, 545 bp, Homo sapiens
gttgttgctggacttgcaacagtacccaagctaggtcaacaggctgaaggactcaaatcttcctttcttgctcctcactggcccttccttactagtatctggaggagctgatgtcctggagcaggccctgcagttcccctgtctgatgtggttcctctgttcccttctgtttcaggaggaggaggacactagggccctagctgccggcatgcctcttggccagcttgttcagtatccttgggccctgtgcrtgatgttacctatagtcagggctaagctcttgttcagatgccctcatagtgaggccagctgactgtgccatgttcagagaacattctgggcctctagctgtgacttgcactaagcagaaataatcaggtcctactttcatgggaattccttttcatgtgatgttctgaatttagagttagagacatttggggaccagcccttgctgggtgtgtaactctggtcaaggcacagggcctttctgaactttagcagcttcttctgtacaatagggatactggcacttggatcaatgc

SEQ ID NO: 466444 - DNA, 610 bp, Homo sapiens
aaagataagaaatatatatctttgtaaaaagagtttttttttttcattttgagttaatttctttctttttcttttcttttttttttttagacagtcttgctctgtcgcccaggctggaaagcagyggcacggtcttggctcgctgtaaactccccctcccagattcaagcgattcttgtgccttggcctcctgagtagctgggattacaggcatgtgccactatgtggctaatttttgtatttttagtagagacgaggtttcaccatgttgcccaggctggtcttgaactcctgacctcaggtgatccacacaccttggcctcccaaactgctgggattacaggtgtgagccaccatgcccagccggttttgagtttatttctgatgccaaataattgttcttggtgcaaaggtgttgtcctgctgctgttgtcactgtcagcaagaaatgagtgtccctgttcctacagcatcatctgcattgggttttaggattaacacttattttcaaactgatttttatgtgcatcattttaatgagtacatccttgagtgggtagctgactggagcagtaatcgcatgtctggaatcttctctttcttgtcttag

SEQ ID NO: 466445 - DNA, 610 bp, Homo sapiens
aaagataagaaatatatatctttgtaaaaagagtttttttttttcattttgagttaatttctttctttttcttttcttttttttttttagacagtcttgctctgtcgcccaggctggaaagcagtggcacggtcttggctcgctgtaamctccccctcccagattcaagcgattcttgtgccttggcctcctgagtagctgggattacaggcatgtgccactatgtggctaatttttgtatttttagtagagacgaggtttcaccatgttgcccaggctggtcttgaactcctgacctcaggtgatccacacaccttggcctcccaaactgctgggattacaggtgtgagccaccatgcccagccggttttgagtttatttctgatgccaaataattgttcttggtgcaaaggtgttgtcctgctgctgttgtcactgtcagcaagaaatgagtgtccctgttcctacagcatcatctgcattgggttttaggattaacacttattttcaaactgatttttatgtgcatcattttaatgagtacatccttgagtgggtagctgactggagcagtaatcgcatgtctggaatcttctctttcttgtcttag

SEQ ID NO: 466446 - DNA, 610 bp, Homo sapiens
aaagataagaaatatatatctttgtaaaaagagtttttttttttcattttgagttaatttctttctttttcttttcttttttttttttagacagtcttgctctgtcgcccaggctggaaagcagtggcacggtcttggctcgctgtaaactccccctcccagattcaagcgattcttgtgccttggcctcctgagtagctgggattacaggcatgtgccactatgtggctaatttttgtatttttagtagagacgaggtttcaccatgttgcccaggctggtcttgaactcctgacctcaggtgatccacacaccttggcctcccaaactgctgggattacaggtgtgagccaccatgcccagccggttttgagtttatttctgatgccaaataattgttcttggtgcaaaggtgttgtcctgctgctgttgtcactgtcagcaagaaatgagtgtccctgttcctacagcatcatctgcattgggttttaggattaacacttattttcaaactgatttttatgtgcatcattktaatgagtacatccttgagtgggtagctgactggagcagtaatcgcatgtctggaatcttctctttcttgtcttag

SEQ ID NO: 466447 - DNA, 601 bp, Homo sapiens
ctggaccacttgccatctttaacaactatccracctttcttcctctccttctaactgaagactgtaacaatggaagtcagtgtctacagccatggcctccctttccaccacgcttttccccatccattcactcacacattctgccatcccttacagagcacccagtatctctcaggcatgatgcttggcacagaggacagatcaggcagaaaacaagcccagccttcaagggcctcatgggctgcttatagaagaacaagcacattatcacagaatggttaacaatctctaaacaaattgtcactgtatggtaagagcttcctgagagaaatacaatgtgctctgggaagactcattccgaaaacccccatgatctgggttacatcttcatgctcttttgaaacccttctctcttctcacctagataagcaatcttctcaatgccaagtccaataactcttcctgctacttctgctcccactttcagccccatattacactgaaaactaactgcactctcactctgctggaccattcactattctacgttttgcagcttccctaacatactggatgttaccctgtctccctcaaccactgt

SEQ ID NO: 466448 - DNA, 598 bp, Homo sapiens
actcactctatttaattttgaatgaattccattgctatgtctagttcaccaatcttttcttctacattgtttaatttgcttttaatcccatccaggttatctcacatactctcacacattgtaatttgcatcttaacttgtgtcttttacrtatttactaaactttttcaacatatggaatacagttgtaataagtgcttaatgtcttggtttgctaattctaacatgtgtgtcagctctgggtcagtttagattgattgtttttcctcccgattgtgggttgtatatttctgcttttttacatgcctggtaatttttaagtgtgtgccagacattgtgaattttacctaaataggggctgaatattttcacatttttacacatattgttgagttttgttctgagatgcagtaaagttacttaaaaacattttaatatcctggtattaagctttttaggtgacaccagagaaatatttagtgttgatgcagttactctccactattaaggcaagaccttctgagcactcaacccagtgattgtgaattataaggttttctagtctgactagaagagttaggtacgaattaattttaga

SEQ ID NO: 466449 - DNA, 598 bp, Homo sapiens
actcactctatttaattttgaatgaattccattgctatgtctagttcaccaatcttttcttctacattgtttaatttgcttttaatcccatccaggttatctcacatactctcacacattgtaatttgcatcttaacttgtgtcttttacatatttactaaactttttcaacatatggaatacagttgtaataagtgcttaatgtcttggtttgctaattctaacatgtgtgtcagctctgggtcagtttagattgattgtttttcctcccgattgtgggttgtatatttctgcttttttacatrcctggtaatttttaagtgtgtgccagacattgtgaattttacctaaataggggctgaatattttcacatttttacacatattgttgagttttgttctgagatgcagtaaagttacttaaaaacattttaatatcctggtattaagctttttaggtgacaccagagaaatatttagtgttgatgcagttactctccactattaaggcaagaccttctgagcactcaacccagtgattgtgaattataaggttttctagtctgactagaagagttaggtacgaattaattttaga

SEQ ID NO: 466450 - DNA, 594 bp, Homo sapiens
tttcttgaataaaacttcttaagttgtagtattctaatattttaaaatactattggctgggcacagtggctcacgcctgtaatcccaacactttgggaggctgaggcaggcagaccacttgaggacagaagtttgagaccagcctggccaacatagcgaaaccacacctttactaaaaatacaaaaattagccgggcagtggtggcaggtgcctgtaaccccagctactcaagaggctgaagcaggagaatcrcttgaacccaggaggcagagtttgcagtgagccaagatagtgccactgtactccagcctgggcaacacagagactctgtctcaaaacaaaccaaccaacaaacagaaaaaattattgacttttcttcactagtacttgtaagacttttattcatatctgcaaatatctagaatcacaatttttttttaaattttgcttttgtttttattttcctaatatcttgaaaattagagggaaaatagaaaaaaagcattaattgttcaccctgctttagtgtaaaatacttaaatactacacacttgatattatacctcttcacaatctaagtaattttacttaag

SEQ ID NO: 466451 - DNA, 585 bp, Homo sapiens
aagtgtatcccaaacattgcatgaaacattttttcaaacagttttattgagatataattcacataccatacartttactcatttaaagcatacaattggatggtttttagtgtattcacagacatgtgtaacaccaccacagtcaatttcagaacatcttcctcacttttaaaaaagaaacaaacaaaaatcagctcgtaccctttagctatcaccaccctgtctgcctcatcactcttccagcccaaagtaatcacttaccccttttctctgtagattcccccattctggactttcatatggatggaattgtattagtctgttcttgcattgctataaagaactacctgaaactgggtaatttatgcaggaaagaggtttaattgactcacgattctgcaggctgtatgggaagcagggctatggaggcctcaggaaacttacaatcatggcagaaggcaaaggggaagccagcacatcttacatggctggaacaggaggaagagaggactgagagggaggtgttacacactctgaaacaactagatctcgtgagaactcactatcatgagagcagcaaggagg

SEQ ID NO: 466452 - DNA, 585 bp, Homo sapiens
aagtgtatcccaaacattgcatgaaacattttttcaaacagttttattgagatataattcacataccatacagtttactcatttaaagcatacaattggatggtttttagtgtattcacagacatgtgtaacaccaccacagtcaatttcagaacatcttcctcacttttaaaaaagaaacaaacaaaaatcagctcgtaccctttagctatcaccaccctgtctgcctcatcactcttccagcccaaagtaatcacttaycccttttctctgtagattcccccattctggactttcatatggatggaattgtattagtctgttcttgcattgctataaagaactacctgaaactgggtaatttatgcaggaaagaggtttaattgactcacgattctgcaggctgtatgggaagcagggctatggaggcctcaggaaacttacaatcatggcagaaggcaaaggggaagccagcacatcttacatggctggaacaggaggaagagaggactgagagggaggtgttacacactctgaaacaactagatctcgtgagaactcactatcatgagagcagcaaggagg

SEQ ID NO: 466453 - DNA, 585 bp, Homo sapiens
aagtgtatcccaaacattgcatgaaacattttttcaaacagttttattgagatataattcacataccatacagtttactcatttaaagcatacaattggatggtttttagtgtattcacagacatgtgtaacaccaccacagtcaatttcagaacatcttcctcacttttaaaaaagaaacaaacaaaaatcagctcgtaccctttagctatcaccaccctgtctgcctcatcactcttccagcccaaagtaatcacttaccccttttctctgtagattcccccattctggactttcatatggatggaattgtattagtctgttcttgcattgctataaagaactacctgaaactgggtaatttatgcaggaaagaggtttaattgwctcacgattctgcaggctgtatgggaagcagggctatggaggcctcaggaaacttacaatcatggcagaaggcaaaggggaagccagcacatcttacatggctggaacaggaggaagagaggactgagagggaggtgttacacactctgaaacaactagatctcgtgagaactcactatcatgagagcagcaaggagg

SEQ ID NO: 466454 - DNA, 563 bp, Homo sapiens
tgaacattggtctgagacagaaagtccctgcaattaaggcattaagctggctctttttctatttctcatttcataattgcccttctcctgctttaccaaaatctttcaccccccatcatatatatatatccccatacatattctatatatacataccctayatatgcatgcacacacatcatatatatgtatgcatatatgatatatacatatatgctatgtaaacatatatagtgtgtatatacatgtgtgtatgtgtatatgtgtgtatatgtgtatatatacacgtgtgtgtgtacatatatacatcatatatgtgtgtctatatatgtatatatgggtgtgtctatatatgtgtatatgtacgcaaatacgtatatgtgatgtatatatataagatgtgtgtgtgtatatatatgtgtttgcatgtgtgtgtgtatatatatatagtatatacatattttttgagacagcatctcactctgtcgcccaggctgaagttcggtggctgatgacagctcactgcagcctcccggctcaagtgattcttccacctcagcttc

SEQ ID NO: 466455 - DNA, 573 bp, Homo sapiens
gaggtgaggggaggagcccttgagcccaggagctggaggatgcagtgagccataacagtgccactgcactgcagcctgggtaacagagcaagactctacattacaaaaataaaaataaattttaaaaatgctgctaaracatttctttccttctttatggggttaacactttgttggtggtgcaaacgccataggggagggggcaaaacagctggcaacttggcacagatcaaggcagccagtgtcaccaaacgatactagtggtcactgcatttgcccctctgagcacttgaaggaaaatcaatgccagcatcacttaggcatgccctggatgaggcagtaagtattaatttggtaaatcctgatcctgagtaagtatcttttaaatagtctgttatgagaaggcaagtacatgtttccatgacctactgaagtatgatgtttgtctcaaggaaaagcacctgtgcaattgagttgtgagctgaactagccacctgcttcacagaacaccacttttcccaaaaaaggacaactgacaaaaacctgttattcagacttaggcatttaaaaagc

SEQ ID NO: 466456 - DNA, 535 bp, Homo sapiens
tctttcacccaggctagagtgcagtggtgcaatcatggttcactgcagcctcaaactcctgggctcaagcaattctcctgcttcagccttccaagtagctgggcctacacscaccaccacacccagctaatttttttttttttagagatggggtcttgcgatgttgcccaggcttgtctcaaactactagctaaagcgatgctcccatcttggccacccaaagtgttgggattacagggataagccccggcacccagccaacattttattttctaaagtgcatttaaattcataggtataccccgaaaacattttctctcatcttttacttgcttaaatctatgttaagattgcctgctagggagtcaagagacttgggaggcccagacctcagcccctgccctttgtccacgtacctcacagggtcttgaggaagtccaccatctttgaggtttaaagctcttaacacacattctcacaatagtcactcttattcgaatatggtttcttaaaccaaaaccttgataattagttt

SEQ ID NO: 466457 - DNA, 535 bp, Homo sapiens
tctttcacccaggctagagtgcagtggtgcaatcatggttcactgcagcctcaaactcctgggctcaagcaattctcctgcttcagccttccaagtagctgggcctacacgcaccaccacacccagctaatttttttttttttagagatggggtcttgcratgttgcccaggcttgtctcaaactactagctaaagcgatgctcccatcttggccacccaaagtgttgggattacagggataagccccggcacccagccaacattttattttctaaagtgcatttaaattcataggtataccccgaaaacattttctctcatcttttacttgcttaaatctatgttaagattgcctgctagggagtcaagagacttgggaggcccagacctcagcccctgccctttgtccacgtacctcacagggtcttgaggaagtccaccatctttgaggtttaaagctcttaacacacattctcacaatagtcactcttattcgaatatggtttcttaaaccaaaaccttgataattagttt

SEQ ID NO: 466458 - DNA, 551 bp, Homo sapiens
ttggaggagataagacagaggtcttgacttttagaaagttcactgcatcccttggtgggaccctgggaggccctggccaaattctactttgagtgatgacattctgctcaccccaagctctgtgctgcttcagttgcacagaggagtatttattgctacttcctgcccttgaatgttttgcagactttctctattctgtttaaacaaatgctgtgtttcacctgtcagagccccatcccctggaataaaggaggcccagaaatctaacaccacggctatcacttttagggcctagacccctggtttattttgttatgtagattggatgagctattaatatatcaagtttacatgtgtagtttctgtctttatctctgttatttgcayttcaaaccctgaaaaacagttgagaggttatgtaagcattgtcctgggtcctgatctgcaaatttctttgccaacttttattggtctttgaaaactgcattcctttgtcctaaagaatgctgtctttcatatcctgtcattagtattatacaatgttaggagcc

SEQ ID NO: 466459 - DNA, 563 bp, Homo sapiens
gaggacaagaaccacatcttcttcttatcatatataccctccaagctgctagcagaatggaaagctgcaaagctattcggaagatcaggtctcttcacaaaagcatgttgccctggttactcagtgtgtgccagggttctgctggctgcacccctcctgcgtgatgtgatttgtgagaggtagcttggaaagagaaattctgtcacagtagagtacgtaaaattctcaaacggacataagtctacatataattccacatattttgaagaatcycaaaggtttaagcatctaaaattgaacatgttcatgtacaggatcatcatgttaacatcttctaaaaatatggaatagtctttcatcatttaacatattgggaggggcccctgtaccttcatgtatcaatttcactagagcttctagaatatactgtcaatacattcaatttgattattttctcagtcaataaaagcttgtctttctttgcttttcttctgacaaatctgaactgattggcctggaacattaaaggtgaacaggtctgtaaattgggctgcttgacgaca

SEQ ID NO: 466460 - DNA, 428 bp, Homo sapiens
attacagcaagtttctgcctcatgctctcacatgagcacatcccaagagagggcttgggaaaataattttttttattttttaaaaaaagccgtgttagctttcaagttgtcactaggtaaaacttgtgtaggaaccagttactactaccaggcagcatcatacgttatgatttgatcctcgctacaatcctccaaggacttatgattgcyctcattacgtagatggagaaggagaagccagaaaagttggagatgctcatggagatgttgctgggaaaagaggagatgggatttgaaccttctgagtttatattctaagcttttctccccccaagaaaatcaaggaagatatcaaagggcacatctatctaaaggctcagtgaacttcccaatattaaccaggtgataaaaattaaaatacccctatt

SEQ ID NO: 466461 - DNA, 573 bp, Homo sapiens
ttgttaatatgatgttattttattccatttttgactgttatttggagcacagcaataaagttrtagatccaagattgaatgtagactcaaacttgcttagatccaatgtaggttttttaaactgcccatacacatatcagtataaaaatattttaatactttagacaccctaaagggcttctattttttttgtcgtttctctctctctctctgtgtgtgtgtgtgtgtgtgtgtgtgtgtgtgtatgtgtgtgtgtttaggaattccagattaacataagtaactttttgtgcaaaaatgaaaatctatttcagtgtaatttaggtaggtatcttagcttttcctacatggctgtaggtattaaaaaccattgactcatttacttaaattttagcttattttaaacattggtctttattcaatcattataaatgtagtgcttatgcttggaaaacaggccaactggcttcctaatgatggctttcatatttttatagctttgtttctgtcataagtgaattcaggaatacttataacaccagaacatcactggaaactctatcttcgtgtgtg

SEQ ID NO: 466462 - DNA, 615 bp, Homo sapiens
tgcttttaattttagcagtgttatattcacaacaaacaacagaaaaccacactgctcttttttctattcccctccagggaaaaaaggtgcagtgcaaatcccatatcaatctcaagaaaacatactaagtaagaatttgtgtgtaaattaaaataccaaaaaaaaaatatcatcgtggaaagttaggagcaaaagtgagtgggtcttttcaatgggccttagttttcttgtaccttttcatgctcccaagtcgcagtttctctgcagcagcagatggacagagcgtgtagcccgcagcaccttcctgtgacagccctattctccctccccagacactgctgtttagtaaatagatgtacacattctccaatctccacacatctttctgccgaataattaaaagcaggatgattagtttattgagtggaaggaggaacttttttattgaggtccatccacgattttatcagggccaagcacttttacggtgtgtcaggggggtgcaggcatccaatgtttcttatctgcstgattaatacaaacgctgtttcaggacacattaattaacagatacaaatctacgttctcatggaaggatccatacggagaagttaa

SEQ ID NO: 466463 - DNA, 583 bp, Homo sapiens
gaggtccatccacgattttatcagggccaagcacttttacggtgtgtcaggggggtgcaggcatccaatgtttcttatctgcgtgattaatacaaacgctgtttcaggacacattaattaacagatacaaatctacgttctcatggaaggatcmatacggagaagttaagaggcatcaatgtgaatttagtgctgatgatggagaaggcacgctagcgacatttacgtgcacggaaactttaaagttgcaccgggccccctttgtccctgtgatttactaattgaaccatgttacagccataaccacatttcgcacatttctttggggtttaattgaacaaaatacaataaaatttcatttttaaagttgatcctgccatttgtttcttctatattgatggttgtgtgtgtgtatatgtgtgtgcatgtgtgtgtgtttatccttcctgcaaacctaactttttccttttgcttctctatgaaataaagagaaggaaaaaaggggaagaaacagctctcctttttttttttttttttttttttttttttggtgagggagcatgaggagacggatatagcacaa

SEQ ID NO: 466464 - DNA, 538 bp, Homo sapiens
ctttttttttttttttttttttttttttttggtgagggagcatgaggagacggatatagcacaaaaggtttgacacatttgcttgattgatatcctcaagtatatttcagctgattaaaggaagtatactttttgcaaatccaaaggaaaaaggacaatctatgccttacaaaataaaataaaagtctgaacttcttctatcttttcttggtctaraaattgctggctctcattttacccctttcctaccacaccactgcaatctggaagctagtacaaagagctctcctgcccaaatgcctgagcagcagttaagacagccttgttataagatagtcatgttcatctggtcactaaggagaccaaatacataatagaaattttatcttaattccataaaattattttaccttttctttaggagtactagctacgttgcacatacataaaaacgcatggataaaataacatttttatctatagacctgaacaatgtataaaattctatataaccacggcctaaatgtaaatgcatgtt

SEQ ID NO: 466465 - DNA, 621 bp, Homo sapiens
cataagaaatctatttctttatctctgtttttatactttaattaggtttcacattgattttatggaactattattttaaaatagtggtcaaacaagacaagtacatattcctaaaatctaaaaggcaggactcaggttttaatacaattttgtatataagggcagaagtgaccaccttccataaaactgagcaaatgatctaagcagttgtgaggaactaaaagagaggagaacagaaacgcaaaggtaatatctaccagtccaaaacagaattatcactgttaactgaatttacaggtgcaattgaccactgactactcatgctgattacataaacaaccaaatgagtttacaattagcccaatcataggaacagaaattgaaaacatgcccccatagacgtggtgaaatgctttctttagcaattattcctggttttccaatcagcttgctagaaaaatttaaaatacaatagcagctaagaaaaaatatttcaagtgacaatacaggaaagactcaacatgatgacaagaggtttkgtttggtttggtttttttcctgtgagtgggagttttttttaacaactgccagcctactttgaaaagtactagacacagggcc

SEQ ID NO: 466466 - DNA, 647 bp, Homo sapiens
agctaatgggccagagaagcagaggttagttgcagggcctttactactgtctcttttcgatcacaatgagagagatcactgaaaaaaagtatctaacacgaagtgctaaggcataccttattctttttctttattttggcttttatttttcttcagggctgggtattttaaagaaactcaagcctgagaaaaatggaggaaaaaattatggtcattaatttcttctcccattgcaaaatttcagtaagtagtataatatcttacaaagttacaggttaaatacagttgaaaaatgaagaggatgcatttggaattgtattgtaaacacattattccacatagcatactagtaagatcatrgaatttgctaatagacagccctgagttgctattaagtcgccaattactggcaagattctttatgtctctagcctcagtttcttagtctgtaaaatagtgataatagtaatggcctatcctacagagtttgctctgaggattaaggtaatgtatttaaaatgcttagcacagtgtctgacaaatattaagtcctcagtaaatattcattattattgtcatcactattagtttgttgcttgaatgtttaggaccttgcatagctacaccaaagatgaattggttctgct

SEQ ID NO: 466467 - DNA, 577 bp, Homo sapiens
ccctgtctgtcccttcaccagttgcatcagtgaggtggagactgtcccccctgggcagtctgctcgctgggtggacgcactgcctgtccagctattctgcactggctcgtctctaattaaagtacttgctatgaacgatttttaagtactggagcttaatgaagttagaaaaaggatttggatgcagtttgtgaagacttcaaattgtttgagttttttctctagggagaattgtaaagtctggaggcattctgaattacttacaatgtattccattttgttcttttcaaaaattctctcatagtggtgaatagctgagaaaaaaaaaaataaaagccccctgcccatcttttcccccaggagaacactgtaactcttgcttggcaaagtggcttcttgggaatttacaagtcttkgaatactgttatctaattaaagggatctttaattctcattggcaattctacctttgaccctacagtatctaagagttgaaagtaaaatcacattcatccaagataacccgaagcttgtacatttggaagcttatccctgtcactgatacctgaagcattat

SEQ ID NO: 466468 - DNA, 576 bp, Homo sapiens
tgtcatgaagcaaatagtttttcatagcacttcccctagtatttatttgtcatctaatcctgacttcgtgataaggaaagcaacatgtgcctaaaagtcaagttacttccccaatgttttcagtgacttcaccagggttttacttaaaatggtggtgtcaaaagttttcattttcgtgggtaatttgtggagagggagttggcctcaaaaattactgtgtatatgtggccctttttcttttaaaatttttacaagcaaagaattaactkgggaacattattctaacagtgtttgaagccaacaatagatgagaggaattgtaaactggcatttcccccctcttaatttgagctctgtgactgtgggtatgatttggtattttgcctaagtctccaccccaaggacaccaaaacaaaatcatcaaattctaaccttcacataaagcaagggtatttctgttcttaagttttgcataactgtttctaatgatccctgttctattcagtgcgcaagttacttcctggtggtaagacacttcaggaacccacaagaggaacattaattctcctctgccat

SEQ ID NO: 466469 - DNA, 576 bp, Homo sapiens
tgtcatgaagcaaatagtttttcatagcacttcccctagtatttatttgtcatctaatcctgacttcgtgataaggaaagcaacatgtgcctaaaagtcaagttacttccccaatgttttcagtgacttcaccagggttttacttaaaatggtggtgtcaaaagttttcattttcgtgggtaatttgtggagagggagttggcctcaaaaattactgtgtatatgtggccctttttcttttaaaatttttacaagcaaagaattaactggggaacattattctaacagtgtttgaagccaacaatagatgagaggaattgtaaactggcatttcccccctcttaatttgagctctgtgactgtgggtatgatttggtattttgcctaagtctccaccccaaggacaccaaaacaaaatcatcaaattctaaccttcacataaagcaagggtatttctgttcttaagttttgcataactgtttctaatgatccctgttctrttcagtgcgcaagttacttcctggtggtaagacacttcaggaacccacaagaggaacattaattctcctctgccat

SEQ ID NO: 466470 - DNA, 537 bp, Homo sapiens
aagcaattcacgattaatactctgcacctgtttttctaattccaagtcctctttaaagagcatcagtactatcatttgatatctccattttccaaaactctaaacaaattttttaataagaagaaatagaaaaagaagggaaacaaggaaagcagataaytgattcattgattctccccacccccaaaacaagcgctttgggaatctatcgggtacttctctgaggactttcagtcaataggaacaaagtgaaaggcaagaatccataagccaccaagtgtgtatcattaatattcatgactgaaggtgtaaggaaaaagaagatgaagtcaaagcaaatgccaaaactcagattttaaaggaaagaaaaacagtgcacctgaccaaaatggaaaaactggaagatggaatcagtttctaaagaaagataagaagtatggttttatacttgagatgattttgagaaattcaagatgtattgcacggacctcaaaactgaaattcaggtaagaatgcaggactactgctgtaaacttg

SEQ ID NO: 466471 - DNA, 465 bp, Homo sapiens
accatcttgttataatctggcagaggtgataatttgaaggaaatttgtgtactgtttttcaggttatgaagcacttcatctagcttacctcatctgattcgcatatttattgtatgagataggtattactatgtttctcattttaaaaatgaggaaggtgaggcagattcaatccattacaaggtttgtgaattacagtgagtacttctaacatcagtactacacagctgtcttccctacatacaggggactgtttgcatttcagcattatcaaaaagaagaagaaatctattagagaaagaacagccaccraaataagttggtattgttcaggttgctcaatgtgaatgaataacagtcactatgccatctcaattaatgaatggatgactgcagtaatctatcttcttttccattgttgcttagctttttaactaaaatggacagtcttctattgttaattgt

SEQ ID NO: 466472 - DNA, 465 bp, Homo sapiens
accatcttgttataatctggcagaggtgataatttgaaggaaatttgtgtactgtttttcaggttatgaagcacttcatctagcttacctcatctgattcgcatatttattgtatgagataggtattactatgtttctcattttaaaaatgaggaaggtgaggcagattcaatccattacaaggtttgtgaattacagtgagtacttctaacatcagtactacacagctgtcttccctacatacaggggactgtttgcatttcagcattatcaaaaagaagaagaaatctattagagaaagaacagccaccgaaataagttggtattgttcaggttgctcaatgtgaatgaataacagtcactatgccatctcaattaatgaatggatgactgyagtaatctatcttcttttccattgttgcttagctttttaactaaaatggacagtcttctattgttaattgt

SEQ ID NO: 466473 - DNA, 564 bp, Homo sapiens
ttggcacacggcaggtatttgatataagtggtaagttctctccatttgtctgtttcttgtgttttcttttcatataaatcaataatcagattctcctagagtagcctgaagacctaattccattggtataccagatcttagcagggagtcattagatacaaaatcttataaaggtgtgtataaatgtgaagtctacttaatgtaacacacatataaacacactcatgcactcatgtgtgcactcagacacacataggaaattcaaataagccttcaaagaaagtctcctggaatatctgctgccaatgagtttatcatcagtattgacggaacatgaactcaggtcacaaaactatgggttttggtcacaaaactgggtttagaggcagtgagaggaggaggtgagacaagaataaaacttattgcctgccctcaagggcccagaatctaccgggggactctaataactcactgtcatatattttgtactgtgctagaggtatrtaaaaaaaaaaaaattcctatgggaatataggacaagaaacaattcttcctgaggattca

SEQ ID NO: 466474 - DNA, 573 bp, Homo sapiens
taggggaagttttttggaaatttctgggttactgttgggaatttttccagaaatggattcttcttctttggaagtcttttggtcattagtttaaatactatattggaaaatttctrcataaagatttgtaatgtgcccccaattttctgtttataggatttataagaatattattgtaatggtaacatcttgtaatggtgacaatatttctattaattttatgaaaccctataccactgctttaatctctgcagtaagaagtcattattttttaaagcgccaaacacagaatgtgtttattacaattcttcatgacccaaattatttttggcagaggtgctataagtttttccctctttatttataaaaatacattatctgtaattctgggaaattgaccacaaaatgacgtggaaagcaccttaaaatctttacgtatgagaccacgtaaagcctcataataactactgtgatataacattgttgtgttcaaccattacatcatttgttttactcaaaagtgtgtgcctctctacgtataccaattttaacaacgttgtattttactgttca

SEQ ID NO: 466475 - DNA, 573 bp, Homo sapiens
taggggaagttttttggaaatttctgggttactgttgggaatttttccagaaatggattcttcttctttggaagtcttttggtcattagtttaaatactatattggaaaatttctacataaagatttgtaatgtgcccccaattttctgtttataggatttayaagaatattattgtaatggtaacatcttgtaatggtgacaatatttctattaattttatgaaaccctataccactgctttaatctctgcagtaagaagtcattattttttaaagcgccaaacacagaatgtgtttattacaattcttcatgacccaaattatttttggcagaggtgctataagtttttccctctttatttataaaaatacattatctgtaattctgggaaattgaccacaaaatgacgtggaaagcaccttaaaatctttacgtatgagaccacgtaaagcctcataataactactgtgatataacattgttgtgttcaaccattacatcatttgttttactcaaaagtgtgtgcctctctacgtataccaattttaacaacgttgtattttactgttca

SEQ ID NO: 466476 - DNA, 573 bp, Homo sapiens
taggggaagttttttggaaatttctgggttactgttgggaatttttccagaaatggattcttcttctttggaagtcttttggtcattagtttaaatactatattggaaaatttctacataaagatttgtaatgtgcccccaattttctgtttataggatttataagaatattattgtaatggtaacatcttgtaatggtgacaatatttctattaattktatgaaaccctataccactgctttaatctctgcagtaagaagtcattattttttaaagcgccaaacacagaatgtgtttattacaattcttcatgacccaaattatttttggcagaggtgctataagtttttccctctttatttataaaaatacattatctgtaattctgggaaattgaccacaaaatgacgtggaaagcaccttaaaatctttacgtatgagaccacgtaaagcctcataataactactgtgatataacattgttgtgttcaaccattacatcatttgttttactcaaaagtgtgtgcctctctacgtataccaattttaacaacgttgtattttactgttca

SEQ ID NO: 466477 - DNA, 594 bp, Homo sapiens
acacttgccctcaaaagaacagatatattatggatataccctgatagrtttgcgtgttttcccaatagtggggcgagttgcactgattcattcacactgccttttgggaccagctgcaacattataaacattatacaagatctgactaagaatcaggggttcaatctatgaataaagaacagaattaactaggtaggttatacaggaattgaatctgccaccttagcctcatttggtaccatgtcctattttgttcagctacaatcttacatattcatctacctaatttacatatatataaataagtaatatgtatataacgattcagacatccgtatgtatacattatgtggcttactttcattttcaatatttgacagtatttatgcaagtggtagcccttaacaattttgatatttagcatcttagttgattttcactgcatcttagaatgctaaagaaaataattttcgaaattttcctaatccaggggagagcataaacctcacaaaaaatggtgtgatttgttttctttgccttctatgtttaaggttaggagtgatcactgtaaattcaatgaacttgagtgaacag

SEQ ID NO: 466478 - DNA, 594 bp, Homo sapiens
acacttgccctcaaaagaacagatatattatggatataccctgatagatttgcgtgttttcccaatagtggggcgagttgcactgattcattcacactgccttttgggaccagctgcaacattataaacattatacaagatctgactaagaatcaggggttcaatctatgaataaagaacagaattaactaggtaggttatacaggaattgaatctgccaccttagcctcatttggtaccatgtcctattttgttcagctacaatcttacatattcatctacctaatttacatatatataaataagtaatatgtatataacgattcagacatccgtatgtatacattatgtggcttactttcattttcaatatttgacagtatttatgcaagtggtagcccttaacaattttgatatttagcatcttagttgattttcacwgcatcttagaatgctaaagaaaataattttcgaaattttcctaatccaggggagagcataaacctcacaaaaaatggtgtgatttgttttctttgccttctatgtttaaggttaggagtgatcactgtaaattcaatgaacttgagtgaacag

SEQ ID NO: 466479 - DNA, 576 bp, Homo sapiens
tgtttccaactgcagggcagttgttggactctgaatctgtgggtcaattccatctttttaagtacaccatttcattcatagacttttagaactggaagagagcttaacatgtgatcaaactcattcatctgcttccaggcaggagagcaataaaagtgtctcaggaagggaatggtttycctcatttgtcaaatttcccaagtatagcaatctatgatctttcttgttcaatattcagtatctaaatataattctctcattagtcagttcttcttaatatctaactgaggttttcacagcatatcaaatgctgttttatgttatctatgatgaatagttaaaaaataaaactgagtctacctttcagccaactccttttttttcttcaatgcttcatgatatgttgttatcttcaagttttctatacttttcttaatttactgtacactggtgcattaagaaaacacgccaaacaagaattactgaaaaaaattgacaagaggttcatatttgtctgtgtacattccagttttagaattaccaaaagaaaaacaaaaatcatcatagtgcatggct

SEQ ID NO: 466480 - DNA, 580 bp, Homo sapiens
caccaaccagcttccctaaggcaagctgtctgcaaaggaacaagccagctggcatggccaaggktgatcaatgatgagaagcaggctagggttccaggttcacaaaagccactcaggggagagtaggtcagcggcttccccaaagccaattagctggcagaagtctgaggtgcccggtgctagccaaattccctgagcctgatggtactagtggggagtccatccttgggcttgctggcaaaccagacttaagtgaatggcagattgtgctttttgagagccagtgcggctttgtggctactagaacaaatatcaggacctgccactgccactcagccttacccaagtagactgcacagccccagcacagtagtaactgaccctcaggtgtgatggatttcagctgattatccacaacataaatttgtttttaccttactttggcttcagtgctttttcaagttgacatgaatatgaatcatgccattagaagagagtgatatggaaatggttttggaagcaggaaacattacagagccctttgacaggaatgtcaggacttctgctattttaaaagccc

SEQ ID NO: 466481 - DNA, 580 bp, Homo sapiens
caccaaccagcttccctaaggcaagctgtctgcaaaggaacaagccagctggcatggccaagggtgatcaatgatgagaagcaggctagggttccaggttcacaaaagccactcagkggagagtaggtcagcggcttccccaaagccaattagctggcagaagtctgaggtgcccggtgctagccaaattccctgagcctgatggtactagtggggagtccatccttgggcttgctggcaaaccagacttaagtgaatggcagattgtgctttttgagagccagtgcggctttgtggctactagaacaaatatcaggacctgccactgccactcagccttacccaagtagactgcacagccccagcacagtagtaactgaccctcaggtgtgatggatttcagctgattatccacaacataaatttgtttttaccttactttggcttcagtgctttttcaagttgacatgaatatgaatcatgccattagaagagagtgatatggaaatggttttggaagcaggaaacattacagagccctttgacaggaatgtcaggacttctgctattttaaaagccc

SEQ ID NO: 466482 - DNA, 516 bp, Homo sapiens
tgcacaatcataattttattatgtctgcaccattttactagcgtttgtatgtgtcttggggatatgrgaaatttaaggagtagaatgtgtaaaaatgaggtaatttacattacttggtttaacttaatatgtgtttctacttagacctggtttctgtaccaatttctggttttgtgtctcagttcaagccagcatgttgcccccataggaggtcaagtccgttttccctggcctccctctcagttctcagctgtaagtgttttccttgaggccacctgagcccttatttagtggcttctccctggattgtccaattaatatcccccaaccaggcttctgcacacagaagttttggagcaaatacaactttctctcccttcaccctctccaccccattaagtttgttcttttttgggagcgggtgggggattgttgttgttgttctcatagtttcctctaaaagccaaatttcttcacaaccctactgaattaccatttggtgatttccaaacttgt

SEQ ID NO: 466483 - DNA, 510 bp, Homo sapiens
ggcttctccctggattgtccaattaatatcccccaaccaggcttctgcacacagaagttttggagcaaatacaactttctctcccttcaccctctccaccccattaagtttgttcttttttgggagcgggtgggggattgttgttgttgttctcatagtttcctctaaaagccaaatttcttcacaaccctactgaattaccatttggtgatttccaaacttgtgacttctataatggtcccctccctactcctgcctcccattaattcacctctctgctctcttagacatttgtctccaggcctattaggttcttcagtatcaacattatcataatcattagtatatttgaagccaattaaatggcaattactctgaccttagccagtcttaggttattatcaattcatacrtaatttggaagtatttggaaggaacgtggattcatgccttatggtttgatctgtgtaaatatttctatctgctatggcagaagtacatcctgttctt

SEQ ID NO: 466484 - DNA, 488 bp, Homo sapiens
agaattcaattctgtctagctacacgtctttagctctctgagccacaggggtttttggtttgtttcatctataaaagaaagacaataccaccacccaccagagacggcagtcagaaggtgyggatgcggtaaggtatgcgctcattaagacttggcttcctttcatatatggttgggttccacaactcaatctcttttcttgatgatatcatttttcaggaagaggcagggcaatctcctgggtcaccaacacctgtccagggcccactgtgctacagaacaggtcagaccaaaagaagacagcaccctctgaaattccctctccatctcatggggagaccaactccaagcttatagtctccaacctcatgcacgggaaagttttcatatacacatatatgtacgcatcgtgcacagttaaagtagaagattctgaaatgtctgtgtttggaaggtgaagacgccaaagagagaacaacactggatga

SEQ ID NO: 466485 - DNA, 565 bp, Homo sapiens
gaattcaattctgtctagctacacgtctttagctctctgagccacaggggtttttggtttgtttcatctataaaagaaagacaataccaccacccaccagagacggcagtcagaaggtgcggatgcggtaaggtatgcgctcattaagacttggcttcctttcatatatggttgggttccacaactcaatctcttttcttgatgatatcatttttcaggaagaggcagggcaatctcctgggtcaccaacacctgtccagggcccactgtgctacagaacaggtcagaccaaaagaagacagcaccctctgaaattccctctccatctcatggggagaccaactccaagcttatagtctccaacctcatgcacgggaaagttttcatatacacatatatgtacgcatcgtgcacagttaaagtagaagattctgaaatgtstgtgtttggaaggtgaagacgccaaagagagaacaacactggatgaagggagtcctggtgaggctacctggaggaagtggacctctggactgggccaaagggccttcctcctgggccatatgaa

SEQ ID NO: 466486 - DNA, 528 bp, Homo sapiens
tggtgaacggccaggctgaagtttactcctgagctgcgcctctattctctactaggtgaggacgcgccaaggaagagacgccaagggcaaaaatgacctggtctcagacgcacgtaaaactccgcctgtcttgtcagtgaaccttaagcggagaagcccctgaggaacacttggggaaggaaggagtgtgtgcgtaatcacccacatttctctcacactcccatactctgagcccatttttctaagaaacggcccattttcgccctagtggctgcagcatgtcaatgcggtatggagaataggcagtcttacggtggtttgtacaccagaagartctaattatgttggaatatttgtagagtttctattagagtaaatatatgctactattatagttggattctaaatatattccactatctcccacttaaaattaggatttgcggtcctacttctaatcaccctacttctgctctactatttcaaccatagcagtttgtcctttggacagataatttacttattata

SEQ ID NO: 466487 - DNA, 551 bp, Homo sapiens
aacctactaccaggccttagtggagactgaacagatgagcatgggctatcaaatgaccacactacctgagccgcccatcatggactgggtattttaagacccaccaagccgtggcattgggcatgcacgacagcactccattgtcagatggaagtaatatgattaggctgggcatgcaatgaaatcacaaatcagctacatgaagaagtggcccaaatgcccacagtccccactcctgctacactgccttatctctccctgcctgcatctatggctgcatayggagttccctatgatcagctgacaaaaaaaaaaaaaaaaaaacttgggcctggcatggagatggttctgcccaatatgcaggtatcaaccataagcaaaagtactgtaacccctttctggggcatcccttaaggacagtggtgaagggatatcttcccggtgggcaaaaccttgagcagtgcaccaggttgtgcacttctcttgaaaacagaaatggtcagatgtgcaattatacaccaagtcatgggctaagccagtggtttggctgg

SEQ ID NO: 466488 - DNA, 596 bp, Homo sapiens
ctactgtaattttgatcaaagtgagaattagaataaaccaagtctagcaccttttccccagtagattaaaatgctccaggaagtactcactgtgtgtccacgtgtctaactctgcagccttcactatacttctgagaaaaatgtgatttygtactggaagctttggaatgcctggactcacccagttgccaatgagaagcagtagatcctgcattgtgttgcatccttcattctccttcaattcagttgggttgttgagtacactgaagtttgctatggtttgaatgtttgtcccctctgaaactcatgttgaaacttaacccccaatgtggcagtatagagagttgaggcctttaagaaataattgggtcatgaggcctctgccctcatgaatagatgggttcattcatggctcagtggattaatggattgtcacaggagtgggactggtggctttatacaaagagtaagagacagctgtactagcacactcagcctcctgggcatgtcatgccctgtactgcctttgaactctgcaaagatttcccaccagcaagaaggccctcacaagatacagccccttgaccttggacttg

SEQ ID NO: 466489 - DNA, 596 bp, Homo sapiens
ctactgtaattttgatcaaagtgagaattagaataaaccaagtctagcaccttttccccagtagattaaaatgctccaggaagtactcactgtgtgtccacgtgtctaactctgcagccttcactatacttctgagaaaaatgtgatttcgtactggaagctttggaatgcctggactcacccagttgccaatgagaagcagtagatcctgcattgtgttgcatccttcattctccttcaattcagttgggttgttgagtacactgaagtttgctatggtttgaatgtttgtcccctctgaaactcatgttgaaacttaacccccaatgtggcagtatagagagttgaggcctttaagaaataattgggtcatgaggcctctgccctcatgaatagatgggttcattcatggmtcagtggattaatggattgtcacaggagtgggactggtggctttatacaaagagtaagagacagctgtactagcacactcagcctcctgggcatgtcatgccctgtactgcctttgaactctgcaaagatttcccaccagcaagaaggccctcacaagatacagccccttgaccttggacttg

SEQ ID NO: 466490 - DNA, 555 bp, Homo sapiens
ttaagcttcctccttcagtgaacatcgtactgtttcaatatacttaacagggtatattcaatatgcggtagaatctaatttattaagactagaaataaaagccagtgtgaatttatgaaagctctaagttaggaaatatatttaaagaaatgcagctttattactttcatatatataaaggaatcaaaattaagccaataaaacatttccagcatgttttggcaagtagggggtaattcagccttacccaaaagaaaaaaataatttaagattatatgattcatcaattgttttcatgagwttcctttgaaaatgcttaaaaagtttgtttcataagatggtgatatatgattcctaccacccatcttgtttccactagtcattaatttagaaattcctttgttcatgaaagataccctaatattccaccaacccaattcctcactaaattaatgatctgaatcagcaagagtttttgaactttcagaaaagctaaataaattgtaatcctatgacatcatagattaataccatcttttgaaatagctttactgc

SEQ ID NO: 466491 - DNA, 545 bp, Homo sapiens
tagtaagttagagaatctttattctaaaaaagtcaacttagccaacaaatacaaaagtgaacaaacagaatatgatgtgaactactaggcaagcccacrgggccaatgccacatttgaaggcaaacagctagctaaattatgacacagaagtaattgaagaggaaacacattgaataatgttctttaaaatccacgttatagccagggatccttttagtaataataactgccttatcagaacagattggctatcacaaggagagtttctctcttgtgtccccaggttctatcttgaactgaaaattttgtggtagatttccctacagattcccacaaagaaaggctacacttcttccttctgcatctcatctgccccacacttaaaaccatatctccctgtaccaaaactgagcatatttatcaggatggatgcataggatggttttcaaaactctaaaaaagaccagcaggcatagcaaatagcaacagtgaccttgagagtattgatcaagctctgtttcttggttacagaagtagggaaatt

SEQ ID NO: 466492 - DNA, 471 bp, Homo sapiens
ttggccacgcctacacctttcctctatccgcccaagaaaatcagcaccaactgtgcatgctggcctcttgcccccagattagactctaagaagacatggtgatgtttttttcactgcttccttttgctttgatcagcaggccctgaggccagtccacactcagcaacacagcagcctgtctraagtatgtttggtaatttccgccaagacctgcatctgataggccctggggcgcttccaagtattttcatgtgtggacctctccttctgctgttcctccttccctctcccggtgaccctctcccttggctttacataaacttctgttttatcctaaatatgaggaactgaaagccttagggagacaaagtccatatcagaattgcacttctgaagtcatcctagtgaagaaacaacagaaaacaaattattctgctgaatgaagccactccttgatattctgttattttt

SEQ ID NO: 466493 - DNA, 604 bp, Homo sapiens
aagtaacactgcctccttctccatctcgtctgtgcagagatctcttactcactctttcagaccccactggagggtggactctgctgtgaagaaytccctgatttctgtagacaatgaatcatccccctcttttgtggggcttcttacattagccaccatagaagctgctgggatgtcaggcctcctctagactacaaacttctagaggtacatcacacaggtatgatgtacacatgtagattccctgtggctggcatattgtacatgctcagtaaaatgtttatcagcaccttgggaggccgaggtgggcagattgcttaaggccagaagtttgaaaccagcctggccaacatggtgaaaccctgcctctactaaaaattagccaggcttggtggcatatgcctgtaatcccagctacatcaggaggccaaggcacaaaaattgcttgaacccaggaggcggaggtttcaatcagctgggatcctgccactgcagtccagcctgggtgatgacagagtgagactctgtctcaaaaaaaaaaattgtttatagggagaacaagtaaatggatgcatgtccactgttaacaaacctatttccccat

SEQ ID NO: 466494 - DNA, 630 bp, Homo sapiens
aactttacaacaggttattttaggaataccactgggcctaacaacaaagttttaaaatatgtataatttggttccaactgtagctggtatccactggacaagaatttaaaagctgtgcaagcaaatattaatatgtaagaaaaagaacatagatggtgtcatataaggatgmgagtgaaacaagcgcatccactgatgtcatttttaggtcaaaaaagcagaattcaaaataattatatggagtactttccaaagaagtattgtcatacgagttacagacaaaggcactggggcacaaactggctgggctcacacaaagctgagatagagcagagaaacatactttgtctcaggactcacatctacccagccagactaatattactaacctaattccctgttctcaacacttagccctatatacctctccaatcccacaaccccaagaggttttcaaatcaaaagggaaaaaagttagagtagaaattagaagtgccacgattgaatgaataactatgacacatgcttttgtaaatatttttaaaatctactttaaaaaagctgaaaataggaacctgccatcagatataaaagaagcaacaacaattgtgaggacagatataagaaagc

SEQ ID NO: 466495 - DNA, 498 bp, Homo sapiens
gggcggctgtgaggtaggaggaggcggtgtgccagggwtgaggatgtctgcgaagggaaggctctctctggctgaccctgaatgaaaggcatgtggagggggaggggacaaggtgggtgccaggggacgttcctgcggagggagcacccgcagaaaagccccagaatcagggcagggcatcttccctgaaagctggggctcctccctgtcccagagacctgctgtccccactcacagtccccccactgactgcaacgggtgaggctcaccctggcgtggggcccaatgcttaggaagatgcccagatggagggcttggggctgggcgccctgggtgaggggaggctgggagaagcatttcctggctggaattggcaccacccgcaggtgtgggcagacgctcaaggcggaggctccacccatgcctggtttctttcctttctccctctccctgtgtctccaggtgtctgccacctcctcagggagccatggggcgtga

SEQ ID NO: 466496 - DNA, 498 bp, Homo sapiens
gggcggctgtgaggtaggaggaggcggtgtgccagggatgaggatgtctgcgaagggaaggctctctctggctgaccctgaatgaaaggcatgtggagggggaggggacaaggtgggtgccaggggacgttcctgcggagggagcacccgcagaaaagccccagaatcarggcagggcatcttccctgaaagctggggctcctccctgtcccagagacctgctgtccccactcacagtccccccactgactgcaacgggtgaggctcaccctggcgtggggcccaatgcttaggaagatgcccagatggagggcttggggctgggcgccctgggtgaggggaggctgggagaagcatttcctggctggaattggcaccacccgcaggtgtgggcagacgctcaaggcggaggctccacccatgcctggtttctttcctttctccctctccctgtgtctccaggtgtctgccacctcctcagggagccatggggcgtga

SEQ ID NO: 466497 - DNA, 566 bp, Homo sapiens
ttaagttaaggatttcatggaaaagggagattattctggatcatctgcacaggccctrtggaagctcaagggtccttataaaagggagttaggaggctcagcgtcagagggaagacatgaggaccggccagggggttggaggcgagaagatgctgccggccttaaggagagggaggaaacgaggggagggagcccatggcctctgacctctgcctcgaggcaagttagtcagagacccctgccattcacagaagacaagaggcagccccctgggctccagctgctctttggtgaagcctggaaggggtaagagaggcggtgccctggacaccctggagaacccacgcttttcaggcttgagcctggggtggatccacagcacgctggtgaccttgttttttacttccagcctggggattgaggcccccactgggggcagggagggaggaatgaacaagggaagggatctgagccatctgtgaccctgccctgcaggagcccacagagcaaggtctgtggacagggacccgtcctggccctgtggggggccctagagctgccagaaa

SEQ ID NO: 466498 - DNA, 588 bp, Homo sapiens
gtgcacatgcctgtgtgggggatgcgtgtgcacgtgtgtgcctggggacgcgtgtcacgtgtgcacatgcctgtgtgtgtgggatgcgtgtgcacctgtgtgcctggggacccagaggtgaaatcacaaccacctgaggtccccagcaccacctgcccccgagctccagcccaggcaccttgccttgctttcatcccagaaaggggtgactgcaggccggggctgccctggtgcaaggatttcatcctagtacccatggccatcaggggaggcagctggggccagaaatgggcacccagggaccaggaggagccctctgcgctrtgccttcagccctgcctaaagggcatccccagggaggcaggcttctctgtccaagccccagccagagcacagcacagactgttctggtccaatccagccccccacccccacaatttgagggcaaagaatgaaggcctcctgacgggggctgggcatttgccacgaagcctcattaacttggacactgtcctcattccacagggcagcacagcccctcaatgttggaaaacggtggcagagcctcagatacctgccgggagttgg

SEQ ID NO: 466499 - DNA, 588 bp, Homo sapiens
gtgcacatgcctgtgtgggggatgcgtgtgcacgtgtgtgcctggggacgcgtgtcacgtgtgcacatgcctgtgtgtgtgggatgcgtgtgcacctgtgtgcctggggacccagaggtgaaatcacaaccacctgaggtccccagcaccacctgcccccgagctccagcccaggcaccttgccttgctttcatcccagaaaggggtgactgcaggccggggctgccctggtgcaaggatttcatcctagtacccatggccatcaggggaggcagctggggccagaaatgggcacccagggaccaggaggagccctctgcgctatgccttcagccctgcctaaagggcatccccagggaggcaggcttctctgtccaarccccagccagagcacagcacagactgttctggtccaatccagccccccacccccacaatttgagggcaaagaatgaaggcctcctgacgggggctgggcatttgccacgaagcctcattaacttggacactgtcctcattccacagggcagcacagcccctcaatgttggaaaacggtggcagagcctcagatacctgccgggagttgg

SEQ ID NO: 466500 - DNA, 547 bp, Homo sapiens
atgacagggccaggatggaggtaggtgtggctataaaaagggcaacaggagagatcttcatggtaattcagctattctgtagtggataaacgaatctaatttgtcactgcactccagcctgggtgacagaataagaccctatctctctctatatatagatatagatatatagatacaatatatatttatatatgttatatatgtaaaatatgtatttatatatgtaatatatgtatttatatatgtaattatatatttcatatagaaacagtacacacattttgtgtttttatttaatttagagaactcagagatctaayaggtgtaactgcagtaccaaaaggaaagtagagaatatttgatgaaaagaaaaggcagataatttttttttttagatggagtctcgctctgttgccaggctggagtgcagttgcgtgatctcggctcactgcaacctctgcctcctgggttcaagcgattctcctgcctcagcctcccgagtagctgggactacagatgtgcgccaccaaacccagctaacttttgt

SEQ ID NO: 466501 - DNA, 587 bp, Homo sapiens
gatattcatcctctaataaaaggtcttagggagaaagggcccagaattcttgcctattcaaaaaaaggtttcctcttttttgttaaagaatcgctctttaacctggtataaagttcttaatttgacccaccctaatgattttgtagcaattgctctgcagacttttatcagttttktttagcaaactttgttatggaaaaggctgagatcagctggacttttttcttatattgactggctgtcaaaatgattctttatctttgaagtctagtaatattattaggaatatatcacgatgttgatcattgttggtctgccttcctgagggatggtttgtctttttatgtagattcaattgtatcttcttttccccaaaaagtgttattggaatattttcaatattggttctatttatttcattttctactttggggaatcaactgtatgtaatagcatatatgtgaaatatcttttatactatcttctttatgcaatattcaccttttatttacttcagtttcttcttgcttgaaaggctttccacatttatttctaatcatacatttcagcaatgcctattctttggg

SEQ ID NO: 466502 - DNA, 470 bp, Homo sapiens
acagctttcactaagccatctatctgaccatagttatctgtgtgactaacagagatgaatggattaaggccttttgccagggtgagtgtctgggtgataatttctctcctcattcttcacagctctggaacacatcccctgctcctgcctccgcaccttctcccatctggaacacattaaggggtttcataagcagatgtaacttagcatacttcctgacctagcacccaatgtatagtttcatgaayttgttcatatgtgaactgcatgtttctggggagtgtgttggtagcttccatcatactctcagaagagtcagtaaaccaagaaccacagcacaaatgagaccttcagaaaactctcagatggctcagactgcccccaaacaccactttactgcttttctttttaaatttattatacttttttacatgggtctagcaaccaaaggaatgttttactgcttttca

SEQ ID NO: 466503 - DNA, 587 bp, Homo sapiens
ttgtgaaatatttttctttcatgaggcaatagaggcaactcctgcttctttgagcagaatgagaatttagtttaaagatataggggagaaaatagaataagtactgtggcattggcttggaataggtgttattgtgagtatatgaytttcattaaaataagaaatatgtaaaagtgcaaatgtggctgcttgtatgcacacattccaactctgtccactgagggggcatggtagcgctaataaactagtagtaataagcatagctggtttctacattttggttcccaaatgccattctttactaaaagaacctggtgtccttgaagaaatagctgattgcaggactgggacaaggaaattacaagattagcctgaaatatttttttgtgtgaaaaagtaaagaagtgttcacagcatgatgagactgtcaaaagtacacagtttaaagcaacctaaagggacccctattggcagaatctgggacagtgtaagaataatgatcgtaatggactgtagaacattgagtaaaatagaaatccataactctacactaatacaaatgaatgaagagaagagaatgctcttcc

SEQ ID NO: 466504 - DNA, 587 bp, Homo sapiens
ttgtgaaatatttttctttcatgaggcaatagaggcaactcctgcttctttgagcagaatgagaatttagtttaaagatataggggagaaaatagaataagtactgtggcattggcttggaataggtgttattgtgagtatatgattttcattaaaataagaaatatgtaaaagtgcaaatgtggctgcttgtatgcacacatyccaactctgtccactgagggggcatggtagcgctaataaactagtagtaataagcatagctggtttctacattttggttcccaaatgccattctttactaaaagaacctggtgtccttgaagaaatagctgattgcaggactgggacaaggaaattacaagattagcctgaaatatttttttgtgtgaaaaagtaaagaagtgttcacagcatgatgagactgtcaaaagtacacagtttaaagcaacctaaagggacccctattggcagaatctgggacagtgtaagaataatgatcgtaatggactgtagaacattgagtaaaatagaaatccataactctacactaatacaaatgaatgaagagaagagaatgctcttcc

SEQ ID NO: 466505 - DNA, 587 bp, Homo sapiens
ttgtgaaatatttttctttcatgaggcaatagaggcaactcctgcttctttgagcagaatgagaatttagtttaaagatataggggagaaaatagaataagtactgtggcattggcttggaataggtgttattgtgagtatatgattttcattaaaataagaaatatgtaaaagtgcaaatgtggctgcttgtatgcacacattccaactctgtccactgagggggcatggtagcgctaataaactagtagtaataagcatagctggtttctacattttggttcccaaatgccattctttactaaaagaacctggtgtccttgaagaaatagctgattgcaggactgggacaaggaaattacaagattagcctgaaatatttttttgtgtgaaaaagtaaagaagtgttcacagcatgatgagactgtcaaaagtacacagtttaaagcaacctaaagggacccctattggcagaatctgggacagtgtaagaataatgatmgtaatggactgtagaacattgagtaaaatagaaatccataactctacactaatacaaatgaatgaagagaagagaatgctcttcc

SEQ ID NO: 466506 - DNA, 568 bp, Homo sapiens
aggttcgtcttgtcctgtctcacccttcttacgagtcttactgagtgtaagctggcatcctaaccttgcacctgattttcagagataagtcaggaagtgttagcaaacactggaatttttctttttttggagacaaagtctcgctctgtcaccagactggagtgcagtggcgcgatctcagctcactgcaacctctgcctcccacgttcaagcaattctcctgcttcagcctcctgagtaactgggactacaggcgtgcgcaatcacgctcaactaatttttgtatttttagtagagatggggtatcactgtgttggccaggatggtctcgatctcttgaccttgtggtttatagtttttctggttttctaataactctggtccaattttggatacacatttattttattttttcacatacttattttaaaattgtacattttttaggttttttattatatattaatctttaaaaggcatgattcttaaaatctttratctgtagttaatgttaatttttcattccagtttttatcagttattatattgcactttaataaggaagctg

SEQ ID NO: 466507 - DNA, 588 bp, Homo sapiens
ttagcattgctgacatgaggctgttggcagagcagactgctcctccgttgcctcctttgcagtgctgccatctaaaccacagaggggctkttctacttgtcacagtaagggattggataaggaatgttgcggtgaggatcgtgcaactggtgcaacacttctgccagggctggtccctggcccgcttcccccagcaaactcaaagtaatcactaattttacgtcccccagcagtgcctttcccttggctagtttcatgtggttcagcttttcttttccactttcgctggtcattctgctttttctcgggagtctctacttctttatcactcaaggatcccatgctgcacaagctctggttggaagactcactattaagtggtcccttttgttaaatctgatgtactctccttcattttgccttttgtttcctgattttccaactcttgaatatttcccattctgttttgcatgtatttatttcttcttgcatatttattgttttttcctcttctagttttccttactaatacctactctagtaaacctggcctccaataattcctgccgtcgtgggtccaggctatgc

SEQ ID NO: 466508 - DNA, 588 bp, Homo sapiens
ttagcattgctgacatgaggctgttggcagagcagactgctcctccgttgcctcctttgcagtgctgccatctaaaccacagaggggcttttctacttgtcacagtaagggattggataaggaatgttgcggtgaggatcgtgcaactggtgcaacacttctgccagggctggtccctggcccgcttcccccagcaaactcaaagtaatcactaattttacgtcccccagcagtgcctttcccttggctagtttcatgtggttcrgcttttcttttccactttcgctggtcattctgctttttctcgggagtctctacttctttatcactcaaggatcccatgctgcacaagctctggttggaagactcactattaagtggtcccttttgttaaatctgatgtactctccttcattttgccttttgtttcctgattttccaactcttgaatatttcccattctgttttgcatgtatttatttcttcttgcatatttattgttttttcctcttctagttttccttactaatacctactctagtaaacctggcctccaataattcctgccgtcgtgggtccaggctatgc

SEQ ID NO: 466509 - DNA, 551 bp, Homo sapiens
tgctatatgcattctcgcattgctataaagaactacctgagactgggtaatttataaagggaagagttttaattggctcacagttctgcaggctgtataggaaacataactcggaggcctcaggaaacttacactcatagtggaaggtgaagggcaaacaagcacgtcttatgtggccggagcaggaagaagagagagaggtgggaggtgccacacacatttaaacaactacatttcttgagacctgtgtcacgagaacagcaccaaaggggggaaatcmgcccccatgatgcaatcacctcccaccaggcccacctccagcattggggattgcaatccgacatgagatttgggcagggacactaatgcaaaccatatcacctagattccctcacacaagaactccctcaaaggacaatatacaaatattccaaaatctgaaaaaataaaaaatccagaaacacccggaatccaaaacacttctggtctcaagcatttcaggtaagggatactcagcctgtacttctttcttaatttttcttttaagtggt

SEQ ID NO: 466510 - DNA, 483 bp, Homo sapiens
gagggagaggcgcccaggccggggagggaaactgcccggcttcagccatgcctctgtcataaacttcttcccatccagccataagatgcagaaaagtaatttgcttcttcttgcttcttaaaacccagctcagaaaaatttcacccacctccatcctgccaaaaacaatgacaaaaccactcactcattcagtattctcagactgtcccatccgctcagaaacgcgactgcatctatgaggcttactcctcctccagcttgaagccactgtgaggactgtggtgagcagcgtggcttcaccgccgccctgctgaggcagtctgagggcaagrcacttacagtccctgcctccgcgtcctcacctgccttggcgaccacgggatcagccccagaactgaatgaggttgcaggaaacttggttcagcccaaactctgtaaccttagataaaacatttaactaagttgtcccccctggccaaagga

SEQ ID NO: 466511 - DNA, 565 bp, Homo sapiens
gggtcggtaataaggggttgcggatgtgtcggggggtggaggcagagatggttaatgggtacaaaaaatgttagaaagaatgaataagacctactatttgatagcaaaacagggagactatagtcaataataactgtacattttaaaataacttaaagagtgtaattggattgtttgcaactcaatggataaatgcttgaggggatggatatcccattcttcatgatgtgcttatttcacactgcacacctgtatccaaatatctcatgtgccccttaaatatatatacctactatgtacccacaaaagttaaaataaaaaaagtttaaaaaagaatttgagcatagatcctctgcactctcttccccttccaatcagctggaacstggccatggcagtgacctagctttcaacatgcagatgtctacaatgtcccagggcagttgttctgaaattgtgctcttaaacctctgaggatcgtcaagaccccttccagaaggtcataggtcaaaactattttcctactaacactatgacattatgtgccttttttactctcactttc

SEQ ID NO: 466512 - DNA, 591 bp, Homo sapiens
gaagtttgttttgtactgccaactggaagaagttccacacagattaaaagatcaaggacagagaaaccagactagaatttcagatgtggatcccaatgggaaattcataggggtaggcccttcaaattgcagttgctaatttctgatgaagatctttctcaggtgagagttttttgcagtactctttaggaggagtagcgacagggatttatttatataatgttggttcctaaatttctccaaccactctgggcaggtttgccaattctacatagatcctttcctccccaacatatcttattttgcagtgtacacagcaaatatatgcatgtctactctgagccaggcaccatgttaagtgataaggctataaaagtaaacatytgaatcttgacctcacagagttcaagtcgaattaaaaaaaaaaaaaattccactaatggtctggagggtatatcagatgtcaattttgagcctgtcagatgcattttgagtctgcagttcttagccttgaagggaggagagcacagagaaggcatccccagatgctatggatgagtttttgaatggtcccttatgcatacatgttca

SEQ ID NO: 466513 - DNA, 586 bp, Homo sapiens
ccagtaacactgtgacacttgcaggctcaaagagggcttgggtaagatccagaagaatcccctggattaccaagcaggatctctcattttcttccctcacttaccccaaacaggagcctctctttccatgctgggctgcctggagttggggaagttgtgatgcaagcacttccctggccaccacakctgggactgtgctggatcacacctgaagtcagcatattgctatatcttgcccaaggcccatggttactactgcctggctatcactgatgttcattcaaagaccaacagttctttagtcatcaggtggtgaatcctgccaggactgggtctttgccttctgggtattgggttgccttctggcacagggtgggtctagaaatgcttgtccagaaactagggcctggaatcaggggcttcaggaatctgcctgatgctttagttcattgtggctgagctggtacccacgttgcaaggcaaagtcctctgtaatcttccctctcttttctgcaagtggaaggagtcgacttgagctgtactgcttggagtttttggaggggtgatgtaagccttcccttaactg

SEQ ID NO: 466514 - DNA, 564 bp, Homo sapiens
tgataagaacttgtgtctgtttttccacaatttcaactctttctctacaggagataagactctcagtcagggcaatcttagcagatgggaggctcagtatctgaagccgggagacagaatccctgagttcatcatttttttatcactttgtccaccaagcttaggagcaaccaaccagcttcattatgttccttggttctccagatatggtcaaaggtattatgtatagagttactaaactccttgtctctcatgagcagggaatcaggtgtgtcaaatgaatttattttgcataactgtcacaatagtttatgcyaaggactatcagtgttctccatactattagaagtagagtccttagcattttggggactgatcatattaagcagccaaatccagaaaccccaaaaccaatgaaagaactccatccttaatattctgttcctctaggatcactcctcgtaccaaaatctatactagtcaaggttctctagagggatagaactaatagtatgcaaatatatataacacttaataaactcacatatgtgtgtgtgtgtgtgt

SEQ ID NO: 466515 - DNA, 564 bp, Homo sapiens
tgataagaacttgtgtctgtttttccacaatttcaactctttctctacaggagataagactctcagtcagggcaatcttagcagatgggaggctcagtatctgaagccgggagacagaatccctgagttcatcatttttttatcactttgtccaccaagcttaggagcaaccaaccagcttcattatgttccttggttctccagatatggtcaaaggtattatgtatagagttactaaactccttgtctctcatgagcagggaatcaggtgtgtcaaatgaatttattttgcataactgtcacaatagtttatgctaaggactatcagtgttctccatactattagaagtagagtccttagcattttggggactgatcatattaagcagccaamtccagaaaccccaaaaccaatgaaagaactccatccttaatattctgttcctctaggatcactcctcgtaccaaaatctatactagtcaaggttctctagagggatagaactaatagtatgcaaatatatataacacttaataaactcacatatgtgtgtgtgtgtgtgt

SEQ ID NO: 466516 - DNA, 650 bp, Homo sapiens
ctgtgtcaccaagacagggtggttaacagttccatttgtggcattctcagtgctgcctttgaatgtaaagcaagtagagacttygtcaaggaaagaattgtcttgaccaactgtattaaatgagagatacaggtttttcctctacctatttgagcaaatagctaattaaaaaaatttttgaacagtgtagttgaaagaaatcttgacttttttctatgtaaaatctaacatttttccctctgtaatcaaagaaaaatctgtggaatataaaaaacaatgatcaaaataacaataatagattccatgccaacagagttaatgtgtaattcggtgaaacgtaaccattatttttagacaaacgcctaccagtatttacacagcttatttaaatcttttttgaaatgtttgctcatgcctgtccttgccttatatcctttgaattctagagttttatgcaatgtaaacatagacatatagaccaatggaacagaatagagaacttagaaacaaatccacacacctacagtgaactcattttccacaaagatgccaagaacacacactgtgtaaaaagcagtctcttcaataaatgatgctggaaaaactacatatccatatacagaggaaataaactagatctctatctcttt

SEQ ID NO: 466517 - DNA, 511 bp, Homo sapiens
ctatcatttgaaaatagttgaagataatcagggcatattgtctaataatatgatttgtttatggtaatctccagcatcttcaaatacaaaaatcatatatagttatatccacaattgaactaactaaatgtaaaccattttaggtcacattgaggtcatcactaagttttagtacatgctgcgctacttaggtattaggaagacatcaaccagcatgaaatttaagccctagagacaaactagggctatgtattctctttagagcatacccctcaattatttctacttctccacgttttttattaacaaatctcccttgaatttggcagagaaaarcacagctgagacatgcagtacaaggaatctgacagttccattaatgaaattactacactaagtaagcattgttctgtttcaagtcatggtggtctacctggatttgcaatcacaatttcctaattgcacaacaaccttaaagtatgagtcaacactaaatgtgaggaaaaaaaaa

SEQ ID NO: 466518 - DNA, 531 bp, Homo sapiens
aataaaacaaacgttttaacccacaaaaaagagtgagaagatgaaaaaaaatgatacactgactaaattagcagaaaggctacagccaaaacacaaatgaggggatataattatgaaaaaaaaattggactagcagaaatactgagatgctctgggtttaaaaagcatctgagaatctgatactaaggtgggctctggaaacacgattagctgacactgagagtctctctcccaactcagtgatccagattattattctaactcctcactcagctttacaaacaaacaatttccgaggtttgttttcaggagttaaagaatctcaggagckcctgccttaaggataccaagctccttgagggtcccctagcgaaagcctagttgccatcctgcaaccctgtcatagagctccagtcatcatggcccatccttgtatggtcagtttccagtcagccttcttagttcctctccgttaaatatgatcaccccacatttggcagaaagactccaaacgagagagaacaaatcttt

SEQ ID NO: 466519 - DNA, 567 bp, Homo sapiens
aaatatgtgaaaataaaattaaacgcccactgaggtcatcatactctacttatccaaggtgattttcctttaactgttttatgacctagcagaaaaatattaacatactgtaatttttatatatttgaattatttgtaaatgcagtgttctgatgtaatgcataagaytgagatattttataagtcatatacatattattgtgaatgacatccatcattgaaattattctaaaaacaatattttaatgaaattactctaaaagcaatttgcattgattcagaaaggtcttcaaaatagaagtcactgtagaccatagctatatttgagctagattcataaaaatacaagcaatagaaagttaaagttaatagagtgctacttcaaaacagtatacatggatataagagtacacattgtaaatggaaacttttttctttttattacgtagtgacttagtcaaactctaatatcctatctttttctgatttttcaggcatttccccccaatacaatataaattctactgtatcagactcaattcttagtaaagcttaatctcattgaaa

SEQ ID NO: 466520 - DNA, 587 bp, Homo sapiens
gtgactgctttaatgtcaaatgaaatagtgggcataaaagcattttgtaaactttgaagaactatgtaaatgtgcgttggaacaatcagaatttaactagagtaccgaattgcttaagttacggtatatatacaaatgcaatatcatttggtgacatttaaatgctctaaaagctcaaaggtgatcacacactatggaaagtgtggatcttataagagattactaacatgtggactacattaccttccagtatctagtcatttattaataaaagcttttcaagactattagtagttagcaactaacacaggcagcaaccaagtagacagcaaactcccctgcttcatgatctcctatcacaataactactcatttttcaaaaacaactacgtatcaggccagaagtaagtgcacacaaacattatttcatcttaactctcacaataaacttttgaaattttactattatcctgattatatgggtgagaaaacygagactcaaagaaagaaaagaaccccactatcacacggtaagtaaatgattatatcaaaattcaaacccaggctaagtctgattccatttgtat

SEQ ID NO: 466521 - DNA, 587 bp, Homo sapiens
gtgactgctttaatgtcaaatgaaatagtgggcataaaagcattttgtaaactttgaagaactatgtaaatgtgcgttggaacaatcagaatttaactagagtaccgaattgcttaagttacggtatatatacaaatgcaatatcatttggtgacatttaaatgctctaaaagctcaaaggtgatcacacactatggaaagtgtggatcttataagagattactaacatgtggactacattaccttccagtatctagtcatttattaataaaagcttttcaagactattagtagttagcaactaacacaggcagcaaccaagtagacagcaaactcccctgcttcatgatctcctatcacaataactactcatttttcaaaaacaactacgtatcaggccagaagtaagtgcacacaaacattatttcatcttaactctcacaataaacttttgaaattttactattatcctgattatatgggtgagaaaaccgagactcaaagaaagaaaagaaccccactatcacrcggtaagtaaatgattatatcaaaattcaaacccaggctaagtctgattccatttgtat

SEQ ID NO: 466522 - DNA, 587 bp, Homo sapiens
gtgactgctttaatgtcaaatgaaatagtgggcataaaagcattttgtaaactttgaagaactatgtaaatgtgcgttggaacaatcagaatttaactagagtaccgaattgcttaagttacggtatatatacaaatgcaatatcatttggtgacatttaaatgctctaaaagctcaaaggtgatcacacactatggaaagtgtggatcttataagagattactaacatgtggactacattaccttccagtatctagtcatttattaataaaagcttttcaagactattagtagttagcaactaacacaggcagcaaccaagtagacagcaaactcccctgcttcatgatctcctatcacaataactactcatttttcaaaaacaactacgtatcaggccagaagtaagtgcacacaaacattatttcatcttaactctcacaataaacttttgaaattttactattatcctgattatatgggtgagaaaaccgagactcaaagaaagaaaagaaccccactatcacayggtaagtaaatgattatatcaaaattcaaacccaggctaagtctgattccatttgtat

SEQ ID NO: 466523 - DNA, 505 bp, Homo sapiens
ggaaatgtgttatttaaattccatttatctggtgagctcagatgcttctggtgaacatttatttgagcagggttataatgcattttggcaaaagcaaacttgaaggtcatcttggatttgctgttgccctggaaatgttgaaaggaatgaatttgttctggcatcttggactgttttggacacagtttctagcagggtacttgtttttatatactaactgaaatagtactgaggtcaatagcttgcatttggaaaacagaaatgaaaatacatcttttaccttgacaaaaggttggcaactgatggcagagatgatcagaaagtagaaatagggtgtgtgagtgggattcccatttgcgtagctttctttgcatacccagcacattcattcatttaataaatatttattctgtgcctaccaygtgccagaaactgttctcggtgcttgggatatggtagagaacaaagcaaacaaaatcatgttgtcatggagatgacatgctga

SEQ ID NO: 466524 - DNA, 589 bp, Homo sapiens
gggcatttgctactttttgctatatttattttttagtttctcctcaatgaataggaattactcattaaataaattagtaactatttttaacagcatgctatgagcattcaattcttgtttgaagcaattgtttgcctcttccaggacgtctcccatgaccattccctccaagtcttcttacacagaagggtcactctcggggcagggtgggtggagaatacatgacaggtgggggactgggtcctctcctcttggaatagtaactgaagggaatacactgagggactggaagcgacccctgtgccatcatgttcttgaaccctctgtatctgagaaaacctacgttattgtatctgtattactggatgaatctccttgcctgtgggtcayaggtgcaaatcccagagagcatgtccctttctgatagtgtttattgagagcacgcagaggatgcggacatgagctaaatttagccaggggtctcaaggagctccacccatgaagggcttcgggggtaagagaatcagctccttgcttctttgtccatagcacatccccagtgcctgtccaaactctgtgagatcatcat

SEQ ID NO: 466525 - DNA, 589 bp, Homo sapiens
gggcatttgctactttttgctatatttattttttagtttctcctcaatgaataggaattactcattaaataaattagtaactatttttaacagcatgctatgagcattcaattcttgtttgaagcaattgtttgcctcttccaggacgtctcccatgaccattccctccaagtcttcttacacagaagggtcactctcggggcagggtgggtggagaatacatgacaggtgggggactgggtcctctcctcttggaatagtaactgaagggaatacactgagggactggaagcgacccctgtgccatcatgttcttgaaccctctgtatctgagaaaacctacgttattgtatctgtattactggatgaatctccttgcctgtgggtcataggtgcaaatcccagagagcatgtccctttctgatagtgtttattgagagcasgcagaggatgcggacatgagctaaatttagccaggggtctcaaggagctccacccatgaagggcttcgggggtaagagaatcagctccttgcttctttgtccatagcacatccccagtgcctgtccaaactctgtgagatcatcat

SEQ ID NO: 466526 - DNA, 654 bp, Homo sapiens
ctagtgcaggctgttattttcttccccagttaccacagtaactgcagtagtccattctcaccctgctgtaaagtagtactcaagactggataatttataaaggaaagatgtttaattgactcacagttcctcataactgggtagacctcaggaaacttacagtcatggcaggaggcaaaggagaaataaggaccttcttcacgtggcggcaggagagagtagagagcaaagggggaagaaccccttataaaaccatcagatctcataaaaacttactatcataaaaacaatgtggaagaaactgcacccattawccagtcacctcccactgggtccctccctcgacaaggggggattatggggattacaattccacatgagatttgggtggggacaaagccaaactctatcagcagcctcctaactggtcaccccatcttagtcttcatccttcaacaatccattctccacattggaactgccattgtgattttttttcaagagcaatcatggtatttctctgcttaaagcccccagttggttcccattttctgagaatatgagtgcaatctgagcaatgttgctatgagacacttcttgatcaagccactgcttgtctccttagccttaattctcagcaccttcatcctctgg

SEQ ID NO: 466527 - DNA, 586 bp, Homo sapiens
gtgatgttttgatacatttgaatacaatgtataatgatcaaatcagggtaattagcatatccatcacctcaaacatttgtcatttgtttgtgttgggaacatttcaaatcttctcttctagctattttgaaatatataataaattatataataatcctgtgtgtaactttttgagaaastgtcaagcttttttttttttacagtgattgaatcattatacattttccccagcaataaacaagcattccaatttctccacatttttgccaacacttattattttctagtttttcgattatagccatcctgtgggtgtgaagtgcaggtggcttctttttattaggccattcctggtttccactcaaggaaaaggcccttttaatgtagaaggaaaaccaggcccaccttattatgctagctattagaaaagaaatctccaaggagatagattccagaagggcctctgcagggcagtactcccttctggaacccaaggctttactctcttggccagcatctgagctccccactctagtgtggtgggttgatgtgtgttttacctctgaggggctcactacagccctct

SEQ ID NO: 466528 - DNA, 502 bp, Homo sapiens
ggcctggcccacagggaacactcagtaaatgcttcctgaatgagcaaatcccttccttctcatcctctctagctcttggcctataacctactccagacactcattattatttcatgcctaagttatatcagctagaatgtttttgcctgcaaggaacagaaaatacaactcaacctggcttaagcaataaagaattttattggctgacagaactgaaagtccagagataaagcaggccccaacacaggcttaatccaagcaccccagtgtgtttctttgtgattctcctggctctgtcctccttcagccaacagtgtgatggttataggatttcagatcctcatattaggccacgatgacatccaaagtgcatcttaagagggcgcttttcctggaagtttctaggaaacctctctttgtatttcattgttagaattgggccacatgccggttcctgaaccaattcccatagycagagcattgccatgttctgagtaactta

SEQ ID NO: 466529 - DNA, 546 bp, Homo sapiens
ttcttcaacaagtgacaaaatctttcattaygtagccaggaagaaaatgagtaagattctaatttttatgaaagtgccctttcaccaacattttaccagctctgtgttaatagacagttccctattttggtggtagtttgattagagagggaagagtacatgctttggacccttaaaatggaattgactttctctggtgaaggaagtcagtgaaaaagttggctgacaacacacaaaaagaggtgaatttggaagccatcacagtattgctggagataaccctattgactttcccttgggtggtgtcaagcagaactgtgaaggttatcttatgtgatttggatgatgaggatcctcggttacacagatcgaatttctagtttcttctctggctatgattgagtacatatactgatcttctctgggccttggtttctctaactctcaaatgagccaccatatattatagggaccaaaccatgggattttggggtcaaaaatatcctcggtgtaagtatcagctcatctgtttacttcaagtttttt

SEQ ID NO: 466530 - DNA, 480 bp, Homo sapiens
agcctgggcaacacagtgagaccctatctgtacacacacaaaaaacttttttttaattagtggaatgtagtgatatgtggctgttgtcccagctayacttggcatgctaaggtggaaggatcgcttgagcctgggagttctagaccagactgggcaacatattgagaccccatctatacaaaaactaaaaaattagtggggtgtggtggtgcacacctgtggtcccagctacttggcaagctgaggtgggaggattgcttgagcccaggagttggaggctgcagtgagccatgatcgtgccactgcactctagcctgtgcaacagagtgagaccctgtctcaaaaaaataaaataaaataaaaagattgttttaaaatgaatctgacgttattcctcattccttattgcttgttcaccttatttgttaaattttcagactggagcccagcctgaaaaaggactgaagtccttttctgtag

SEQ ID NO: 466531 - DNA, 592 bp, Homo sapiens
ccagtaaagctgtgtgtgctttagccacctcctagacatcgtatctttttccttgatcagtccccaaatccctcaggatcttcttcttgtccaactaacaccaattcccaataaaggaccattcaaacatatttttacttctccgcttcatcataagccaaaatagaaccaagagacagaatagtcaatgtgttagttttctttagagttgcccagtagggggtatgaagtgccggctggrtataggaagattgtcagggttgccaaatatcccaaatgattatattctttccatcatctcttaaaaaaaaaatcatactgtgattttaggcacatctgtaggtactttgcaaaataactttgtctaagtccattcaggctgctgtaatgaaatagcatcaattgggtggcttatcaaaaatgcatttatttctcacagttctgaagctgggaagtcgaaggttgaggcagatttggtgtctggtgacaaactctccccctctgagtttccataaattttagatcttttactccattaccttcatagtatctgtgaggaccaccttttctggggtaaaggaaaccatgattt

SEQ ID NO: 466532 - DNA, 564 bp, Homo sapiens
ttatgtggctcacagttctgcatggcaccagcatctgcttctggttagggctttaggaagcttccacttgtggyagacggtgaagggggagaaagcatgtcacattgtgagagagggaggaagaggaggcagatatgcaatgctcttttaaattaccagctctctgggcttggcatagtgactcatgcctgtaatcccagtgacttgagagactgaggtgggaagatcgcttgagaccaagagtccaaggctgcagtgagctatgatcacgccactgcactccatcctgggtgacagagcgagatcctgtctctaaaaaaaccaatacaaattaaaaataaacaatcagctcttgagagagctgaactaagagagcaagaactcactcattaccttaggatggcactaaaccatgcatgagagatcagccctcaagacccaaacacctcccattaggcctcacctccaatattggggatcaaattttaatatgagatttggagggacaaacatccaaactatataaccagataataaataagctgcctttttcaaactcatttc

SEQ ID NO: 466533 - DNA, 564 bp, Homo sapiens
ttatgtggctcacagttctgcatggcaccagcatctgcttctggttagggctttaggaagcttccacttgtggtagacrgtgaagggggagaaagcatgtcacattgtgagagagggaggaagaggaggcagatatgcaatgctcttttaaattaccagctctctgggcttggcatagtgactcatgcctgtaatcccagtgacttgagagactgaggtgggaagatcgcttgagaccaagagtccaaggctgcagtgagctatgatcacgccactgcactccatcctgggtgacagagcgagatcctgtctctaaaaaaaccaatacaaattaaaaataaacaatcagctcttgagagagctgaactaagagagcaagaactcactcattaccttaggatggcactaaaccatgcatgagagatcagccctcaagacccaaacacctcccattaggcctcacctccaatattggggatcaaattttaatatgagatttggagggacaaacatccaaactatataaccagataataaataagctgcctttttcaaactcatttc

SEQ ID NO: 466534 - DNA, 564 bp, Homo sapiens
ttatgtggctcacagttctgcatggcaccagcatctgcttctggttagggctttaggaagcttccacttgtggtagacggtgaagggggagaaagcatgtcacattgtgagagagggaggaagaggaggcagatatgcaatgctcttttaaattaccagctctctgggcttggcatagtgactcatgcctgtaatcccagtgacttgagagactgaggtgggmagatcgcttgagaccaagagtccaaggctgcagtgagctatgatcacgccactgcactccatcctgggtgacagagcgagatcctgtctctaaaaaaaccaatacaaattaaaaataaacaatcagctcttgagagagctgaactaagagagcaagaactcactcattaccttaggatggcactaaaccatgcatgagagatcagccctcaagacccaaacacctcccattaggcctcacctccaatattggggatcaaattttaatatgagatttggagggacaaacatccaaactatataaccagataataaataagctgcctttttcaaactcatttc

SEQ ID NO: 466535 - DNA, 573 bp, Homo sapiens
gtcttgttatgcatgtcatgttatgattattcttttaaagtgtctaatttaagagttgggaaaaatctaattaccatccacttttctcatttggcgagtaggagttggactgagtaaatgaaatgtattgccaacagagctcacattcatggacctacactgatagaacttggaggagtccacatcaagccttcttcatagtaattgatgaagaaattggggtccaaagagtccagtcgtcaytgggactatagactgggaaactgggccttggtagaactcttcaaagttgctgatgtgcctttccgtgtgagtacaatgaactcttatctacctttttgctttcattttcttgctggaatgtgtcctttgtaaacagtgaccccatattgttatcagtcaagtacatgttagttcaacatgttgtttttcatatttataaatgtgaaaaataaaatttttatcttcccaaaacttaaaaattccttgcctatgaaagtttacttttcttttagacatgtactaaaagaagcacagcttacatagaatcctttaaaagccaatttgaggaag

SEQ ID NO: 466536 - DNA, 573 bp, Homo sapiens
gtcttgttatgcatgtcatgttatgattattcttttaaagtgtctaatttaagagttgggaaaaatctaattaccatccacttttctcatttggcgagtaggagttggactgagtaaatgaaatgtattgccaacagagctcacattcatggacctacactgatagaacttggaggagtccacatcaagccttcttcatagtaattgatgaagaaattggggtccaaagagtccagtcgtcattgggactatagactgggaaactgggccttggtagaactcttcaaagttgctgatgtgcctttccgtgtgagtacaatgaactcttatctacctttttgctttcattttcttgctggaatgtgtcctttgtaaacagtgaccccatattgttatcagtcaagtacatgttagttcaacatgttktttttcatatttataaatgtgaaaaataaaatttttatcttcccaaaacttaaaaattccttgcctatgaaagtttacttttcttttagacatgtactaaaagaagcacagcttacatagaatcctttaaaagccaatttgaggaag

SEQ ID NO: 466537 - DNA, 527 bp, Homo sapiens
atggctggggaggccttaggaaacttacaatcatggcagaagagaaagtaaacatgtccttcttcacatgatggcagcaaggagaataagcaaaagggggaaaagccccttataaaaccatcagaaktcactcattatcacaggaagagcattaaagtaactgcccccatgattcgattacctcccaccaggtcactcccacaacacatggggattatgggaactattaatcatcttaatacaattcaagatgagatgtgtgtggggacacagccaaaccatatcacatgttatatgactattgtaccctgaaccttcactacttgaggggaggggccattgctaatcatgtagttcataaaagtgccatggcccaaggttgcagtctgtctctaggagtctgctgtctggccctgttaagcctctgtgctctgccctagaatgcaatggattacagggccctgcacaactgctactgcttctatctttatgagctctatttatttattcatttagccagttctgat

SEQ ID NO: 466538 - DNA, 419 bp, Homo sapiens
gaagggaatagaaagagagagagagctactgtggcaatgagagtgagagagagagaaagaaggaagaaaatcttgatgagaaggtaaagttggggcatgaagtcaaatgccgttagtcagggggctttactttgttcccagttttcccaggagactgtctacaggtgctaattccttagaggttctgggtttaattttactgaagaggtggtacttccttatgttttgtatgtgccaggcagttttgtaagctyttcacatacattatgcattgaattctaactacaacctttcaaagaagaaagggacttttatccttaaagatcagtgctattcgaagtgtgattcctggacgtgtggcaggctgtgaactctttctttccagtccacagcgagatgatacagaaattaaaagtggc

SEQ ID NO: 466539 - DNA, 505 bp, Homo sapiens
gatgatgaagagataggtacaagttccttgtatagagaatagtctggacactcttctgaaatattaacttgggcgtgacttgctgaatctttccctttcccatgtgtgtcaggcaagtagctggactcttgatatttcctgcttcagggattttcatagggcagaaagcaggaacaatttgaaggcaattgtatctcctgtcttttgtaaaagcctaaaccaaatgatcttcagctgaggggtgcatttgaaggtatttagaaagaagagggagagacttcacctagaataaaaaggtcagagaaggaaggagaaatctagggcaggtgggctctggacacagagctcccagccccacagaatagtcrtatgccctaattggaccagaaaagaccatgttcctgggataatgggtatcttaaagatagtcagggtggacagataagtgatggctaggattttctccctgatgttctgtggctgggtaagacactttcagagccct

SEQ ID NO: 466540 - DNA, 577 bp, Homo sapiens
ctgcatctaaatcactgaaattgcagattctgactcagcacctgaggtggggcatgtgattctgcatttctaacaagctccrgttaacgctgatagtgttggtctctggatccacacttgaagaagcaagcagggcattttaggttaaagaaataccagcacaaaggtgacagtgaaaagccacatggtaggtttgaaggacagcagcagctcaaaatggttgcaccatcaagtgcagggaaggaagtgacactggaaagctggtagagttagagcaagtgagaattacatgaaaagacaaaagtaagtctttctggcacatagtggacactcagaaatggcttatttccatcacccattttactcaaattcccaccaattagaaaggaatagagagaatgtttaatatgaggtggtaagatatttgatttctcacttccatttgaggcctgagtctacttaatttatgaaaattaagtagataaaaagacatctagatggtcatcttacctgcctcagagaaagaaggtgattcccaggctcaaacaggattaagcagaaaccacttcacagagcc

SEQ ID NO: 466541 - DNA, 577 bp, Homo sapiens
ctgcatctaaatcactgaaattgcagattctgactcagcacctgaggtggggcatgtgattctgcatttctaacaagctccagttaacgctgatagtgttggtctctggatccacacttgaagaagcaagcagggcattttaggttaaagaaataccagcacaaaggtgacagtgaaaagccacatggtaggtttgaaggacagcagcagctcaaaatggttgcaccatcaagtgcagggaaggaagtgacactggaargctggtagagttagagcaagtgagaattacatgaaaagacaaaagtaagtctttctggcacatagtggacactcagaaatggcttatttccatcacccattttactcaaattcccaccaattagaaaggaatagagagaatgtttaatatgaggtggtaagatatttgatttctcacttccatttgaggcctgagtctacttaatttatgaaaattaagtagataaaaagacatctagatggtcatcttacctgcctcagagaaagaaggtgattcccaggctcaaacaggattaagcagaaaccacttcacagagcc

SEQ ID NO: 466542 - DNA, 577 bp, Homo sapiens
ctgcatctaaatcactgaaattgcagattctgactcagcacctgaggtggggcatgtgattctgcatttctaacaagctccagttaacgctgatagtgttggtctctggatccacacttgaagaagcaagcagggcattttaggttaaagaaataccagcacaaaggtgacagtgaaaagccacatggtaggtttgaaggacagcagcagctcaaaatggttgcaccatcaagtgcagggaaggaagtgacactggaaagctggtagagttagagcaagtgagaattacatgaaaagacaaaagtaagtctttctggcacatagtggacactcagaaatggcttatttccatcacccattttactcaaattcccaccaattagaaaggaatagagagaatgtttaatatgaggtggtaagatatttgatttctcacttycatttgaggcctgagtctacttaatttatgaaaattaagtagataaaaagacatctagatggtcatcttacctgcctcagagaaagaaggtgattcccaggctcaaacaggattaagcagaaaccacttcacagagcc

SEQ ID NO: 466543 - DNA, 511 bp, Homo sapiens
gctctgtatttccatggaaacacaaagggaactccatagtgcagtgagcaggaggtaatagagaaaagagagagaattagcaggcttggttactgttaataattacctgggtagcaattattgcttttggaaagtgcacaatctttgtagctgtcactcattggtgacctcagatttcacttagtctggaagccaaaggatttasttcatttcatttgcattcagaaagcccccccacctataaccaccaatcccaagatatgtcaaagtaccttttctcagatcttgcttagaaagagcactcatatgtgggagaaaaggcacaatctgtttagccttaaggtaccaactttttcatttacccagctcttggctcctagtgattttgttcagaattagagaagagttagccaaatgcccagagaagcagctgttcctctaaaacaaactggaaaggaaaacaatcactcctcctgccccccactagaagaaggcaaatggttccaaaact

SEQ ID NO: 466544 - DNA, 584 bp, Homo sapiens
tttagttttacagaaaaatttcacagaaattacaagttcccatatactcctcttgccttgccccttaaatatttcggagggtgtgaggtaggggtccaactttactattttgcatgtagatatccagttgtccsaggaccatttgttaaaaagactattcttttgctattgaacgatgttggcacccttaacaaaaaatcaattggctataaatatttgggcttatttatttatttgttgagacagagcctcactccattgcccaggctggcatgtagtggcatgatctcagctcactgcaacttctgcctcctgggttccagagattctcctgcctcagcctactgagcagctgggattacaggcatgtaccaacacacctggttaatttttatatttttagtagagctggggtttcaccatgttggccaggctggtcttgaactcctgacctcagatgatctacataccttggcctcccaaagtgctgcaattacaggtgtgagccaccgtgcctggcctgggtttatttttggactttccaattctatttcactagtctgtgtgttctttttatgccagta

SEQ ID NO: 466545 - DNA, 554 bp, Homo sapiens
tatttttctcattttattttttgctgtagacagagtcaaatttgcacatgtcaaatcatgtaataccactgtcttattacaagctaagtcaacattagacataaacaactgctaagggtggcttcctcaaaatggaacttgggaagtggttggcaattttggtttcatggactsaggagtatatttgtcccatcccctgctttcttcatacagtattaaatagtgagcatttctgcatgttattaatttttttcacaaatgtcatttttaataactttaataattcaacctatgcctattccataattcatttaactattcttttgcacattgatggtgtttataatttttaatcgtttcaaacaccaccatattaatctgtcatacattaatctttgccattctctctatttccttggggtagagggtagttctcaaaaatgggattaaagcatgaatattttagaggctgctgttaaatagctttctagaaatattataccaatacaagatatgccaacagagataaagtgcccacctcaccacaccctggc

SEQ ID NO: 466546 - DNA, 583 bp, Homo sapiens
attcttttgcacattgatggtgtttataatttttaatcgtttcaaacaccaccatattaatctgtcatacattaatctttgccattctctctatttccttggggtagagggtagttctcaaaaatgggattaaagcatgaatattttagaggctgctgttaaatagctttctagaaatattataccaatacaagatatgccaacagagataaagtgcccacctcaccacaccctggccaataccgaacatgcatttttaagttgtgacagtttttctccatgaataaaggtatcatactggtgttttaattttcagtccaaaggttagcatctttatttgcttattaagcattgtatttttttccttctgaaattttatgttccagttctttgcccttttttggtttttattactatggttctatgtcatcttgatatgtgtggayctcttccttgtgactgatagctcataaaactacttttccctccacgccccccacccactttccttagttccctgaaaagcagtaggcacaagaaatggcatggaaatcacagtcctgactttaggcaaatgttcagc

SEQ ID NO: 466547 - DNA, 518 bp, Homo sapiens
agtgggtcccaaacagcatttaaagaaatagaatagaatagaatggaagggaagggaaggaaagaaaagtaaatggaagggaacagaatggaaaatatcatgcgtcacacatagtggcagtaagcattgctcagtaaaagttttatttcagttatgtacatacgtatgtgtggttatgtgtgagtgtgtgtgtgtatgtgtgtgttargatataaaatgcatttcttactttggttggcatcaagaaacaatgaaatgctcctgctctagccactccttctgtcctcaaggtcactgccaatagcttatcctcaacggacacactttctgcaggcctttgcaatttagaaaagggtagttgtaattcttggtgtgcttccttgagccttttctatgaaaatataattattaaagaaaagcatatccaattggttacccttatcccaacttactaggtgtataaactttttccctttctaagggtagcctccctgaattttactttctccatttttaaa

SEQ ID NO: 466548 - DNA, 589 bp, Homo sapiens
attttttataataattcctcctgttttccaccaagaataagtcaaattttgaactttttgattaatgtgaactatgcagaaggggctatcaattagtacaatgttatctatgaaaaggctaattttatttttcctccttagaagtgcctagttatggcttaatgtatatacayacacacacacacacacacacacacacacacacacacacacacgtgtatgtgtgtttatacatgttaagccataggtttaaagtaagtaacaaacaaagggtttgttactttaattatttccaccttacctatgagtagacattgacttacaagaaggttaaataattagcccagcattatgttactaaaaaataacaaagctgagctttgacccctggtagtccaactccagaagctgtgttctaaactactaagtgatagtatttcacctgacttactttcttattttctaccagtctcattcagatccagccacatgttcttttgtaacctccttttcctttctcaaatattcctagcaaactttgtgttgcagcttttgtattagctattctttaggccttgactcttcctcc

SEQ ID NO: 466549 - DNA, 618 bp, Homo sapiens
cttgtcctgagaagataaggtccgttaaaaatttttctgtggtggaaataattttgacagctcaggaaaatgatatgaaaatttgtaatagtaatgaaagggttagagaagttctgccatcaagaaaaatgctaaaaatttgtttttctaacattgttttataaccttcctaataacagtttgcaaagtttttctataaagggcaagagggtaaatagtttgggctttgcaggctgtatgggtctctytggcatctactcaactcttcctttatagtgcaaaagcagatttagatattatagaaacaaatatgtggctgggttccaataaaactttatcaaatcagcccactgggctggatttggcctgtgtgctggaattttccaacccccgccaatattatgcagaggtagttttaaaaaatgtctgatttggaaatctctgttttagattttgtacttaaatctcaaactctctaaaattgtatccataagatagcccttcctctttgcttattctcattcttgagaaatttgtagcagtagaggagggcatgaagaagggaataactttttgcagagaataaactctttcagccttggtacccatagctatccc

SEQ ID NO: 466550 - DNA, 618 bp, Homo sapiens
cttgtcctgagaagataaggtccgttaaaaatttttctgtggtggaaataattttgacagctcaggaaaatgatatgaaaatttgtaatagtaatgaaagggttagagaagttctgccatcaagaaaaatgctaaaaatttgtttttctaacattgttttataaccttcctaataacagtttgcaaagtttttctataaagggcaagagggtaaatagtttgggctttgcaggctgtatgggtctctcyggcatctactcaactcttcctttatagtgcaaaagcagatttagatattatagaaacaaatatgtggctgggttccaataaaactttatcaaatcagcccactgggctggatttggcctgtgtgctggaattttccaacccccgccaatattatgcagaggtagttttaaaaaatgtctgatttggaaatctctgttttagattttgtacttaaatctcaaactctctaaaattgtatccataagatagcccttcctctttgcttattctcattcttgagaaatttgtagcagtagaggagggcatgaagaagggaataactttttgcagagaataaactctttcagccttggtacccatagctatccc

SEQ ID NO: 466551 - DNA, 496 bp, Homo sapiens
ggtctctctggcatctactcaactcttcctttatagtgcaaaagcagatttagatattatagaaacaaatatgtggctgggttccaataaaactttatcaaatcagcccactgggctggatttggcctgtgtgctggaattttccaacccccgccaatattatgcagaggtagttttaaaaaatgtctgatttggaaatctctgttttagattttgtacttaaatctcaaactctctaaaattgtatccataagatagcccttcctctttgcttattctcattcttgagaaatttgtagcagtagaggagggcatgaagaagggaataactttttgcagaraataaactctttcagccttggtacccatagctatcccacccctatcacctttgtggtatatactgtatgactatggaaagtgaatcacatactcttcctgccctcagggaacgagctctatggtctactgggagtgagggtgataattttgcaaa

SEQ ID NO: 466552 - DNA, 496 bp, Homo sapiens
ggtctctctggcatctactcaactcttcctttatagtgcaaaagcagatttagatattatagaaacaaatatgtggctgggttccaataaaactttatcaaatcagcccactgggctggatttggcctgtgtgctggaattttccaacccccgccaatattatgcagaggtagttttaaaaaatgtctgatttggaaatctctgttttagattttgtacttaaatctcaaactctctaaaattgtatccataagatagcccttcctctttgcttattctcattcttgagaaatttgtagcagtagaggagggcatgaagaagggaataactttttgcagagaataaactctttcagccttggtacccatagctatcccacccctatcacctttgtggtatatactgtatgactatggaaartgaatcacatactcttcctgccctcagggaacgagctctatggtctactgggagtgagggtgataattttgcaaa

SEQ ID NO: 466553 - DNA, 573 bp, Homo sapiens
caccctcaacacacacacataagaaagcatattgcatgtattttggtgtttttaccttccgtattagccgttttcacgctgctgataaagatataactgggactgggcaatttacaaaagaaagaggtttattgaacttacggttccacatggctggggaggcctcacagtcatcgcagaaggcaaggaggagcaagtcatatcttacgttgatggcagcaggcaaagagagagcttatgcagagacccctgttcttaaaactatcagatctsgtgagatccattcactatcacgagaacagcatgagaaagacccacccccaagattcaatgatctcccactggttccttcccacaacacgtgggaagtatgggagctacaatatgcgatttgggtggggacacagggccaaaccatatcaccttcgtaattttgagatgacacattatacaaccctcctaaaacttgtaggaaggcttatgatgaaaaacagaaacaaaacagatcaaaaggaaatactgatattgcaaattgcttggcagtttttgtttgtttttcagatttcagcactc

SEQ ID NO: 466554 - DNA, 304 bp, Homo sapiens
atgtacctatgatatttcagtcaacaacagactgcacatacartggttgtctcataagactatttgccatatttgccatatttttactgtacattttctatgtttatatgtgtataaatacacaaatacttaccattgtgttacaattacctcaaataatcagtatagtaaaatgccgtataggtttgcagcctaagagtgaaaggctacaccatgtagcctaggtttacagcaggctatatgatctaggtttgtgcaagtacactccataatgtttgcccagtgagaaagttccccaattacg

SEQ ID NO: 466555 - DNA, 304 bp, Homo sapiens
atgtacctatgatatttcagtcaacaacagactgcacatacaatggttrtctcataagactatttgccatatttgccatatttttactgtacattttctatgtttatatgtgtataaatacacaaatacttaccattgtgttacaattacctcaaataatcagtatagtaaaatgccgtataggtttgcagcctaagagtgaaaggctacaccatgtagcctaggtttacagcaggctatatgatctaggtttgtgcaagtacactccataatgtttgcccagtgagaaagttccccaattacg

SEQ ID NO: 466556 - DNA, 304 bp, Homo sapiens
atgtacctatgatatttcagtcaacaacagactgcacatacaatggttgtctcataagactatttgccatatttgccatatttttactgtacattttctatgtttatatgtgtataaatacacaaatacttaccattgtgttacaattacctcaaatartcagtatagtaaaatgccgtataggtttgcagcctaagagtgaaaggctacaccatgtagcctaggtttacagcaggctatatgatctaggtttgtgcaagtacactccataatgtttgcccagtgagaaagttccccaattacg

SEQ ID NO: 466557 - DNA, 304 bp, Homo sapiens
atgtacctatgatatttcagtcaacaacagactgcacatacaatggttgtctcataagactatttgccatatttgccatatttttactgtacattttctatgtttatatgtgtataaatacacaaatacttaccattgtgttacaattacctcaaataatcagtatagtaaaatgccgtataggtttgcagcctaagagtgaaaggctayaccatgtagcctaggtttacagcaggctatatgatctaggtttgtgcaagtacactccataatgtttgcccagtgagaaagttccccaattacg

SEQ ID NO: 466558 - DNA, 563 bp, Homo sapiens
gaaactgtacaaaaaatataaaaatgacctgagtatggtggcacatatctgtagtyccagctactcgggaggctgaggtgggagaatagcttgagcccaggtggttgaggctgcagtgagctgtgattgtgccactgcactccaatctgggcaacagggcaagaccctgtctcaaaacaaaataaaataaaaatgctaaggaatcaaaagtaactttcaatctatataattgtccttaattgtcttgaatatgtacaccatatcataaaacatcatatatttgaagtgtcatttaaggagaatttatgcagtgcttcgttgttaagactggtgaaatggcagactctggtcataccaaatatgcaggtggaagtggtttttcatttcctgggtaaagaatataacctgaggcatagatatgcattctaagagttaagttttaaattagacttaagtcttccacttccaaacttatatttaagattcttgcaatcttttactcatttacttttgataatttgcaagaatttattttaagcacaagaaatcttaatataatcata

SEQ ID NO: 466559 - DNA, 563 bp, Homo sapiens
gaaactgtacaaaaaatataaaaatgacctgagtatggtggcacatatctgtagttccagctactcgggaggctgaggtgggagratagcttgagcccaggtggttgaggctgcagtgagctgtgattgtgccactgcactccaatctgggcaacagggcaagaccctgtctcaaaacaaaataaaataaaaatgctaaggaatcaaaagtaactttcaatctatataattgtccttaattgtcttgaatatgtacaccatatcataaaacatcatatatttgaagtgtcatttaaggagaatttatgcagtgcttcgttgttaagactggtgaaatggcagactctggtcataccaaatatgcaggtggaagtggtttttcatttcctgggtaaagaatataacctgaggcatagatatgcattctaagagttaagttttaaattagacttaagtcttccacttccaaacttatatttaagattcttgcaatcttttactcatttacttttgataatttgcaagaatttattttaagcacaagaaatcttaatataatcata

SEQ ID NO: 466560 - DNA, 659 bp, Homo sapiens
gtgtgttgcgtgtccttaatctatttggcgcaagatgatgaacctcaggtgtttaccccagacagtgatgctgattcagttttagtgtctgtattctttttaaaaatttttactctatttcatttttttgaagagatgttgctcacgctgatcttaaagttctggcctctaggggttctcctttatgttggttttccctatgtagaaaatgtgctacacatagccactctttattgttaattcagtctacttacagcttcttcaaatttcatattcattattgtccaaacacacataagtagaaaaatatatataatgtaaagatatagaaatttgagaagatgcaaagtcaatgctgattggagaaactggacttgactatcataagctgctactactaaaatacaattactaaaagaaaaawatctgaactaaatgagaaatgtcacaggaaaacaataaagaattataattatataatatgtctcatccttggtgaattattgcagtgtagtaatcatctgataaaatatgttccaatcacaataagcatcaacttttgaaggatatattggaattatcttcattccacattacagcaggtaaaaattagaacattttctattcatattccttggtaagattaattctggataaca

SEQ ID NO: 466561 - DNA, 508 bp, Homo sapiens
tgatgcagcccgtgtcaaggtgagcaacttggtgaagggaagagcaggctggatttcacctcccactcaggtgatcttggrggccactgtgggcaggacacaacctgggcagctcaagaatggctttttgtttaggtcttcaatcctactccatttatccaggctagttttgttttcactgataaagacatttcacttatggaagtcataggtgtgggtaactagataaagtagatcagttaaatgatacgtcttgaaaataatgacacctttcaaagtaaagtattaacataatgataatttgttatcttggatttaaccatattttgtatctttaaaaaatacttgtatattatttattagttatggctttctaaacacaaagttacctatacctacattaaaaaaaaaattcatggtggtgagagggagttatatctttaaccttaaccaagttatgtaatttacataattattgtgtgtgtgtatgtgtccatacacataatca

SEQ ID NO: 466562 - DNA, 508 bp, Homo sapiens
tgatgcagcccgtgtcaaggtgagcaacttggtgaagggaagagcaggctggatttcacctcccactcaggtgatcttgggggccactgtgggcaggacacaacctgggcagctcaagaatrgctttttgtttaggtcttcaatcctactccatttatccaggctagttttgttttcactgataaagacatttcacttatggaagtcataggtgtgggtaactagataaagtagatcagttaaatgatacgtcttgaaaataatgacacctttcaaagtaaagtattaacataatgataatttgttatcttggatttaaccatattttgtatctttaaaaaatacttgtatattatttattagttatggctttctaaacacaaagttacctatacctacattaaaaaaaaaattcatggtggtgagagggagttatatctttaaccttaaccaagttatgtaatttacataattattgtgtgtgtgtatgtgtccatacacataatca

SEQ ID NO: 466563 - DNA, 606 bp, Homo sapiens
tggtaacaggtgacaaaagataggagagacttagtatatatgtgtgtggctttgttagctaagatgaagaatttggattatttttaaaatatgcaagaaagccactgtgaagactacagtaacataacttgtcttaaatgtttttttttttaattgctctgactgttttcaagaagagtgagtggaaagagactgtcaagaagagaaccagagagaacatttaaggcaaaaatatcaatattcagataaaagatggtggcttaactgaaattgacaacagaggaaacagggacaagagattccactccagttgtggaggtgaattaaacaaaatttaaatgaataaaatatgaactaaggaaaaaaactggatttcttgtgtatatttatgggtggatgatgagctattttctgacatcaggaagagggaagaaagatgagacctggtgtgaaggaagacagaaggaagaatatgatttatttgataagtaaataaacctattgcattaccacatggtaataccatgtaggcagttgyatatttcagtttggaattccaggagatgagaagaccaggaagagtcccaattccttgggactagacgt

SEQ ID NO: 466564 - DNA, 561 bp, Homo sapiens
aaactaaaacagcatcagtttttttgttttgtttgtattttccatatagagtagcaagaggcaaggggttgaatagcagtccccatattaatgaagcatagctgcaataatccttgctttctgcagcaggttggcatagcttggtaggcatagcttctttctttcgccatccatttcatgatcttatcctgggtcagaatattggctaaacggtgttctttaccctaatcagctgacccaagtctcaatgcatatgatttgtgtggggttctgtcttcattaagttgcaatgtatttccattgaccaagatttttgagtaaggggatactcacaggtccccctgggatctaaatatagtcatcatttcccccatatggcaaaactcagccttttcctctccctttcctgctgcaactctggactgaccttcatgctggttccatgtatcttgactkcctcttattcctgctctgcttcttctctcacaccattgctcttcccttttgttatcccaccctttcctaagcacatctttctcactggacaatactccctcataa

SEQ ID NO: 466565 - DNA, 578 bp, Homo sapiens
tcagcctcccgagtagctgaaactacaggcacctgccaccaggccaagctaatgtttgtatttattgtagagatggtgtttcaccacgttgcccaggctggtctcaaactcctggccttaagtgatccacctgcctcagcctcccaaagtgctggggttataggtgtgagccaccgcgcctggccagaggttctgtatttctaacaagctgctggtccatgaaccacactttgagttgcaagcgtctaaactaggtttctcaccctggactctattgacattttgggccagataattctttcttatgtggttgtttagcagcattcctggccttttcccactagatgtcagcagcaccaccccccatttgtgatgaccaaaaatgtctcctgacatygcaaaatgtcctttaaggggtacagcctttgccaggaaagaaccacgtgtctaaaccagtggttcccaaagcttgtctgtacattggaatcatctgggaagcttagaaactcctggcgcttgtgtcctgcctaacagattgcagtttacttaacctgaaatatggctgggtcaatttcaaa

SEQ ID NO: 466566 - DNA, 578 bp, Homo sapiens
tcagcctcccgagtagctgaaactacaggcacctgccaccaggccaagctaatgtttgtatttattgtagagatggtgtttcaccacgttgcccaggctggtctcaaactcctggccttaagtgatccacctgcctcagcctcccaaagtgctggggttataggtgtgagccaccgcgcctggccagaggttctgtatttctaacaagctgctggtccatgaaccacactttgagttgcaagcgtctaaactaggtttctcaccctggactctattgacattttgggccagataattctttcttatgtggttgtttagcagcattcctggccttttcccactagatgtcagcagcaccaccccccatttgtgatgaccaaaaatgtctcctgacattgcaaaatgtcctttaaggggtacagcctttgccaggaaagaaccacgtgtctaaaccagtggttcccraagcttgtctgtacattggaatcatctgggaagcttagaaactcctggcgcttgtgtcctgcctaacagattgcagtttacttaacctgaaatatggctgggtcaatttcaaa

SEQ ID NO: 466567 - DNA, 641 bp, Homo sapiens
cattcatgctacctcaggaatcattattatctttttataggtaactaaattcagaggggtcagatggcttcctcaaggtcatgctgctaagatatgagagctgaagtttttttattttatgttcactgctcttttataacatacatttatggatttgaatctacctgacagagtctagctagattccaaggtagaaattgcacagagatggtcggattggagagttatttacaactaatgggatgttttttatttctgacttaagattggatagacctttgtycatccatgatgcaggtcttcagaaatcaaaaacatgtttccacaccctctcatatgtactttctactgaactgtattttcctggttaattatgaattcttttataaatttaaaaacctattaaacaaatattgtgtgcttgaccctgtgctaggcaccttgggtaaagaaataataaaggcaggcatggtccctggtttttatagaacccgtggtctagtgcagaagtcaaatattgaatggaaagtacacaatagcagtgaagaaatgagctttggtgacttgcgacagcaggacttaaggtggtctggggattcaatgaagacatgccccaggaagtgtctttgttgaaaaccagg

SEQ ID NO: 466568 - DNA, 603 bp, Homo sapiens
gctcactttttcttttgagacataggccctttaggatgtagtcttttaacctgggcaaagtcaatgctcacttatgtttcttttcatggctggtttgctacagtaaccgcatagtgggtgcttagtttgtttgtggcaaaaaagtagaattgaaatctttatgctcaagtccagtggctccaatctgtgcttgattattggaaatggagccttcttctgctctggggttcctgagctaaagccaaggcacttgcaccagcggcactgctggctggctgggattgctcaaatttgttctggctcacctggtgtggctcttaggttcctgtccatgttaatgatgttctrtacagtccctggagtcaggtgtttgcctacttgtctgaatgggtgatgtcctctggcaaacccatcaagggagctttcttcattgctctacctcacagttgatctctttgctccagactttgtgccttttggctcccattcttcccagttcctcctcatctcacttctgtcatttttccaggcttagcctggatactgttccatagtgccctgtcagggtttctccacatggcaataggactcaagaagccttgt

SEQ ID NO: 466569 - DNA, 536 bp, Homo sapiens
  misc_feature (1)...(536): n = A,T,C or G
aaatgtttctaaaatttttaaaagtcagtatgcaaccgtaagtaagtaagcattgaaatggaaattcgatatttccagagaccatgttgcatctaacagctgagtctgactccaggcycatcactagttccaagcttatcatcatcatcatcatcatcatcatcatcatcatcatcatcaccatcatcttttttgagcctatgaggtgtcaggactaagacttatagagtatctcattgaatcgtaaaaaataacattctgaggtgaatattaatattatttattcttgctaggtgaggaaatcaaggctcagagagcggaagtccctggccaaaggtctcatggccagtatgtagcccaatcagaatacgaactctcaaatgcctgagagaaagcacatgcttgtacatgtaatcccttccagcaaatgacccatgggactgagtcctctgcangaatgctgattctatgcaggataacttccctaacatctcagctttggtgtgtgacaaccaaaggctaggaattattttata

SEQ ID NO: 466570 - DNA, 536 bp, Homo sapiens
  misc_feature (1)...(536): n = A,T,C or G
aaatgtttctaaaatttttaaaagtcagtatgcaaccgtaagtaagtaagcattgaaatggaaattcgatatttccagagaccatgttgcatctaacagctgagtctgactccaggcccatcactagttccaagcttatcatcatcatyatcatcatcatcatcatcatcatcatcatcaccatcatcttttttgagcctatgaggtgtcaggactaagacttatagagtatctcattgaatcgtaaaaaataacattctgaggtgaatattaatattatttattcttgctaggtgaggaaatcaaggctcagagagcggaagtccctggccaaaggtctcatggccagtatgtagcccaatcagaatacgaactctcaaatgcctgagagaaagcacatgcttgtacatgtaatcccttccagcaaatgacccatgggactgagtcctctgcangaatgctgattctatgcaggataacttccctaacatctcagctttggtgtgtgacaaccaaaggctaggaattattttata

SEQ ID NO: 466571 - DNA, 536 bp, Homo sapiens
  misc_feature (1)...(536): n = A,T,C or G
aaatgtttctaaaatttttaaaagtcagtatgcaaccgtaagtaagtaagcattgaaatggaaattcgatatttccagagaccatgttgcatctaacagctgagtctgactccaggcccatcactagttccaagcttatcatcatcatcatcatcatcatcatcatcatcatcatcatcaccatcatcttttttgagcctatgaggtgtcaggactaagacttatagagtatctcattkaatcgtaaaaaataacattctgaggtgaatattaatattatttattcttgctaggtgaggaaatcaaggctcagagagcggaagtccctggccaaaggtctcatggccagtatgtagcccaatcagaatacgaactctcaaatgcctgagagaaagcacatgcttgtacatgtaatcccttccagcaaatgacccatgggactgagtcctctgcangaatgctgattctatgcaggataacttccctaacatctcagctttggtgtgtgacaaccaaaggctaggaattattttata

SEQ ID NO: 466572 - DNA, 536 bp, Homo sapiens
  misc_feature (1)...(536): n = A,T,C or G
aaatgtttctaaaatttttaaaagtcagtatgcaaccgtaagtaagtaagcattgaaatggaaattcgatatttccagagaccatgttgcatctaacagctgagtctgactccaggcccatcactagttccaagcttatcatcatcatcatcatcatcatcatcatcatcatcatcatcaccatcatcttttttgagcctatgaggtgtcaggactaagacttatagagtatctcattgaatcgtaaaaaataacattctgaggtgaatattaatattatttattcttgctaggtgaggaaatcaaggctyagagagcggaagtccctggccaaaggtctcatggccagtatgtagcccaatcagaatacgaactctcaaatgcctgagagaaagcacatgcttgtacatgtaatcccttccagcaaatgacccatgggactgagtcctctgcangaatgctgattctatgcaggataacttccctaacatctcagctttggtgtgtgacaaccaaaggctaggaattattttata

SEQ ID NO: 466573 - DNA, 303 bp, Homo sapiens
cagaaaacccaatttatatttctcaaagagcagcatcacgtctccagtaggagagaaaaggaaagcagaagattaagatgggtacacctaagaaaaagggcactggtgcctaaaactaagcaggtaragactgggatactgtgagtctaagaaacaaaagacagcagaagagcaagagaactgcaaagcactcaacaggaagatcgattgggaagctgaaggcagggcagctaagaagatgagcacccagcccccaaagactggaccagagaatgagggctctaagacaagctgggcagtgtc

SEQ ID NO: 466574 - DNA, 600 bp, Homo sapiens
tcaggcaaccctgttggagaaaaggaccacgtggagaggctctgaaggatgacattgtgtggagaaagaagcgacaggaaagggaaacttggtgccccagctgagctcccagctgaacgcaggtgcctgaagcagcccagccaaggtgacatagagcagaaacagccaaggcagcctcagaatcatgagtcataataaattgttgtcattttaagtcgctaaattttgcagtagtttgtcatgtggaaaaactacaagaaaaaaatggaaaataaggggcatgtggggttgaaaccagaagattatacctatgagtttcagaaatagcatttagagagaattggcgggggaagtggggactgtgaagtaatcaaagaaataaaaagaaaaattctcgtaattgaaaaaagattatattcatattaaagttgctcaccgaagactaagcwgtttagaaagaaaaaacacacctagaacacaatggtcatatttcagatatttagatatagatacaaatatatgtatttatttacatatataaataaatataaattcctcaaaaaattccacagattttttcaaactcacccagagtggaat

SEQ ID NO: 466575 - DNA, 416 bp, Homo sapiens
cccagccatctggaaatgtgagttcactaaacctctttcctttataaattacccagtctcaggtatgtccttattagcagcrtgagaatgactaatataccctcctagttcctgatttgacaagggatgtttggaggttttaataacttagacaagattcataaggtagcatatattttttaaaaaatcacaaaggcctataggagatcttatcaattcaaatctactatggattttttataacaataaatattctacatatttctggagcactttgatttggacatcagaagaatatgttggggaaatatgacctgcaaaatcaaagcccaccctgtgttggggaagtaatgactcatcaactacaaaatcaaaacccaggcttggtttggacaaaaatactctttgaagtctcc

SEQ ID NO: 466576 - DNA, 558 bp, Homo sapiens
aggtttggagttggctatttagatgccaaaattcatcaatccaacagtattttttaagtcttggttttagttcattgatactgtttgggtgctcattcttaggatagaaggcctgagctgtaatccaggaaaggagcctctcctcagcctgcatggtgaggaggagttacctaatgagtgctctttagcagaaggctcagccagcagcagctactccgaaaaactttcatgtcagggagattaaaaaatcaytgtccttaggatgctgagctcaccatctagtaggcctgagggtaacctctctaagctgacaaaactggacctttctgggcctgtcattatctcgctgaacctgaaaatgagccttgacctgaacaccaggcccgagctccttgccattaactctaccaactaccacagctttgctggagccaagaactcgaacatgcatccttgggagaacttaattgcctgcttattgctattgctttgattaatgagggcaaacctgctctcagcaatgcctcataaaaggagtgagccgccacattttagaaa

SEQ ID NO: 466577 - DNA, 558 bp, Homo sapiens
aggtttggagttggctatttagatgccaaaattcatcaatccaacagtattttttaagtcttggttttagttcattgatactgtttgggtgctcattcttaggatagaaggcctgagctgtaatccaggaaaggagcctctcctcagcctgcatggtgaggaggagttacctaatgagtgctctttagcagaaggctcagccagcagcagctactccgaaaaactttcatgtcagggagattaaaaaatcattgtccttaggatgctgagctcaccatctagtaggcctgagggtaacctctctaagctgacaaaactggacctttctgggcctgtcattatctcgctgaacctgaaaatgagccttgacctgaacaccaggccygagctccttgccattaactctaccaactaccacagctttgctggagccaagaactcgaacatgcatccttgggagaacttaattgcctgcttattgctattgctttgattaatgagggcaaacctgctctcagcaatgcctcataaaaggagtgagccgccacattttagaaa

SEQ ID NO: 466578 - DNA, 530 bp, Homo sapiens
ctataataaggacttgagcaaatgaaaggttataagccacccctccccataagcaagtcaacgaattttattttcaaaatgacattaaatgtgtataaaggctgagctaaaatagcttttctgtagacattttaattgcaaaattatgggtaaaatgattgtgactgagctgtttcctcttttctggcagggttggcaccctcctttgcgcttagcatatgcttgatcaatttccggagtacccagaattaagatagaccctgtgcgtagttgtcttagtagtaagcagattaactgactggagccaggaatgtcgtcataaacatgragccccgtaccagggcatcttggcagggcaatgttcctagctgcaggtaagaagctggtacactatgatgaggtctcacccactggaaaatatttggagtacccttcaatgccaggggctccaagaatcacattggctaaatgatcagacatgaacaaataggctgagactggagtcaaacctaaaaactgggcatatatag

SEQ ID NO: 466579 - DNA, 583 bp, Homo sapiens
ctacccacaaaagaacaataaggacaaccagacaaccaccaccaccaaaatagtaaggttttctacatgcccagcactgtcctaagagtttatatagattaactttttgtgcctccttcttaaaaaaaggtgctataccattttaagcataaggaaactgagacagagagataagtaacttctcttgcaggtcgcacagctggtgacacagctgagattttagcccagaagctctgactttagagcccaattatcatgctatactgactctgaaaactgttgagagaataaaggaatgagtaagcgagaattcttagtggataatgaagtcctaggttgaggaagcttgagaacctggcatggttcaaggagactcagtctcctgggaccctcttactagtgatggggatcaactataaggcatcayagaaaataagaaactaaatgtgttttgttgtatattctgtgtcaagctagggatctattttctccaagtcaaaggccaggcctgatggtgttagaactgtgctgtttagtggacaaagcatcaaggtttacatgggttctgcaaatctggaatttg

SEQ ID NO: 466580 - DNA, 524 bp, Homo sapiens
gaaaaaaaaaaatactatttcatttagagagtaaaaggttcaaaacagtatttccagctacattcaagcatcaatttactgagtccctgctgtgtaccacatactttagtaagcattaacaatataagacygaaaaaatcctggagctatttgttctgttgctcacaacttagtcatggagagagggattgaaaccagcactccactctgcaagaactgagagctaaccttaactgagcacctactatcttacaggtattatgctgtgttacattttaatgaagatcttaagagcgtaggctttttaaacagacaaagttgagttcaaattttagttttgtgcaacctatttcatctccctgggcctcggtttccatataaacctggaaaaacaatacctaacccacagaatggatgagagggttaaatcaatgaatgtatataaacactgtgatggttaattttttgcatcaacttggctgggccatagtacccagatagttggtcaaatgttattctggatt

SEQ ID NO: 466581 - DNA, 524 bp, Homo sapiens
gaaaaaaaaaaatactatttcatttagagagtaaaaggttcaaaacagtatttccagctacattcaagcatcaatttactgagtccctgctgtgtaccacatactttagtaagcattaacaatataagaccgaaaaaatcctggagctatttgttctgttgctcacaacttagtcatggagagagggattgaaaccagcactccactctgcaagaactgagagctaaccttaactgagcacctactatcttacaggtattatgctgtgttacattttaatgaagatcttaagagygtaggctttttaaacagacaaagttgagttcaaattttagttttgtgcaacctatttcatctccctgggcctcggtttccatataaacctggaaaaacaatacctaacccacagaatggatgagagggttaaatcaatgaatgtatataaacactgtgatggttaattttttgcatcaacttggctgggccatagtacccagatagttggtcaaatgttattctggatt

SEQ ID NO: 466582 - DNA, 599 bp, Homo sapiens
attgctctccatactgtgggtgggcctcatccaatcagttaaaagcctaaatagaaccaaaggatgacctcctccaagtaaaagggagtcctccagctgactgtatttgcatttcaacatgcaactccagctttttctgggtcaccagcctgctagcttatcttcttgaactcttgtrgcctgaaccacgagattcaagaggacaagaggaactccaccctcccagtcattctctatccttctaccgtgatttaatttcctttatgacacatatcaatacatacatattgctcactaattgttttagtggttgtctccatttgctgtatgagtgtctatggcaggctgaatgaagctgaatatatatggaattggctcacatgattttgaacctgccaggctccataatcatgcaagccaattccatacacattccattggttctctttctctgtggaatagtgattaatacaaacatactacataatgcttagccacatagtaagcacttaatgcattgtatatcaattaatacaacattttaagtattattatcttcattatacagaagagggaattaagattatagagataaaaca

SEQ ID NO: 466583 - DNA, 528 bp, Homo sapiens
ttgacctttcagcctccagaactgtgagaaataaatgtttgtggtttaagccatctactccatggtattttgttatgacagtccaggttgactaagacagacaccttagtcttytgcaccagaaattgagtgttttttcacatgtgggccttatggtaagagcttcactattctgaccttatttacttccaacccttggtcccaggcttatctgctgataccaagagcctctccactgtgcctgtcactgtgccatgaaccatgctttctgctgcatacacctttgtactcacactgaaagtgagccactgaaacttctactgagctagccctcatctccactcctgtgaccaatggcagaagcataaattccacactgtcagtggcatttgagattcctctgaatgcattttcatgtattattgagcactggctatttgtgcaggcattgtcgttggtcccagtgaggcagccatgaatgagaggaatgaggtccccgatttcatagaatctatgtcctagtgaaag

SEQ ID NO: 466584 - DNA, 542 bp, Homo sapiens
ggctgcatcctctctaaattcccatttgttgcatttgtttggaggcctcaggcggtcccagttaaccagctttctcagggtgacttttccccttgggtctcattcacaacaaagatgagtcttaggcagtgtctgatgttcacacagtttatgctggcagtgctctcacagcatgaacaacaggaacaggccagtggcacaggccagatacagtcaggggtccgaggacctccagactgagagattctccatacagaaacyaatttcagagtttgggagattcttccccatttcttattcctgtgttcaatccaagtcagttaccaggtatttctttcataaagggaatctaagctgttcttgtaaggggaagctttattttaaggttcatgatagttggatctgtgctgaggtggtcttgcctcctggaaatctccagtctaggctgcatgacactgctaagtgacacatagggtaggccctacaagatatttgcaagggccttatggctgtcattattcttatagtcacaatatgtctat

SEQ ID NO: 466585 - DNA, 549 bp, Homo sapiens
ttggaggcaacacatttctcatttgggtatgttactctggtccacttatcaagtgacccaaaaggctacgagttttgagtggggtccagaacagaagaatgctctgcaacaggtccaggctgctgtgcaagctkctctgccatttgggccatatgacccagcagatccaatggtgcttgtggtgtcagtggcagatacggatgctgtttggagcctttggcgggacccataggtgtatcacagcagaggccactaggattttggagcaaggccctgccatcttctgcagataactactctccttttaagagacagcccttggcctgttactgggctttggtggaaactgaacatttgactatgggccatcaagtcaccatgcaacctgaattgcctatcatgaactggctgctttctgacccatctagccgtaaggtggttcatgcctagcagcattccatcatcaaatggaagcggtatatacgtgatcgggcttgagcaggtcctgaaggcacaagttacatgaggcagtggctcaaatgcccatgg

SEQ ID NO: 466586 - DNA, 549 bp, Homo sapiens
ttggaggcaacacatttctcatttgggtatgttactctggtccacttatcaagtgacccaaaaggctacgagttttgagtggggtccagaacagaagaatgctctgcaacaggtccaggctgctgtgcaagcttctctgccatttgggccatatgacccagcagatccaatggtgcttgtggtgtcagtggcagatacggatgctgtttggagcctttggcgggacccataggtgtatcacagcagaggccactaggattttggagcaaggccctgccatcttctgcagataactactctccttttaagagamagcccttggcctgttactgggctttggtggaaactgaacatttgactatgggccatcaagtcaccatgcaacctgaattgcctatcatgaactggctgctttctgacccatctagccgtaaggtggttcatgcctagcagcattccatcatcaaatggaagcggtatatacgtgatcgggcttgagcaggtcctgaaggcacaagttacatgaggcagtggctcaaatgcccatgg

SEQ ID NO: 466587 - DNA, 512 bp, Homo sapiens
ctctgcctcccaggttcaagcaattatcctgcctcagcctcccgagtagctgggattacaggtgcccatcactgcacctggctaatttttctacttttagtagagacggggtttcaccatgttggccaggctggtgttgaactcctgacctcgtgatccacccgccttggcctcccaaagtgctcggattacaggtgtgagccaccatgcctggccatttaaaggaactttgtaagtaatcctttcctttgtagttaacttataaatatcctttgatttgcctgttttacactttgaagttgtttatatyatagttttcagaatacagaatagagttacacataaagaagagttagttctcaaatagttgtttcaatcattcatatgaaagatgctagaaatctgtgaatactagtgtaactcaagcatctcacttcatactgggaagctggcagccagctgtctcaaaaataaaaataaaaaaagtatttttctagcctagagggttgttt

SEQ ID NO: 466588 - DNA, 583 bp, Homo sapiens
aatagaattaaaaacagagccctataaaatgcagctggttctgacaggctaaatactggcatttttgatatatctattttcctcatttaaaaatatattttgcggctgggcactgtggctcacgtctgtaatcccagcaatttgggaggctgaggygggtggatcgcttgagctcaggagtttgagaccagcctgggcaacatggcgaaaccccgtctccacaaaaaatacaaaaatttgccaggcatggtggtgcatgcctatagtcccagctacccaggaggctgaggcaggaggatcgcttgagcccagaagacggagactgaagtgagccgagatcacgccactgcactctaccctgggcaacagagcgagaccctgtctccaagaaaaaaaataaaataaaaatgtactttgcattgagagaatttaaggaaattcaatgtaaaaaagtaattcagaatttactatgggaaaaggcatttttctcaggagtttccatccagcttggaattcatctcataatgtgaatgaagtgtgaaaatacctctgattccctgaggttgcagaacactgcacacac

SEQ ID NO: 466589 - DNA, 492 bp, Homo sapiens
cactgcagcctctgaactcctggactcaagcctcccgagtagctgggactacaggtgcacgccaccatgcctgactaagtttttttggttttgtagagacagtttcactgtgttgcccaggctggtcttgaactcttggcctcaagtaatcctcctgcctcagcctcccagtgttgggattacaggcatgagccaccacacccagcctatattcatctttttatttagtccttgtaatcttataaagcaaatattacttctattttagatattatcattttagtaaacagagaataagaaagactaacaagcttgccaaagtcccaagagtatatccagaatgcaaacctggacgtttgggagctttctgactcgtaagctagycctctcaaccataccatatgttcagtgctgtactgataaatgtaatatcagattaaaataaaatacagaggaaagggctgaaagggaaacttgagccctagaaatggt

SEQ ID NO: 466590 - DNA, 618 bp, Homo sapiens
actgataatacaaacagcttgtattatttaataatttctcatgttattttctgatatgtaaatctaaaagtaaacaaagaagtaaaaatatccttttaaagttttatgatgattttagtatgactacatgatccatacgatcaataatgcataatcaataatgcaggcatgtaactacaaacaagacaccaaggtaaattttaaaactctctatttcagatattagaatttatgaaatgcacataagtaatattggtttccaactcttcagtagatatcgatgtttttattattataagtaaataatgaaacaagttcagtgygcactggttagtagcttgtctaagtcctgtgagacagaacacccatgcacacaacaggttacatgaactgggcttactacttacagatagacagcaagggagaataaaagcctaggattcattgcaagctgatactcaaggatcaagaaagctgcccaaaggggatggagtctcaagtacgggtgccctacttgtactacagctgagggaccatggaaagcagtctactctggattttatgcaccagaggtgacattaattacaaggataaagcattgaagaacatcctgtttct

SEQ ID NO: 466591 - DNA, 618 bp, Homo sapiens
actgataatacaaacagcttgtattatttaataatttctcatgttattttctgatatgtaaatctaaaagtaaacaaagaagtaaaaatatccttttaaagttttatgatgattttagtatgactacatgatccatacgatcaataatgcataatcaataatgcaggcatgtaactacaaacaagacaccaaggtaaattttaaaactctctatttcagatattagaatttatgaaatgcacataagtaatattggtttccaactcttcagtagatatcgatgtttttattattataagtaaataatgaaacaagttcagtgcgcactggttagtagcttgtctaagtcctgtgagacagaacacccatgcacacaacaggttacatgaactgggcttactacttacagatagacagcaagggagaataaaagcctaggattcattgcaagctgatactcaaggatcaagaaagctgcccaaaggkgatggagtctcaagtacgggtgccctacttgtactacagctgagggaccatggaaagcagtctactctggattttatgcaccagaggtgacattaattacaaggataaagcattgaagaacatcctgtttct

SEQ ID NO: 466592 - DNA, 551 bp, Homo sapiens
tattacatgaacattttattcacactgtatacacaggatgtcaaacagtccccactgaaggaagaatcatygtgagagctttctataaattattcagatgtataatatgaagaatttaaaatacaatgcaatcattgggtagagaatatatgctacagaaaatttctaactcaactttaccttctcattttcgactgagggtaagtgaaaaatattaacttgaaagaccacgcaagaacactattcaatggctaataaaaatttttataggtgaaaataaaactgcacaaagttctagccatattgaaatcacaaaataaaattatctgaattgtctaaaaattcatctaatgaaaatttcactgagaaatttaataattttttttcatgtttcaggcaaacagaatgcaaaagaagtccatatctagagaaatcctggtggaatttttcaaacttctatgacaaaaaaaagtccgatgagtttctagattttaaaaagtactaaattactttttaaaaaatcaactttacaaacaacatgaaaacagaat

SEQ ID NO: 466593 - DNA, 551 bp, Homo sapiens
tattacatgaacattttattcacactgtatacacaggatgtcaaacagtccccactgaaggaagaatcattgtgagagctttctataaattattcagatgtataatatgaagaatttaaaatacaatgcaatcattgggtagagaatatatgctacagaaaatttctaactcaactttaccttctcattttcgactgagggtaagtgaaaaatattaacttgaaagaccacgcaagaacactattcaatggctaataaaaatttttataggtgaaaataaaactgcacaaagttctagccatattgaaatcacaaaataaaattatctgaattgtctaaaaattcatctaatgaaaatttcactgagaaatttaataattttttttcatgtttcaggcaaacagaatgcaaaagaagtccrtatctagagaaatcctggtggaatttttcaaacttctatgacaaaaaaaagtccgatgagtttctagattttaaaaagtactaaattactttttaaaaaatcaactttacaaacaacatgaaaacagaat

SEQ ID NO: 466594 - DNA, 479 bp, Homo sapiens
acttatcctgcccatgagaagccccagatatgagctgggaggtggctcctggacttacagcatgtggagaagttgccatcgatcccgtgactgactgcaggcaaactggtggagacatgggctgaagtaatgttgccactgggttggttgtgaatacccagaaccaaggagccccaggtaaggcacagtgcacttcttccatgagatagtggcagactgggagatgacagcttttgaataagggtagtatccacagcactgctatcaatggtaggaaaagatgatgatgttgcagaggtgctgctccctaaagtggaggtgtctggaggcrtcataatgggatggctcagaataacaggggtattagggacacaggcttttcctgcttcctgctggggaccccgaatgtgagtggagcagtggctcccagatttatagtgtggttagaagttgccattggtctcgtgactggctgtgca

SEQ ID NO: 466595 - DNA, 641 bp, Homo sapiens
ttgcacattcatgtatcagtgtgcacaccctctaatcaatcctagcttgtcatctccaaaaggaacagcaggatttttctgtgatgggagggaagtgggatgggaaggattcacattagaaccagatagtggtctctatctacttcttcaatatgcttgacatttgcaaggaaatgggaatgctttccattgttaaaaagcgtaacctgacaacatgactgcatgtctcagagaaacttgtcaaaaaataagatcatgggacactgggcgcatccactctgtcatattaatggaaattccccaaagcttcaacattcattttttttttcctttgtgcttccaacaagaaaatcatttgaaaaagaaggtaggaagacacatatgctctcacagctcccaccatttcattagaatggtttgtgctaatattcttttaaaccttccwcatcaaaggagaaagctatttttctttcgtatcagatctctcaacaatattcatttctgttgttgtctcattgccattatctacagtttataagttattcaccccactgtgtttgcagcggtggtcttttgcctaccctgctagaggctccaatcttccactttataatctataatctgtggtttccctgtgagct

SEQ ID NO: 466596 - DNA, 368 bp, Homo sapiens
accactatttccactatgtaatgcgtactaagagctaacactgtaccagkcactatgctaagctctttacatccatattccatttaagcctcataattctctataaagagaaaaatattaattgtcagcattttacaaatgaggatattgaagtttgaaaaattgagatatttaccgtgaccctaaaacttctaacataatatcagaatagatggaggtttggtagaggactatcatgagtttgtttttaaacattttcagttcctgtgtgttatacagttgataaattatagctggccatttggatacaggtttggtgcgccaaaaggaaagaatctaaggtacagatatggatatcaccagtgtct

SEQ ID NO: 466597 - DNA, 550 bp, Homo sapiens
gggtaggtacacaggtgtgatagtcatgcttgtaatggtaagaggtgaaacatttttatttgttttatttttacaataamagctgtctggggagtcagatcgttatagaaatgaaagatctggtgaatttcaggcaagtcagaaatttgtgtattactgtttccaatatagatcaaacagtttatagacacataaaagaaaaacaattagaaaaatgtttaattttctatattcagctagaaacatcttacagtttgatcaaaagtggtagcatgtgcaagtgataacttcctggtgataaatacaaggttttctaaacacatttactggttaacactaagattagattattttaagtgaccacccagatggttactgtaatcaaagctatactttctagttaagagaactattaattgggaaaacaaagtttaagtttaagaatagtacttccatcttaatgcattttatcaagattaatgcatcatctgtggcattgacattttaaataaagacagttaaatatgataagatgggaggtttaggggtt

SEQ ID NO: 466598 - DNA, 550 bp, Homo sapiens
gggtaggtacacaggtgtgatagtcatgcttgtaatggtaagaggtgaaacatttttatttgttttatttttacaataaaagctgtctggggagtcagatcgttatagaaatgaaagatctggtgaatttcaggcaagtcagaaatttgtgtattactgtttccaatatagatcaaacagtttatagacacataaaagaaaaacaattagaaaaatgtttaattttctatattcagctagaaacatcttacagtttgatcaaaagtggtagcatgtgcaagtgataacttcctggtgataaatwcaaggttttctaaacacatttactggttaacactaagattagattattttaagtgaccacccagatggttactgtaatcaaagctatactttctagttaagagaactattaattgggaaaacaaagtttaagtttaagaatagtacttccatcttaatgcattttatcaagattaatgcatcatctgtggcattgacattttaaataaagacagttaaatatgataagatgggaggtttaggggtt

SEQ ID NO: 466599 - DNA, 608 bp, Homo sapiens
tactcagcatgcaaactatagagacacatatattatctctgcacttctttttataatggagtcactaataatgcccttcagggataaactagaatatcaagctgctcagaaatttcaggtacagaattccagaaagctggtgttaagttatttacttctaacaaaaaatgttagcagagattttgagtgtccacggggtttgagccatgttatgattctcacagataaagcctcacaaagggttctaaccagcatgtacttcatcttcctctaacgaacagtcaatccctttgagttttgaaaycacaataaatatatcaaatgacttaatctcttacaatactgtagtctgatataaatagagaatctaaatgtataatttctccagcaggaatacacaatttatgcattttaaaaattttgtttctttgtccatttgaaatattttcctctttcattctctaatgaggctttattccatagttatttctgggtattaataaatattcaactggaagctgccctcaaaacagaaaatagatatataaactattgtgcaacatggatcagactcactgacaatgatgagaatttactggatagtagct

SEQ ID NO: 466600 - DNA, 479 bp, Homo sapiens
tttttgtccttaaattgcctcaaactagtcatcttagtagaatattaatgccaaggagtaggaactgcaaaatacaaggtataccataaagaatgggagtttgttatactccataaataggagtataacacttttcctcagaagagtttacttcagtacatcatggaatagaatagcaccaataggttgtattcagtctgcaaatatatctacagttattgaaactgactatttaaatgtatgtctcggaaatattatttgactaaagcttgctcccttatagagacagttcagcatgctcttgaaagcataaaggctgcctttgtttgacacagttcagtatyatctttttcaaaaagctgatgatgaaaacatagggaatgattcttaaattctgataaaatatacatttattcttcagaacatttgggagcagctgatttactgctgagaaaaaatattaacagcaaagtttgttt

SEQ ID NO: 466601 - DNA, 454 bp, Homo sapiens
aatgcctcaaaacatattgtctacaaataacaaatatttattatctcatagtttctatgggttgggaatctgggtatggctttgctgggttctggctcaaggcctcttacaagaatgcaagaaagctggggccagaactgtgttytcatctgatggttcaattggagaagacctacctccaaacttactcaagtcaagtggctattggcaggcattaaacacaagtcagcatgctatattttattttaacacagccatgctcattggtatacatattgactatagctgttttcatgctacaacagcagaattcactacctgtgtgtgttacctacattttcttaacttctgtattcttggtactctgatatcttgtaccttgctgacctgaaagggcagccccttccagggttagcttaattcctagaaatagtaaacaacttgcctgcaagca

SEQ ID NO: 466602 - DNA, 454 bp, Homo sapiens
aatgcctcaaaacatattgtctacaaataacaaatatttattatctcatagtttctatgggttgggaatctgggtatggctttgctgggttctggctcaaggcctcttacaagaatgcaagaaagctggggccagaactgtgttctcatmtgatggttcaattggagaagacctacctccaaacttactcaagtcaagtggctattggcaggcattaaacacaagtcagcatgctatattttattttaacacagccatgctcattggtatacatattgactatagctgttttcatgctacaacagcagaattcactacctgtgtgtgttacctacattttcttaacttctgtattcttggtactctgatatcttgtaccttgctgacctgaaagggcagccccttccagggttagcttaattcctagaaatagtaaacaacttgcctgcaagca

SEQ ID NO: 466603 - DNA, 558 bp, Homo sapiens
gcgaactgtttgttaaaaagagcctgtcayctccctctcctcgctcttgcttcctccctcaccacgtgactagctaagtccccttcactttttgccatgaggccctcaacacatgcagatgctggcaccgtgctttttatatggcctgcagaactgtgagccaaataaacctcttttttaataacttattcagcctcagtcattctttatagcaactcaaatggactaagatactttcaggtgtagatcaagcataaagtgcataactctttgatgacaccctcactaacctcatcaaaatattttccctcaaggatttaaaataaccttttttttttattttttttcagtttctactttatttctgtgggcctagcacttactctcttaccaagatattctaatgagatacagacgttcttaatgaactcggtgtgatatgattgaacaatttccattatttcctgagtaggcaacagagataggaaagaaagaaattaagatcgaattctccaacctcaatgtgcactggaatcatctggaagactgagccacact

SEQ ID NO: 466604 - DNA, 631 bp, Homo sapiens
tgtttgcatttctgataagttcacagatgatgaataatgatgttgctggtaccaaggctacactttgagaacttctggactagggagcagtatagaaagggaaatggggaagtggtaaaggcgaaaggttttaccagagcctaatgtaacttagtatagagagtattcatgttagatccataatgaccattttataagcatatcttatctkacaagtaagaaaaatgagacacatactcaaagtgttgtattgcattgctgaatactggtgagttgggacaagaatctcttttaagttttgtattttagtcatgaacagagtctttcaaattgaggctcctaggaaatatttgaagagcttggcaaaagtgtggattcctagatactattctggactcagaccttaaacaatctgctttttaataaatgcctttggtcactcagacacaagacatattaagacaacactctaagaaacagggcaagtaaaatcgggtgctaagctagcctcacatagcaggagcagagacctaactgaacacaagacaagctgtatcacctgataagctgaagttgagagggtaaagaggatgtatatttgctgccctacaagatggtaaaacagatattc

SEQ ID NO: 466605 - DNA, 500 bp, Homo sapiens
caatgtttccagtgttaattatttgtgctactacaacagtctgctagggtggccataacaaaatactattgacagggtggcttaaacaacagaaattcattttctcacagttctggacagtagaagtccaagatcaaggttctggcagggttgccagaaaagttrgtttataatgaggcctctcttcttggcttgctgatggccacctactcactatgtcctcacatggcctttcttctgtgtttgcacacctctggtgtctctttctcctattaggataccagtcctatcaaattaggagcctgcctttatgaactcacttaatgttaattacctacttaaaggtcctatctccaaatacagtcacattgtgagttaaagctttagcatataaattttggggagaaataattcagtctaaaacagtgaccctaggcaaataattaacctgaacctctgcttctctttgtgtaaaatggagatgttaagatgttaaagtt

SEQ ID NO: 466606 - DNA, 294 bp, Homo sapiens
aatttgtattatatatatttaaggtatacaatatgattacttgatatactataataatcatttaactatgtataggtatatcatactatacacatatatagttaatatatattatgtaatgtatattatgatacacatatacataattaaatgattattayggtaaattagcatatctatatatgtatatacaaagagggtttatagatatataaagatatatatataaaaagaggtaactaattgaaataatggatatgctaatttactgcaataatcatttaactattatag

SEQ ID NO: 466607 - DNA, 630 bp, Homo sapiens
ctaaattttattgatgtacaattggtatttggattccttaatagatttgttgactacatggatctttagaaatactaaatcaattaataatttcgtggtggtgcacagctttggaaatgcaggagaagctccacctgttttagtgacagataatccaggctgctgctacagattaaaaccatctggccaataagggagggacactttttcaacctcagtttttctggactgctaggtagactaataaggaagaaaagagagaaggttcaaataaacacaattagaaatgataaggaagatatcaccactgacccccccgccaagaaatacaaacagctatcagataatactataaatacctctatgcacataagctagaaaattatcagagaatattataaacacttctatacacataaactagaaaatctaaatgaataaattcctggacacatacatcctcccaagactaaaccaggaagaaattacatccctgaatagaccaataatgagttctgaaattgaagcagtaataaagagcctaccaactaaaaaaaagcctaggaccagacagattcacarctgattctaccagaggtacaaagaagagctggtaccattccaactgaa

SEQ ID NO: 466608 - DNA, 604 bp, Homo sapiens
atgtgatatttttgaagccagtgttctcatgtgtaaaatgttaaacatagtacttacctcatgggattgttgcagagattgaataagttgatgtatgtgaaatgcctaaaatagtgcctaaaacatagtcaccttcaataaatgtcattttattgttacactaacttaacatgctcataagggaatttgagagagaacactctatgagacagaaaattctgtaagacagctagaaagtcctaactgatagattcaacaaagtaaaacaaattgacagaaaccatataagttctggaggcagaacttagtctacaggtgttttattttatttaaatttctagaaaattatataaatgagtragcattactggaacagggttaaaaagcagcatagaacatacaagatttgaggaagttggtttctagtacataaaacagggaaccttccagctatatctggagaactgatcttccatgagtctctcttacaaaatttatggtattcccattgttggatctatttgagacactaaaaaatttgcactgatatttacatttgattttttaaaaatcttatctgactacttttaactttgattttgca

SEQ ID NO: 466609 - DNA, 609 bp, Homo sapiens
tttttgaagccagtgttctcatgtgtaaaatgttaaacatagtacttacctcatgggattgttgcagagattgaataagttgatgtatgtgaaatgcctaaaatagtgcctaaaacatagtcaccttcaataaatgtcattttattgttacactaacttaacatgctcataagggaatttgagagagaacactctatgagacagaaaattctgtaagacagctagaaagtcctaactgatagattcaacaaagtaaaacaaattgacagaaaccatataagttctggaggcagaacttagtctacaggtgttttattttatttaaatttctagaaaattatataaatgagtgagcattactggaacagggttaaaaagcagcatagaacatacaagatttgaggaagttggtttctagtacataaaacagggaaccttccagctatawctggagaactgatcttccatgagtctctcttacaaaatttatggtattcccattgttggatctatttgagacactaaaaaatttgcactgatatttacatttgattttttaaaaatcttatctgactacttttaactttgattttgcatcttgccactata

SEQ ID NO: 466610 - DNA, 527 bp, Homo sapiens
tatagtgggggacttcaatactccactgacagcacaagacaggtcatcaagatagaaagtcaacaaagaaacaatggatttaaactacaccttggaacaaatggacttagatatatacagaacatttcatccaacaaccrcagaatacacattctattcaacagcccatggaactttctccaagatagaccatgtgataggccataaaatgagcctcaataaatttaagaaaattgaaattatatcaagcactctctcagactacagtggaatagaactggaaatcaactccaaaaggaacctccaaaaccatgcaaatacaggaaaattaaataacctgttccttaatgagcattgggtcaaaactgaaatcaagatggaaattaaaaaattatttgaagtgaatgacaataatgatacaacctatcaaaatctctgggatacagcaaaggtgatgctaaaagaaagttcattgccttaaatgcctacatcaaacaggctgaaagagcacaaactgacactctaag

SEQ ID NO: 466611 - DNA, 527 bp, Homo sapiens
tatagtgggggacttcaatactccactgacagcacaagacaggtcatcaagatagaaagtcaacaaagaaacaatggatttaaactacaccttggaacaaatggacttagatatatacagaacatttcatccaacaaccgcagaatacacattctattcaacagcccatggaactttctccaagatagaccatgtgataggccataaaatgagcctcaataaatttaagaaaattgaaattatatcaagcactctctcagactacagtggaatagaactggaaatcaactccaaaaggaacctycaaaaccatgcaaatacaggaaaattaaataacctgttccttaatgagcattgggtcaaaactgaaatcaagatggaaattaaaaaattatttgaagtgaatgacaataatgatacaacctatcaaaatctctgggatacagcaaaggtgatgctaaaagaaagttcattgccttaaatgcctacatcaaacaggctgaaagagcacaaactgacactctaag

SEQ ID NO: 466612 - DNA, 610 bp, Homo sapiens
caatggagaaaagacagtctgttcagtgctgtggggaaaaactggatatccacatgcagaaaaataaaactttatctttatctcacaccatctacaaaatcaactcaaaatgagttacagacttaaatgtaagacctgaaactaaaggcacttaaggaaaatacaggggaaatcctccataacgttggtctaggcaaagatttcttggacacaactccaaaagcatatacaatcaaagcaaaaataaataaatggaattgcattaaactagaaagctgctgcatagccaagacaacacttagcagaatgaagagacaattcacaaaactggataaaatatttgcaaaccatgtatctaataagtgcctaatatccaaaatacatwaaaaaactcaaacacttttatatcaagaaaacaatgcaatcaaaaaatgggcaaaggatctaacagatacttctcaaaagaaaacacatgacagcaagtatgtgaaaaatgcttatcatcactaatcagcaggaaaatgcaaattaaaaccatagtcagtatcaccaccacacatctgttagaatggctattatgaaaaaggtaaaagataaatgttggtagagg

SEQ ID NO: 466613 - DNA, 552 bp, Homo sapiens
caagggggaatctgttcttggaactgtaggggctcagaccaccttagaggtcaaaaactccagccttctgtttgcaggccttggtctttcttcctgtatartgggtcaagtctcccccatcttctcccttgcccttgaggatctgaggaaagccagaactctcactctttctggccttggttcccaccatctcctgagccctgccaggtttccccagaagcagaagcctaccagggatgggttgtcaggtctccttcactgggcccagctgtggaatccaggtctcagaccaccctctttggcccagggtgggtcaaacctactgtctgagtctggaagaggaggaagcatcatgatgggagagtccaaagcagccccacatatctggaaggtttgggccaaggctgccctggaacacagctcccaagatgccaggatgctctcttctcccacatcctgggacagtctgggggaccatggcccattcctgcatcccatggagctgctgcagtgcatagaggaaaggggtgcagcggggctgtcctgggcccc

SEQ ID NO: 466614 - DNA, 552 bp, Homo sapiens
caagggggaatctgttcttggaactgtaggggctcagaccaccttagaggtcaaaaactccagccttctgtttgcaggccttggtctttcttcctgtatagtgggtcaagtctcccccatcttctcccttgcccttgaggatctgaggaaagccagaactctcactctttctggccttggttcccaccatctcctgagccctgccaggtttccccagaagcagaagcctaccagggatgggttgtcaggtctccttcactgggcccagctgtggaatccaggtctcagaccaccctctttggcccagggtgggtcaaacctactgtctgagtmtggaagaggaggaagcatcatgatgggagagtccaaagcagccccacatatctggaaggtttgggccaaggctgccctggaacacagctcccaagatgccaggatgctctcttctcccacatcctgggacagtctgggggaccatggcccattcctgcatcccatggagctgctgcagtgcatagaggaaaggggtgcagcggggctgtcctgggcccc

SEQ ID NO: 466615 - DNA, 552 bp, Homo sapiens
caagggggaatctgttcttggaactgtaggggctcagaccaccttagaggtcaaaaactccagccttctgtttgcaggccttggtctttcttcctgtatagtgggtcaagtctcccccatcttctcccttgcccttgaggatctgaggaaagccagaactctcactctttctggccttggttcccaccatctcctgagccctgccaggtttccccagaagcagaagcctaccagggatgggttgtcaggtctccttcactgggcccagctgtggaatccaggtctcagaccaccctctttggcccagggtgggtcaaacctactgtctgagtctggaagaggaggaagcatcatgatgggagagyccaaagcagccccacatatctggaaggtttgggccaaggctgccctggaacacagctcccaagatgccaggatgctctcttctcccacatcctgggacagtctgggggaccatggcccattcctgcatcccatggagctgctgcagtgcatagaggaaaggggtgcagcggggctgtcctgggcccc

SEQ ID NO: 466616 - DNA, 628 bp, Homo sapiens
gtcaaattcatagaggatgatgcgtcaggcactagtgggagaaggaaatgggagttcttttttaatggctgcagagtttcagtctgtgataaggaaacaattctggagaaggatgacagtgatggcaacccaacaatgcgaatgtactaatgccattcaattgtgcacttaaaaataggtaaaatggtgaatttcatgttttgcatattttactacgattaaaaacatgtataattatttagctacacctgaatgctccttaaaagttcatattcctgagccccagcccagacctgggtgggctcctgaaatgtcccttttaaaagaagtaatgccagatgattctcacgctctgtagtttgagaatcattggctggaacgaagagggctgactagtgacaagaaactggtctggaggagtatgcggacatggccagtcttctcacagcagggggctgtgtccagcagcctgcagggaccctgcaccactccacyctgtctgctggccttggaccctcgacgtggcagcctgccttatctgggataagctcgtcctcatcgcagaatcctgatccagctgcctcagcagcagctgctgcagggagggagggcggtggagagctaatcc

SEQ ID NO: 466617 - DNA, 628 bp, Homo sapiens
gtcaaattcatagaggatgatgcgtcaggcactagtgggagaaggaaatgggagttcttttttaatggctgcagagtttcagtctgtgataaggaaacaattctggagaaggatgacagtgatggcaacccaacaatgcgaatgtactaatgccattcaattgtgcacttaaaaataggtaaaatggtgaatttcatgttttgcatattttactacgattaaaaacatgtataattatttagctacacctgaatgctccttaaaagttcatattcctgagccccagcccagacctgggtgggctcctgaaatgtcccttttaaaagaagtaatgccagatgattctcacgctctgtagtttgagaatcattggctggaacgaagagggctgactagtgacaagaaactggtctggaggagtatgcggacatggccagtcttctcacagcagggggctgtgtccagcagcctgcagggaccctgcaccactccactctgtctgctggccttggaccctcgacgtggcagcctgccttatctgggataagctcgtcctcrtcgcagaatcctgatccagctgcctcagcagcagctgctgcagggagggagggcggtggagagctaatcc

SEQ ID NO: 466618 - DNA, 578 bp, Homo sapiens
tttcatgctcctggcaggacaggctgtgtctctgcactcagggagcagccaccttactgacccaggtgcagctcagccctgattgccccttctatactttcctgtttatacagagctcctcccttctccctccatggatgtatttacaatgtagagatgctgttaatactgtcggctgctgctacttgagaaagctcaccacacactttccatggggattgggaatggagttgagcagccccatttagtttcaccaagagtagtgggaccttgtgyacttgttttaaagtctcactccctgaaagggccagaactggattctgagtgacatctacccagtgcaatttctccattgaatagaaagaaatgtgcaaaacattctaattatgcttttacaacaagctttttaagaaaaattacattgcaaagacccaatcagtgcaaaacttgccctgaagttccttacagtttaaaatcaccatatcccctctgccccttcagcttccttctgcaatttagggtgctcgtgacgcagaagggttaggggctgcaggaggtccacgtgctttggctctgat

SEQ ID NO: 466619 - DNA, 550 bp, Homo sapiens
gaagctgccactggtgaggcctctcacccattcatctatgtattcctgtcacccagcagccccagcatagctggacttcttacaggacagctggaggtccctagagcaaatgtcccaagagaaacaggcacagctgtgtgggctcagctcrccaagcctcagaagtcacagagcatcacgaaggcccacccaggttcaaggcgagaccacatggaaatgcattcgtgttaaaactaccacagaacgctttctcccgtgtgatttgactctgaaatgcacccacccaaggattgagcctaattgaagatctgtcctcttttcaagggtaattctctccggccaggacatgacagcatcttcaaaaagaaacatagggagtgtatgcgtgcaagtggctgggttcaggtgctctgaggcttaccatcccacccatatctccctactccagcattcaatgcctgtatcccccagctcggcaagccactggatccaactttacttgtgattcttggccactatcaccctgtgggaagaagaagagattctatta

SEQ ID NO: 466620 - DNA, 550 bp, Homo sapiens
gaagctgccactggtgaggcctctcacccattcatctatgtattcctgtcacccagcagccccagcatagctggacttcttacaggacagctggaggtccctagagcaaatgtcccaagagaaacaggcacagctgtgtgggctcagctcaccaagcctcagaagtcacagagcatcacgaaggcccacccaggttcaaggcgagaccacatggaaatgcattcgtgttaaaactaccacagaacgytttctcccgtgtgatttgactctgaaatgcacccacccaaggattgagcctaattgaagatctgtcctcttttcaagggtaattctctccggccaggacatgacagcatcttcaaaaagaaacatagggagtgtatgcgtgcaagtggctgggttcaggtgctctgaggcttaccatcccacccatatctccctactccagcattcaatgcctgtatcccccagctcggcaagccactggatccaactttacttgtgattcttggccactatcaccctgtgggaagaagaagagattctatta

SEQ ID NO: 466621 - DNA, 381 bp, Homo sapiens
aagacggggtgactttgaaaagcagtggttgggaataagtggattcatcacatagttgatgtttgatgcaggggtaaccaagaacccacacagacagtgaacatcaacctatggctgtcgcaagaggctgctcacrggaaccaggtccaagatccccacaggcctcgcaaggggtggagaaaatggacacgctcccgagcatgctggtggacgtggaaattggtgcagactctttggaggacaacttaacactgccgctcagaaactgtcacatccccaacccgcaggtgacctcgaggagctcactcctcacctcgccgacgaagcaccgacttgacaagttctgatctcatgacgctgaccctctcagtgggaaagggc

SEQ ID NO: 466622 - DNA, 381 bp, Homo sapiens
aagacggggtgactttgaaaagcagtggttgggaataagtggattcatcacatagttgatgtttgatgcaggggtaaccaagaacccacacagacagtgaacatcaacctatggctgtcgcaagaggctgctcacgggaaccaggtccaagatccccacaggcctcgcaaggggtggagaaaatggacacgctcccgagcatgctggtggacgtggaaattggtgcagactctttggaggacaacttaacactgccgctcagaaactgtcacatccccaacccgcaggtgacctcgaggagctcwctcctcacctcgccgacgaagcaccgacttgacaagttctgatctcatgacgctgaccctctcagtgggaaagggc

SEQ ID NO: 466623 - DNA, 529 bp, Homo sapiens
cctgtaaggaatgtctggtgaggggggaggtgaaaggttacatttgcatttctgaagggctaggtaggaaatagggagccagggaagtgagaaaaaaagtgatagagggaaaaaaaaataaaccacctcttaaaaaaatgggggtactcccttacactcctctgagttggactttyttagattccacagatgagtaagatcatgtggcatgtatctttctatgcctggcttatttcattttgcgtaatgtcctccaggttcatctatattgtcccaaatgataatatttcattttcttaggctgaatagtattccattgtgtatatgatactatattttctttatccattaatgaaaaatgttctgtgattatgtcatattgtactgtgttgtgttgtactatcctacttgccatggaccttcatatctccctactttctgtttgcaataaaattaatctaggctctcaggaaggacctaagcgtgtgtgtgtattggctttgttttgcacaaccttccacatcttgtg

SEQ ID NO: 466624 - DNA, 492 bp, Homo sapiens
ttgttataaaatttatcagcatcagtttctcattatacacccatggtagacttccacactgcttctacaccaccagcaagggagcccaacagagttccttggtttcaaggttgtaatttgcaaagaatcatctgtctgtggcatgcctctggtcaggtagagaccagtactgatgtcctttaattacatatgttagaaaccacagctaattcaggacaagctaaaacatttgaaataaataccagattggcagagcactagatggtataccaaccagcgccacgttacataaaacaaccaaataaagacaaaayagaaaacaaagcaagatgtttaatgtcccccttttctcaaatactggattctgacatgactgttctgattccattcaaagaaaaagtcaattccatatgatgggaattccatatacattatcaatcaatgtcattaaaacttctggaaatcatttggacattgttcatatccattgat

SEQ ID NO: 466625 - DNA, 356 bp, Homo sapiens
ggccacacagcatcacttccactgcattacacccctaccccaccccaggcagtcaccaacatccaagaaaaggaaaataaactctccctactcctttaaaaaaattgtgtcacrgttcacataacaacattgaccatcttaaccatttaaaaatgtacacttcagtggtactaagcacattcaccttcaataaaactgaaaagaggtacagttttatttaaaataatagcctacagactatactatcacttaaaatatggtcatttgtgtgaaatttataaggttaataataaataataatataatattatgtattatataatatatattataataaataacattataataaatga

SEQ ID NO: 466626 - DNA, 356 bp, Homo sapiens
ggccacacagcatcacttccactgcattacacccctaccccaccccaggcagtcaccaacatccaagaaaaggaaaataaactctccctactcctttaaaaaaattgtgtcacagttcacataacaacattgaccatcttaaccatttaaaaatgtacacttcagtggtactaagcacattcaccttcaataaaactgaaaagaggtacagttttatttaaaataatagcctacagactatactatcayttaaaatatggtcatttgtgtgaaatttataaggttaataataaataataatataatattatgtattatataatatatattataataaataacattataataaatga

SEQ ID NO: 466627 - DNA, 514 bp, Homo sapiens
gggcctgttttatttatgtctttattctcagaatctagaataccacctggaaaaataggtgtccaataaatgaggaataaacaaataaatgaatgaaacgcattattctcttagaaaaggacaaagacaacagaaatttcaggaacgagagcaaaagatctgcagatagtcacaatccagagttcaccttctgggaggataacaaaagcaatgcatttgtttctgaaaaggaaggtttgtcttctagcggcacacagactcccacagagaaaaggatgtgatcttggcataccacttggcstgaatcgtgaataagattgacataaaaattatgatgcatccacactgcactaatgtatttttgttgttgtacacatattttatttataattatgataacaaatttatgtgtgtgtatgtcttccactagactgtcagtgcaagaggcagagatttcttttatatcttgtgcaaactctaattgctggtatgtaaaagagttgtagatagacac

SEQ ID NO: 466628 - DNA, 522 bp, Homo sapiens
ggtttgtcttctagcggcacacagactcccacagagaaaaggatgtgatcttggcataccacttggcctgaatcgtgaataagattgacataaaaattatgatgcatccacactgcactaatgtatttttgttgttgtacacatattttatttataattatgataacaaatttatgtgtgtgtatgtcttccactagactgtcagtgcaagaggcagagatttcttttatatcttgtgcaaactctaattgctggtatgtaaaagagttgtagatagacacacaaaatacttttgaaaaactaaacactcgcctacaactcaaccgcaaatatccaatacarcatcccaggtgtcccacttatttgcttcctggggctgccacaacaaagaaccacacaagggggcgctaaaacaacagaaatctcttatcccacagttctggaggctggaaccccatgagcaaggtgtcagcagggttggttctgctaaggactgtgaggaaaaatgggctcaggcctcac

SEQ ID NO: 466629 - DNA, 614 bp, Homo sapiens
gaaacagacatttaggtcaacggaatagaacaggtagccaataaatatatccccacaaatatactcaactgatgtttgacaaatgtgcaaaagcaattcaatggtggaaagataatcttttcaataaatgctcctggggcaaaaaaaaaaaaaaaaaamaaaaaaaaaaacctcaacatacacctcagaccttacacacaaaataactcaaaatggattgtagacttaaatataaaattgactacagctataaaactaaaaaaaataaaaagacaaaacagagtacaggagaaattcttcaggatctaatactaagcacaagttggcaccaacaatacaatctataaaagagaaaaaaaaattgaactttattaaaattaaaaacatttgctttgtgaaagactttgtttagagtatgaaaagacaagctgtaaactggataaacatatttgcaaaccacatgccaataaaggactaatatctgaactctgaaaattcaacagtaaaaaaacaaacaatctgattagaaaattagcagaagacatgaacatttactaaaaaacatgaacagatagatggaaaataagcaaatgaaaagataatcatcactaacc

SEQ ID NO: 466630 - DNA, 584 bp, Homo sapiens
gctaaacttccctgggataacacagttcatggcatggccctggagggagaagacacctggagaatgaaatttaagtggggaatgaaaatattattcccattatcaaccaacatttccagaagagcctacaggatccatttgatcctcagaataactttctcccttccctcatgaccaggcccagtgcagacatgtgtagtctggtcccagcagtcagtgctggataggataacagacattgtggagaacagatatgtgtggtgagcacttgacctaggcctgggcagaggaaggcagcatgaggcgaggatcaaggcataattagttaacatcttataaagctgayatcagcgtgtattatgaatcatgaagggttgcagatgtgagattttaccctatttacatagtaactagttagcctgccacagtttcctggatgatggcaaaagatatgagactcctgagtcagagacaaaagactttattccttacagtacagcaagaaacatgacattagaatccattccctttgccccccaaaaattccattgagaggatacagaggggacccggtggacactgca

SEQ ID NO: 466631 - DNA, 584 bp, Homo sapiens
gctaaacttccctgggataacacagttcatggcatggccctggagggagaagacacctggagaatgaaatttaagtggggaatgaaaatattattcccattatcaaccaacatttccagaagagcctacaggatccatttgatcctcagaataactttctcccttccctcatgaccaggcccagtgcagacatgtgtagtctggtcccagcagtcagtgctggataggataacagacattgtggagaacagatatgtgtggtgagcacttgacctaggcctgggcagaggaaggcagcatgaggcgaggatcaaggcataattagttaacatcttataaagctgacatcagcgtgtattatgaatcatgaagggttgcagatgtgagattttaccctatttacatagtaactagttagcctgycacagtttcctggatgatggcaaaagatatgagactcctgagtcagagacaaaagactttattccttacagtacagcaagaaacatgacattagaatccattccctttgccccccaaaaattccattgagaggatacagaggggacccggtggacactgca

SEQ ID NO: 466632 - DNA, 542 bp, Homo sapiens
aggccagagttccaaaatcaaggcatcgcaggtccacgttcctcagaaagctctaggaaaaatctatcccaagcctttatcttagcttctgatgttgctggcaatccctggcattccctggcattccctggcagtccctgtcagtccctggcttacagacgcattgctcagtgccctgtcatcatgtggcgttctcctggtgtctgagcctgggtttgtgtctctttccttctgcatgtaacgacactagtcatattgaatttcagtcatatcaaatttcatattgaatgtctgttccaacatgacatcatcctaacctgatcacattgcaaagaccttatttctaataaggtcacactcacaggtaccaggggttaggacatgaacagatctttttgggagacacaactcagctaacaacagagaccaattagaggacatttgcaattggccagctgagaaaatgaggtgctgaccagcagcacagacgtggcraaaaggaggtgatgaggaggaagaaccagccaagcccagcaagagga

SEQ ID NO: 466633 - DNA, 606 bp, Homo sapiens
ttaacatgcaatcaaaatatatctctataagttggaaacaggacagcagaattgctagtcacctctggacttgtggaatgaamtagttatgcatcctgagtctttgatttaccatatatcccagacttggcaatggagaggtgtgccacctgggactgtcagcaggttcagacagagaaagccctaagaaaagtctgctttcaggtcaaaatacagagaaaagggtggcccagcagagttagattggagagctccactctcactccataaccagtggcaactggtgtgcttgtgccacctgcatcggcaatgccagagaagaccagatggggagtttccttttcctttcctcaatcagcagcagcttcagatggacccacatcaccacctgctactcacagcagaagcacagacacagactggatggtgagccccatttctgtttgccacccagtagcagcagtttgctctttctgctggagatggtggcaggtgaagactgtgtggggagtgccatctttcacatacccacctgctagtggcataagcagagacagagcaaggagctctctcttctgtcccctatgcaatgacagcaggaggcct

SEQ ID NO: 466634 - DNA, 532 bp, Homo sapiens
catgccttgtgtacagaaaatgtgtatccttttctattgttcayaaagaaaacctcaaactcaaaagaaaaaagaaaaataacaaaaaccaccttctttaacatcaataaaggaaaactaaaaatgcaaaacaaaatttactaattgcaataataacacagaacaattctgaaattttaaaagctcttccctaaacaatacttcagtgagagaaaaactgaaagtccctcatggaatttccttaaaatcaatattccttttcataatctttggaatactattaaagctgtgctcatagaaaaatatatagccattaatattttcagtaaaaatatgaaccaataaaaacaaatgaactaggtattttacataataattcttttgattaaggtcactaaaaagaatattaaaaatagaatcacagtgacaacagaaaagcctcatacaattgaccatgacatgaaaggtatgtctttggtggcggaggagaatggaatagaatgaaacaaaatggagtgcaacaaaatattaa

SEQ ID NO: 466635 - DNA, 532 bp, Homo sapiens
catgccttgtgtacagaaaatgtgtatccttttctattgttcataaagaaaacctcaaactcaaaagaaaaaagaaaaataacaaaaaccaccttctttaacatcaataaaggaaaactaaaaatgcaaaacaaaatttactaattgcaataataacacagaacaattctgaaattttaaaagctcttccctaaacaatacttcagtgagagaaaaactgaaagtccctcatggaatttccttaaaatcaatattccttttcataatctttggaatactattaaagctgtgytcatagaaaaatatatagccattaatattttcagtaaaaatatgaaccaataaaaacaaatgaactaggtattttacataataattcttttgattaaggtcactaaaaagaatattaaaaatagaatcacagtgacaacagaaaagcctcatacaattgaccatgacatgaaaggtatgtctttggtggcggaggagaatggaatagaatgaaacaaaatggagtgcaacaaaatattaa

SEQ ID NO: 466636 - DNA, 600 bp, Homo sapiens
tggttgatatagacatcattttctaagttgccagggaaacagtctcatttgcttttaatttgttattcttttttctgatttatttacttttaattgccataaaattgtacatatttgttgtgtacaacataatatttaaaaatatgtatacattgtggaatggctgaattgaatgaattaacataagctttacttattatggtgataacaccactttcttaggaattttcaagaayacaatatattattaactatagtcacagtgttgcacaaccctgtgatcaacagatcaacagatctctagaacttattcttcctgtcgaaccgaaatcctccttccccaccccaggccctggaggccaccattctactgtctacttctttgagcttttactcatgtttaaaattgaaatacaattacatattcatattccataagtccatcctggccatcatcagtagcccaccaggacactgtgaactaaggcctgcagcgaagtggaagaaacagctcacttagaagaagctgagccatccacaggagcagaaagtacgggtaaagaggttgggttgaggcgattctgtgttttgacatgacaa

SEQ ID NO: 466637 - DNA, 585 bp, Homo sapiens
agagggggaaggaggagaagggggacacactttctctctttctctccaccctgggtcacacaaatgggaggaagaggaataagggacaccttgtctccctttctccttctagatgagtaacaaaccatctgcagttagtactccccttgagtgcattttgaatcactgsaacgcctttgaccctgagacttctggcttatattctattgcacaggggcatggccttgttcccatcttggggatgaacaaacctggctttctgagggaagtcttgatttctatactattcaacaactagatattttctgtaagtgggagggcaagtgctccaaggtttcctatgtacaggctttttttgctttttgggaaaactcgaatctttgtaagtattgtacagttgaccctgcccttttagcagccatgtcaagcaagcctacaaaggatgattacccaaagtcagagagacaaaccattggggaaccctaaaatgcaacttctgggttccctacctgacccacttcttaggggctcccaatagccaaatcattagctcctctggttgtgccactcaagaaattgccaact

SEQ ID NO: 466638 - DNA, 585 bp, Homo sapiens
agagggggaaggaggagaagggggacacactttctctctttctctccaccctgggtcacacaaatgggaggaagaggaataagggacaccttgtctccctttctccttctagatgagtaacaaaccatctgcagttagtactccccttgagtgcattttgaatcactggaacgcctttgaccctgagacttctggcttatattctattgcacaggggcatggccttgttcccatcttggggatgaacaaacctggctttctgagggaagtcttgatttctatactattcaacaactagatattttctgtaagtgggagggcaagtgctccaaggtttcctatgtacaggctttttttgctttttgggaaaactcgaatctttgtaagtattgtacagttgaccctgcccttttrgcagccatgtcaagcaagcctacaaaggatgattacccaaagtcagagagacaaaccattggggaaccctaaaatgcaacttctgggttccctacctgacccacttcttaggggctcccaatagccaaatcattagctcctctggttgtgccactcaagaaattgccaact

SEQ ID NO: 466639 - DNA, 541 bp, Homo sapiens
atggtcactctctcaaaaaatcttattgtgctgtacttgcctatttttggaccacagttgaccgctggaacctgaagctgaagaaagtgaaaatgcagatgagaggaaactgtatacaatactgtatatatagaactaagaacactcgctgtcaaatgtaggcctccagtaaatggacttgcacttattcatactatttgtatttattctaataactttgtattttaattagtctcaagttttatgtaaacataagtaactttgtgcataaatggatatccacacctccaaatgtatggaaaatcataccaataagcawaatgcttctggaaggtataggtgaagtcatataataaacacagaaaaaaaaattttgtttgcttttcaacttgctccagagtcattatgaatatatctttaatgtagcaagtgttataaaatgtgatagaagataaagctacataatctgctatcattgatatagtgcctcagtttgtatctgcatagagatcctgttgtgatcacttggcttaaaatcgtt

SEQ ID NO: 466640 - DNA, 581 bp, Homo sapiens
aacccacaattggtcttctcatatacggggaaaatatttatacttttataagcaatcagctatttttggaaagcatccatttggtttttttgaaaatctgaaagtgattagttcttactaaatrtaattattgccatcaaaaccctgaattcaaatagctctttcatttatagctttctgtcagaacattcagtgctttctttctttgagttaaccttcccccctttacaaatatcaaattaacaaaaatatctagtacctgaacaagtgactattcattttttagacaatatggaaaggacaggtctggatgtcatgcaaggaaaaatgcaggctacacttaagttcaggaaatgtgccatctccaagaaagatattggtgttgggaacatcacagtacatattacattcagagtaggcagtgtaaatgagtttaaggctaagatggatatacgcttggaatcaatacagttggatatgcttgccgaatagcaagatgcacctgctgaaaggcagcaggataattagattgatattgtctctttccaataataaattccacgtttcagagtaatatctca

SEQ ID NO: 466641 - DNA, 592 bp, Homo sapiens
actaggcttcttgttgctcattcatttacactcattgccctctgaagcctatgatctagtgctgaaactaaacagagtaatatttttttaattatggaaaatttcaaacatttgtaacagaagagagtataatataacgaacccccaagcatacctcacacagccagcttttaccactattaattaaaagcccatcttgtttcacttgtaattttatccttctcctctttggattattttgaaacaaatctcaatcattatatcaatttatccataaaattttcagtgtstgtttctcagcaaaggaccactttttgtaagaaaagaaatggccaatatcattatctcagctaaagcagaaaatcaattaattatatcaatgtccaattgatgttcaagtttcattaaatgtttttttactttttgaaatagttgttggtttgagtccagatccaagcaggtccttcaaaacgttgtatttgttttacgtgtctcttaaacttcttttagtctataaattttccttgcccccttttttatttcttgcagcttattgaagaaaacagtgatttttggttcatagagttcctga

SEQ ID NO: 466642 - DNA, 553 bp, Homo sapiens
gctgacaaaaagaagcaacaaggaagaactttgtattcaataaatggtgctgagctaactggctagtcataggcagaagaatgaaactggaccctttaccatatacaaaaagtaactcaagatgaaatatagatttaaatgtaaaacatcaaactataaaaaccttagaaggaaacataagaaataatcttctcaacatcagctttgacaaagaatttttgcctaagtccccaaaagcaattgyagcaaaaacacagtttaacaagtgagacctaaataaaaaggttctgcacagaaaaaaaaaaaagtccacagagtaaacagacagcctacagaatgggagaaaatatttgcaacctatgcatctaacaaaggtctaatatgaagattctgtaagaaactgaaagaaatcaacaagagaaaaacaaataacccaattaaaaaatgagcaaaggacatgaacagacatttttcaaaagaagacatacaagccgccaacaaacatatgaaacagttcgcagcatcactaatcatcagagaaatgcaaatcaaa

SEQ ID NO: 466643 - DNA, 553 bp, Homo sapiens
gctgacaaaaagaagcaacaaggaagaactttgtattcaataaatggtgctgagctaactggctagtcataggcagaagaatgaaactggaccctttaccatatacaaaaagtaactcaagatgaaatatagatttaaatgtaaaacatcaaactataaaaaccttagaaggaaacataagaaataatcttctcaacatcagctttgacaaagaatttttgcctaagtccccaaaagcaattgcagcaaaaacacagtttaacaagtgagacctaaataaaaaggttctgcacagaaaaaaaaaaaagtccacagagtaaacagacarcctacagaatgggagaaaatatttgcaacctatgcatctaacaaaggtctaatatgaagattctgtaagaaactgaaagaaatcaacaagagaaaaacaaataacccaattaaaaaatgagcaaaggacatgaacagacatttttcaaaagaagacatacaagccgccaacaaacatatgaaacagttcgcagcatcactaatcatcagagaaatgcaaatcaaa

SEQ ID NO: 466644 - DNA, 303 bp, Homo sapiens
gacccaggggcatgtgcgcaggtttgtcacaagggtgtatttcgtgttgctgtggtttgggtttctattgatcccgtcacctgtatagtgaacacagtaacctaataggaagtttctcagccctttgtccccctcccccmctccctgctttttgagttcccagtgtctattgttcccatcttgatgtccatctgcatccagggtttacctcccacgtttgtaagtgagaatatgcaatatttggttttctgtttgatattccataaagttgagctgaattcggatcagaagccagaagttctg

SEQ ID NO: 466645 - DNA, 516 bp, Homo sapiens
gctttccttccgatggcctttagttttgtttggggagatttttctctctgggataaaagaaaatctaatgagggaacttaaaaaaaattctctggaggtactgtaagggaaataaggtaatctgagcaccagaaatcctgctctaactcttyagctgtgtgacctttggcaagtttcttcgtctgtaaaatgggaccaatggggttgtagagaggattaaatgaggtaatatgtgtaacgtgcttagaacagtacctggctcatagtatttgccattgttatggctattgttgttaatctttctgatcctccctttcctcagctataaaatggagccagtgacaccaatctctcatggattaagtgtgaggatgaatcatgtcgttataactgatggagtggtggttataagggtgtatacatttgtcaaaaaccatcaaactgtgggttttattgtgtgtaatttatacctcaactttttaaaatataggtttatatcaccaggtaaagcagcca

SEQ ID NO: 466646 - DNA, 516 bp, Homo sapiens
gctttccttccgatggcctttagttttgtttggggagatttttctctctgggataaaagaaaatctaatgagggaacttaaaaaaaattctctggaggtactgtaagggaaataaggtaatctgagcaccagaaatcctgctctaactctttagctgtgtgacctttggcaagtttcttcgtctgtaaaatgggaccaatggggttgtagagaggattaaatgaggtaatatgtgtaacgtgcttagaacagtacctggctcatagtatttgccattgttatggctattgttgttaatctttctgatcctccctttcctcagctataaaatggagccagtgacaccaatctctcatggattaagtgtgaggatgaatcatgtcgttataactgatggagtggtggttataasggtgtatacatttgtcaaaaaccatcaaactgtgggttttattgtgtgtaatttatacctcaactttttaaaatataggtttatatcaccaggtaaagcagcca

SEQ ID NO: 466647 - DNA, 567 bp, Homo sapiens
tcacacctattactcaggaaattacaagggcttcaggagctctgtgccaggagrgggaacagaagaccaagtgtatatttcttattgtatcacatcacaagggtgaacctcaaattggatttgtctgatttttccttttgattagtattagaggccatgcgttctcggcaggaattctttagaaatggcgctgtgctcttctcattacatcgccgtgggacaaacaatgtcactgtgtcccactgctagtaatgttaaccttaattacctggaaaagttggtgtttgtcaggcttcttggccaggcatagtggctcacgcctgtaatcccaacactttgggaggccaaggcaggtggattgcttgagctcaggagttcaatagtgggcaacatagtgagacctcttctctacaaaaaaacataaaaattagctgggcatggtggcacgtgcccgtagtcccagctacctgggagactgaagtgggaggatggtttgagcctgggagattgaggctgcagtgagattgcacctttgcactccagtctgggttgacaaagcgaccctgt

SEQ ID NO: 466648 - DNA, 567 bp, Homo sapiens
tcacacctattactcaggaaattacaagggcttcaggagctctgtgccaggagggggaacagaagaccaagtgtatatttcttattgtatcacatcacaagggtgaacctcaaattggatttgtctgatttttccttttgattagtattagaggccatgcgttctcggcaggaattctttagaaatggcgctgtgctcttctcattacatcgccgtgggacaaacaatgtcactgtgtcccactgctagtaatgttaaccttaattacctggaaaagttggtgtttgtcaggcttcttggccaggcatagtggctcacgcctgtaatcccaacactttgggaggccaaggcaggtggattgcttgagctcaggagttcaatagtgggcaacatagtgagacctcttctctacaaaaaaacataaaaattagctgggcatggtggcacgtgccygtagtcccagctacctgggagactgaagtgggaggatggtttgagcctgggagattgaggctgcagtgagattgcacctttgcactccagtctgggttgacaaagcgaccctgt

SEQ ID NO: 466649 - DNA, 602 bp, Homo sapiens
  misc_feature (1)...(602): n = A,T,C or G
aggctgcctttcattttgttgactgttttctctgctgtacagaatttagtttgatgtacaatagtctttcttgattattttgcctccattgcctgtgctttkactgtaatattaaaaaatattgccaacactctntttctatgtttttggtagtgttttatggtttcagttcttacatttaagtctttaatcacttttgaattgttttgtgtgtgtagcgtaaaaaaaggcctattttattctttcaggtagatattcagttttttcccagaactactgaagagatatccttttccattatgtattctaggtgatcttgtcaaagattagctaactgtatttgcatgagtttatttctgggctacttattctactccatttgtctatatatgtattttgaggccaatgacatactttttttatcactttagctttgtaatatagtttgaaatcaaggcatgtgatgtctccagccttcctcttttctcaagattcctttgactgtttgaggtcttttctagttcaatatgagtttaattttgtttttcttctttgaaaaattatattggaattttgacaggaatgcattgaatttatagata

SEQ ID NO: 466650 - DNA, 505 bp, Homo sapiens
gttggtgttgtatcttgcaactttacaaaatgtgtttgttagttctaacagtttttgtatgtgtgtgtgtagaggtgtgtctttagggattcctatgtataagatcaactcatatgtaaatagcaataatttctctgtccattctcatttcaatgtcttctatttattatacttttgtccaattcttcttgctgggacttcaagtactatgatgacgagaaatgcagagtgtcttgtcttrttcctgatcttgtaggaaaagcttttagctttttatcattgagtatgatgttagctgtgggcttgtcatgcatggcctttattacattgaggtgcattacttaataagtctactttcttgagcatctttacatgtatcatcagaagatgttgaacctgtcagaattttttcttgcatctattgagatgacaatattatttgtatccttcattctgttaatgtgctgaatcacatgtattgatttgcatatattgaacaattctt

SEQ ID NO: 466651 - DNA, 587 bp, Homo sapiens
aggcatgagccaccacgcttggcctcttgactttttaataatcgccatttctgactggcgtgagatggtatctcattgtggttttgatttgyatttctctaatgatcagtgatgttgagctttttttcatgtgtttcttggccacataaatgtcttcttttgtgaagtgtctgttcatatcctgtgttacatagtgcctttcttaagaaatgcttcctttgtcctttttccttctcttgtgttttcattaaaatcctacacatctttcaaggcctagctcacatgctgtctctaacatgaaaccccagagcccttcaacatggagtaattcctacttcgtctaagctttcagggtactttgcctttattgtgaactttatgaccttcttttttatattgtaattgttagtgcacatctgcttctttcttctggattataagctccttgaggaaaaatggatgacacacagctatacactggctgtacaccattctgtcacctgtgttgcttgtcacactgctttgcacacagaaggcacttgatgataaatgataagtggcacaaccactctcttcataaagctccc

SEQ ID NO: 466652 - DNA, 636 bp, Homo sapiens
gaaaataaaatattataactccaacttgaaaagaaaatatggtgcatggtttattgctgtggattatggaggaagaaagaactgattttcggtcaaacacagaaaagcagtgacactctttaaactcaatacagtattcatatggcagacactcgactttagaaagccaaacctttagactcctgctatggtctataaaatacatgtaaaattgcttttgctacattgttrgtgctgcataattagtgtgcagttttaaaggcaaggaatatttaggaagaaaataaccttgaagcctggaagactctttcaagtcagagtctgtttgtcagaatctcacattgctttgaaagacctttaaagactgcggtcttgggaaattccactctgataaaatgaggtgaaagagaactaggaaagatttgcaatgtaggaaacaactttagctgtcctagtgatacgttctacaattatcaaaaatatgaagatggtcttaaataatgagattcccttatttctagaatcaccttgcattgggagtgccttccttccttcctgagctccctagcacctatgcctaagtctccattgcttgcatgtagtgagtcattaacaattcagacacaaaggtaccaa

SEQ ID NO: 466653 - DNA, 636 bp, Homo sapiens
gaaaataaaatattataactccaacttgaaaagaaaatatggtgcatggtttattgctgtggattatggaggaagaaagaactgattttcggtcaaacacagaaaagcagtgacactctttaaactcaatacagtattcatatggcagacactcgactttagaaagccaaacctttagactcctgctatggtctataaaatacatgtaaaattgcttttgctacattgttagtgctgcataattagtgtgcarttttaaaggcaaggaatatttaggaagaaaataaccttgaagcctggaagactctttcaagtcagagtctgtttgtcagaatctcacattgctttgaaagacctttaaagactgcggtcttgggaaattccactctgataaaatgaggtgaaagagaactaggaaagatttgcaatgtaggaaacaactttagctgtcctagtgatacgttctacaattatcaaaaatatgaagatggtcttaaataatgagattcccttatttctagaatcaccttgcattgggagtgccttccttccttcctgagctccctagcacctatgcctaagtctccattgcttgcatgtagtgagtcattaacaattcagacacaaaggtaccaa

SEQ ID NO: 466654 - DNA, 635 bp, Homo sapiens
aataataataaaagaacttttaatttatgttttacacattacctaatattgtcttcccattgataagatagacatagcttgtatttktatgtctattttgtggacaaggacactgaaacaagagaaattgaaaactaacatgtactagaatgcacatcttctccatcctgatccaatggtcagatctccccaaaagcacactaggttcaacccagccaaaacagctggcaactctgtaacaccccctaactattttaaccatcctcacaactaaggtggcttaaatatgtttgatcttggccaagtcacatgactattctggtccccaatttccttaatccttatggcacagcacatgcacatttaattggaagtgtataaggtcccttttaacttgaatgtctaatgggtggattagtagtacagcttagagaccaccaagtctaacaaaagcgaaccaactacaataggttcatttggttaccatacatagaaaatgcctaaattgcatacacttttagtctaataaaaacttaatatccaaattagacattttaaaagcatattttacagtcttggcatctccacttaacagttaattttgaggaattattcgttactgcagtgaacaaagc

SEQ ID NO: 466655 - DNA, 516 bp, Homo sapiens
cttcttaccatttgtggggttgtaattggtttttgaaattacctttttgtttagatttgtgcatttctttctactgaacttttagaaaacttaaaaaaagaaaacagcagctgttgtttttctattctgtacattatcttccttatttgccaatttgccagggacactaatatgaaaaaatcatcttgaaaagttkccagcatttttacttcattgtttagcctgttcttattgatcagaatgaggccagcaaccatttaagagattatgtatttttctaaagtaaagtcactatcttattagatatttttttacagagctagatgtctatttacgtagctgaaatcccttgttcctactcataggtaatttatcatgtcttaggaaggaatcatccatagcttccatttgacaaagtggttcatagtctagtcctaccattctcatttttatttctctctcttccagctttatcttaatattcctaccccttcagattcatagtggaattaccta

SEQ ID NO: 466656 - DNA, 571 bp, Homo sapiens
gtgttctgcaaaaccaaaaaacattggacaagcactttccctcctaatttttaagcccatgtgtgtttaaaggaaatgtaatccgtatgttttgggtacatttacatgcaactcatcaaaccatgctcctctgcatgagtagtcacttgatgtctaaaatgcatggggaagatcttagatttacaagatttttgttgttgttgttgttgttgttgttttaccacagaagggcaatagatgaggtgcttgatggaaggtggtgaactgggtcctgattctggcacagaaccaccagttcccagaagatttgcaaataattctctgtatcctcatctatcaatatttcccacctgcaaggtggcattaataattgttgcccttatcagatcctgtgggtagccagtgagaattaaagtgtgattatcaggtaattttgagatatttaaagagaaaaatacaagggyccccttacttgccgtagcaatttattttaatctagttttccagaatgctgaaggacaaaaatggcttctatctttagtaattcatccttgccccatcatgagacaca

SEQ ID NO: 466657 - DNA, 568 bp, Homo sapiens
acttcttttctatgtgacattacttccctcacatcctgctgatggttgatggctcctgccttttagaaaacacctgtatgctccgccactgtgtacacttcggcaaagagaaatggatagctaacgtaagaatcaaattctttgttgcatagtctaaatcaccagatcaaatccctcatgctgttttcttccccacatcatatttagtaattgagtcacttaaaacaaattttatggtaatttattatcattaaaagattgccatttttctctgataagtatctataggtggcttcagcacctgcagtgatatctcatatatttctcattcccaggaaacaaggagttgtagacaaataacattttttcagaaaattactaccttaagagctaaaacagtgtgaaaaaaaatgtaactgtttttctcctgggaaatagttccaaaatatatcagatgcttcctgctttagaaaagagagtttayagaacacccctttcttgatgacttagcctcagtcattatgactaggttattatatagtgaatctcttattgctgaagtttatag

SEQ ID NO: 466658 - DNA, 568 bp, Homo sapiens
acttcttttctatgtgacattacttccctcacatcctgctgatggttgatggctcctgccttttagaaaacacctgtatgctccgccactgtgtacacttcggcaaagagaaatggatagctaacgtaagaatcaaattctttgttgcatagtctaaatcaccagatcaaatccctcatgctgttttcttccccacatcatatttagtaattgagtcacttaaaacaaattttatggtaatttattatcattaaaagattgccatttttctctgataagtatctataggtggcttcagcacctgcagtgatatctcatatatttctcattcccaggaaacaaggagttgtagacaaataacattttttcagaaaattactaccttaagagctaaaacagtgtgaaaaaaaatgtaactgtttttctcctgggaaatagttccaaaatatatcagatgcttcctgctttagaaaagagagtttatagaacacccctttcttgatgacttagcctcagtcaytatgactaggttattatatagtgaatctcttattgctgaagtttatag

SEQ ID NO: 466659 - DNA, 539 bp, Homo sapiens
gttattttgtattactagaaggtactgtattatattaaatcatatctgcgcagccaaagggaatgttaaataagcatgcttgttgatttatccagggattagaggcttgttaaacaggcaaaagctgtcatcttgatcccaaaatgggcagaattgagtatgactcatctattttgcatgtcagcacatcatgaattcaccaatatgacatgacgacagagagatcaaagtagttacctatggattataattcctttgagagccattgcagctcctccaatttcgaacaatgcactttttccttaataagcaatctattctttaaaattgcttctatgccccrcttttcatgcctgttcagacccagccacggagcaatgtaggctgactactattaattagatgtcaggtttgtgtcagtgaatttatacacgtttccttatttagtcctcatagctctacgaggcaggcgcattttcaagaccggaaacacaagttgaaagaaattaataccacacaatgtcagtgaaaagatcaga

SEQ ID NO: 466660 - DNA, 605 bp, Homo sapiens
ccctgggtagctctgcaaggcagccatgttgcttcgggcacatggtggataatcagagaggtttagattacacagctggctttctcggcagcccacattgaaagtgttgggggccagatgaaaagttggaggagaacaggatggagataaaagatgagaagaagccgaaggggatggtgtcccagtgctggaggtggttggggaagtgcctgtgctgcctcctgaaaaataaaacgtgaatactattgagacagagtsttttaagatgagtctgcctaagtcacatgcaagccatacaggaggtgccttcaaatgtccaagatagggctgatttttacagaaccatttttcctcttaactcagcagacctatgctaagcgattccacctgtggacatatacacagtcatacagtctctcacacacacacacacacacactccagaaggatcaaaaacaacactaaactcttttgtttgttttctctgtaagagccttagtaagtcctttgtataaaaataacaataaaccttccaagattcacgttgccatttctcaccatcaaattcactttctaataagacctctgatgtcagcattaaaatc

SEQ ID NO: 466661 - DNA, 583 bp, Homo sapiens
gtgctagtgggacccagagatccaaaattatgggttatttaacttggccttcagcatgactagctcttttgtgacttggctgttcttggggatgtcacaccttgattctattgggctttactgaagaatatttttttaggtgcattttatgctttcaatggcactgtcctttctgtttagagaaaaaaataaagaagaatcagcagtaggggatatatatttatttcagctcactatctcagggaaaactttgctttgaaaagagtggcactacaagaacacagtcacaatgggacctgctatkgtaaacaaaacatcatttttctcttactgcattaagcagtagaccctgattagaactaggtgacattaagatggaagtgagaagatgggagagtaacccttagatttaaatgagcatctatttttggctttagcactcctaaatgcccaccacaaaaaaatcagtggtttaaagtctaagttctgtcatctgtccaagacagcacagatttcttatgcttggacaggatggagtgctgctgtgatgagaggagatcaagaaactggcctgaagacaaga

SEQ ID NO: 466662 - DNA, 594 bp, Homo sapiens
attatctcatccccaagtcaatgtttatttgctctttgcaaccaccacttccaacctcccaccaccacctccgacatcagccactgtcatagcaccattgtgtatctgccattrtggtcttttaatttctgtgatgtgaaaagtgggcctttctccaaaggccttacaagcatttgctttataccttgttagaatgttcccactgagcaccaataaataaacaaattcatgatgatgcactaaaggggaagaactaagaagccaatttctaaacatcaagtgtaatttaactatgacttctggagagagtgcctctggaggtggcagtttcaaagatgtaagtaggataaacatttgagcacagccaggaatgcccttcaaatgatcccaggagaccaccaactattccaagtttaaaatctacccaactcaccatgcaaacatagaaaaccatcccgtttagtaaatataacatggctgacaacaatgtaacaacctctccagtaatcaaaattcatccattcaatcaatcattcattcgttcagcaaataatattcattttctaggctgggcctggcaatgtacgaggtgtt

SEQ ID NO: 466663 - DNA, 585 bp, Homo sapiens
aataatcaaaaattggccacaagccacatggaaatgttcaacctaagtacctcttgcaccaaaggtccttcaaaagttcattctgataaactgggtggtcttcaagatttaccaatttcaggtgagcagctatcaacacaggccccatcctaaggctcttggcatttttcctgggtgaagcgatacattatctcatccccaagtcaatgtttatttgctctttgcaaccaccacttccaacctcccaccaccacctccgacatcagccactgtcatagcaccattgtgtatctgccattgtggtcttttaatttctrtgatgtgaaaagtgggcctttctccaaaggccttacaagcatttgctttataccttgttagaatgttcccactgagcaccaataaataaacaaattcatgatgatgcactaaaggggaagaactaagaagccaatttctaaacatcaagtgtaatttaactatgacttctggagagagtgcctctggaggtggcagtttcaaagatgtaagtaggataaacatttgagcacagccaggaatgcccttcaaatgatcccaggagaccac

SEQ ID NO: 466664 - DNA, 594 bp, Homo sapiens
attatctcatccccaagtcaatgtttatttgctctttgcaaccaccacttccaacctcccaccaccacctccgacatcagccactgtcatagcaccattgtgtatctgccattgtggtcttttaatttctgtgatgtgaaaagtgggcctttctccaaaggccttacaagcatttgctttataccttgttagaatgttcccactgagcaccaataaataaacaaattcatgatgaygcactaaaggggaagaactaagaagccaatttctaaacatcaagtgtaatttaactatgacttctggagagagtgcctctggaggtggcagtttcaaagatgtaagtaggataaacatttgagcacagccaggaatgcccttcaaatgatcccaggagaccaccaactattccaagtttaaaatctacccaactcaccatgcaaacatagaaaaccatcccgtttagtaaatataacatggctgacaacaatgtaacaacctctccagtaatcaaaattcatccattcaatcaatcattcattcgttcagcaaataatattcattttctaggctgggcctggcaatgtacgaggtgtt

SEQ ID NO: 466665 - DNA, 584 bp, Homo sapiens
atgtgtctcagtgaagcccctggcgcacaataggaatatacttmatataaattgtttccatcatttggaacagaaaatgaccatatgcgttaagtcttttctcagtcacttccctgtccctatgagagagacagaaagaagactttcaaatgaataaatgcaaacctcactaaagaaaatgtaaaatatagaataggaaaagatcacatgatgaagaaaatatttcagggcctagggcaaaactatcaaaactgaatggtgttaggagaaatggtggaaaggcagaaagagggaaaagcagaagaaacaacgaaaatgccatgtaaggaagcctgcttttgagtgggtctgcttgagtgatgctctcttggtccataatggctggcacaatatctgagaaagaaagtgataaggtctaaaagaagagagaaaagggtagatcactaagaaaagaggtatattgggtcttcagtaaggaaaatgggccagggagcaaactctcaccttgaacagagaagcagagatagcaactgaggctgaaaaagctgcccaaaggcattgttccatgagaggtggaaatgaca

SEQ ID NO: 466666 - DNA, 584 bp, Homo sapiens
atgtgtctcagtgaagcccctggcgcacaataggaatatacttcatataaattgtttccatcatttggaacagaaaatgaccatatgcgttaagtcttttctcagtcacttccctgtccctatgagagagacagaaagaagactttcaaatgaataaatgcaaacctcactaaagaaaatgtaaaatatagaatrggaaaagatcacatgatgaagaaaatatttcagggcctagggcaaaactatcaaaactgaatggtgttaggagaaatggtggaaaggcagaaagagggaaaagcagaagaaacaacgaaaatgccatgtaaggaagcctgcttttgagtgggtctgcttgagtgatgctctcttggtccataatggctggcacaatatctgagaaagaaagtgataaggtctaaaagaagagagaaaagggtagatcactaagaaaagaggtatattgggtcttcagtaaggaaaatgggccagggagcaaactctcaccttgaacagagaagcagagatagcaactgaggctgaaaaagctgcccaaaggcattgttccatgagaggtggaaatgaca

SEQ ID NO: 466667 - DNA, 578 bp, Homo sapiens
ggtagtggactgagctgcctgacctctcatgtggttttgttgttgctgttctgtttcttaaatgaacatctgatattcataccttgtcaagtatgggcctttattattctctaataggaaagcttaactcagaatgtcagctatgtttcaaagaccatcacaaaaaaggaagaaaamaaccagcttcagttctcaagcttgccagtataaaagcacaatatgcctcacagttctcatcgaaggatcagctgggtcagtccaaacatcaccatgtcatcttggttccttaccaaatgaggcagtggtgctaaaagaaaaaagtccaacatgccactgtgcactccgaaaagacactggcatctactgcccccaaaagagcaatgcagaagaactattttcatactgcaacaaatttaaagttttaagaaaagatagaatcattacacaattcagatgccatgtagctatctataaaaagaataggatattacagaaaacaaactacaaactatgactacatcttcaatgtcataaaatacctggcttgaaataaatttccttgacaggagaaaaaagat

SEQ ID NO: 466668 - DNA, 569 bp, Homo sapiens
gtgtgccctgtatgtttgctggctttctgcccttgggtcattgtaccaagggacacttgctggtgttcatcctgagcccatgagagagcaaatccttatgtgtgtgtcacttaggaacatcagccccacaagtctggtctttttttcctcactgtcttatggctcctcactataattttaaccttttagagaaataaggataccacctcaccctcttctgtcttctcagctacctctgtgttgagcccatggtaaatgcctagataagtcttggtgtgagtgaragggaaccaataatcttgtatgttgcatagtttggtgcagggaagcataaatggtgatgttgcaaatcccttaattcattaccagaggctttcctctgccccaagtaggatagaaggatacccagaggcagaaaagaacattgagtgaaatatacataactgtctgaatcactgcgttcttgggagagttagagcaaccgtcaaagccccccaagtatccatttttattggttttgatgttgatttgatgttgttagagattcaggtctcatcttcgcttctgag

SEQ ID NO: 466669 - DNA, 569 bp, Homo sapiens
gtgtgccctgtatgtttgctggctttctgcccttgggtcattgtaccaagggacacttgctggtgttcatcctgagcccatgagagagcaaatccttatgtgtgtgtcacttaggaacatcagccccacaagtctggtctttttttcctcactgtcttatggctcctcactataattttaaccttttagagaaataaggataccacctcaccctcttctgtcttctcagctacctctgtgttgagcccatggtaaatgcctagataagtcttggtgtgagtgagagggaaccaataatcttgtatgttgcatagtttggtgcagggaagcataaatggtgatgttgcaaatcccttaattcattaccagaggctttcctctgccccaagtargatagaaggatacccagaggcagaaaagaacattgagtgaaatatacataactgtctgaatcactgcgttcttgggagagttagagcaaccgtcaaagccccccaagtatccatttttattggttttgatgttgatttgatgttgttagagattcaggtctcatcttcgcttctgag

SEQ ID NO: 466670 - DNA, 569 bp, Homo sapiens
gtgtgccctgtatgtttgctggctttctgcccttgggtcattgtaccaagggacacttgctggtgttcatcctgagcccatgagagagcaaatccttatgtgtgtgtcacttaggaacatcagccccacaagtctggtctttttttcctcactgtcttatggctcctcactataattttaaccttttagagaaataaggataccacctcaccctcttctgtcttctcagctacctctgtgttgagcccatggtaaatgcctagataagtcttggtgtgagtgagagggaaccaataatcttgtatgttgcatagtttggtgcagggaagcataaatggtgatgttgcaaatcccttaattcattaccagaggctttcctctgccccaagtaggatagaaggatacccagaggcagaaaagaacattgagtgaaatatacataactgtctgaatcactgcgttcttgggagagttagagcaaccgtcaaagcccccsaagtatccatttttattggttttgatgttgatttgatgttgttagagattcaggtctcatcttcgcttctgag

SEQ ID NO: 466671 - DNA, 520 bp, Homo sapiens
acgggttttagttaaaaattagggacctttattttattttttgtctctactgggagccaaggcaacctgcttacccttttggatgctgaattttcctttctataaaatggggctatgatgtgccagtgagtgctgggagagtaaagtgagaaggtctattacaaataatgaatacatgcttaacacacrttaattatttatttctccaccaatcctgggagattggtgctctttttatccccatttgacagatggggaaattaaggtttgaagaggaaaagggacttggctaagattactcagctgataaaagcaaaacatccacggaatcttcagcggggcttttccctttcatttttgtgtagaagctacgtaggtagcactgaaagtcagagaggtagggcaagcaacaaagaatcatgttcttttttaaactgtgggaccaaggctttagaaagaatgggctgcttattctctatagagagaattgccagtattgaggccatattcttacaaggcc

SEQ ID NO: 466672 - DNA, 475 bp, Homo sapiens
tgggtgaatttgttgttttattgaagtttctgtcccatggaaagtgggatgtcctcaatttagccactgaattggaagaaaatggttttaggttttttctctgggctcagaaagtactggggcctccaggaaggggccccagggaaggggctgagggctgggggccttccctccctactgcrgatcctggcaggggagggtaggaaggacctggggagggagggctggatgaggccatcttgcatacctttggaagtgtcatcattgacggcgtggtggtggcctgtgacggtggctgtcaggccatcctggacaccggcacctccctgctggtggggcctggcggcaacatcctcaacatccagcaggccattggagccactgcgggccagtacaatgaggtgaggtcaggccccaccgccccacaaggttgccttgaagtgggggccccttcacacaaacgagatgatgcagg

SEQ ID NO: 466673 - DNA, 475 bp, Homo sapiens
tgggtgaatttgttgttttattgaagtttctgtcccatggaaagtgggatgtcctcaatttagccactgaattggaagaaaatggttttaggttttttctctgggctcagaaagtactggggcctccaggaaggggccccagggaaggggctgagggctgggggccttccctccctactgcagatcctggcaggggagggtaggaaggacctggggagggagggctggatgaggccatcttgcataccyttggaagtgtcatcattgacggcgtggtggtggcctgtgacggtggctgtcaggccatcctggacaccggcacctccctgctggtggggcctggcggcaacatcctcaacatccagcaggccattggagccactgcgggccagtacaatgaggtgaggtcaggccccaccgccccacaaggttgccttgaagtgggggccccttcacacaaacgagatgatgcagg

SEQ ID NO: 466674 - DNA, 568 bp, Homo sapiens
gatataatttacataccagaccattcacccatttaaaatatacatttcaaataatttttaggatactcacagagttgtgccaccatgcctactaactaattttgaacattcttatggctccaaaaagaacattaacagtcaccgyctattttcctacctgcagcccaccccagccctgggcaacagctaatctactttctgtctctacagagttacctattcaggacatttcccataaatagaattatacaagatgtggccttctgtgactggctctttcacccagcatgatgttttcaaggttcctccatgttatggtgtatatcaatacttcattctttttcatggctgcataatactccattgtgtggatatagtgtgttttattcattcacttgtcattcgatggagaaaacctgtttgtttaacaatggctcttattgttttcctttccagctcccaatcagaacaggtgtccccaaagatacccagacagagaatgtgcccccaggccaccttgtgcttccttcccccactggtagaatctgattttttgacaacccaggcg

SEQ ID NO: 466675 - DNA, 559 bp, Homo sapiens
cagctgccagcatttgctgagtgcctactgcacgctgcgtgctttctatgtgacatcactttcccaccacaccctttccagggaggtgctagcaaggctactgtaaagacgaagaaccctaagtgaagggagcataagtaacttgttctctgtcacgcagacactaagtggccaagccaggattgggagctggccctcctgtctgcccccagagcctgtgctcctgaccaggatggagagcctgcctcaggctggatgaggggcagcccccacacccagcctgctgacctccccactgaattcaggtctcctgacggacgctgctctcagtttccagctctaccctttccatggccctaaggctgacatcgccacctctgctttccactcagaaaggctggaggagctgggcactcgagggaccagaggggctacagtgagcagcagagccagcgagtctkgcctaagaccccatcttaccattccctggttggggaaactgaggttcttggagagtgaggcaacataatcccgaccacgtgagacagagaggtacaga

SEQ ID NO: 466676 - DNA, 464 bp, Homo sapiens
cactgttgtctttgcatgattacttatttcaaccattctctgactaaggaacagctgctgcctcacctgaatgtgtaggaggtgttggagttgctaggcaaccaaagttgacccatggggaaaggccatggaatgggttctggayactgcctgcttggtatagctctgtgaccttgaaaagccaggtccacagccctgacattagccacagatgtctgcaggtctgttctgggagaagcacagggctgagcccctccccatgccctgcctgcaggaagtgcctggtccagtcagagaagaggttacctgaaccataaagcctcatcctcagtctggctgccaacatgaagagctacagggctcaggaggggcagttgggatggctgaggtctgtgtcacgtgggcagggaaagcttcccaaaaaagatcagctcccatctatgggatgcctactgcatgccagg

SEQ ID NO: 466677 - DNA, 618 bp, Homo sapiens
caggtgggcaaagaaggcctgaaaaggccaggagcctgcgctgctcgggagagaaaaccagaagcccatttactcagagctgcccttctctcccctgctgattccttgtgccctaggtcacctcctgccccttctccttctctctgtccttcttccaagccaccacacccaccattgcccacaaagctgccacagccaaatgggctcttctttgctgaccccagcatgcccaggtctgtgatccagataatgcaggtcaacccrggccaccttcatctgcgacctgaggggcagaagtgggaaggtggccaggtccccaggccaatgcacactccttccaatactggaagatacttccatggctcaccagagcctggccctgagaaactgagggctgtcccttgttggtagaaggctctggatcagaagtcaggacaggcaggccagaggccctgacctcactgctggtctcccattctttccaccttggtccctggggaatggaggttcaggggtgaggggacacaggacatttcctatttctcaaaggaaactgtgagcagataaaagcaagtattttttatgtttgtcttccttgaataaatctttacattaaag

SEQ ID NO: 466678 - DNA, 618 bp, Homo sapiens
caggtgggcaaagaaggcctgaaaaggccaggagcctgcgctgctcgggagagaaaaccagaagcccatttactcagagctgcccttctctcccctgctgattccttgtgccctaggtcacctcctgccccttctccttctctctgtccttcttccaagccaccacacccaccattgcccacaaagctgccacagccaaatgggctcttctttgctgaccccagcatgcccaggtctgtgatccagataatgcaggtcaacccaggccaccttcatctgcgacctgaggggcagaagtgggaaggtggccaggtccccaggccaatgcacactccttccaatactggaagatacytccatggctcaccagagcctggccctgagaaactgagggctgtcccttgttggtagaaggctctggatcagaagtcaggacaggcaggccagaggccctgacctcactgctggtctcccattctttccaccttggtccctggggaatggaggttcaggggtgaggggacacaggacatttcctatttctcaaaggaaactgtgagcagataaaagcaagtattttttatgtttgtcttccttgaataaatctttacattaaag

SEQ ID NO: 466679 - DNA, 618 bp, Homo sapiens
caggtgggcaaagaaggcctgaaaaggccaggagcctgcgctgctcgggagagaaaaccagaagcccatttactcagagctgcccttctctcccctgctgattccttgtgccctaggtcacctcctgccccttctccttctctctgtccttcttccaagccaccacacccaccattgcccacaaagctgccacagccaaatgggctcttctttgctgaccccagcatgcccaggtctgtgatccagataatgcaggtcaacccaggccaccttcatctgcgacctgaggggcagaagtgggaaggtggccaggtccccaggccaatgcacactccttccaatactggaagatacttccatggctcaccagakcctggccctgagaaactgagggctgtcccttgttggtagaaggctctggatcagaagtcaggacaggcaggccagaggccctgacctcactgctggtctcccattctttccaccttggtccctggggaatggaggttcaggggtgaggggacacaggacatttcctatttctcaaaggaaactgtgagcagataaaagcaagtattttttatgtttgtcttccttgaataaatctttacattaaag

SEQ ID NO: 466680 - DNA, 310 bp, Homo sapiens
gtttgattaaagtcagtatcacctgaaacccaagactaatgtatgtcgacaaggactcccaggtggccccctcggccaggacaactctccctccctgcagccctttggaaacaaactcaacaggyaggaggcgccattaccacggggccaggagccgggcccttgctgagtgagaccgagacgccactctggaaagtctcagggcatcaatatttcatgccgctggagctgtctttgtttatatgcaaattgctcacgctgccagatgggcaaaggctggcagcgtcatccatctccaggctgttccctc

SEQ ID NO: 466681 - DNA, 562 bp, Homo sapiens
tgtctgtattcactgtcctccaatttttacctacttctgttttctcttcagcattctccaatcatygccaatctctgaaatcacttttctgatggatatttatggccaccactttactgaatctaacaattaattcttagaccatctacactggcctatgaatagtttgagtatacatcctatacttttcctgggacaatcatatctctgtctattgtcctgttttaattatttatagctgctgctttcattctgcaatgcatccagatttggataatatattataaggtcattttaactcttagtaccatatgacccaatcactccatgaaatactttttatacttgctcccctgttaccacatgccttgtttcttctcctggactttttgacttctgcttcttggtctttgctaattgttcttcacattactcactccatgtattcaaacaccctaggactcaggagttggaatacctgagtcctaggtttctgtataacctttccccctagatagtcatagtcaattttgtgactttatgtatgatgatgataactccc

SEQ ID NO: 466682 - DNA, 562 bp, Homo sapiens
tgtctgtattcactgtcctccaatttttacctacttctgttttctcttcagcattctccaatcattgccaatctctgaaatcacttttctgatggatatttatggccaccactttactgaatctaacaattaattcttagacyatctacactggcctatgaatagtttgagtatacatcctatacttttcctgggacaatcatatctctgtctattgtcctgttttaattatttatagctgctgctttcattctgcaatgcatccagatttggataatatattataaggtcattttaactcttagtaccatatgacccaatcactccatgaaatactttttatacttgctcccctgttaccacatgccttgtttcttctcctggactttttgacttctgcttcttggtctttgctaattgttcttcacattactcactccatgtattcaaacaccctaggactcaggagttggaatacctgagtcctaggtttctgtataacctttccccctagatagtcatagtcaattttgtgactttatgtatgatgatgataactccc

SEQ ID NO: 466683 - DNA, 570 bp, Homo sapiens
  misc_feature (1)...(570): n = A,T,C or G
gtgcatcatttaaaacatagctttggcttttagaatcatgctctattttaaaaactaaataataaaatcagcaaggatttgggagaaatgggataggaatagaaatacatgaatctaactgtatttcaaattaattatataaagaagttttaatttttggacgctgtgtttttactgtatatcctcagactgaagacaaaaaagtttttaaaatratgactttattagtcagcctgttttccacaatgttatgggtcagacattcctcaatgacttgtatatttcagagctgagcacataagtgaatgtattgtgaatgacagctaggttcctctctgtcagagaagaaagtccaagntgtagaaaaccagaagctgaaataaatgctttggtgtggaacgaaattgcaggtattagtgtgaatacttttttaaatatctagatatagatatgaatatatgcatgaatatatatttgagtttacatttatgaataaggaagcacacacaaatgaatattattggtacatatatatcttatctcatgtaatgcttttcagttcttctaaaa

SEQ ID NO: 466684 - DNA, 563 bp, Homo sapiens
atgtgaaaagcaggtgcaaaagtccttaaatacgagtgaagttggagacatgcagtttgaccattgaataaaataggttagtggcttgcaaaatataatattaaaaggctatctctcttctgatatatattttaacgtttattacatacttagatgttcaagaattatccagaaaaaaaaaattgagttcgtcatgtgaatgacccctgagatccttaagatcaaccctgagaggggagaggtgtactgtgtatgagtttagattgagaggtggtacatacactatcaatatagagatagaaatttggattacatactgaatttatatgtggactaggttgccatctcttaatggtgcaccatctgagatattatcaattgcgtggaaaagtcatttcgatcttggcaatgagccgttatgcctgtacattgctggtatttctactcctttcaatcgaaattaatgtttcagcagggcaaccaacccacctcttctttccctgctgtcatcaatatgatgarcttgcagagttctaagttagaacaaaaatctgattgctttt

SEQ ID NO: 466685 - DNA, 605 bp, Homo sapiens
ggacatcgttctgggcaaaaatttctctagcaatacaccacaagcacagtcaaccaaagcaaaaatagacaaatgggatcatatcaggttctgcacaacaaaggaaacaatcaacaaagtgaagagatggcccacagaatgggagaaaatattcgtaaactaaccatctgacaaaggattgataatcagatatggaaacagctcaaacaactacaggaaaaaaaaaaaaaactaacaattggatcaaaaaatgagcaaaggatttgaatagacatttctcaataaaagacatacaaaggtcaaactggcctatgaaaacatgccaaaaatcactgatcatcaaataaatgcaaatcaaaattacaatgagatattatctcaccccaattaaaatgacttacatttaaaagacaggaataacaaatgttggtgatgtggagaaaaggcaatcctttacgctgctggtggaaatgwaaattagtaccaccactatgaaaacagtttgaagtctcctctaaacactaaaaatatagctatcataagatccagcaatcccactgctgggcatatacccaaaagaaaggaaatgaatatgcagaagagac

SEQ ID NO: 466686 - DNA, 560 bp, Homo sapiens
atactaacttggaacaaatgccagaggaaaggcacttactctcttctatggcttatccatagaagccaagccctctgtgaactactccttaataatcaatatgattatccccaatatacaggtatcactacctattatttttactggaaattcactgtttcactagaatggtgagcaggattatttgattacttaaagggcatttagtcattcacaaaaaaatccattccaaaatgtaaaatgttctcatgtaagctaaatgtataacttgttgttagaccccttaatatctgtacagttcagagccaggcaaaattttctgatgtgccaggcaccctcatttccattaatgtattaaattctcacaaaagaatactttttcttttttcacagataaggaaacacyacctaaaagagagtgctgagggtctcaaagacagatgagagaactggtgtttcccctcagccttcctaactccatgcccacaaatatttcctgcccatgactggccttcccctgggtatgttacaagtttagttgctgtggggataatgaacta

SEQ ID NO: 466687 - DNA, 605 bp, Homo sapiens
tatacttttgctttgtaacgattgcataattgttcactgcatgtatcttctttgcttactgtctgtctcttgacaaactagarcttccaaaggtcagggactagatgtgttttttgcattagtatgtctgctgcacctagcactgagcacagagtaatgtgactatttcattaacatttcttgaagtaatactttaacaggcttcctactctatattctatagcacttacttctgagtgcctctttttatactagtggtatacaccttaaatcattagctgccatggcatgtttttctttatagacgttagtaacttgagagatgattctgtctttttcaccctttctgtgactatgttttgtatagaagagaaacaatcaataattattggttcaagtgctactccagagtcaagcttctaatatctaatagagtgagtttaaaaagcaaattcaaaaggaaggaaaaatttgcagataataaatttccaagggcttattgtgtttgcatagataacatctgttaggaaacaaaccatctgcgggtcccagcctcctaaatatgttagcttttgaaatgccaaaattgatatctattttacctt

SEQ ID NO: 466688 - DNA, 574 bp, Homo sapiens
ctctaactctgaacgaatctaggtccctataaagaagagtgctgagttttggtctctccttgaactgtctgcttgctgggtgttttcattgaggctttccgaggctagtgtcttttagtttctcgtgctaaatttactgtctcctacctttaagagctgctttaaggcttgtttggaccatctatgccaactccattgagaaatcagcagtttcttctcataaagtctttatgagtctcttgaaatcatctggtagtggagaatgtaaaaagacttgatgatttttccccccratggaatttaaaagccaaagcaccaaaattactcttaaatcagaatttacatcctaaattatttcagagatacatttcactgcctggtacaaaacctgggcgtaatttcagatttggggcaaagaagggtccacctcattaaaatttaccactgcaatctctattgttccctccagcgctcccatttatggggctgacatcacccagagatgagggcgaagtttttgtggcactgtttcaaaagctaaacacctctcagttagtcactaagttaatagcaa

SEQ ID NO: 466689 - DNA, 425 bp, Homo sapiens
gagtttatccagctataatcccatcctaagttgagaagcatctctatatagaaaacttggtaagggccaccagaacaataacctcagggtatttgcctcacattttcagaacwaaggtcatgcaccaaggataatttagtattagatatttagtaattagatactatgattagataaatatataacaatgcaattattattaataatctatctaattactaaatatctaatgataatacaagagtccaaggggaccactaacatgtacatttagaatgcagtttctaaagaatcgattccctgtgccatttctgaaatttgggcaagtgcaaactcttaaacaactttattaaaataaaaaatgcagcattgaaatttgggcaagtgcaaactcttatagctttaataaaataaaaaatttggca

SEQ ID NO: 466690 - DNA, 438 bp, Homo sapiens
gctgctggcaaatcaggcaggaagggcttctgtagcaaccctagtagctcctgtgaattcaccaggagcttcccgcatgctatttttcatcccataacaacctgcctaagcgggtattgatgcctacagttgatgggagaggaagctgaaactcggggatgtgaaactgactttgccaagatcacacgtctatgaagcagcagagctggaactcaaatttgagctggttttgcctctaaatcccatgcttkctttcccactcccctgaaattccacagagcctttccacagttacccactccacgaggaagctgtgaaggatgagaagtaagacagggctttagggcttattcattagatggtcactgggtgggaaatttctgcaggttagaaggcagaggctggcctggtggtgttaaagagggaatcaatgggagc

SEQ ID NO: 466691 - DNA, 586 bp, Homo sapiens
attcaagttttactgcaatgaattcacattaatgctaytaatagttttgcattgaagatctaattttaaatcattttttcccataggttctaaatctctgacaagtacatggcaaaaggacacttatcacacaaatctttctgatatggagacagggcagactctcgaggagagcctaaagctttagcagaaccactgctttgcatttgttctaattgcatggtgcaggcgtccttattcagagagtttgcagattaaaagctaatttgctttagaccagcctgatgcagagcctgtctcttgcttgggctttgttgttcaccagggtaaagtgtaattttctgactcttcccaactacttagtttgagacaataatccaccttgtctcctcttaattaaagcaaatagctaccgctcacaatagtagttcagaaggccctggtcttctcattccctctgtgcaaggagctaattgatttccaaatgataatggtgtttacattagaaagccaaaccccttgtatttagtccttagctgctcatcttaaaccttcccagtctcatgaatatcaaatggccaaaata

SEQ ID NO: 466692 - DNA, 481 bp, Homo sapiens
ttcttttttctgtactcctcaaaattttggcaccaaattgtatcagttctatttgaaagctttatgaatttgccttcgtttggtccatkgcccaagttgggctctggtcttatttcaccctgacttctccaaaagcctaacagattatctccctgacttggatatctcctgtctataatcaatccaaatttaactttttgaaatcacaactgattatgtcaagcactcgctccaaaaggttaggtcgtttttccattgtccatagtataagtttcaaaatccttagcatagcatacaaggtttttctggtacaccctaagctaattttacaacctcatcatccaccactttttttcactctatgttctaatcacattgaactttttctcataatcaaagccactctaccctttgtttacacatctccttcaaactaatcggctatgaacttcccttgattcattctattgcagtctttttt

SEQ ID NO: 466693 - DNA, 481 bp, Homo sapiens
ttcttttttctgtactcctcaaaattttggcaccaaattgtatcagttctatttgaaagctttatgaatttgccttcgtttggtccatggcccaagttgggctctkgtcttatttcaccctgacttctccaaaagcctaacagattatctccctgacttggatatctcctgtctataatcaatccaaatttaactttttgaaatcacaactgattatgtcaagcactcgctccaaaaggttaggtcgtttttccattgtccatagtataagtttcaaaatccttagcatagcatacaaggtttttctggtacaccctaagctaattttacaacctcatcatccaccactttttttcactctatgttctaatcacattgaactttttctcataatcaaagccactctaccctttgtttacacatctccttcaaactaatcggctatgaacttcccttgattcattctattgcagtctttttt

SEQ ID NO: 466694 - DNA, 566 bp, Homo sapiens
ttctaaatttaaataggttgatgattgcacatctctgtgaatatatgaaaagccactgaaatctacatgttaaatgagtgaattgcatagtatgtaaattatatctccagaaagctattaaaataaatttataaaagatataactgcctgcattgcattgttggccaaacttgtaaaaaagagagaaaaattcaagagatttctgttttttgttggattttccactctttcttaactcccataaaggcccttaggtcactgtcccatagaaatttaccttaagtctttaagttaatgaagaaggctgaagataattcctcagcatgaagattctattgaaattgtgggtgtttgaaaatttctctggctttggtgttcctttgcatatttatatatttacccctactatagttcactctcctcaatgtgtctggtctctttctgagtgtggttgaagaataatatcattgaatatgaaaataaataagcaagctawttaactgactaactgaaaaacccaaaacaccacgtagaattctaaaactctagcattggaaaaaaccttc

SEQ ID NO: 466695 - DNA, 532 bp, Homo sapiens
taccttgagatgatttcttattgttcatcaatgtccttttcatcctgattgaagtactctctttggcatttcttgtacaacaggtgtactgttgattaaatgtttcagcttttctttgttggggaaagtctttatttctcctgcatgcatgaagggtatttttttggaatatgctattctagggtaaaagatttttttcttcagcactttaaatatgtcatgccactttctcctggcctgtagggttatcattgaaaactctcctgctagatgtattggagctccattgtrtgtaatttgtttcttttctcttactgcttttagggttttttctttatccttgatatttgggagtttgattattaaatgccttgaagtaatcttctttaggttaaatgggcttggcattttagaaccttgttgtacttgaatattgatatctttgtctagatttgggacgttctcagttatatcctgttgaataatctttcttccactatctctttctctatctcctctttaaggccaataa

SEQ ID NO: 466696 - DNA, 459 bp, Homo sapiens
aactcttgttactaccctcccttaaagagtttagtggagtctgttttctgcctccactgtattaaatctttgatatttctccttagggaggcagagatttgtgtatcctcaaagtcacactgtgatcagtgttaggtaaggctctccggttcttttcctgaccatacccagttgttatgctccattaattgcctgttgattgctctgttatttataaaaatgtcccaggggcagagatttctctacraatactctaatcagaatgatttctgaggtcagtgtttgatatttgttctcaccccatgatggttgctcccagctatcttattccccagatgtttccttaaaactaggtgacctacagtgtaggctgtatcaacatcagatccacaaatctcctcccaattcccttctctacaacctccttgtttttaggtttaaacttctctatgtcgtaaa

SEQ ID NO: 466697 - DNA, 609 bp, Homo sapiens
gtccagtattctcagaatgccatgttcaaaatagagcctctgttctacaagtgtgagctggatagaagaaggcagccaccatctctttgcacactgcccaggactcagcatcagcaacaggcagctgaggcaggatgagaaaaagtgacatgctactcttcttggaaagtaagcactcaggctgggagctacagggaaagrgacctctgcatccttggctgcagtagtctggagtggaatctccctttgctaaatttagagggcagagggagagagcagtcttggttcaaatagcacgactttttttgaaattttccacagattttcttgaatacatttttcttcattatctgtttgcccttatgaccatttccagatgctttaaataatttttgttacttttatatatattttcaccattttaattggagagaggttcagtggaactactcatgctgttgtaccccaattacattgaaataaagtttaaaattctataaaaacacacttatgattaatacatgtatttgttaatgcattaaataagatacaaggacaagtctaataaatgctataatttcaaaattctgatgaatataaattatattc

SEQ ID NO: 466698 - DNA, 589 bp, Homo sapiens
tgatgtgttttaaaaactgaacaaaattcagggcaactggagtatatagaactggaggagagtggtgttaagtgaggctggaaaggtgggcaagactcagagcctgaaggggaaggcataaagaagacattcttcttaatggtgtaaaatgcaagcacaacaattgttatgtattattttgggcaataataaactagatactgttttgagttttttttttttttcagctattagctgttttagttcttattcctactctatgagatagatgatatcattactcccattctataaataagaaaactagagcatgaagaggttaggtaacttgcccaagataatactgcagcagaactaggactcagtttcaaggtgtctggcttcaraatttgtgctctagagcaatccacaatactgccttatgccaatataatgtgtctccttggaacaaaaaaaaaaaatcaagcttttctttataattgtttgtggtaataatttagagacaaagaaactgttcagtataaaaccactggaccccagaatactccatggatggccagaggcccaggaaaattcaccaaaaggagaa

SEQ ID NO: 466699 - DNA, 589 bp, Homo sapiens
tgatgtgttttaaaaactgaacaaaattcagggcaactggagtatatagaactggaggagagtggtgttaagtgaggctggaaaggtgggcaagactcagagcctgaaggggaaggcataaagaagacattcttcttaatggtgtaaaatgcaagcacaacaattgttatgtattattttgggcaataataaactagatactgttttgagttttttttttttttcagctattagctgttttagttcttattcctactctatgagatagatgatatcattactcccattctataaataagaaaactagagcatgaagaggttaggtaacttgcccaagataatactgcagcagaactaggactcagtttcaaggtgtctggcttcagaatttgtgctctagagcaatccacaatactgccttatgccaatataatgtgtctccttggracaaaaaaaaaaaatcaagcttttctttataattgtttgtggtaataatttagagacaaagaaactgttcagtataaaaccactggaccccagaatactccatggatggccagaggcccaggaaaattcaccaaaaggagaa

SEQ ID NO: 466700 - DNA, 599 bp, Homo sapiens
aaatgtctgtctgcccctagtgcgaggtttctcccagtcaggatcaggatacacaggaatcagggacccacttgaggaagcagtctgattcttagcagagctcgaatgctatgctggaagatctgctgctctcttcagagccgttaggcagggaagtttaagtctgctgaagctgctcccacagctgycccttcccctgggtgctctctcctagagttatgggatttttatctataagcccctgactggggctgctgcctttccctcagagatgccctctccagagaggaggaatctagagagacagtctggccagagtggccttgcagagctgcagtgggctccacccagttcaaatttcctggtggcttttttacactgtgaggctaaaatcgcctactcaagcctcagcaattgcagacgccccacccccaccaagctcgagcatcccaggtccatctcagactgctgtgctggtagtgagaatttaaagccagtggatcttagttttctggtctccattggggtgggatccaccgagccagaccacttggctccctggcttcagccctcttaccaggggcattaatagttctgtc

SEQ ID NO: 466701 - DNA, 560 bp, Homo sapiens
tgcatactatatgtacaatccattttatgttgccataaaagaatatgctctgtgtaaattataaggaaaaaatttatttcttagagttctggaggttaggaagttcaaggtcaaggggcacacatctggtgatggccttattgctatgtcatctcatggcagaatgtagaagggtaagygagtgagaatgagcaagataaggaaagagagaaggagataagctcatcctttaatcatgaatcttcttctgagataacaaaaccactcctaagataacaacgttaatacactcatgagggcagagccctcatgttctaatcaccttttaacagtcccacttcttaacgctgtcacaatggcaattaaattttcaacatgggtttttgaaaaggccttcaaaccatagcactgtgtgattcaatttatataaaactctagaaaactacaactaatatgtagtgactgaaagaagatcaatggctgtctgtgggggaggagcaagaatgagtaattacaaaggggcaagaagaacatctggggatgaatgatagatatgttta

SEQ ID NO: 466702 - DNA, 446 bp, Homo sapiens
ctgtgctggtagtgagaatttaaagccagtggatcttagttttctggtctccattggggtgggatccaccgagccagaccacttggctccctggcttcagccctcttaccaggggcattaatagttctgtctcgctggagttccaggcaccactggggtatggaaaataaaacttttccagctagcttggtgtcttcccaaacagctgcccagttttctgcttgaaatccagrgccctggtggcataggcactggagggaatttcctggtctgtgggttgcgaagaccatgggaacagtgtagtatctgggccggagtgcaccattcctcatgacacagtccctcatggcttcccttgtgtaggggagagaattccctgaccccttgtgctttctgggtgaggtgacatcccaccctgcttcggctcaccctctgtgggctgcacc

SEQ ID NO: 466703 - DNA, 611 bp, Homo sapiens
ttcttagggggactgtctccataagctctttataaaacataagttatttcatcattctgccacccaaccttcaccataaatttaatatttctttttgcttcaattttgacagaattcgagttgctttggtggaggtttttttcaaactgatattttattcttcttaatatctcaagctagatcctgttcagacattttayaacaagttagagtttactttggtgcaaatgagttttgaaatccatgcataattatttcattatacgcattttcaataaacttttgaagacccctcatatatggcctttatcatattgagatacattccttctacacctaattttgagagttattctaatgaaagaaatgttgacttttgttgaatgctttctttgcatctattgagatggtcatatcatttttatccttcattccattaatgtggtatatcacattcattaatttgcacttattaaactattcttccatcccagggatgaatcacacttgatcatggtgaattatccttttaatgtcttgttgaattagggtttctagcattttattgagaatttttgcctatgttcagcagaaatattattctgtagttt

SEQ ID NO: 466704 - DNA, 681 bp, Homo sapiens
tataatatattgtttctaactataataaccctacttgctattgaatattagaattgatttcttctatctaactgcatgtttgtacccattaaccaaccgctcttcattcccccttcccaccctcacagctttcccatcttctggtatctatatttctaccctcaattttcttagctcttacatataagtgacaatatgtggtatttttcattctgyatctgcctcatttcacttaacataatgacctctaattccatctatgttactgcaaatgacaggatttcattctttttatgacctattagtattctattgtgtatatataccacatatcttgtacccatttgtccactgatggacatttaggttgattccacatctttggtattatgaatagtgctgtgataaatatgtgagtgcagttatacccttgatacactgatttccttttctttggatatgtgccccatagtggaattactagatcatgcagcagttaaatttttagtttattgaaaatctctatactattttccatagtggttgtattatactaatttacattcccaccaacagtgtataaaagttcccttttctccacatcctctccaatgtcttttatttttgtctttttaataacaaccattctacttgtggtaagataacatctcactgtggttt

SEQ ID NO: 466705 - DNA, 551 bp, Homo sapiens
tttaccagcacatccctgggcagaataaactgccattgtgtcagatacagctccttcatatggttaggtgaggtgagaaccttttggcccttggcaaacattgagagcttttaactagccgaagagttcactgaattaggactggacagttttggttccatttttcacttcagggttgttggctgtggcagtgctaacaacatatctgcaaagggcactagattacccagcctttccacacctaagaggtctcaccccatcaaagaagaatttgaggcccaagatgctagacgttgctctaaagagcaaatccaaaacaagctaaaattggaagaaactgaattcaatcaaaggagcagaactagcctgctttcaagtttttgatcatcatttcagggagtgagatttcttccattatcaaagaaagaaggggattgtacacaaagccaggaaccaatttgagctttaatgactaaacagagaggaktgggttaaagccaacttatagaaccagtgaaagggatggaagttgaaacaatacaggcatagaa

SEQ ID NO: 466706 - DNA, 591 bp, Homo sapiens
aaacccccaaagaagcaatgaggctggagaacttatataccattttgacaatgaacaataaatttatagagaagtgagaagacaaaggaaaaaggggkttaggcttttaagggtggcaaactgtgggaaggtaaatatatgggtaaacagatgaagatagaagttgttttgtaaattttgtatgtaaatgtctttaggtgctgtctctgggctgatgagagtctagagtcatcttcctctgcccttcctggtacaaaagagggaagagtgatgctttcacaaaggagaatttatagaacataagtttatatatttacatatatgttcatagaatatatttgctttttaggcaaataagtgtttactgttttctcagttgtcttcagttcaatataatccttatgtcaaagcagcatattttgggggagcattttctgatcccctacaatagtcttcaagttttatctcatttaatttcctgagtccagtaggatattagtatccacctttggcggactaaatgacttgcccaaagccaacagctagttaggtgtaggaccaggatttgaacccaggctctctggctgcaga

SEQ ID NO: 466707 - DNA, 591 bp, Homo sapiens
aaacccccaaagaagcaatgaggctggagaacttatataccattttgacaatgaacaataaatttatagagaagtgagaagacaaaggaaaaaggggtttaggcttttaagggtggcaaactgtgggaaggtaaatatatgggtaaacagatgaagatagaagttgttttgtaaattttgtatgtaaatgtctttaggtgctgtctctgggctgatgagagtctagagtcatcttcctctgcccttcctggtacaaaagagggaagagtgatgctttcacaaaggagaatttatagaacataartttatatatttacatatatgttcatagaatatatttgctttttaggcaaataagtgtttactgttttctcagttgtcttcagttcaatataatccttatgtcaaagcagcatattttgggggagcattttctgatcccctacaatagtcttcaagttttatctcatttaatttcctgagtccagtaggatattagtatccacctttggcggactaaatgacttgcccaaagccaacagctagttaggtgtaggaccaggatttgaacccaggctctctggctgcaga

SEQ ID NO: 466708 - DNA, 634 bp, Homo sapiens
gcattttgggagactgaggagggagaatcacttgagctcaggagtttcagaccagccttggcaacatggcgaaactccatcaccaccaaaaatgccaaaaaattagcctggcatggtggagcatgcctgtggtcccagctactgggaaggttgaggtgggaggatggtttgagttcaggaggctgaggttgcagtgagccaagatcacaccactgcattccctctctactgcactctgactttgggcaacaaagccagaccctttctaaaaaagagagaaaaaaaaaaagaaagagaaagcactgtttacaatttggggattcaccaagtggaagctatattcactggagggcacaggttgacagtgtctctaatggctggctggcattaatagtatgccagyaatccagtcaatgttagggttcccaagtgggcagagcagcttctataacagcctgagcttgctacagagccttctcttgctctgtttcccacttgaaacaggcaggcaggcaggcaggctatggggaattttctagttggatggaaatagctggcacaaatgtgctatatgttgccttcaaaatccaaaagccctaataagcattgtgcatttttcattgcagatggcaca

SEQ ID NO: 466709 - DNA, 519 bp, Homo sapiens
ttaaccaactccatctttcttctaacctccaagctgcccttgttcattcctgggcatagggtaaactaactttgggaggaagttagtttataatttatagtttaaaacaaagactaataacagtcctttccccaaacatgcccttcttgcctggggactagactgcctttgtagtgatgcaggatttttctgctccttagctcggctagacccaggttcttgtctcatgactaggaaaaattgggcacatggacacttggagtgcatggagttgaatttattaagcaaaaaggaaagctctcagcaaaaagaggggtcctgaaagcaggttgcctgttgctccattctctgtttgatacrgtgctttttttttttttttttttttttttttttaaggctgatgaggctgggttccttatttgtaagagactccaccccatcctcagactaaggggccattagtctgctgggggcatgtttgggcaaccctcctgtgcagattcctttatctgcacaaaa

SEQ ID NO: 466710 - DNA, 493 bp, Homo sapiens
gtgtgtagtgtagctcacggttgctttaattttcatttccttaatggcatatgaagtagagcatcttatcttgattatttgccatctgtatatcatcttttgtcttactttcattttatttcctccagagttgagttagttcatccctttkgcactaaaaacatctccattttaacccttttcctgcttgccccaagaatacgcaccagtgacacttgcggctgcagtgtttaccccaagataacttggccacaaaatatctcgcttttattattatgtttgcaccactctagtatattgactttagaaacaaaatgcatcattctctttatggcattctgtttttagtagtgctatttccatttataaaatgtagtaattctcaatcgctgaaaatgtcaaatcttagaaaatgtaggattcctgtgtgtgatgttaacattgttctcgaacaattttgggttgtagattcatttgataaatccaatttttc

SEQ ID NO: 466711 - DNA, 613 bp, Homo sapiens
gggcaccattttgtattccccccagcaatgaatatgagttactgttgctctatatccttaatagaatttggtgttgtcagttttctggattttgaccattgtaataggtgtgtagtgtagctcacggttgctttaattttcatttccttaatggcatatgaagtagagcatcttatcttgattatttgccatctgtatatcatcttttgtcttactttcattttatttcctccagagttgagttagttcatccctttggcactaaaaacatctccattttaacccttttcctgcttgccccaagaatacgcaccagtgacacttgcggctgcagtgtttaccccaagataacttggccacaaaatatctcgcttttattattatgtttgcaccactctagtatattgactttagaaacaaaatgcatcattctctttatggcattctgtttttagtagtgctatttccatttataaaatgtagtaattctcaatcgctgaaaatgtcaaatcttagaaaatgtaggattcctgtgtgtgatgttaacattgttctcgaacaattttkggttgtagattcatttgataaatccaatttttctgaaatagacgat

SEQ ID NO: 466712 - DNA, 474 bp, Homo sapiens
ctattgttttcctgttttcagtttcattgatttctgcatttgtctttattgcttctttcattctggttgttttgagttaattttgctctttttttctctagattcttgaggtaagaatgtagtctatttatttgaggcctgcccctgcttttctaatgcattcagtaggtacagcktatactctcagcactgctttagctgcttcccatatacatgttctattttctatttttattttcattcagttctatatatatatcttaccaaatattcttgacccttattctttcacctatgtattgtataatactttggtgtgtagtttataagtatttggaaagttttcttttgtctttctgttaatgatttctagttttattccattatagaaaaagaatatactccacatgacttcagttattttatatcttgagggattatttagtgaccctggatatgatctatttggtgaat

SEQ ID NO: 466713 - DNA, 539 bp, Homo sapiens
acacgagtgtttatatttgagggcgaaatgaagtggttagaatacattataattacgaaggagaaatgtgcaagtaaattagatctcctagactctaggacatgaagttgagatcatatgagtatttctagggggaggaaagaatcatatctactgttcagggaacttaaaaagggctgcttttgtttaaatttggtactccaaatcatctgaagctggtgtctaggcagaccaggttctctagataactcagcaagtactctctcttttcctgctgtgaagaacttttgaaaggcatttaatatgggtctgtatatcctgagtcagaataacaagttgatgtgagagagattctgctagcccttgcttcctggggcccttaatcaattcagtycctatctagagttcaagcagtttcaatcacttcccaaaagtcctgaccacaggacttagcttccatcttggcctgcccagaagatccgtgcaagccctaaggcccaccaggttgagtgctgacccagggtgaagtacaacttcct

SEQ ID NO: 466714 - DNA, 571 bp, Homo sapiens
cgtgggccgcctgcaaagctggagagctgagcaggtggaccccggggcggtggccacgttgctcttgcaaacgagccactttttgtctgcgctgcttttcacctgtgccgcttctcacttgtgtgttcccctccctccccccaccatgcaggctgagttcccgggagcttttgctggctttgagtttgtgagcttccctgctgccaagcctttctttctatctactgctcacttggccccacagctccaktctctaatgccttttcttaactctttatgtacctgattggctcattgattttgcattaccaggcaggctaagagctccccttctaatgccgcttgcttaagacagggttgcatagctgtaatgtatctctcgcctttttttctatttattggaggaggaggcacaggcaagacctccatttcctctttgttattttggccctgtgatattggggctgagggacaaggaggcggtaaagtaggtgactattcctcctccttcctctttttaggctcttctgtgtataatgggaccaaagccatccttactagaccccatagt

SEQ ID NO: 466715 - DNA, 460 bp, Homo sapiens
cagagccaggactagttctagcaagatgatgagttttctgccttcctaaatcttgcagtgccatgtggaagctgaagtaaatacattcacatcatttgaaatacatgccttagatctctgtacaaaggtagcaagaaatttcrggaagagtccctcctcctgtcaacctacacatagcttctcatcagccccttttcatcctcactttccaattgccacaaaccaccctctctccccaccccttgctagcattttttcaccctctgacctacctcataagatagcatctccttacattgcaataacataaaacagcctgacttcttaagagttcttataaagataaaaatgagataagatacgcaaggtgcctagcttagggcctgccacatagaaagccctcaataaacctccttattattcactgttatcccccaacatacaattaacccaaacacca

SEQ ID NO: 466716 - DNA, 460 bp, Homo sapiens
cagagccaggactagttctagcaagatgatgagttttctgccttcctaaatcttgcagtgccatgtggaagctgaagtaaatacattcacatcatttgaaatacatgccttagatctctgtacaaaggtagcaagaaatttcgggaagagtccctcctcctgtcaacctacacatagcttctcatcagccccttttcatcctcactttccaattgccacaaaccaccctctctccccaccccttgctagcattttttcaccctctgacctacctcataagatagcatctccttacattgcaataacataaaacagcctgacttcttaagagttcttataaagataaaaatgagataagatacgcaaggtgcctagcttagkgcctgccacatagaaagccctcaataaacctccttattattcactgttatcccccaacatacaattaacccaaacacca

SEQ ID NO: 466717 - DNA, 537 bp, Homo sapiens
tgggaggcagaggttgcggtgagccgagatcttgccactgcactccagcctggagactctgccaaaaaaaaaaaaaagaataagaaaattyttggctgggcctgttagctagagagtggacagagtgtcctctaatacagagaacagagatctgtctgccttgaggcaatagaagcaattccagtagcactaagcacccagatcttggtttctaaatactattcctcactaaaaagaaaaagaagaaaaaaaaaaggctccttgaagaaatgcttaatttccccccacaaaaaaagaaatgtttaattccagaactagggcagaaaaattataagtggaatctggaatagcttcatgttccaggaagtaagggggtgctcgaagaatgatgaggacacggcagaagggcacaggagctgtcctgaagggactctccctggcaaaatctggggcaatttgagcatcaaaataaataataatagtaatgcatttaatccattgagtaatataggaacctatctgcccttatttatgtaa

SEQ ID NO: 466718 - DNA, 537 bp, Homo sapiens
tgggaggcagaggttgcggtgagccgagatcttgccactgcactccagcctggagactctgccaaaaaaaaaaaaaagaataagaaaattcttggctgggcctgttagctagagagtggacagagtgtcctctaatacagagaacagagatctgtctgccttgaggcaatagaagcaattccagtagcactaagcacccagatcttggtttctaaatactattccycactaaaaagaaaaagaagaaaaaaaaaaggctccttgaagaaatgcttaatttccccccacaaaaaaagaaatgtttaattccagaactagggcagaaaaattataagtggaatctggaatagcttcatgttccaggaagtaagggggtgctcgaagaatgatgaggacacggcagaagggcacaggagctgtcctgaagggactctccctggcaaaatctggggcaatttgagcatcaaaataaataataatagtaatgcatttaatccattgagtaatataggaacctatctgcccttatttatgtaa

SEQ ID NO: 466719 - DNA, 500 bp, Homo sapiens
tgtgttgcccagggtggtcttggactcctgggcttaagccatctgcccacctcagcctcccaaagtgttaggattacagatgtgagccactacacccagcctgaactcttgttcagagatggtgaggtatagagagaagagcatggatgagctttggaactaggtaagatagatttgaatcctagctctgcctgtgttgttttgggccggtaaactctgtgaaccttagttttctcatctgtaaaatggcatttactggcaccttatttttcagggttggtatgagaattagagataaatctcagagcatagtgcccagaacataatagatgcagaatacgtagttgttattactgcatatggtccctgggccagtgcacaatggaacaactcagtgctggatgcaatcagctggcaggtaaattgtgacaacatcattgctgaaaggtgcayggttgcgcaaggtcatgaattgacattattccatcagggctggtgag

SEQ ID NO: 466720 - DNA, 483 bp, Homo sapiens
cctgatcctactggcttgaaacccttctatttccagaaaaataagtctaaaagagatcaggtaacttgtacaaagtcacaagggcacaaaatcagttaatgacagagctgcaattgcaatactacaaaacttcagcaattctctccattctaccattctgccccctgactgaagtagaaacccatcagagaggtgtatggtaaggtgagtgcaaggctagaaggcatattcttattaaataagaacctgcacaggacacaaactagtcactgttttgaaactatggtacttcctcagagaacacacagaaatctgatttcctgtttgcccttttcatacaaagatgaacagaattgtcaccaatgctggatacgtaaaccttaagtgacacacacragacagtccatcagggcagaactaaatactagaatttctttatattaattttaacgtaatcagtctaccactacatttgtatatgtt

SEQ ID NO: 466721 - DNA, 483 bp, Homo sapiens
cctgatcctactggcttgaaacccttctatttccagaaaaataagtctaaaagagatcaggtaacttgtacaaagtcacaagggcacaaaatcagttaatgacagagctgcaattgcaatactacaaaacttcagcaattctctccattctaccattctgccccctgactgaagtagaaacccatcagagaggtgtatggtaaggtgagtgcaaggctagaaggcatattcttattaaataagaacctgcacaggacacaaactagtcactgttttgaaactatggtacttcctcagagaacacacagaaatctgatttcctgtttgcccttttcatacaaagatgaacagaattgtcaccaatgctggatacgtaaaccttaagtgacacacacaagacagtccatcagggcagaactaaatactagaatttctttatattaattttaacgtaatcagtctaycactacatttgtatatgtt

SEQ ID NO: 466722 - DNA, 585 bp, Homo sapiens
cagtagaacgtcttccgaaattggagtcaatctctcaaacactgccatkgttttatcaaatacatttatgtgacatcctaagtccttggtggtcatttcaacaatgttcacagcatcttcaccaggagtagatttcatctcaagaaaccactttctttgctcatctataaaaaccaactcctcatctgttgactttttttttttttttagacggggtcctactctgtcacccaggctggagtgtagtggcctgaactcagctcactgcaacctctgcctcccacgctcaagtgattcttatgcctcagcctctcaagtagctgggattacaggtatgagccaccacaccagataatttttgtatttttagtagagatagggtttcgccatgttggccaggctggtctcaaactcctggtctcaagtgatctgcctgccttgactcccaaagtgctgagattacaggcatgaaccactgtgcctggtcccagctaatttttttgtatttttgtagagatgagatttcaccatgttgcccaggctggtctcaaacttcagtttttttgccaaaaactcctcaagtga

SEQ ID NO: 466723 - DNA, 539 bp, Homo sapiens
aatgatcaatttaggcctgatctaaagcaatattttaatactttaaaatacattcttgtatatattctatagagttttctcaacatagtaagcggtaacattctacaatgttttcagtatgtaatcatttgctcttgggtttggcttttttgttggccccttggggcatgtttgaatctgactgtagtattggactggtgacaatgagaggtgtgtgtgtttgtgygtgtgcacttccatgcatatgtgcctgactgtacccacatgtgtgctagggatggaacgtaatgaaaattagcttcatctttataggtaactctccaaggcaaggaagctatttaaaaaatatatcccccatatgactatccactttgggtttgcagattgatatgtaaactgcagagataaaaaataatgaccattcagaaaatgttgccaaatggttgagggctgatttcccaagggattcattaccataaaatcacttttccagactaagggagatttccctggatcaaaggggttagatttgactgggt

SEQ ID NO: 466724 - DNA, 351 bp, Homo sapiens
actgacaccacagaaatacaagaatctgctatgaacgactrtgcctgctatgaacatctgcatgccaacaaattagaaaatctagaggaaatggataaatacctggacacatataacctacgaagattgaacctggaaacattagaaaaccagaacagatcaatcacagggagattcaatcagtaataatgtctatcaacaaagaaaagcccagaactggatggcattctactgaattctagaaagtttacaaagaagaactaacacaaattcttctcaaactattccaaaaattttaaaaataggaaatactttttaactcattctacaagccagcattattctgatatc

SEQ ID NO: 466725 - DNA, 351 bp, Homo sapiens
actgacaccacagaaatacaagaatctgctatgaacgactatgcctgctatgaacatctgcatgccaacaaattagaaaatctagaggaaatggataaatacctggacacatataacctacgaagattgaacctggaaamattagaaaaccagaacagatcaatcacagggagattcaatcagtaataatgtctatcaacaaagaaaagcccagaactggatggcattctactgaattctagaaagtttacaaagaagaactaacacaaattcttctcaaactattccaaaaattttaaaaataggaaatactttttaactcattctacaagccagcattattctgatatc

SEQ ID NO: 466726 - DNA, 351 bp, Homo sapiens
actgacaccacagaaatacaagaatctgctatgaacgactatgcctgctatgaacatctgcatgccaacaaattagaaaatctagaggaaatggataaatacctggacacatataacctacgaagattgaacctggaaacattagaaaaccagaacagatcaatcacagggagattcaatcartaataatgtctatcaacaaagaaaagcccagaactggatggcattctactgaattctagaaagtttacaaagaagaactaacacaaattcttctcaaactattccaaaaattttaaaaataggaaatactttttaactcattctacaagccagcattattctgatatc

SEQ ID NO: 466727 - DNA, 627 bp, Homo sapiens
caaaaacccaactttgatatcagaaagtgtgttagtctgttttcatgctgatgataaagacatacctgagactgggcaatttacaaaacaaagaggtttaatgaaattacagttccacatggctggagaggcctcacaataatggtggaaggtgaaaggcacatctcacatggcagtagatagaagagatcttgtgcagggatattccccttttataagccatcagatctcatgagaattattctcatgagaaagagaacagcatgagaaagacctgcccacgtgattcaattatctctcaccagggccctcccmcaacacttggaaattcaagatgagatttgggtggggacacagcaaaaccatatcaggaagttactcatcattctttttcctaaagtaggcatttattatgattgcttgctatacatcctgctctgcaatctctcatgcagaaaaagtgctcccagtcttcagtgcactgttattgctggataagcctggccaatgggaggcatttgtggaagagaaaaacctccagttctctgttacctgtgtccatttactgtgacatattaggtgatggtcacagacactcatttcatggccccagtttttataagatga

SEQ ID NO: 466728 - DNA, 610 bp, Homo sapiens
aagtagaatattgataaatgtctaggtttacaagttgaaaagtagcaatcaatggattacaactgatggattcaatgtcaattcataagtgctttaaacatatgtgtaattgcctagctagaataaaaagaaataaaaggcatccaaatggtaaaggaagaggagagattgtcttgcttgctgaaaatatgatcttaacgtagagaaaaccttaaagatcccactgaaaaactgagagagttggtaaacaaattagataaatttataaattaaaaatcaacatacaaatattattgtttccatacagtaatgaaaaactatctgaaagataaataaagcaatttcatttataatagcatcaaaaatatataaagatttagaagtaaatttaatcaaggatgtgaaagatttgtacactgaaaactataattcattgatgtaatatattgaaaatgacataaataaatwaaaaaatcccatgtacttatattggaaaaattaatactgttaaaatgttaatactatccaaagcaacctacagattcagtgtcactactatcaaaatcccaatgtcattcttgacaaaaatagaaaaatcaattacaaaata

SEQ ID NO: 466729 - DNA, 574 bp, Homo sapiens
atatcactaattatcagggaaatgcaagtaaaaccatgatcagatatcacctcacacatgttagtatggctatgaacaaaaagatggaagaaaagtgataaggtttggtgctgtgtgcccacccaaatctcattttatagctcccataatttccatgtgttgccggaggaagccgtgaaagatgattgaatcatggtggcaggtctttcccatgctgttcttgtgatagtgaatgggaaacatgakatctgattgtttaaaaatgggagtgtctctgcacaagctctctttttgcctgctctcacccatttaagatgcgacttgctcctccttgccttctgccatgattgtgaggcctccccagccacgtgaaaatgtaagtccaataaacctcttcttttgtaaattgcatagtctggggtatgcctttgtatcagcagcatgaaaacaaactaatacagtaaattggtaccagcgagtggggcattactgaaaagataacagaaaatgtggaagcgactttggaactgggtaacaggcaaaggtgggaacagtttggagggctcagaataag

SEQ ID NO: 466730 - DNA, 540 bp, Homo sapiens
acaatattgtgattcttccctcttgtatctacataaaacaacaagattcactaaggaaagttatttagaaaagtyattgtttaactatctctggggatagatactctatggctttaagttaaagaattcacattgtctacataagtaatacatttagaaattgcatgaaccatatattatagaagttattgattaatccatatcaatattttaaaaacaaaacaaatcttgatttacatttacttttttaatggacttttagttttccagtcatacaaaatattggcatttcaatgtacggcataattagtgctagcccagcaaatatttattctataaattccatattttaacacattttatttccttctgtattagtttaagtatttccccccttcttcattacacaaataatattttctctcagtagaggaagagaaaactaaagaaaataagtcaaatcctattaagattttggagtttaacatattttttctatgtgcactttcacgtagttgtacaaataaatgataagtacat

SEQ ID NO: 466731 - DNA, 540 bp, Homo sapiens
acaatattgtgattcttccctcttgtatctacataaaacaacaagattcactaaggaaagttatttagaaaagttattgtttaactatctctggggatagatactctatggctttaagttaaagaattcacattgtctacataagtaatacatttagaaattgcatgaaccatatattatagaagttattgattaatccatatcaatattttaaaaacaaaacaaatcttgatttacatttacttttttaatggacttttagttttccagtcatacaaaatattggcatttcaatgtacggcataattagtgctagcccagcaaatatttattctataaattccatattttaacacattttatttccttctgtrttagtttaagtatttccccccttcttcattacacaaataatattttctctcagtagaggaagagaaaactaaagaaaataagtcaaatcctattaagattttggagtttaacatattttttctatgtgcactttcacgtagttgtacaaataaatgataagtacat

SEQ ID NO: 466732 - DNA, 620 bp, Homo sapiens
ttcttaaaacaattaattgacttacctgggtcacacacatgttaatagaaaatcaacattcaaactatagaaacatgattcaatagaaactttttagtacattgaacatccatagtcgattacaatatatatacacttatatttatcaagaagtgtaatccaaataattagtttatttaaaaaatacatccaagtaacaatggtagttttcaacctatcagtatggtaagttggagcacccgaaaagctttcttgaaattaggcatatgartacattggttaaaactcgttttatcctaaaataatatatatcctatagtagataaacttctaatttacttttcaactttcctgtataagtgtgtatattccatcactgagtcagtaaaacttgtttgatgttttacatgatagacaactttctattttaaataataagtaattgttggcaatatcctcaatttatgacataagctaaaagtatgttttattctataaaaaatttcacatatgatacatttaattttcaaaattacaaaatatatatgtaaactttgttcacaaaattattacaaatgctgttttctggtataccataataaatggaatttttaattttt

SEQ ID NO: 466733 - DNA, 620 bp, Homo sapiens
ttcttaaaacaattaattgacttacctgggtcacacacatgttaatagaaaatcaacattcaaactatagaaacatgattcaatagaaactttttagtacattgaacatccatagtcgattacaatatatatacacttatatttatcaagaagtgtaatccaaataattagtttatttaaaaaatacatccaagtaacaatggtagttttcaacctatcagtatggtaagttggagcacccgaaaagctttcttgaaattaggcatatgaatacattggttaaaactcgttttatcctaaaataatatatatcctatagtagataaacttctaatttacttttcaacttkcctgtataagtgtgtatattccatcactgagtcagtaaaacttgtttgatgttttacatgatagacaactttctattttaaataataagtaattgttggcaatatcctcaatttatgacataagctaaaagtatgttttattctataaaaaatttcacatatgatacatttaattttcaaaattacaaaatatatatgtaaactttgttcacaaaattattacaaatgctgttttctggtataccataataaatggaatttttaattttt

SEQ ID NO: 466734 - DNA, 518 bp, Homo sapiens
acatttgtcacaactaataagacttcattgacatggagtcacaggaaagtgatatgaaatttaagactctggcaagaatttcagggtaaaactcacttcctaaaatggcttttaaaattctgaaagggatgccatgtgctgaagatgtataaatgcctgagttgccatggcatatgatagatgatggggaaaaaaagtctcagagaactgggcatactggaatgcagagattatgtaatgctggagratttatcagaggtaaatccatggtagagcccagaagacacactttccaacaagaccatcaatgaatgtaacaatgaaaggtctgagaagaccactaagtccaatgttggttcttctctttagagcaggtctgatggttgaagaggtggtcacagagcttggcttaatagcaattaattgttggcactcattgcacttgttgttaacagcaatgagtatgacagatctccaggtggcagctcttaattgccaggtccatagtgctacaatta

SEQ ID NO: 466735 - DNA, 613 bp, Homo sapiens
atggctttcaccaaaatgctgataataatatggaagataaaatccaggctgaggtagtctcagatggagatgaggaacttgttgggaactgtagcaaaggtgactcttgttgtgttttatccaagagactggtggcattttgcccttgccctagagatctgtggaactttgaacatgagagagatgatttagagtatctggcggaakaaatttctaagcagcaaagcattcaaaagatgacttgggtgctgttaaaggcattcagttttataagagaagcagagcataagagttcgtaaaatctgcagcctgtcaatgcgatagagaagacaatcttgaaaacaaagctaaaaagcttacattgcctctatttggtgccatgaaaggaggaagcaaattcaaattaaaaactagaacagcagggaagttacccccgaagcatccagaactccctccaactttaatgagaatgaaagatgagcctgaagtagaagaggaggaggaagaggaagaggaagaagagaaagaaaaggaggagcatgaaaagaaaaaactggaggatggaagcctcagtaggccacagccagagatacagccagaagcagcagtgcag

SEQ ID NO: 466736 - DNA, 572 bp, Homo sapiens
atattgacttctgcatgtataatcaaattaaaatgctgagaataaacataaatatcttccttctattgtttaaaatgtccttgctgaaatattagaattttgacatgaactcccaaggaaaggcagagctaagatccacattatttaatgttcagctcggtgcataaagtcaaggaatgaactctcggacatagctccaagttctcattaataagaaagagggggcgggttgctcttaatattgtacttgatataagatgatgtgaatttactaattaaatgcttacaaaaagttaaatctcaatagtttcatttttttggtggcattgtgaatatttcctgaaagatcttcttcctttattagatagaaagatttagagtcatatcacattttgttgtcattgaarttaaagtgacctcaagagctggtttataaaatataacaaatttgctaagctctggaggtttatctattgctttaagaagcctactggactccttctattccaagaacatcttttgactgttgaacacagaaaacaaaaatgcaacatcttttcatggagatttta

SEQ ID NO: 466737 - DNA, 599 bp, Homo sapiens
tgattatttattaaattagtctttaggctaatattaaaaataagcatttaaaaattagaggaaattttgttaraatatttgttgatgttaaagtgcatgaccctcctccaataaacataacagatttcttctgcttaactagtgtttgagttctttattgttttcaggaaacaatgatatattctttcttttttgatatttaatacatataaatgtaatgagtctataccaaaaatttcattttgattcttttttttttttcagataagcaacaacattaaaaaagaattctgagcatcataacatcccagaacattcatgcagggtaagtaacatttcctttcaattgtagtgttgttggcattctctaaaatctgtttctcttctgtgtctcagtgagaatttatttcaggcttaatacctgaatttattcagtgtattctcaggctttctacattataagtaaagtgctactgtggagacactcctgggatttttaaaggaaaaagcctttggataatgtgaaaataacaaagatctttctttgtaagtttgagaatgactgtcatgctccattacatctcctagaatgttcaaaa

SEQ ID NO: 466738 - DNA, 443 bp, Homo sapiens
ttggattcctatggaattgggctctgctggacacaaactctttttagcatcagacctacctgccatcatcaaatggctgctgattggtacttgagacctcctctttgtaggacttcttcattccttagtcagggtttcctggtggaatgaggagaaatgggaggtrgtgggggacagttacctgcatgcctaaaggaataggcttgggggtggggagaaagaaaacatagccatttctagttgttacacaaagctgtgtaaaggctcatttctactaaatggtcagctgtcaccaaaaaaaaaaaaaaagtgtcatgagacctttataaaacatgccaatagggtatgggaattatctaactattttgaaggaatctaagtaattaaacaaaaaatgccactgtcctaactaatagcagttaaccaactcataataggagtca

SEQ ID NO: 466739 - DNA, 443 bp, Homo sapiens
ttggattcctatggaattgggctctgctggacacaaactctttttagcatcagacctacctgccatcatcaaatggctgctgattggtacttgagacctcctctttgtaggacttcttcattccttagtcagggtttcctggtggaatgaggagaaatgggaggtagtgggggacagttacctgcatgcctaaaggaataggcttgggggtggggagaaagaaaacatagccatttctagttgttacacaaagctgtgtaaaggctcatttctactaaatggtcagctgtcaccaaaaaaaaaaaaaaagtgtcatgagacctttatraaacatgccaatagggtatgggaattatctaactattttgaaggaatctaagtaattaaacaaaaaatgccactgtcctaactaatagcagttaaccaactcataataggagtca

SEQ ID NO: 466740 - DNA, 625 bp, Homo sapiens
taaaatcttatctgatattggatagatatataaatatcttctgtctcaaaaagctgatgttgtgtttgttagtaataacaatgactttcctctgggaatgcttgttaaacctacaagataaagaaggcgttggttcctccttggcctttaagttaaattgcagaatatctttaaccaaaaaaaaaaaaaagaagaaaaaaaamccaccactgttccttagaaagactatttgaatgaagaagtaaattgctggggagaaattgaaaaataggtaagatttacaggttgatttattgttgatagacattggcctctttatagacttgcgttttaagttttatataaatgtgatggtggcaaagtacagaatctaagtgtgcagtgggtcctggcatgatggaacatgaactgttctgagaatcaagagacctgaattctagtatagccttcgctgttacattttgagcttaagcaaaacatgaaaacaaaaatatccggatctcagtttttgtaaaatgagaattactagctgtgaatctagtatgttccagatagcgtaaatattgtagattttgtaggtacaaatgcattcagtcagtcatttactacaggaatctcacagaaa

SEQ ID NO: 466741 - DNA, 556 bp, Homo sapiens
gcaattggtagacattaagttgctttcagtttttatctattaaaaacaacaccacaattcaatgtacgtctttaaaactaaatctttgtgcatgtccttgattattttcttatggtaaatttctgaagtggaattgcttggccagaagcaatacttactttaaaacgcttgatacccatcatcaaacttccctgaagaaaagttgtacccagaatctgtgagtgattgtctttctccacattccaatagccatgtgcattatcttttcacttttgagatacaattgacaaattataaaattcactcattgcaagtaaacaattcaataatttctaataaatgcatacagttgtgtaaccatcaccacaattcagttttaaagcatgctcrtcttccaaatttccttcagcattatctcttaaagcttgtcttactgcgatataattgaatacagtaaaatgtcaaattttaagtgggttttgacgaacgcatgtccagacacggggcatttcagtcatccatgaaagtttccttggctcttcccaatcaacgcctc

SEQ ID NO: 466742 - DNA, 601 bp, Homo sapiens
atttaagtgtgtaattctggatgattcatttctgatgtctagttagctctataatcatgactaaaaactgtgtattaattaaaaactactctgtgtgtgtgtgtgtattcttagatgtcaacattctctaggagaaaaataagacaaaacaagaaaatacctaaagatcaaatgtacacatggcacaaagatagacatatggattaatggaatagaattsagagctcagaaataaatatatacatccactttcaactgattttcaacaaagttgccaaggccaaccaatgggggaaataataatcttttcaacaaataatgtttcaacagctggatagcaatgtgcaaaaaaatgaagttcaatccttacctcacaccatatacaaaaattcactcaaaatgaataaaaggcctaaaagcaagacctacaattttagaactcttagaagacaacataggagtaaaacctttatgatgctggctttgacaaaggattctcagatatgacaccaaaagtataagcaataaaagcaaaaaatagataaattagacttaatctaagttaaaaaacttcctgcttcaaaggacaccaacaagaaaa

SEQ ID NO: 466743 - DNA, 600 bp, Homo sapiens
tactggcattcattattcattcttcctgcttctgctccggccccactttgtctattcaccacatggaagccagcattattgtgttaaaacatgttaggttatgttggtcctctgctcaaactctgcaatggtccccttcttactcagagtaaaagctaaagtattttcagcagctttccacgctctatgtgatcttctttcccatcctgtatctctttgacctcacctcacacattcactccactctggccacactgtcctcctgacttcttccaatatactaagcatactccagctttggcacttgytgttcctccagcctggattgctaggtgactgtcaccctcatctccttcaagtctgtatccaatgttaacttttaaatgcagccttctctgtccattctacttaaaaactataaatccctcccttttctggaaaaccctatttccctcccctgctttattttcccctacacacttaccatcatattatatattttacttatttattccgctcctgatctgtttccccccaactagaacgtcctctgtgaagatagattttattgtttgttcttttgccactgtatttctactg

SEQ ID NO: 466744 - DNA, 601 bp, Homo sapiens
agtcctcaatacccaacacccacagtgtatttaataattttagtcaaataaaactgagtaaatctcaatctaacaaaaatggaggtaaaagggcaaaaatcccttaaagtgaaatttatttctagtttacccaagtctgtataccayagggaatctctgagagttttattcctaagacttttctatattctccactacactagaagatatgcctgaatatatgaaagtattgttgatattattccaattattgcttgagactgaagcctccattccagaaatgtatgtgtcaacctagaacctagagagcatcccaatgcttggttcctaagtgaggtaatagtaaacattatcgtggcaaaataattctgtatcagatgtgttggtgccccgtgggggttggaacattggtattcatctagaaactatgttctaagtttgttgtttagatagtccttctgtggtagtttcagatgctctagaacaaatcattcataatatttaaatacacacacacacacacactccatcagaataaaggagtacactgtaaatgcaatgtgccaaaacaagaacaatatgttactacaaaatgacagtt

SEQ ID NO: 466745 - DNA, 457 bp, Homo sapiens
cattcatttatccctttatgcaataaaagtttttaaagcatctcttgtatacaatgtactggctatgtaactagttctataacttaagtgagtctctatctaagcctcatttgttaaataataacaattaaaaattaaaaagggggataaacttatgtyctttccctaatgaatgcacaataaatttggaagaaaacattatttccatagataacactgaaagccaggacgggtccatgtcctgaaatctaaaactagtttggaaattaaacactaattctaaaagagatctagtgttttctgactttttaaatatttcatgtgtggcttttcttggacatttccatttatgaagagaatgagataaatctgatcaccaataaatgcataaaaattagtcaacctcactggtaatcaagtaatcaaaaatgtagtaccattttgaagataatgtaaa

SEQ ID NO: 466746 - DNA, 603 bp, Homo sapiens
ctctaacccccaatgtgactgtatttggagatagagcctttacaaaagcaattatggctaaaggaagtgatacggtttgactctgtgtccccacctcaaatctcaccttgaatcgtgtaatccccacgtgtcaagagtgggacaaggtggagataactgaatcataggggcagtttcccccatgctgttctcatgatagtgagtgagttctcacaggatctgatggttttgttagcttcactcagctctcattctctcgcgtgccaccatgtgaagaaggtgcctgcctccccctcagcttctgccatgattgtaagtttcctgaggcctttctagccatatggaactgtgagtcaattaaacctctttcctttatacattacccagtcttgggtatttattcatagcagcgtgagaatgaactaatacatccataagggtagggccctgatctgacacagttagtgtccttagaagaagaggaagagagacaggaaggtgctctcactttctctctgtatgtctctgtctgtctgtctgtctstttctctctctgctcacccacaccgaggaaaagccacatgaacacacatggagaaggtg

SEQ ID NO: 466747 - DNA, 562 bp, Homo sapiens
gcactcccatatttattgcagcactattcacaagagccaagatatggaatcaacctgtgtccatcaatggataaatggataaagaaaatatggcatatatgcacaaggaaatattattcagccataaaaaagaatgaaatcctgtcacttgcagcaacacagatggaactggaagtcattatgttatgcaaaataagccaggcacagaaagacaaatactgcatattttcattcatatgtaagggctaaaaaagtggatctgatagaggtagagagtagaatcatggttaccggaggstggaaaggaaagtagggaggggaaataaagagaagatggttaaggggtacaaatatacaattatgaggaataacttctggtacttgatagtacagtagagagattatagttaactataatttattacatatttcaaaatagaagaattataatggtcccaacccaaagaaaagataactatttgagtgatagacatcccaaataccctgatttgctcattatacattgtgtacaggtatcagaatatcacatggtccccaaaat

SEQ ID NO: 466748 - DNA, 596 bp, Homo sapiens
gactgaatggccaaactagaggccatgaggatcctatctgggaagattgaattcaaagctgaattcttgagccaataatttacccaaagctgggccgtgagggccagtctcaagaagctctaaagaaatgcagtggacagagagtgggaagttaactacagtgactcagcagggcttgattcagccgtcccttcccctttgcagactgcttttgtcatgtgttaggtgatgtatgttgtaatggagcaaggatgttgccaccatggcaacgtgaagtcagagctcttctgagctcatttctcggaaccacttcccccttcccttgacgagctttctcatggagccctctgttacyagtctttcagaagcacctccacagagatcttctgtcgtcagatgctcctatcaaagacagctcctcctcttcttctgtcttcctctaaaacctaaccccaggttcccctcaaaggcttcttcctgaagcttctcctgagttcacatatctctgttattttgaaaagaaaccccagtactcagtaacagtcaagatgtgaaagaaatgagactgaatcagaacaaagttggacctcggatag

SEQ ID NO: 466749 - DNA, 647 bp, Homo sapiens
tgaaacaaaatgatttaagtcagaaagtttgcttacaggaaaattaatgtagtatgaagcagtattaccaggtgtctgtgggtgtggttgtgtaccctgagggtatggtaccgcggggctggtatgtgtaccctgaggcttggtgagcacctggtcagtgagccggtgtttgcctggacaagtctgagctgcagttgacacaatggccattggccaaactggtggaaagtttcaatgacaggtaaacaaaagactgaggaccaggaggggaacagccaaagaggatgtaggtattacaaaggagaatttggggaacattctactaacccgataagtagccgtgtgttcaaaaatgtcttttgcccttccctgagccagtcttccttcaaaatgttaacaataccactgtttctttcattccaagaagcttgatcttcacacctgacatttcagagatcctgtgtcttacaattgatgtgtatgtttaacagagaaacatttttcttctcctttccccctaaaagctgttattaactcrctgctgtgtcttagtcaatggcttcttagagtctagaaaatacagtaagagtgatgtacgagaatacgtggttttgaatgtggtgcttaagatacatctttgacttaac

SEQ ID NO: 466750 - DNA, 583 bp, Homo sapiens
ccaggcctgtttcccggagtagtagcagccttgcctccccttaagaaacctgcccacaactcacactccctrcatgccagtcatgcacactcgtgtgtgtcacaccctctgctcatccccccacccactgaagtcagaccatgtgtgagggaggatgagaagccggggaagaggaagacagctcagctggctggccctggcccctgaagaaaacaagcagaggcagggagggaaacatactgttccctgcaatctgatcacctccgtgcaagcctctgggctacacacccaggcccaggcccagaggccacgctaatgagaccaggcaggaaaagtgagctggtgactgttcctgggcagattagaaacacattgtggagaagtgggggcacggtgagggtgtgcagggcagtgtggttgaggctgggtgtggggctggggcatgcgggcccagaaaggagcagaagaaggactgctgtctttctgagctctgattccagctcctggggtggccccctggcagctgctgaggcctcacagtgagaaatctggaacaacaaaggctctgggacaaaagactctc

SEQ ID NO: 466751 - DNA, 699 bp, Homo sapiens
aagtcacttaaccactttgacttttaatccattatccataaaatgaaggtggtaatagtatctgtctcatgaggttgctaggaagattaatttatatacratgcacataaagtacttggcccggcccctgggacagaataaggtctgaataaatgagagctgttgtaattaattcaaggcatagcatgtggcatttcatggacatttttcaattgcttgagtaaaacagacccagcttggagaaagcagaacaaatcagaatgagacagtccatcaggattccttccaaatttgtgatcacattgcagctcatccctttgttttggctcagtcatttctccaattgtgagcaacttagggctcttcacaatagggagaatgggcatattcacaggggcaaattacagttggaggaagcctcctggaggaatggttttcaggggacttaggtcctggctaagtgccttacagcacttgaagattgttgaggagccattctccactcccccagttttatgaaggtatacttgacaaactatatatacttgcagtgtacattatgatgttttgatataagtatacatattgaaattaaataattaacatagcaatcatctcacacatttatcaatttttgtggtaagaacacttgaaatctactgttagcaattttcaagtagtcaatacgttattattaat

SEQ ID NO: 466752 - DNA, 593 bp, Homo sapiens
tttgtgtggttccctgcccccctttttttgattttagattttagaacttttctctcaaattcatttcaatgagattcatgctccagtgaaaactaacattcttcttacattccagcctagcagcctcaggggtgatgatagtcttcaggaactttctgggataatggaagtgttccatatacaagggcactaataacataggggtgtacatttgtttaacattttttgaatagtatatttatgatcagtgaatttcactggaaggaaagtttaacacaattttaaaaattttattgagtacctactatggccctggaactcatytgggtactgttttggtactcaaaaaaaggccattaatgaaaaactcacagctaacattacaatcaatgggaaaaactgaaagctttttttttttaagttccagtgcaagacaaggctgcccactctagtcatttctattcaacataatattggaagtactcaaccaagcaattgggcaaggaaaagaaataaaaggcacacaaatcagaaagaaagaagtaatacatgcagaatacatgaccctgtatgtagaaaatcccaaaaactcc

SEQ ID NO: 466753 - DNA, 602 bp, Homo sapiens
tcacttcccctctctggcatcctcaatttcctcattttgaagtgaggggcctgagtgagataacaactaagatccctgctgagttaatgcaatattactttaaaaaagaagagagaaagaagggatggaaggagaaaaaaatgggagggaagaaggaaggaaggtgggatcagcaagtagagtagtagaatagaattaatttaactataagtgacaggaaactctaaataacagggacaagcaagtttgaggcttatttttctttcacatgaaagtctagagattggctaaaagggagggtcagggacccaagtttcttctatcttgttactctgtccagcatggcttccattgccaagtttgtatcatgatccaagatggtggccagccatctacttacactccrttgatgagaacttagtcttatggccacacctgtctgcaaggggatctatcatatgtagtttttgttctaattagccatggggctcctactgctgaggagtaggaggaagacagatattaggggatgtgtaacaggccctgctagaatgggcttcccaagaagcgtcaattagggagatgtccaaaaatttagagca

SEQ ID NO: 466754 - DNA, 497 bp, Homo sapiens
tcgctgggtcccgaagcagcccattcctgcctggcactagaggaattgattgggagggtggccagaggagcagggkgtaaaactccacaggaagaaggacatctctagcttaactgtgtaacaatttgaataggatgagaagcctcctgcccagaacttggggagggcacaaatccagtgtgcagactccacagtgtggggaagaaccaaacccttttctttcacagctggaaggcaggtagctgggggcaagttttcaagcctggcttgcctacctccaggaaacagactcagggctgttgagggggccacggtgggaatgagactggcctttggtttgcatggaaactgggtaaggcctgtgactgctggttttcccacatttccctgacaacctacatgactcagcagaggcagctataatcctcctgggtacacaaatccagtgacctgggaatcccaccccatcccccacagcagcagcagcagcagcaaga

SEQ ID NO: 466755 - DNA, 570 bp, Homo sapiens
aaccctcctagcttaaatcaggaattaggtaccctgaacagaccaataacaagaagygagatagaaatggtaatttaaaaattaccaacaaaaaaggtccaggaccagatgaattcacagcagaattctaccagacattcaaagaagaattggtaccaatccttttgacactattccacaagatagagaaagagggaaccctccttaattcattttatgaagtcagcacgaaaaccaggaagggacataaccaaaaaagaaaactacagaccgatattcttgacgaacatagatgctaaaattcttaacaacatgctagttaattgaatccaacaacatatcagaaagataatccaccatgatcaagtgggtttcataccagggataaagagatggtttaacatatgcaagtcaataaatgtgatacaccacataaacagaattaaaaacaaaaatcacatgatcatctcaatagatgcagaaaaagcatttgacaaaatccagcattgctttatgattaaaactctgagcaaaagtggcatacaagggacatacttcagtgtaataaaa

SEQ ID NO: 466756 - DNA, 625 bp, Homo sapiens
cagctaatttttccatctgtgctttggagctctagctgtaaacatcccaacctgaatttgtcttcagtctgttgttctgctttgcttgtatgtcatggccagtttatgacacccattaatgacattctgcccaccctaatgcttactttaattccagaacaatgaaaaattcctgcagtaggtttctagacaccagggcattatttaatgtgagttgttataacagtgcctgcagttctattctcatacatacatacataatttacatttaaataggcaagatggccacacagggatgcctggcacaagcacaatgccacctgcataagggaaaacacagtattttatgagacaaaagcatcagttattyccaggaatgtgcacaatgtgtagcactaagtaaaacaatatgattcaaaagacttaaactaaccagggggccgtaggggtaaaagtaaaggaagtcttacagagaagataaattaaaatttggaaagtttacatgcgataatagaaataatgtttttccaagtttccaacataccttcccaaagtaacaagttagggtagaaagaaagactaaacaatacaggaaaaattcatttaagcaccttaaaaaaagtat

SEQ ID NO: 466757 - DNA, 525 bp, Homo sapiens
atcctttgaatggccacaactgtgaagtaaaaaagttctgtctgaacaagaaatggctggtgctttatccagccaaagaggttaaagtagttctggaagctttggytgaagttgtggaggtaattccgatggggatgacaacttgagtcatggaggaagccacagtggttgaggaggttttggtagcaatcatggtggtggtggatacagtgacagtgggcatggctataatggaattgataatgatgggagcagtttgagacgtggttgaaactacaaggattttggcaattacaataagcaatccttaaattttgaagccacgaggggagaaaactttggaggcagaagctctagaccctttaatggtggaagtcaacactttgcccaaccacaaaaccatagtggctacaatgatggttccaatagcagcagtagttatgacagtggcagaaggttttaatttctgccaggaaacaaagtttagtggagaaaagagccagagaagtgacaggaaagttacag

SEQ ID NO: 466758 - DNA, 525 bp, Homo sapiens
atcctttgaatggccacaactgtgaagtaaaaaagttctgtctgaacaagaaatggctggtgctttatccagccaaagaggttaaagtagttctggaagctttggctgaagttgtggaggtaattccgatggggatgacaacttgagtcatggaggaagccacagtggttgaggaggttttggtagcaatcatggtggtggtggatacagtgacagtgggcatggctataatggaattgataatgatgggagcagtttgagasgtggttgaaactacaaggattttggcaattacaataagcaatccttaaattttgaagccacgaggggagaaaactttggaggcagaagctctagaccctttaatggtggaagtcaacactttgcccaaccacaaaaccatagtggctacaatgatggttccaatagcagcagtagttatgacagtggcagaaggttttaatttctgccaggaaacaaagtttagtggagaaaagagccagagaagtgacaggaaagttacag

SEQ ID NO: 466759 - DNA, 386 bp, Homo sapiens
cctgtggtggcaggacatagctgctacaagacatgccttagacaatactcatgtgtatgggcaaaagactcaagaactaaatttgtaactaattgcataacaggttattttagtttctgctttgtggaaaacatamggcattccaacaaaatgtttaatgtagatttttttttgcacccatgctgctgattgctaaacataataggctaatggtgacactgaaaaaatgtctttttaaaaaaaagctttcaaaagcaaattttcctttaacgtacataccaccttaaaggtttggcatctacctcctaattttcctcagtgccattgtcttagtttgttttactataaaggaatacctgagggtgggtagtctataaaagaaaata

SEQ ID NO: 466760 - DNA, 662 bp, Homo sapiens
tatgagtaattgaagggataaattaaagacctcaaatgatttgttatgagcaaattatgaaaataaaattatatactttattgacaaaattcttaaagtggcaatttagagaaatttcatagttatactttacctcaattttagtatatcattttaataagtatcttaatgatatcctcatgtaaaagacaaaaacttatggcctggatgaagttcaattagacaaattcataatcagttaaacaaatgaaaaaaaatgsattaatgaaattagcttcctgaatagaaatcttgtgctctttgcctcacccttttctctcattcattcattcatctaacaaatacacatggaaaaacactataagaaacattttgcatgtttctgaaaatacagatataagaacagacaaaactaacattaagttaggggtcagaatggagctaacccacgatgtaaaaaattatctattgacggacggagccttctcaagggccagaaatgtttggtatcttgacttatgtgctggttagaggggtaaagatatatgcaaaaattcatccagttgtacacttaagatttcgcacttaaatataggaataatatactaaacttcaaacaatagcacaaataatgagccattcttgttattgccttccgtaat

SEQ ID NO: 466761 - DNA, 662 bp, Homo sapiens
tatgagtaattgaagggataaattaaagacctcaaatgatttgttatgagcaaattatgaaaataaaattatatactttattgacaaaattcttaaagtggcaatttagagaaatttcatagttatactttacctcaattttagtatatcattttaataagtatcttaatgatatcctcatgtaaaagacaaaaacttatggcctggatgaagttcaattagacaaattcataatcagttaaacaaatgaaaaaaaatgcattaatgaaattagcttcctgaatagaaatcttgtgctctttgcctcacccttttctctcattcattcattcatctaacaaatacacatggaaaaacactataagaaacattttgcatgtttctgaaaatacagatataagaacagacaaaactaacattaagttaggggtcagaatggagctaacccacgatgtaaaaaattatctattgackgacggagccttctcaagggccagaaatgtttggtatcttgacttatgtgctggttagaggggtaaagatatatgcaaaaattcatccagttgtacacttaagatttcgcacttaaatataggaataatatactaaacttcaaacaatagcacaaataatgagccattcttgttattgccttccgtaat

SEQ ID NO: 466762 - DNA, 610 bp, Homo sapiens
ttgccagcagcacttatgtctgcatcatttaccccgagataactttgccatgaaatatctggcttttattactatttcacatctctctagtgtatcgactttggaaacaaaatacattgttctatttatagcattctggttttagtagtggtatttccatttacaaaatatagtgaatctygattgctgaaaatgtcaaatcctagaaaatgcagcattcctatacgttgttaacattgttctctaacagttgttggcagatttatttgatgaatctgatttttccaaaatagatgattcagatgattcagacaattccaatgttagctctgtttaaaaataactccaagaacagtttttatattttattttcacattgaaaattagtcagatttgcttcaacctcaaagagcatggttatttaaaattaggtgagtgctggaagtgagttataccttttttttaaacagaaaaaggattaattttatgtagtcttgctagttgatttttttcttttgttgcctctgcttttggtgttatatcaaaaaatcattgccaagatcaatgtcaaggagatttccctctatattttcttctaacaattttgcag

SEQ ID NO: 466763 - DNA, 584 bp, Homo sapiens
gttttctcttttaccacttagttcagcttttaagatagttttatttttaacattttctatgctaaaacaactaatagtacaatatttgtcacttagaaggtcttaaattttatttccctatctcagacaaatattaaatgtttataataggatttrcaatatgaatataacttatatttaacttattttaccccgtactttagaattttgtttaatagagaacatcaaggcttctagaactagcagacataagaataatagctagtgaaattacctttaattgttgtgaatctaagataaaagaacatacatgaaatatgtccaaactttataggatattcaaataatatttattgtgtacccttttccacatatcctgtacagcagttctgtcctatagaaatataatatgaaccgcaaatatgatccacttaagatgtaattttaaattttctggtagccatgttttgaaaatcaaaagaaactggtgatattagtttaaattatatactttatttaacccaatatatccaaatgatatttcaacatatctttatattatgaatgagacattttatatgtgt

SEQ ID NO: 466764 - DNA, 584 bp, Homo sapiens
gttttctcttttaccacttagttcagcttttaagatagttttatttttaacattttctatgctaaaacaactaatagtacaatatttgtcacttagaaggtcttaaattttatttccctatctcagacaaatattaaatgtttataataggatttacaatatgaakataacttatatttaacttattttaccccgtactttagaattttgtttaatagagaacatcaaggcttctagaactagcagacataagaataatagctagtgaaattacctttaattgttgtgaatctaagataaaagaacatacatgaaatatgtccaaactttataggatattcaaataatatttattgtgtacccttttccacatatcctgtacagcagttctgtcctatagaaatataatatgaaccgcaaatatgatccacttaagatgtaattttaaattttctggtagccatgttttgaaaatcaaaagaaactggtgatattagtttaaattatatactttatttaacccaatatatccaaatgatatttcaacatatctttatattatgaatgagacattttatatgtgt

SEQ ID NO: 466765 - DNA, 589 bp, Homo sapiens
taacattttctatgctaaaacaactaatagtacaatatttgtcacttagaaggtcttaaattttatttccctatctcagacaaatattaaatgtttataataggatttacaatatgaatataacttatatttaacttattttaccccgtactttagaattttgtttaatagagaacatcaaggcttctagaactagcagacataagaataatagctagtgaaattacctttaattgttgtgaatctaagataaaagaacatacatgaaatatgtccaaactttataggatattcaaataatatttattgtgtacccttttccacatatcctgtacagcagttctgtcctatagaaatataatatgaaccgcaaatatgatccacttaagatgtaattttaaattttctggtagccatgttttgaaaatcaaaagaaactggtgatatkagtttaaattatatactttatttaacccaatatatccaaatgatatttcaacatatctttatattatgaatgagacattttatatgtgtttttatactgagtttagatttgttatgtacagattttacatgcagcatactt

SEQ ID NO: 466766 - DNA, 634 bp, Homo sapiens
tgcttgcatttactggcatcagaggagatttttttcctggcagaaggcagctctggctgccgcctgggcacactgtgttcatgaagtacttctctgcttctttctatgacaggagcacctgtcatggagagagctagagcagggggacactggcatgctagtcctaactctgctgtatcacacagaacattttcctccaagccttgacttctttgtctgaaacataaaatggttagcctagatcaaaggctgcaacctcaaatgccctctgggatcagacatgtaacatatatggcaatgtcagccaacagagtgttcagaactttatgaacagaagaaagcctttagccccacctaaagacatttttattctcaaatgttaaaatgtgcttgaacagcaaaatgtgtctgtaatctcaattcatcccatgactgctagttgtgagcctggccatggatcacagtactaaggcaaaatggcactgttggtatttcagtacttcttttacccagmggcctttaaaaacaatatttagaacgttttaaataaaattagtgaaattaaatgtatttcctatttgaaatttagctgagcattctttggccacaaccggttctgctgctgactttgaca

SEQ ID NO: 466767 - DNA, 536 bp, Homo sapiens
aagtaagtcttgcctagtggaaagcatgctgccctgccctgctttaatgagtgaatgagaataatttgtaattcacatacaaaggttgctgaattgcttttttaaatgttcctagcatagggcacacatgcttccaaaggacacatcacaggaattaagcaaagctggctctgtaaatactcaatagggatattataaaagatttaagcactggataattttttgaaatctatatcagccaaaarcttccatgattatgtgacaaacccaatttaacgtatctttttttaaatttgataaaattattttgagttatcatgaagtctaaactagtaacacccaaattgaaagattttgcttaacccaattactctgttttctgatttttataggaaagttcatatttggtgttctgccaagagcatcatgttccatgatctatctaactgaaaaaaaggagaaaactttactccagagataaagagtagcacaataataaaattagcaactgacatttatgtcacagtgtacaattt

SEQ ID NO: 466768 - DNA, 621 bp, Homo sapiens
ggggaatagccctcaattgtgctccattagtttcactcatgcatgcatacattcatctgtttcacaagcatggattagatcaggcattgtaggggagtgccatagttcagaaataaacaccacagtccctaccttctaaggaacctacagtaaagggtgagagaygaactagtaaaaccttacaggacagtttatcaagtgcaaagatagaagagtctggaggtgtcatgagaactcgaaaagagccaatcaaggaaagcctcccagaaaaagtgacagtatacctaactaagccttgaaggacaagcaggaggtaacagcagccacaggcacatctacatgagaggaagacactgcatggagctcagcatgattggagcaagggtgagcagcagagaaaaccgatccaggaagctgcagaggcagcttgactatgaagacaggattgtatcctgacctccatggggagccactgaaaggtgtcaagcaaaatggagtaacttactctgatgtgtgttttggaaagatatttctgagttcagtgaaaggaatgaattaagagggcagcgagtagagtcaggaaatgagaaggacttattacaatagaacgggccacagtga

SEQ ID NO: 466769 - DNA, 621 bp, Homo sapiens
gagtctgctgagagaagcaggggaagagctgcagagagaagggcacgatttgagtatacattttctgaatcgaaaagctggaacagttactccaaggacaggcaactgaatggacaaagttcttaagggaaggaaaaggatgatgtgacaaggaaatgacaaaaagctcctcatggctgaagtggttgagtggggagcactgttggagaaggttccagaactttgtgctgggctgagatgctggaccstatcctgtaggcagaggtggaataatatcatcagaactctattttagaagaagaatgcatgcatgtgtatgatgtttaaaaattgagttagggagaccagagacagagagatcctatgctcttgatctcaccctgccaattacccccacgaggtggctattgtttctatttccctttaacagtaaggaaactggagctcaaagcagcccatgacttgatctttagctgttaagtggcagcgctgagactcaaacacagacctcttgatttcaagtcaagggctctttttacttctcacaactcattagctactacaatcacaaaatgcagaccctgagttgctttcaggggttctgaacttctttatgctatg

SEQ ID NO: 466770 - DNA, 519 bp, Homo sapiens
taacaggtgttccaaagcttcacagactggcccctgcccaccacttcggctgcttctttgactgtgttctctcttactctgcccactcccactgttccagacatctctccgtcaccccagttgcatgcctgttccctccacctgcagtgttctttcttcactcttcacctggtgcaatcttttttcattttttatgatttattttaagcatgacttactcagggaacctctcattaaaaacctatacttcttttacacgttgatttgagcatttggaattcattgattattttcaattacattcatttctctctgcttctccggacacaagytccttgagggcaggggctttgtttggcctcatccactcctttttccgagagcctgcacatggcaggagctcaggaagagtttgctgtctaggcctcagtgtcctcaattagaaaaggatggacttttgatgcagatgaagtaaaaggcccctttgagctctccaattttatgaaatggaaatgcttg

SEQ ID NO: 466771 - DNA, 584 bp, Homo sapiens
catctcctcttattccatccattccactgcactctactccactctactccatttcattccattctaatttgttctactttatgtcattaaaaaattctggtctcaacctatgcattgatgtcatggctcactaaaagattgagaatgacaatttgaaaagcacagacatgttgtatcagagttcaggctgtgtgtgcaggtgtgagttcctctatgtgtgtctatatttaacatgtaaatgtaccccttactctktaccccagacatgtacattttgctatcctcagtcctatcatatgtaataccctttttataactaataggttgaatcactcctttactttcctggaaaaaatcaagtgctaatgtaacacacagtgctcacatagtattaagcaattattatactaatataaaatcaaagagaaatactttatgataaaaatatggatttcatgcccaggcacaaccacactaaaagatgtaccaattttttctgtgtttttttttctttttgtggagaacagggtcttgctatgttgcccaggcagatccggaactcctgggctcaagtgaacccccca

SEQ ID NO: 466772 - DNA, 591 bp, Homo sapiens
ccaacatttgaaatttacataattattgagcttggtgaaagctgagtctaaaaattgatgatacatgaagaaagataataaacaattgcttaagagccattttcaactacatttctggaaggttttaaattttcctttatgagcagtcatagcagaaatgtggtttttttcctaagccaactcttactctgtttagtctctaagcccctgaggtgcacactggaagatggggaaggagctttaaataagccaagattttatgaatataaaaaattgaatctaggctatktctaaatataacattactttccaatacataaagtaatttatttaaaaaaatcaatttaaagtcataaacatggagcttttgagtcacttgtgtgatgcaacaaaatatataattagaggtgtcttctaatattattcacctgagctaattttgccaattaaagctaaaagcatgagaacaggtcaataacatggatccttttaattctttttgaaacaaaagtcctgtgtatctctcctgttctagaagagaatgcttgttttgtgataactccatgtttctggtttacctttttaactaat

SEQ ID NO: 466773 - DNA, 619 bp, Homo sapiens
attacattcaaggcattcttctctgtttatgacaaacagaaattgtggctgcatatgaccatttctgagttttcccatatattgatattggtttaaaaaatagtttttaaagatagctacagtaacagtaacacaatataatttgaatttacgtggcatacttagaaactaaattatagtaactctacttttaatttgtggggtagagaagctatgtgcaactttccaaataaaaccaatagaccaaatcctgccacaagatcttggcctctctcgatacagtgccaactctccagcacatggctcctttytgggtggcactgataatgagacgtgtcaaattctagcaatggaatattatcagaagaaaacccatgctatgattggatgacagtggtctgcctctgtgtctataactttttatggctcatatagaaatggcaatatgatgttatagagaatatttgagtggagcttagaaaagctgagtgctgagatggggccacccaccagctagccgtggactttgcaagtctgcactctccatgaccttatttttctcatctgtagaagtagaggataagtctagaaaatgcccaagcttccttccaatgctaaa

SEQ ID NO: 466774 - DNA, 619 bp, Homo sapiens
attacattcaaggcattcttctctgtttatgacaaacagaaattgtggctgcatatgaccatttctgagttttcccatatattgatattggtttaaaaaatagtttttaaagatagctacagtaacagtaacacaatataatttgaatttacgtggcatacttagaaactaaattatagtaactctacttttaatttgtggggtagagaagctatgtgcaactttccaaataaaaccaatagaccaaatcctgccacaagatcttggcctctctcgatacagtgccaactctccagcacatggctcctttctgggtggcactgataatgagacgtgtcaaattctagcaatggaatattatcagaagaaaacccatgctatgattggatgacagtggtctgcctctgtgtctrtaactttttatggctcatatagaaatggcaatatgatgttatagagaatatttgagtggagcttagaaaagctgagtgctgagatggggccacccaccagctagccgtggactttgcaagtctgcactctccatgaccttatttttctcatctgtagaagtagaggataagtctagaaaatgcccaagcttccttccaatgctaaa

SEQ ID NO: 466775 - DNA, 600 bp, Homo sapiens
tgcctggcacacagttacgggacacaattatcagttactaaaattatttgaggtataattgtcatacagattgagcatccctaataaagaaaaatctgatacccaaaatgctccaaaatctgacacttcttgagcaccaacatgactccacaggtggaaccctccgcagctgacatcatgtgataggtcacggtcaaaactgttttatgcacaaatttatttaaaatattgtataaaatttccttcatgctatctgtgtaaactgcatatgaaacataactgaattttgtgtttagatttgggtcccatccccaagatatctcattattcatagtcatgcaccatataatgaagtttcagtcaatgatggactgcttattcgatagtggccccataagattataataccatattttcactgtaytgtttctatttctagatacatttaaatacacaagtacttaccattgtgctccagttgcctatagtattcagtatactcgcatgctgcacaggtttgtagcctaagatgaatgggttgtaccatacagcttagtgtgtagtggcctctaccatctagatttgtgtaagttcactcta

SEQ ID NO: 466776 - DNA, 509 bp, Homo sapiens
agcagttcagaaaatacaatagcttttccaaatatgccaatagaaaaaaccttttaacagctgtatgcaatttttaggaaggaagcattatttcagcattttaagcactacccaaaccttttagtcactttgcaagtaaagyttaactaaatgcagtgggatataagaggataattagagtacatcttatctcttcatgtagtcaaatataagaagatcgtcactggatattattttgtcagccattagattctgtgcagcctaaaacataaaactcctttaagacttttttgctaatttaattcagttctttttttcaataatcatgtctaattagttaaatatgcataggaaatccaaactttagttgaaaatctgaccctatttagagttaactccattctcttaggaatgcagaatttaagcagggtctcaagagccatctttcttgaaattcatacaataattttggtggtccttggagcagcaagagtttcttggaaattcag

SEQ ID NO: 466777 - DNA, 628 bp, Homo sapiens
  misc_feature (1)...(628): n = A,T,C or G
tttttttcatgttttcttctggaagtttatggtttcaggtcttatgtttaaatctttaatccatttaaagataattttktgtgtgatataacaggacaatttcatccttttgcacgtggatatttagtttcccgaacaaaatttgttgaagagaatattctttactcattgtatattcttacactcttgttgaagatcagttgaccaaaaacgtgcagactgatttctggtctctttaatctattctatcagtctatatgtctgtccttatgcccagtaccacaaagttttaattactatagaattgtaatatatttttaaattaggaagtgtgatgtctccagatttgttcttcttgctcaaggttgttttgtctgttcagagtcttttttggttccatatgaattttagtgtcttttatcctattttgtaaaaatataccccaagaattttgataggaattgcattaaatttagagattactttggaaagagtggacattttagcaatattaagtcctccaatccatgaatataggttatctttccttttgctcatgagtttcaaaatttcttttatcaatgttaantactattcagtttaatagtcttttactttcttagctaag

SEQ ID NO: 466778 - DNA, 628 bp, Homo sapiens
  misc_feature (1)...(628): n = A,T,C or G
tttttttcatgttttcttctggaagtttatggtttcaggtcttatgtttaaatctttaatccatttaaagataattttgtgtgtgatataacaggacaatttcatccttttgcacgtggatatttagtttcccgaacaaaatttgttgaagagaatattctttactcattgtatattcttacactcttgttgaagatcagttgaccaaaaacgtgcagactgatttctggtctctttaatctattctatcrgtctatatgtctgtccttatgcccagtaccacaaagttttaattactatagaattgtaatatatttttaaattaggaagtgtgatgtctccagatttgttcttcttgctcaaggttgttttgtctgttcagagtcttttttggttccatatgaattttagtgtcttttatcctattttgtaaaaatataccccaagaattttgataggaattgcattaaatttagagattactttggaaagagtggacattttagcaatattaagtcctccaatccatgaatataggttatctttccttttgctcatgagtttcaaaatttcttttatcaatgttaantactattcagtttaatagtcttttactttcttagctaag

SEQ ID NO: 466779 - DNA, 528 bp, Homo sapiens
tgagtggctgaattccccattcaccagctgctttgttacataacttcacattttacaaagtccaaatgtggttgtgcagtaatgtttgctttatttctttcctaaagacctcgtaggttttagattatctcagtactaagacatttgagaacacatcttytttccttggagagtaatacagttcttggatcgtatctttctcctcacaacttagtgaacgtaattccactctgcagctgtggagctgagccaccttaagccgccttcctgatgacttggttttacatacattttccccatgaaagtttgaaaactcattatttgttccctacccccacccccaaacatgtattattttcttttatacatatgtctttattttaattttttttctcacctttcttgagctatgaatgaaaaacaaaaattgtacatattgaaggtacacaatatgatgttttgatatgtatatacggtgaagtgattaccactataagtacattaacaacttaatatatttattatctc

SEQ ID NO: 466780 - DNA, 609 bp, Homo sapiens
gcatcatgtacgagacactctcatgtcttgttggtttctggactcatgtatcaggttacggtgactgcaggtttagggcatacactgcagcctgcaggaaagcagtgcttatttacacagtattgtttctcagcttcaataactaaaccttcagcaggccattccatcattcaataaagcccattccatcattcagtcaagcccactgcttctgaatattgaggtatgaagtatgaatcatgaattccaagggcaattctattgccacaccccttttgctgtgaaatatgtttcctggttacaggtgatattgcaggggatgccatggtgatgattaaggctttgttcactatgtaaatggttcgggcatggaagacaaaactgtccccasaatattattctgtccctataaagactaacattgcttactctatgctcaaaggagtccagagtaatcactatgctactagtccagccagacgcctggaaatagtgccaaatcacatgctaaccttggtgagagaaatgtcataatgctgagcccattcatagtttccatccctgcttccatgttaaatttctcataggctcaatgagcaagcctgctgg

SEQ ID NO: 466781 - DNA, 550 bp, Homo sapiens
gattattttaatttttagcttccacaaataaatgagaacatgtgaagtttgtctttttgtgcttggctcattttgcttaaaatgatgaactccagtttcatccatgttgttgcaaatgacaggatttcattcttcttatggttgactagaaccccattgtgtatagttaccaaattttctttatccattcatctgttgttggacacttgtgttgcttccattgtgtaactattgtgagcagagctgtagcaaacattgtagtgcaggcaccttttcaatacactaatttcctttcttttgtgtacrtacctaggagtgggattgcaggattgtatggtaactctatttttaattttttgaggaactgtcaaactgttgtccatagtgattctactaatttacattctaacccacagtgtacaagggttctctttgcttcacatccttgccagcatttgttatagcctgactgacttttggataaaaaccattttatctggggtgaggtgatatctcattgtagttttgatttgtatttctctgacaatca

SEQ ID NO: 466782 - DNA, 530 bp, Homo sapiens
tcttacatttaagtctttaatccattttgatttgagttttctatatggtgagagaaaggggtctagttttattcttctgcatacgaatatccagttttcccagcaccacttattgaaaatggtrttctttccctaatgtatgatcttggcacctttgtcaaaattgagttcactgtagatgtatagatttatctctgggttctctattctgttccactgatctatgtgtctgtttttataccagaaccatgccgttttgattactaaagctctgtagtataacttaaagtcaaataatgtgattcctccagttttgttctttttacttaataaatctttgctattctgggtcttttgtggttccacatagattttaggactttttttcctatttctgtgaaaaatgtcattggtattttgataaggattgaattgaatctgtatattactttagatagagtggacattttaacaatatttattctcctaatccatgaacgtgaaacatctttccagtattttgtgtcttc

SEQ ID NO: 466783 - DNA, 530 bp, Homo sapiens
tcttacatttaagtctttaatccattttgatttgagttttctatatggtgagagaaaggggtctagttttattcttctgcatacgaatatccagttttcccagcaccacttattgaaaatggtgttctttccctaatgtatgatcttggcacctttgtcaaaattgagttcactgtagatgtatagatttatctctgggttctctattctgttccactgatctatgtgtctgtttttataccagaaccatgccgttttgattactaaagctctgtagtataacttaaagtcaaataatgtgattcctccagttttgttctttttacttaataaatctttgctattctgggtcttttgtggttccacatagattttaggactttttttcctatttctgtgaaaaatgtcrttggtattttgataaggattgaattgaatctgtatattactttagatagagtggacattttaacaatatttattctcctaatccatgaacgtgaaacatctttccagtattttgtgtcttc

SEQ ID NO: 466784 - DNA, 595 bp, Homo sapiens
ttgtaaagaaatacaatataaaatataaaaatattggaaaagaatatttgggatctatatgacaaactaaattcaatattatgttaagattacaattaatttagtggcttaaaataacaatgaaacaaatttattaacatacatttatatagtttagaagtccaagattggtttcactgggttaaatttaagccatcagcagaattatatttccttctggaggctgtagtgtagaattgattttcttgccttttttggtttctagaggccattcattttccttggctattatcagcttccttcatgtgagagctaggatcgttgtactaactccttcctgccctgccatctttctcgttctcttacatgtgcctscctcttctacttttaatgaatgttgtgattacatcaagcccacctgaatcatccagaataatctccctatttttagatcagctgataagtgaagttaattccatctgaaaccttaattctatttccccatgtaacctgacgtatttacatgttctagggattagaacttagacatctttgagagctcattattctgcttattataattgcatgtctcaaa

SEQ ID NO: 466785 - DNA, 595 bp, Homo sapiens
ttgtaaagaaatacaatataaaatataaaaatattggaaaagaatatttgggatctatatgacaaactaaattcaatattatgttaagattacaattaatttagtggcttaaaataacaatgaaacaaatttattaacatacatttatatagtttagaagtccaagattggtttcactgggttaaatttaagccatcagcagaattatatttccttctggaggctgtagtgtagaattgattttcttgccttttttggtttctagaggccattcattttccttggctattatcagcttccttcatgtgagagctaggatcgttgtactaactccttcctgccctgccatctttctcgttctcttacatgtgcctccctcttctacttttaatgaatgttgtgattacatcaagcccacctgaatcatccagaataatctccctatttttagatcagctgataagtgaagttaattccatctgaaaccttaattctatttccccatgtaacctgacgtatttacatgttctagggattagaacttrgacatctttgagagctcattattctgcttattataattgcatgtctcaaa

SEQ ID NO: 466786 - DNA, 602 bp, Homo sapiens
tggctggtcatggtcccacgcacctgtagtcccagctactcaagagactgaggcagaagtgtcgcttcacaggagttcgaggttgcagtgagctatgatcatgccactgcatttcagcctgggcaacagagtaagaccctatctcttaaaaaaaagtaaattcaagtaacaaataaaggaataaatagtaaaataatgaaaataaagttaaagaattaagacaaatcatgtcagtataggcacacaatgattgctcatagrtgattataaatatgagtgaaataaatacatcaatcacttaagggatgagtgctccaattaatagaaaaaggcatgtcataggctagggtaaaaaaaaactaaactcaaatttatacagcctgtttgaaacaaacaatacagtcaattaaagaaagaaaagaaaacatttttaaaaattaaattagaaaaattcaatataatttaattttgagataacaacaaaactgacaaaacaggacaattttattgattaaagattgaatctacaatgaacatatggatgtactaaaatgttatgtcccaagcaggcaacaaattgtgtaaatcaaaaactgttagga

SEQ ID NO: 466787 - DNA, 541 bp, Homo sapiens
tgtctgttttggtgttttatttcctccaatactttagggaggcagaggatgacttgtttccttagcaccgctgctttcctcttatgagggtccatgtgtcctgatgagaacagaaagagaaaagttctagtttgagacccttactgtgaaatctcaaacagatcactttcattttttatctacctataatgggaataatagatgtctgcttcagagtgcagagtgttattaaagcatcaaaattgataataaatatgcaagcgacttataaagtgccatacttttataaagggttggtactacctgtcattgatacatttgyggaatagaactacagggaagtgttgcatatttttccttctggggaaaaggatgctgtattttcttacttggatataaaactaattatattagatgattaataagtctacctagacgtagatatggcaaatcaaccaatacttcattgttttttaagccagcattttctaataaaagagaacagttaaggaaaatttataaaaatggtagtatttttttg

SEQ ID NO: 466788 - DNA, 735 bp, Homo sapiens
tcaatttacattgtaaatagccttagatcctcttgcccacattattccttagctaatagttggccccatttaaagaggaattattgttttcattttaaggaagtagcctagagaatatatcacaaaaagaattaccctaaaacatacagtagagttcagaaaaataagtttgaatgttttcaaagaaatcatgatgttttctctaaaaagaactcaaagggttctgagaagaaaatataatacataagcaggaagttaatagtgtgccagtagaacctaaggaagaactgcaagaaaataaaatcattatagagatgaaacatactttagaagcaacaagaataatgtaaatgctgaagacacagataaagataagagtgctggataggcttcagaaatcacaaaaacaaaayggaaaagacaaagatatttaaaagattataaaaggtgatcaaactggaagacagagaaaacatcatcaacataaatatagttgacttcctgaagaagagaacagaataaatgaaacagaaaaagtattcaaacatatttattcattcaaggaatatttattggaagcctattatgttaatttagacatggggcaaaagtatttaacaaaaatataataaaagacaactttcctgaactaaataaaaacatgaaattacagattaaaaataccaatttattctagaaagcaaaaaataccttaatatagtaacagtaaaacat

SEQ ID NO: 466789 - DNA, 511 bp, Homo sapiens
aaacctgaacgagcttttgccatgtttctttcagtacaagttcyctattacgcagaattattttagttgctggtgtcagaaacccaattccgtggtttgcagaagaattttctttataaaattgaagttttaagggacgtcagtgtttatgccatttttccagttccaaaatgattccattccattctagaaatttgaagtatgtaacctgaaatccttaataaaatttggatttaattttataaaatgtaaaaaaaaaaaaaaaaaaaaacgaaatctactcgcttgtaaaactgggaaaggtcaggggtaatgtgggcctcaggcaccatgaattaaatgaacaactatggtgttatttgaattcattcacctcctgactgtttttctctgcagggcagctgacaacctcggcaaggcagaagtcaccatgaaagcttccttttctcaagtatttaccattcaaaactttagggaaattcattaacataaattggcaatgatattagat

SEQ ID NO: 466790 - DNA, 511 bp, Homo sapiens
aaacctgaacgagcttttgccatgtttctttcagtacaagttccctattacgcagaattattttagttgctggtgtcagaaacccaattcygtggtttgcagaagaattttctttataaaattgaagttttaagggacgtcagtgtttatgccatttttccagttccaaaatgattccattccattctagaaatttgaagtatgtaacctgaaatccttaataaaatttggatttaattttataaaatgtaaaaaaaaaaaaaaaaaaaaacgaaatctactcgcttgtaaaactgggaaaggtcaggggtaatgtgggcctcaggcaccatgaattaaatgaacaactatggtgttatttgaattcattcacctcctgactgtttttctctgcagggcagctgacaacctcggcaaggcagaagtcaccatgaaagcttccttttctcaagtatttaccattcaaaactttagggaaattcattaacataaattggcaatgatattagat

SEQ ID NO: 466791 - DNA, 590 bp, Homo sapiens
ctagtttgttgtcttcaattatttagtgagtaatcaatctgttccctgtgatttaaaatgccacatttgtcatacattaaatctcataatatgtgagattggtgtctgtttccgggattctctgtcccttggcaatttgtcttttcctgcaccaatgctattcatgtattgttattgttattactgctaaatacaaggtgwtactatctaatagaaaaagtgtgtacccctctcttctagtcctttcgtaatttttgttaccatctttgcagatgaatttaaaaataatttttgttaaattttaaaataatcctgttgtaattttgactggcattacatacaagttatggtctgttttagagaaagaactaaagaactgacatctttacaacaccaagtctttctgtccacaaacaaggtatgtctttcatttatttgacaattcttgtgtatttcttggtaaaatgttgtaatttttatcgctgcacatttctttttagtttttgctctttgtatttttggtgtttattatgattgcatatgtggtagcttgattactgattatctctggtatgtgaagaatgattgca

SEQ ID NO: 466792 - DNA, 645 bp, Homo sapiens
atattaattgacttactaatataatatctttgcagtctagaatgattaatacgtttttgcaatctaaaatcctttcagtgtcttatttaattctatttcccactattatgtttaggattttgggtgtcaatatatttataagtgagattggtcagtagttctctttttgtttaataagatttggcaatagtgtcatgtattgacacatttttgaaatattcctatttttctataaattgttccaggctcattagagawttttatttatataagtaaacaaatgttatttactttaaaatttgctcacaaaattatcctaccagatctttttaataggtgtcttttaaaaagcttttttattttcttctgcctttggtatcaaattaagactttttccaccctattcttattaaaagtgtatactctttcttttgtattactctgtaagttatcttcatttaattaattttgtgtttgtgcttctttaaatatttattttagcattaaatattaattcaaaacattatatggtaatattttggtaaaggatgtatttttcaaacagcacaacaagtaagacaacaacaaaacactcagccatgttggccacacctgaggtgaattttaaaagaatgtaagctactt

SEQ ID NO: 466793 - DNA, 562 bp, Homo sapiens
ctgagctaaagttgaaggtgttaacagggttggttccttatggaggctctgagagaaaatagttctctgccttttcagcccgtaaaggtcacctgcattcctcagctagtgtctccctcctcacatcaatccaacctcttgtttccatcataacagctactactatttgggtcctcctgccctgctcttataaggrtccttgggtttacatttttcccacctggataaccctgggtaatctcccctatctcaacattcttaatcatatcagtaaagtcccttttgccatgcaatgtactttattcacaagttttgggggtgaggacctggacatctttagggaggcattattttatgtactacaattaccaacacttacatttttcaagttaaaaggaaaaaattaattagaaaaaaaaaaaaaatccagtctctattgtactcacctgtgtccaatttccaattaatttgtggtctttcaggacttactttaagggaaagatattatttttctcttcttgttggaaactttctggagcatgtgggtgtagtgactggtatt

SEQ ID NO: 466794 - DNA, 538 bp, Homo sapiens
cataaattaatccctccagagatataaatccggatctttagttattagtagatagcccagaagaataccttcttggaatctgaatatttccaaatcctaatttccagagactctccagccttctgtattgtttcatatattcattctttcatgtattaaaaaaaatatgaacatctactatatcccagtcactaccatatgttacattgatgcaacgagcagaattgtccaacggcgacctggggaaccaactgaaacaaggtattttgcttccccagcagatggtgttgtatctgaacttatctcttttggaacgaggggcttcctttcccacagaggatgctctaacttcccaggggcctcaagtgcctcaggaactgatcayctggcctttccacataactcctttaaacagctgacactcaaatccagactgcctgctagctaaataatcttattatctccacattgaggaagctgctctctaaaaagagaaagcaataatgggaagggctcctctcctggaacagagaaaagt

SEQ ID NO: 466795 - DNA, 538 bp, Homo sapiens
cataaattaatccctccagagatataaatccggatctttagttattagtagatagcccagaagaataccttcttggaatctgaatatttccaaatcctaatttccagagactctccagccttctgtattgtttcatatattcattctttcatgtattaaaaaaaatatgaacatctactatatcccagtcactaccatatgttacattgatgcaacgagcagaattgtccaacggcgacctggggaaccaactgaaacaaggtattttgcttccccagcagatggtgttgtatctgaacttatctcttttggaacgaggggcttcctttcccacagaggatgctctaacttcccaggggcctcaagtgcctcaggaactgatcatctggcytttccacataactcctttaaacagctgacactcaaatccagactgcctgctagctaaataatcttattatctccacattgaggaagctgctctctaaaaagagaaagcaataatgggaagggctcctctcctggaacagagaaaagt

SEQ ID NO: 466796 - DNA, 538 bp, Homo sapiens
attattctacacctttagtatcaatttccatatatwtcccccctttcctgcttatataaattagaaaactctatcagagtatagggcacctcctcatgggtcacactctctacatcacttttaggggcctgctgggtctcaagtctagttacagggatagaagcaaagagggatggtgggcatgagtcctgaggagaatcagcattgtctttcttggcaactgcctcaagggaggccactaaccttttccataggcaatgcacagatcatcctttcagaaagagatggaaaggccaataccactgtgggtgagaatgccactgccttggaaggtggagagaccacttccactggcaaacaagactcatggagatttaagagctcaatgttcccagcctcatcagagtcttctcacacatccccatcccaacttataggatcccattctttcccaaccaatgccctctctttaacagcagacaccctgtgaggctgggagttcaacttttgctgtaatgcagctaattgcatgacaagg

SEQ ID NO: 466797 - DNA, 538 bp, Homo sapiens
attattctacacctttagtatcaatttccatatatatcccccctttcctgcttatataaattagaaaactctatcagagtatagggcacctcctcatgggtcacactctctacatcacttttaggggcctgctgggtctcaagtctagttacagggatagaagcaaagagggatggtgggcatgagtcctgaggagaatcagcattgtctttcttggcaactgcctcaagggaggccactaaccttttccataggcaatgcacagatcatcctttcagaaagagatggaaaggccaataccactgtgggtgagaatgccactgccttggaaggtggagagaccacttccactggcaaacaagactcatggagatttaagagctcaatgttcccagcctcatcagagtcttctcacacatccccatcccaacttataggatcccattctttcccaaccaatgccctctctttaacagcrgacaccctgtgaggctgggagttcaacttttgctgtaatgcagctaattgcatgacaagg

SEQ ID NO: 466798 - DNA, 579 bp, Homo sapiens
gttaaataaattatggcatacttgttactggttataagaacaagacagatttagtcactgtgctcgtggagcttgtatactaacagtaatatattatgttcatcaataatcatattttggaaataaagttaaataatatgaaaaaaacaatttccaatgaacttcaggtaagaagctacatatatagtaatttaataccaatttaaaaatttatgtatatatccttgtatatgtatgtatatgtacatatatgtgtgtgtgtatatatcaaactgttaaaagttattatctctggatattgatattacaggtgatttttatttccattttatactttttcatactttcaaaatattataataagtacatttttaatagtaagtgggattttcagattttccttattccttttctgattattttccaagtgttaatggaatatataatgagaaaaaarcatcaatcaagtcacagtatttgatatcattatgaactgagaaaccatttgaggagtggcttcctggcttagtagatttttgcttccaataaccctgtgggcctgaattaacctacttgtaa

SEQ ID NO: 466799 - DNA, 529 bp, Homo sapiens
tggtctacctataataacttctgtagtttagctaatgtatttctcagttatgagatttctgtttcatttaaaaaattatttcaatctctgttaaatttctctgayaataaatttctgaattacttttctgtcttacctttgagattactaaatttccataaaattgctattttgaattattggtccaagagttcacatatcccatctcattagggtcagtcactggttccttgctttgtttgtttggtcaatggctcccatttttgctgttgttccctgtggatgtacatgtataacattgcatggaaggattaactatttatttcagtcttctctgtctggctctttttggtttttattggatgtgtttgcttagagattcttcgtaatttagctgttgatttttttccccttctaggtcactgccccctttttagcactaaatgatgccttaaaccctggtttgccttggttctagtaagcaatcagagtggtgcccatcctgaatggggaatatcccacaggggat

SEQ ID NO: 466800 - DNA, 529 bp, Homo sapiens
tggtctacctataataacttctgtagtttagctaatgtatttctcagttatgagatttctgtttcatttaaaaaattatttcaatctctgttaaatttctctgacaataaatttctgaattacttttctgtcttacctttgagattactaaatttccataaaattgctattttgaattattggtccaagagttcacatatcccatctcattagggtcastcactggttccttgctttgtttgtttggtcaatggctcccatttttgctgttgttccctgtggatgtacatgtataacattgcatggaaggattaactatttatttcagtcttctctgtctggctctttttggtttttattggatgtgtttgcttagagattcttcgtaatttagctgttgatttttttccccttctaggtcactgccccctttttagcactaaatgatgccttaaaccctggtttgccttggttctagtaagcaatcagagtggtgcccatcctgaatggggaatatcccacaggggat

SEQ ID NO: 466801 - DNA, 626 bp, Homo sapiens
tcttctctctgtgaggacacagcaagaagatggcagtctgcaagccaggaagagagcccttaacagaacttgatcatgctgtcatcctgatcttggacatcccagcctccagaactgtaagaaataaatgtctgctgtagaagtcacccagttttgggtattttgtaatagtagccagagcttgtggacatcttgatctcagacttctagcctccagaaaagtgagaaaataaatttctgttgtttatgccacccagcccatagtagactttgttttgtcagcctcagcaaactaatacaattattaatttgttgtaatactaatacaattatttgctatgactgattaatcaacattgatataccattattaactaaaattcatagcttacattaggatcctctctgtgtgttgtatagtctatgggtctaacaaacgtataatttcatgtgcctaccattagagtatcatatagaatatttgcagtaacctgaactcctctgtgcttcacttataaattctgcttctcactcccacctgcaaacctctgccaacaactgaccttttttaccrtctgtatagttttgtctattccaggatgttatatgaaaataatatagtaggt

SEQ ID NO: 466802 - DNA, 608 bp, Homo sapiens
aaaccatggtaaagatttaagatttaattctaatgatagcaaggatccattggtggatttcaatcaggaaagtgatagtatcatttcagaacttaatagaattttcaattttattgacagataacatttaaatttaaaatttagcatctccctgaaacaaatccaagcttgttgcccattgtatatttttgaaaaggtttttcagagctctagaaagagctatatagaagcgtctatggtaccttcagaaaaaaatcattaaatataatttattggtatgcaccgagtattgtagggatgtgattaaaggcagcaaacttgwtcaaataaaataagacctgccacgaaccgtcatccaagccttgaaccaagcatttttaaaaagtgtggtttatataagcttgttcacctcaacaacatgatcatttttcttttttgtgtttttgtcatttccgcaaatcatgagaaatatatttatttcttgttcaacctaaaaataaaactttaggccacacagtgttacagttaaaggaaaaaagaggcaaatgtgttttatttaaaaatttagttgtaaggacaaaatcaaaatgcaggatagaagaatggca

SEQ ID NO: 466803 - DNA, 564 bp, Homo sapiens
ctttttcctcttgatcaaacctctgtttcttgaaagaggaaagtttaaagctatttaarctgaaagattaaattcattgtttgtaggcctgtataactttctgtccttttttttgactgctaagcgtgaaacacttcatattgtttatcaagtgaaggctaaaatgggcagtaatccatgagaacaacacatgtttttactccacagaggcagaggcattgtacccattttaaaatgcagaaaatgatgcttagagatagtaaatgtcttgctcaaggttacatgtgggaggagctgggagtaaattcaaagtcatattgttaacagctataatatgtactctttccctttgtgccattacacttttgtgatgatatgaatgcattttatgtgtctgtgtttgtggtgaaacagagcatgactgctaagtgcttaatcagtgggcaaaattaatttggctttattgttctgatagaggaataaatttgatacctttaaataggtactgcattaaaattataagaacctgcccatagttctgtctgaagtgactgcctaactctg

SEQ ID NO: 466804 - DNA, 564 bp, Homo sapiens
ctttttcctcttgatcaaacctctgtttcttgaaagaggaaagtttaaagctatttaaactgaaagattaaattcattgtttgtaggcctgtataactttctgtccttttttttgactgctaagcgtgaaacacttcatattgtttatcaagtgaaggctaaaatgggcagtaatccatgagaacaacacatgtttttactccacagaggcagaggcattgtacccattttaaaatgcagaaaatgatgcttagagatagtaaatgtcttgctcaaggttacatgtgggaggagctgggagtaaattcaaagtcatattgttaacagctataatatgtactctttccctttgtgccattacacttttgtgatgatatgaatgcattttatgtgtctgtgtttgtggtgaaacagagcatgactgctaagtgcttaatcagtgggcaaaattaatttggctttattgttctgatagaggaataaatttgatacctttaaataggtrctgcattaaaattataagaacctgcccatagttctgtctgaagtgactgcctaactctg

SEQ ID NO: 466805 - DNA, 551 bp, Homo sapiens
ctgggagcttctttcaacctgcaatcaccatgcgaactttttgacttctctctgtgttccctgtgaggaacagtgaggaacagtaaggaatggctgccctccatccgcactgggatttgggaatttgggagtgcatataatggtcttccaattgcttctcctatttttaccttccatgaccctcaagtcggttcctgcactgggttgggttcgagccttcccccttggcctggactttcaggggctggttggggtgtgtatcmcagaggcaaattctcctctcacactctgggtactagcaaccctttgcctgacttacagtgtagactgcagcctcctgcttctttcaaaggatctgtagatttttttcagttttcttgttcagttattgcattgcttcttggaaaaaaagttcacagtgtgaatctctacaggctattttgtccttccaattgggagcggtatgctagcaatgcttctaatctgccatcttggaaagacaaacagcaacaacaacgacgacaacaacaaaacaactaagcagcatcgtt

SEQ ID NO: 466806 - DNA, 562 bp, Homo sapiens
aattgggagcggtatgctagcaatgcttctaatctgccatcttggaaagacaaacarcaacaacaacgacgacaacaacaaaacaactaagcagcatcgtttcttgaaaagactattatttctgactgggcacagtggcttatgcctgcaattccagcactttgagatgctgatgtgggaggatcacttgaggtcaggagttcaagaccagcctgggcaacatagtgagaccctgtctctaattaaaaaaaaaaaaaggctgggaaaagacatttgttttctccattgaattgccttttcttctttgttaaagatcagttgtctgtatttgtggaaacctatttctgggctttctgttttcttctgtttatttgtctattacttcaccaataccacattctcttgattattgtagctttatagtaagtcttgaagttagatagtgtcaattctttaattttgttcttcttcagtattgtgttggctatctgggttttgtggcttccatataaattttagaatcagtttgttgatattgacaaaataaatgactgagattttg

SEQ ID NO: 466807 - DNA, 562 bp, Homo sapiens
aattgggagcggtatgctagcaatgcttctaatctgccatcttggaaagacaaacagcaacaacaacgacgacaacaacaaaacaactaagcagcatcgtttcttgaaaagactattatttctgactgggcacagtggcttatgcctgcaattccagcactttgagatgctgatgtgggaggatcacttgaggtcaggmgttcaagaccagcctgggcaacatagtgagaccctgtctctaattaaaaaaaaaaaaaggctgggaaaagacatttgttttctccattgaattgccttttcttctttgttaaagatcagttgtctgtatttgtggaaacctatttctgggctttctgttttcttctgtttatttgtctattacttcaccaataccacattctcttgattattgtagctttatagtaagtcttgaagttagatagtgtcaattctttaattttgttcttcttcagtattgtgttggctatctgggttttgtggcttccatataaattttagaatcagtttgttgatattgacaaaataaatgactgagattttg

SEQ ID NO: 466808 - DNA, 607 bp, Homo sapiens
tgagtgaataacctacagatttctaaagcccaggtactgagatattggaattataattggaaaggtaactgaaccttatgctgagaatatacgattacaggatcatgaaaaggctgggaaaagataaattatatctgatggtaaagttttattttgaagaaaagacaaaactaagtctttgggtggggaaattaaagggtcaggggaagtatgtgctcatggaactaaaaatggtttttgtgatgagtgtctttcatttgcttaaaagaagaatcatatcaaggataagaaatacaactggtagagaggagaaaacgtagcattatttgtaggaaatgtaattatacacctactaatccatgaaattgagaataagatattttagtaaataggtccattataaaatatataaacagaaatcaatatctttcctgtatgccaaaaaatagataataattctagtgggaataatcccatattcacaaaaatgtcaaaagcatagcatgcctatgaatagaccaarcaaaataaataagtgaaaaaatatgacaatacttaactaagatacatttagagaaaaaaatgatttgaggaaaagaaatttgcc

SEQ ID NO: 466809 - DNA, 528 bp, Homo sapiens
acgcctgcttcccctttgccttccaccatgattgwaagtatccagaggtctccccagaagcagataccaaaatcatgcttcctgtacagcctgtggaaccgtgagccaattaaacctcttttctttataaattactcagtctcatgaatttctttgtagccatgcaaggacagactaatacatttctctttgaattatttacatgagcatacaaacattctgcaatatctccttttttgccacctactattatgcagccttcagcatattacttccctgctctttgcctcaatttcctcatttgttaatgaagacaactttaatatctgcatcactgtgagtgtgtgtgtgcctgtgtgtgtgtatttgtgcataaaatgtgttagcatacataaactacttagaaatatgtctggagcttagtaagtgctatattagtacagttattaatattattgttatgtcagtattatcactattattatttttaaaaatctcccttgatctcacattctctttcattagctg

SEQ ID NO: 466810 - DNA, 611 bp, Homo sapiens
ttttcacttggatatcatatatgaatcttaatataacacctcatttcaaagctgtttccctcttccctatcacagtaagttatatttcatttgtccacttgctgagataagaaagcatgtagtaattcctgattcctctttttatcacacatttatttatcctatcagcaaatcccatkgattttaccttcaaaatatattcagaagtgaccactggtcattactcgcattattaacatcacagaccagagggtcaaaaactaacacctggatttcttcaatagcctcctaacaggtttcctgctttcattcttgctacccatacattttttcctcacacagtagtcagagtaattctattaaatatcacatcaaataatgtcacatcactgtttaaaacatcaaaagattccctatctcagagtaaaaactaaaattgttcacatggctttaccttgttttatgaatgagcaatcattctgtatccccaaaaaactacttctgtgggctaatgttcttccacagtgctttaaacttactgcatactatccatacttgcctcttcagtattgctagaacacaccaagcattctcttgcttcagggtgtttg

SEQ ID NO: 466811 - DNA, 434 bp, Homo sapiens
aaacacctcacaacaagagtactaagtgatttctgaagactttactttctctttataagaaatctgtactggtattcattcaacaaattttwatggaactcactatgtaccaaatagtgtgctaaggactggaaacaatatcacaaacaaaaacacatatggatgccttttaagggttaatgaatgagaaatccatatttaattaaataatcacaaagtattcgtgaaattataactataataattatgaaggagaaatatgtgctgggagaacagataatatgggtttcgttgcgtgaggatgttggtgaaggtttccttaaggacgtgtagattaagctggaatctacccatgtatcagatttattcctcttagtgtataatgtataggtattcactaggctaagagatttccagaagaaaaaatacttctg

SEQ ID NO: 466812 - DNA, 463 bp, Homo sapiens
agctttaaatcccttctgtatttctagttaaatgttaaccagagtctgaaaccagacactgtccttgatattcactccctcctaatattccaygaaaatgatgataaaagaaaataaatgacaacttcacatccttgtaggattattcttttcaacagctatcattttaatagaattttaaaagatagaaagataaatgcatacactcagtttgtcatgtttatacagaaatcagcacaaacttttaaaataataagctataatttattgattgagccctaattatgataaagaaattgtcaagtagaattggaactagcaactaagtgtagtaattttaataactgtttgaatgtttcctaggtgccaaatattctgctatgcattttaacatatattgcatccaatccccatagcagtgctgtatagtgatagtaatattgttttacttattcatgtttac

SEQ ID NO: 466813 - DNA, 463 bp, Homo sapiens
agctttaaatcccttctgtatttctagttaaatgttaaccagagtctgaaaccagacactgtccttgatattcactccctcctaatattccatgaaaatgatgataaaagaaaataaatgacaacttcacatccttgtaggattattcttttcaacagctatcattttaatagaattttaaaagatagaaagataaatgcatacactcagtttgtcatgtttatacagaaatcagcacaaacttttaaaataataagctataatttattgattgagccctaattatgataaagaaattgtcaagtagaattggaactagcaactaagtgtagtaattttaataactgtttgaatgtttcctaggtgccaartattctgctatgcattttaacatatattgcatccaatccccatagcagtgctgtatagtgatagtaatattgttttacttattcatgtttac

SEQ ID NO: 466814 - DNA, 550 bp, Homo sapiens
ctcctttttctgccttatcatgcactctacttaggcaggttgctaatcaggtagttttgtgactgtaagttcaaaatgattggagaaaatgacagctattcatcgaatccaaaacaggatgtaaaaatagcttcccccagtttttaaattgcaaaataaaatttgctactaagaagagtggcaatttctggctttaagatgtaaaaataattgagacttctctatttcctcaagaggtagcctgtagttttggagtgctagttgtggttgcaactctaatagaaaggaaaataatgtaaacatataatataatgcaaaaatgccttgggaaagtgcttacctgcatttagtctaatcattgttatgttatacaatacacttaaatgtagagtacartacaaggatgtaacagataccccattgtgagtcctgagaattactgtgagtttaccttaaaatatatgtttttgttttgaaaacaaaaaagttatttgaggagcactaaaatagtctctctacagcttttgttattctgaaacatgaaattgtt

SEQ ID NO: 466815 - DNA, 307 bp, Homo sapiens
gctttgctgttaaatgtggctttggctttgacatttaagtaaagagttaatatcagcatctttgagccagtactttaagtagtactgtgtgtgtgkgggtgaagccaaggctattttggattatttttgttatttatttaatatcttacttttaccatctctcttataccctaccagtcagtgaagatggtgagagctaacattatttaggagcatgcatttgagacaattatccattattgtagtaactgtttaaaagaaacacgctactcatcaatttttttcatgtaaattgaatccataattt

SEQ ID NO: 466816 - DNA, 307 bp, Homo sapiens
gctttgctgttaaatgtggctttggctttgacatttaagtaaagagttaatatcagcatctttgagccagtactttaagtagtactgtgtgtgtgtgggtgaagccaaggctattttggattatttttgttatttatttaatatcttacttttaccatctctcttataccctaccagtcagtgaagatggtgagagctaacattatttaggagcatgcatttgagacaattatccattattgtagtaactgtttawaagaaacacgctactcatcaatttttttcatgtaaattgaatccataattt

SEQ ID NO: 466817 - DNA, 633 bp, Homo sapiens
tactctgtctctctctctttgagtcatatgtttcatatttctcattttaaacttcttattagtactcttcacatcaagaaagagttggcatctagcatgttttatgcatcccaaaaatcaaaatcaaaatttattctttcattcttgatcctctctgcatatgctgttccacttgactgtttttctagttattctttctttgccttcactcccacttaccagcagaagattgcagaaatgtraggagaggcttcacaccttcctctctaagaggccacagttttgattgactgttttccattatagcttctgtatggtggcacttccatggcttcagagtcactggttttgggagatatcatcaccctgcctcttctgggctgaaaatattaataaaatatagtagaatatgctaccccaaaatatgccactttggcataaggattattttgagccaaagcttctttaaaaaaaaaaaaaaaggcagattcggccaggcgcggtggctcatgcctagaattccagcatattgggaggcctaggcaggtggatcatgaggtcaggagatggagaccatcctggttaacacagtgaaaccccgtctctactaaaaataaaaaaaaaagtaaggca

SEQ ID NO: 466818 - DNA, 563 bp, Homo sapiens
acatgatgtcttagtctgtcagtgctgctgtaacaaaacaacttagactgggtaatttacaaggaatagaaatttatttcttccagttctggaggctggaaagtccaagattaagatgccagcattgcagttgggtgagggttgctctctgcttccaaaatggcaccttacttgataaaaggcagaagggcattcttacctgataaaaggcagaagggcaagagtgagaacctttcaacctcaagacattttataagggcactaatcctattcatgagggtggagccttcatracttaaccactttccaaaggctttgccgcttaatactgttgcattgagtattgaatttcaacgaatttcaacatgaatttcagagggaacaccattattcaaatcatagcacatgggtaaaatcatgtagttctccctttttttaaaaaacaacagtctttttaaaaatgtcccatagcaaacacacaaagcctccttgaagggatgagtcacatagaacacacatttgcttcaacagatgacacgtggtttagtacctactgcattttt

SEQ ID NO: 466819 - DNA, 563 bp, Homo sapiens
acatgatgtcttagtctgtcagtgctgctgtaacaaaacaacttagactgggtaatttacaaggaatagaaatttatttcttccagttctggaggctggaaagtccaagattaagatgccagcattgcagttgggtgagggttgctctctgcttccaaaatggcaccttacttgataaaaggcagaagggcattcttacctgataaaaggcagaagggcaagagtgagaacctttcaacctcaagacattttataagggcactaatcctattcatgagggtggagccttcatgacttaaccactttccaaaggctttgcckcttaatactgttgcattgagtattgaatttcaacgaatttcaacatgaatttcagagggaacaccattattcaaatcatagcacatgggtaaaatcatgtagttctccctttttttaaaaaacaacagtctttttaaaaatgtcccatagcaaacacacaaagcctccttgaagggatgagtcacatagaacacacatttgcttcaacagatgacacgtggtttagtacctactgcattttt

SEQ ID NO: 466820 - DNA, 563 bp, Homo sapiens
acatgatgtcttagtctgtcagtgctgctgtaacaaaacaacttagactgggtaatttacaaggaatagaaatttatttcttccagttctggaggctggaaagtccaagattaagatgccagcattgcagttgggtgagggttgctctctgcttccaaaatggcaccttacttgataaaaggcagaagggcattcttacctgataaaaggcagaagggcaagagtgagaacctttcaacctcaagacattttataagggcactaatcctattcatgagggtggagccttcatgacttaaccactttccaaaggctttgccgctyaatactgttgcattgagtattgaatttcaacgaatttcaacatgaatttcagagggaacaccattattcaaatcatagcacatgggtaaaatcatgtagttctccctttttttaaaaaacaacagtctttttaaaaatgtcccatagcaaacacacaaagcctccttgaagggatgagtcacatagaacacacatttgcttcaacagatgacacgtggtttagtacctactgcattttt

SEQ ID NO: 466821 - DNA, 299 bp, Homo sapiens
cctgttctggatcattatcactagtaaagtgccaagtggagacttgtttgtatgtgggaaatgttgttatttttcaaggtcagctgctaatatgtatcatttacatgaatgtttctattagcagcctcatatcaaattaggaggataaaagtagagtgtgaattccttgccaattttttctgctaggataaactggaagaattctttatctagactyatggaccaaaaaatatttatgctattcagaacaaagtgatggcagaagaaaaaatgatgcctatttttcagcaatgttcaga

SEQ ID NO: 466822 - DNA, 595 bp, Homo sapiens
ggcagttacataagtgtttcccttccaataatttactaatgtgttaattttcattattcactttccyttatgtatagtttacaaattaaaaaaattttaaaggctttttattttattgtgaacactcttatacacgtatgcgctctcacagtaaatagtactgagaagcccactcacagtaaatagtactgagaagcccattctttcatctattaatatgcgtgcatatcacaactggctggatgagatacagaatgtggaaaaataaaacccacataatcttcaaatttaaaaatccctagagcctgttttaaaatgagaaaaccaagattcggaagattaaatgattcacataattactctccatttgacacttttgcatctcagttaaatctacgtgctttaaaagtatgcagatgaaaaacaaaaatgaaaatgtgagaggaaagaaaaatgttcttgttgatacaaacatgtaaaacacatattctattttatgttttgcataaaccctgaaaggtcacgaagacttgttctgtggcaaaagacatatctgggcagccacagagagattaaatctcttctgtatacaaac

SEQ ID NO: 466823 - DNA, 609 bp, Homo sapiens
ttcacttctgcttgtatagaacctcaaggtcagccagcggtgagaaactaaggccttctgagatcttttctgagcatgcacagaacctgacacatgtatgtagccktttagattcccaggaatgtgttgtttttcaaatctctgtacacacttctcacttctaagatttttcttttaatttttttgaccagcctcttatttactgcaactggtatgcttatctcaagcagcttttttttttgttaaataattgccactgattttgtataacaaacactctagggataagactttacttactgtgtgaagtcttaggtcaagtaaagacaaggcttgtgattggtgcttttcctaggaattgccatacaggcagtttttagaatggagcttttgtggggctccaaacctattctgtccctcctatggtttgtaggctgcagatttccccagattccgcggttgcaaggttgctgatcttcaaggctactgtggagctggacagagggagattggaatagagaaagttaaaataccacaaagctcacttttcttactgagattcaggctttttcttgaatagatgctgtttgttgcaagccttttattaaa

SEQ ID NO: 466824 - DNA, 581 bp, Homo sapiens
acgctgtttccactgcattgtgctttatcrtgtttctgtaacttgaggtaaagctgggaacaggttaagatttgggtaattagaggaatgattgttcatacttatgcacatgcagttggcaaataattttctcaaaacactgttgctttagtcagatacaacttgatgtatccatgcctgtataagtgggttcctcttcaaacaatggctattatcagaaatgtataaaaaccttagatagcatactatgaaattttctgttaagtctgcctgagttccagtccctactcaagattggcctcagtcaatcatgataatctcctttttgtagtgatttatctgggccagtcatgctaccagtttgaggtcgtgtctgttggaggagccatgagaaagacacatttccctgatgtaaagaaacaactgcatgaaatgaaaatcctttatagtcctgccctcatctttctgcttgagatgctcagttgtggtgcttgtcaatatgacggccataatcctaaccctacatcagaggatgataaaggccaatgtactaaggatgactgagtgaaaaagatcctaaa

SEQ ID NO: 466825 - DNA, 581 bp, Homo sapiens
acgctgtttccactgcattgtgctttatcatgtttctgtaacttgaggtaaagctgggaacaggttaagatttgggtaattagaggaatgattgttcatacttatgcacatgcagttggcaaataattttctcaaaacactgttgctttagtcagatacaacttgatgtatccatgcctgtataagtgggttcctcttcaaacaatggctattatcagaaatgtataaaaaccttagatagcatactatgaaattttctgttaagtctgcctgagttccagtccctactcaagattggcctcagtcaatcatgatartctcctttttgtagtgatttatctgggccagtcatgctaccagtttgaggtcgtgtctgttggaggagccatgagaaagacacatttccctgatgtaaagaaacaactgcatgaaatgaaaatcctttatagtcctgccctcatctttctgcttgagatgctcagttgtggtgcttgtcaatatgacggccataatcctaaccctacatcagaggatgataaaggccaatgtactaaggatgactgagtgaaaaagatcctaaa

SEQ ID NO: 466826 - DNA, 596 bp, Homo sapiens
  misc_feature (1)...(596): n = A,T,C or G
tgtttctggtcattacctaaaatgagtgctttacttgaaatgtgtgggtattctagttgaggcaaaaaagcctacaagttagtagtgattgtatatcttattgatgagaaaaattcaatctaattacttcttcaatctttttaaaatgttggagatttgtgtactaataatcataattagagagatatttctaatcaggtttctgttttactagatggatacttattttcaaagagtttttttttaatttcaagggcttracatataactaattttcaccagctatttccatcttcttcatttatctagagcngttacatttatatttaaaaactatgcaggtgggagttaacagcattgttgaaatttgaagttttactaattaatattttactgttttagaaaatgtgtatgacagtcatatctgtgggttccgcagattcaaccaactgtggatcaaccaactgcagattgaaaatatttttaaaaaacagtaaaaaataacacaaataaggtcagtcacaatggctcatgcctgtaatcccagtgctttgggaggccaaggcagggagattacttgagcccattagttccag

SEQ ID NO: 466827 - DNA, 462 bp, Homo sapiens
gagctctggcttagaagattttgcctgcgggataaatagtgccatacaaacccatggtgcctaacatctcttcctaaaggaatctgacttcatttgtaacagattggggaagttcacagcctaaggatgccctcgagaatgctggaggttgtgatgaaagacaactgagaaaagagtcaaatacaagtaaaagtgtatgccctctaatttgtggggatgaactggagaataagatagstggaaggtcaaaaaatatcaaacactggttttagaaacgattccctgcaaaggaagcagaatttgatcagattcacttgtaaagcaatttataccccaggacattgttgaaaacaataatcagccagcaaatagtgaagtttaacagctgggcatgggcaaggaaagacaggaagggggccctaccaaaaccattgttctcccagcgtgactggggcagaccca

SEQ ID NO: 466828 - DNA, 590 bp, Homo sapiens
cttcgtggctcaaaacaccacacatttattatcttatggttgtggagggttgggaagtccaaaatcagtcttactgggccagaatgtacaagggcgtgcattccttacagagctccaggagataatcgtgtttcattgccttttccagtttctacaggccatcgtgcattcccgcggcttgtggccccaacactcgccctctgcttcgtgtggtcgtagctctgactctgtcctcccaccatcttcttataaatacccttgtgactataggggacccatccagataatccagataaacctccccatctcarggttcgtggggattaggcatcgtggcacatctgaggggggcaatattcagccttattattcagcattaatgcactgtgccatgaagcttatctgcaggcagttaactctttgagatctagatctgagagagggaggttcaggtaagacaggtgctcccctccatctgccccaggctcctttccttgggatgagtgacaccaagcatccatttcattcacagcaccccctttcctcatcctcagggggtgccctttctctgtgggtgctgtgggacaagt

SEQ ID NO: 466829 - DNA, 604 bp, Homo sapiens
caacccacaactgcctgactatactctttggggtctcagcttctcaggtaaccatctacacacaaagtccagttggaatatttacagagagagttggtaaagtaggggggaaatggtgcctgtggggtagtgccaaaaggcagggaaatataggatggtacatttgtgggaagagttaagtctgctcctaaattccctggcattgctgtctcctagctaatgagcaagcattgtaaaggagtccatctttatgtgggaatagcatgcaggaaaccctttctctttgyaaattgctattctgccatcagacaagcagagtaagaaataatgtttctcccagcatttgaactcttttcagccccacaatcctcagtattttaggaagaaatattttagtttccttcagtggaaaggattacaaacatatgccttgaaaggtcaagattcatacaagtaaattaaaacataataatttttatatgtttctctcccagactaaagataccctttaggaaaaggaatttcctgatggattttaagaacttgaactctgtttcaaactctgatgtcagctggaacattgcttagcttattctccggatgt

SEQ ID NO: 466830 - DNA, 587 bp, Homo sapiens
gactatcaccaaactcaagatacagaaccattctatcatactaaagaatcctcaaattccctttggagtcagccgccaggcccagccccagccccagacccagacccagmccctagaactactaatttgttttctctatataattttgaatcttccagaatgtcctataaatggaatcacacagtatgtagcctttgagcctggactctttcatttagcacaatgcatttgaaattcatccacactgttgcatgtatcaagaattcggtcctttacatttctgagtattattttatagtataggtgtaccttgataaatccactagtcgaaggacatcagagttcttaccaggttgaggcttttaaaaattaagccagcataaatattttcataccaatttttttgtgaacataagtttttatttccctttataaagatatgagtgagatgctgggccataagtatatgtttaactttataagaagtggccaaactgtttccaaagtggttgtacattgtacattaccaccaatagttgctctgcattcttgccaacacttgttattattagtcttttcaattttag

SEQ ID NO: 466831 - DNA, 574 bp, Homo sapiens
ttaggtacacattgttttaatctaaacttgtttctcactttttcataccacaagattattgtgggatgaatggtagtgtcaagagaaccagactggaagttagaagacctgggtgtaggtccctcctgataagctgtgtctctcagcaagtcagtgatctctacgaaaacgagggatttgaaccatttgacttctaagtttcttccaagccaaaaacaatgattttactatttagtgaatcaatttttctagtccacaattttgctgtgctagaacagtaacctgcaaatcttcagggtctaaaacaccccaatcttatttcctttcacttgtttaccttgctggattaccytgaataaaaggacaagaaggcatatctttttaaaagtcagaggtatgtttatccaagtaaaagaatatgttcacaaaaagactaatacaaaaatgtttgcagctgctttatttataataatacgaaatggaccaggtgtccatcaacaggagaatgaataaacagtgcactgtaatcttacaatggaatactacttagcaataacaggaatgaactattgat

SEQ ID NO: 466832 - DNA, 565 bp, Homo sapiens
agcaagtaatcccgtcaaaaattgggcaaaagataagaatagacaattctcaaaagaagatgtgcraacaggcaacaaacatgaaaaaatgctcaacattactaatcagggaaacacaaaactacaatgagataccgtcttactactgcaagaatggccataattaaaaaattaaaaaatagatgttggcgtagatgtggtgaaaagggaacacttctgcactgctggtgggaatgtaaactagtacaaccactatggaaaacagtatggaagccaggcacggtggctcacgcctgtaatcccagcactttgagaggctgaggtgggtggatcacctgaggtcaggagttcgagaccagcctggccaacatggcgaaaccccatctctactaaaaatacaaaaattagccacacatggtggcttgtgcctgtagtcccagctacttgggtggctgaggcaggagaatcacttgaacctaggaggcagaggttgcagcgagccaaaattgcactactgcactctagcctgggcaagagagcgagactccatctcaaaacaaaaaaa

SEQ ID NO: 466833 - DNA, 578 bp, Homo sapiens
tgctccagccacactggcctccttgctgttccttagcgtgacaggcatgctgcgcctcagggcctttgcctgtgttccccctctscctgggagctctccccacatgtcttcacatggctcactcctcatctctttcatgtctttactcaggtatcaacttctcagggaggccttccttggccatcccatctacaactgcaatagccctaacacttctatccccttccctatttagttttcttcttagccatcaccatcagatgcatatactgtgctttgttcattgtctcccctagtagagtgtaagctccatgagggcaggaatctttgtcttttgttcaatgtggtgtccccaataactagaatagtgtgtgacacataataggtgctcattagatatatgtcgaataaatgaattagattcaatgttgtgaaatccatcctttcagttatccacccacccatcgatccatctctccattcttcaagcaggtactgagcatcctctgtggacataccaggcaggtattgcgggaaactcacacacacacacacacacacacacacacacacacaca

SEQ ID NO: 466834 - DNA, 556 bp, Homo sapiens
  misc_feature (1)...(556): n = A,T,C or G
nnnnnnnnaaaaaaagagctttaggtttggtgtcaaagcaaagcacccacagctgtctgaagctaccaatctaggcttgcataacaatcttgtgtgaccgggatgtgaaatttggggctggattaaaaaaaaaaaaaagacaagatgctccgttaaatttgaattgcagataagcaacaaataatgtatttattataagtatgtcttcccttgttaacagttcaattctgcatattttcttctacaaccttcctgtgaatattccattctacatatgtaaatttttaaaaatgggattgtatttacttttactagttgctattttcccctttccatgtcagtaaatttcaatctaactcatttatctctgctgtgatctttattatytcttttcttctactaattttgggtttgatttgctcttacttttctagttctttacatgcatcaacaggctgtttatgtgaagtgtttctcttttctgatacagaagcttatagctataaacttccctcttagtacctcttttgctgtatcccataggttttggtatgtt

SEQ ID NO: 466835 - DNA, 556 bp, Homo sapiens
  misc_feature (1)...(556): n = A,T,C or G
nnnnnnnnaaaaaaagagctttaggtttggtgtcaaagcaaagcacccacagctgtctgaagctaccaatctaggcttgcataacaatcttgtgtgaccgggatgtgaaatttggggctggattaaaaaaaaaaaaaagacaagatgctccgttaaatttgaattgcagataagcaacaaataatgtatttattataagtatgtcttcccttgttaacagttcaattctgcatattttcttctacaaccttcctgtgaatattccattctacatatgtaaatttttaaaaatgggattgtatttacttttactagttgctattttcccctttccatgtcagtaaatttcaatctaactcatttatctctgctgtgatctttattatctcttttcttctactaattttgggtttgatttgctcttacttttctagttctttasatgcatcaacaggctgtttatgtgaagtgtttctcttttctgatacagaagcttatagctataaacttccctcttagtacctcttttgctgtatcccataggttttggtatgtt

SEQ ID NO: 466836 - DNA, 577 bp, Homo sapiens
tttaaatgaagagatatgtgtatatacacacatacccgcaatatctctatgtatatgcatatataacatatgcataaattatctctggaagaatacacagcgactagagtcatggagaagagacctgggagcctcggggttggagtggaagtgagacccactgcctactttttttgttctgtttgaattttgttttttttgagacagagtstctcactgtcgcccaggctggagtgcagtggtgtgatctcggctcactgcaacctccacctcctgggttcaagcgattctcctgcctcagcctcctgagtagctgggattacaggtgcccaccaccacacctggctaatttttttgatttttagtggagatggggttccactacattggccaggctggtcttgacgtcctgaccttgtgatctgcccgcactgacctcccaaagtgctgggattacagacgtgaaccaccgcacccggcccctgtttgaattttttaactgggtgtgtgtgtatgatctttttttaaaaacaccaaagtttaataccaaaatgaaaacccactgtacacatagagg

SEQ ID NO: 466837 - DNA, 577 bp, Homo sapiens
tttaaatgaagagatatgtgtatatacacacatacccgcaatatctctatgtatatgcatatataacatatgcataaattatctctggaagaatacacagcgactagagtcatggagaagagacctgggagcctcggggttggagtggaagtgagacccactgcctactttttttgttctgtttgaattttgttttttttgagacagagtctctcactgtcgcccaggctggagtgcagtggtgtgatctcggctcactgcaacctccacctcctgggttcaagcgattctcctgcctcagcctcctgagtagctgggattacaggtgcccaccaccacacctggctaatttttttgatttttagtggagatggggttccactacattggccaggctggtcttgacgtcctgaccttgtgatctgcccgcactgrcctcccaaagtgctgggattacagacgtgaaccaccgcacccggcccctgtttgaattttttaactgggtgtgtgtgtatgatctttttttaaaaacaccaaagtttaataccaaaatgaaaacccactgtacacatagagg

SEQ ID NO: 466838 - DNA, 577 bp, Homo sapiens
tttaaatgaagagatatgtgtatatacacacatacccgcaatatctctatgtatatgcatatataacatatgcataaattatctctggaagaatacacagcgactagagtcatggagaagagacctgggagcctcggggttggagtggaagtgagacccactgcctactttttttgttctgtttgaattttgttttttttgagacagagtctctcactgtcgcccaggctggagtgcagtggtgtgatctcggctcactgcaacctccacctcctgggttcaagcgattctcctgcctcagcctcctgagtagctgggattacaggtgcccaccaccacacctggctaatttttttgatttttagtggagatggggttccactacattggccaggctggtcttgacgtcctgaccttgtgatctgcccgcactgacctcccaaagtgctgggattacagacgtgaaccaccgcacccggcccctgtttgaattttttaactgggtgtgtgtgtatgatctttttttaaaaacaccaaartttaataccaaaatgaaaacccactgtacacatagagg

SEQ ID NO: 466839 - DNA, 577 bp, Homo sapiens
tttaaatgaagagatatgtgtatatacacacatacccgcaatatctctatgtatatgcatatataacatatgcataaattatctctggaagaatacacagcgactagagtcatggagaagagacctgggagcctcggggttggagtggaagtgagacccactgcctactttttttgttctgtttgaattttgttttttttgagacagagtctctcactgtcgcccaggctggagtgcagtggtgtgatctcggctcactgcaacctccacctcctgggttcaagcgattctcctgcctcagcctcctgagtagctgggattacaggtgcccaccaccacacctggctaatttttttgatttttagtggagatggggttccactacattggccaggctggtcttgacgtcctgaccttgtgatctgcccgcactgacctcccaaagtgctgggattacagacgtgaaccaccgcacccggcccctgtttgaattttttaactgggtgtgtgtgtatgatctttttttaaaaacaccaaagyttaataccaaaatgaaaacccactgtacacatagagg

SEQ ID NO: 466840 - DNA, 685 bp, Homo sapiens
ctcaaaacaaaacattcgactagattattcatttcaggtattttataacatttatttctctgttcatgtcaactatttgctttgactaatatgtgatagtatttattatctcatttgaaactatgttgaatgttgaaaattacttcaaatcctttcctggaaggaagtagaaaaaaaaaatcctaaagaaaaataagaaatggtatttaggaaaattgcttccaagtctaagggatggcccaaagaaacagagcctagggaattctctggctgtatcagctccttcctaagaaacctgatgcactgtgctgctagatgtaacaaaagaacaaaatgagttgagctttctcttttttggatctgccataaattcaggtttttacacttaatgtcatcttggacacttaaatactgaatttcccaggttaccccaaagctccagcaaaaggaaagggggaacaatacttgcacaaygcttccatccttcacatcctgggttcacagaaaccatacaagaattgaaaccattccagaatccaacacaaaaaccatttgttaattcctagcttcaggatctgaggatgagtaaacgtatgtatacctttctaaggggtgtcagctacaccataataaaaacacagccaaaattaaacaggctcaggggttacgtttcagaatcaagact

SEQ ID NO: 466841 - DNA, 632 bp, Homo sapiens
taattgttctgggtttgaaatctatcaagtattggaaattcaaattaagccatttgtgaagttctgtttaatgagggttatcaagtcgcttcttaatggcatctgtcggactcctagccccctctgctattcatacaggcccaaggcctcccattatatgccccatgatgcagccggatgggccccctctttgatctgggcatctctgccctcatacgtggtgggcagtcccaccctcccccactgctctgggagctgttccgtcccagcycctccatgtcttatctttctcttccactttctgttttctctcctgtcctctcttcccatcatcccattgcttctgttttctgtcttccttcccagcctcctgcctcttccttctttgtcacgcattcaacctgtctctcatcaacactaaggccagcacgtgtcaccaaactgcctcccatcagaggcctctgacattctccaagtcctccttcaacatgttgcattctgacagtatgagatcctgaattataaacattacccacccactatttattaatcgcacttttatcttttggcctgaaactttgtctctcacctgctaccagctgcctccagagcatgggggttgggagctgatg

SEQ ID NO: 466842 - DNA, 632 bp, Homo sapiens
taattgttctgggtttgaaatctatcaagtattggaaattcaaattaagccatttgtgaagttctgtttaatgagggttatcaagtcgcttcttaatggcatctgtcggactcctagccccctctgctattcatacaggcccaaggcctcccattatatgccccatgatgcagccggatgggccccctctttgatctgggcatctctgccctcatacgtggtgggcagtcccaccctcccccactgctctgggagctgttccgtcccagcccctccatgtcttatctttctcttccactttctgttttctctcctgtcctctcttcccatcatcccattgcttctgttttctgtcttccttcccagcctcctgcctcttccttctttgtcacgcattcamcctgtctctcatcaacactaaggccagcacgtgtcaccaaactgcctcccatcagaggcctctgacattctccaagtcctccttcaacatgttgcattctgacagtatgagatcctgaattataaacattacccacccactatttattaatcgcacttttatcttttggcctgaaactttgtctctcacctgctaccagctgcctccagagcatgggggttgggagctgatg

SEQ ID NO: 466843 - DNA, 520 bp, Homo sapiens
ggtgaacaaccaaacaaggcagtacaatttgtgccaggcattttatacccattgtcacaaaaaacctttactacaaccatgataatggtctaatcgttttcattttatgaattatcccactgagcttcagagactttaagtaattctccaaaaaatcacgccactaaataacctgcagagaagggcttcaaatatatgtctgtctgtcttcaaagtccatggtcctttaatattatattacacccaactacatctcccacacatatcactgtcacaggatttcagaaatggatgacatcattgtagactgtgggggtcccagaatgctgaccaaataagtctagcacacaagggmtcaattatagatatgatgtgaattggtttggctattgtggacttatagagcttcaaaggggttaaattacagaagttgcaaacagacagacccttgggttgcatttaacatgcagatgtgctttgtttagcctacacaaaggctaaaagatcaggacattctact

SEQ ID NO: 466844 - DNA, 618 bp, Homo sapiens
gtaagttttctccctatgactggagcaaaggaagtatttgggggaagtggttaaagaggaggctggaagagtaggtatacattcatatatacataaattcacatattcattcaatgggagcttaaagatactgatttaggcattgggaatacaacagagaacagggcagagagaaccccaccctagtgaaacttgcattctgaagaattcagtcaaattttaaaaaattacaattgattaaccagattagtgccatgacagaagtttggctttttaaagcgttatgatagaaaccaaccagaaagctggctgtacataagatgatctagaataaccaatagttcataaacttaacatgttcttaaaaaaagagctctaggctttattctaaggaccacaggaagccacagagggcttttaagaggggcagaattgtggtatgatcaagtgtattttagagcgataactgtgactaaagtatgaagggttgattggatragggaaactttggaagcaaatagactagttgggagactcaactggtagcataggtaaagagtgtaattgaattctttgtcactcaaagggttaaatgcttgagggaatggataacctatt

SEQ ID NO: 466845 - DNA, 511 bp, Homo sapiens
gaacatggaaaagtatacagcttaaatgttcaattttatgaattcataaactgaacacatctaaacagtacctggattaagaaacagaactataccagcactttagaagctctcttcatgctcccttccagtaacttttctcaccaccccgcaaaggtagccattatcctgctttctagcaacatagattagttttgcccatttttgtactttatataaatggaattagatgatgcataaatactctttgtgtctggcttctttcactcaacattttgyttatgaaattcatcctactgttgcatgcagttgtcaactattcattttcattgttgtatattactttgtttgaacattttatttagccaatctactgtagatgggaatttgaataatttctagtttgggcccattatgaacaaaactcctataattattcttatataaaacttttggtagagataagtactcagttcctttgagtatacacttagaagtggaacttcatatg

SEQ ID NO: 466846 - DNA, 527 bp, Homo sapiens
gaaattcatcctactgttgcatgcagttgtcaactattcattttcattgttgtatattactttgtttgaacattttatttagccaatctactgtagatgggaatttgaataatttctagtttgggcccattatgaacaaaactcctataattattcttatataaaacttttggtagagataagtactcagttcctttgagtatacacttagaagtggaacttcatatgtgtagcatatgatatactattctgcataataccamaaattttttcaagtactttaccattttaccatcccatagcagtatatgcaagttccagttgttccatgctatattttgattcttgagggtgctttaattttgtcctcttcatagcataagggtacatttgtgaaaatgcttgctctcctcccttcataaaagttccatgtgcatgggtttttctttataccttcaataggaaatatgatcaaacatccttaaaatcaaagaattattggctgaaggagcccagtgccttgttac

SEQ ID NO: 466847 - DNA, 518 bp, Homo sapiens
caattacatctcatccccataaatatacattggaagttggttgcagaaaggaaagcatgaggctgcatggatatatgtgatttttagataaaggtcacttcagcacattgctccctgagggcccaggtagaagtcacctgggattgggagacaggtagccctgggtcctcgtcctagcttaactattagctaaatgtggagcatgggcaaatcactcacctgctttgactcccagtttcctcatctgtaaagtgaggaagagtgacttagatatttctaaggtccattccaacatgaacagtctagaattctagttgcctgaccctaagaactcactgacatgtgggaytgatgctggaaagaacaaaaaccacagtggtgaacctaaaataaatttggggccaggaggagaaaagctcgtcctctcctaatcccaaaccctgaatggctttgccactctttttcaaagtggaagcattctggataccaaagggggactcccaccccaggactctgaa

SEQ ID NO: 466848 - DNA, 505 bp, Homo sapiens
tgggcttgtgagatatgattgttttcaggaattctgcaaggtggtaattgaacatagccattattaaaaattgaattacataacatttcaataaattatattacaaacaaaagtaacaaatattcaaaattcactacttcctggttgtttttaccacattccactactatgtccttgagattatttccatctcttgtttctgtgtagtggaaatactctgtagtggaaatggcatcttactgtgcatctcttctcacctaatctgctgttaagattctctgtgttcaatgatgccacatgtgtagcttgcaatcagccacggtaggartatttatgccacagaaattggaaaaatgttacaaatcagggctttacctctggagagcctgttgttgaacattttctagaacaccactgagcataagccatttttccctagattctctctgttcctaaagattatttttttttgtgcttcaaaacctgccttattctcaggagtgtt

SEQ ID NO: 466849 - DNA, 597 bp, Homo sapiens
  misc_feature (1)...(597): n = A,T,C or G
gaaaatttttacaatctacccatttgacaaagggctaatatccagaatcggatgtgatttaaccacatttctttttgttcagtcttccagagagatggagtaaaaccaataagcatcaatcaattacctggagccttgaaatagcatgaactagcagtcctccaatgaatcagtgagaaaaggcattgggagatgaactataggtataattctcttacagcttattgagggaattagggaaatacaaaatgaggaaatgtgcacactgcttttattggaaaataattggttsgagtgaatttttgtacaaatggagagggggtgttatggcttttattgatgggtatgaaaatttgaacacatataataatgaaaatattctagatattctaaancaagcnaaaagacaattgcatggcaagagaaaatggtttggaagcattgaggtgtcacccacaggaggaaggagagacaagagcatggtgcttcagtgaaggcgtttctgtgtctgaattaactggggttgccatgtgtcagtctcttctgacagttggtgttttntgggttgggnnnnnnnnnnnnnnnnnnnnnnnnnnn

SEQ ID NO: 466850 - DNA, 555 bp, Homo sapiens
cttgttttctttgtcaaagatcagttggctataagtatttgagcttatttttgggttytctattctgttccattggtcttatgtgtctatttttataccaccaccaccaccacactgttttggtgactatgaccttatagtatagtttgaaatcaggtagtgtgatgcctccagatttgttcattttgcttagtcttgttttggctatgcaggttcttttttgttccatatgaattttagaattgttttttgtaattctgtgaagaatgatggtggtactttgatggggattgcattaaatttgtagattgcttttggcaatacggtcattttcacaatattgattctacccatccatgagcatgggatgtgtttccatttgtttgtgtcatctatgatttctttagaggactttcaactccttggttaagtcagttcctaagtattttatttttttttgcagctattgtaaaaggggttgagttcttgatttgattctctgcttggttgctgttggtgtataaaagagctactgatttgtgtatgttaatcttg

SEQ ID NO: 466851 - DNA, 555 bp, Homo sapiens
cttgttttctttgtcaaagatcagttggctataagtatttgagcttatttttgggttctctattctgttccattggtcttatgtgtctayttttataccaccaccaccaccacactgttttggtgactatgaccttatagtatagtttgaaatcaggtagtgtgatgcctccagatttgttcattttgcttagtcttgttttggctatgcaggttcttttttgttccatatgaattttagaattgttttttgtaattctgtgaagaatgatggtggtactttgatggggattgcattaaatttgtagattgcttttggcaatacggtcattttcacaatattgattctacccatccatgagcatgggatgtgtttccatttgtttgtgtcatctatgatttctttagaggactttcaactccttggttaagtcagttcctaagtattttatttttttttgcagctattgtaaaaggggttgagttcttgatttgattctctgcttggttgctgttggtgtataaaagagctactgatttgtgtatgttaatcttg

SEQ ID NO: 466852 - DNA, 646 bp, Homo sapiens
gataatggccttagaactttagagctgaataaatcaggcctctcaggcatggacttaaatctgtatttcaatgaactctttcaaccagaactatgccttgaactatgaccctaaatgtattctcactactgcctgacaaaactgggcctgtgaccttctccaagtatctatcatgcataggtatttcagaggcaakaagtttatgataatatttaaatttcatcagttcttgggtcatgaaaggggaacattctacctcattctctgttactattcagcatgtcttctaggtagagtttttttatttgtttgtttttcctttggtgtcctaatattcttgtcaaatcagagactgagggattaagaagagactgaggtattaagacacacatacccaagaatggaacagacaaagctggaaccagtttatcaatagatcctttgtaagaggaaaaagaaaatgactctcttctgagatcagagaatgaaaatcaaataattaagcagtgaggaagactatggttcactctacaaatattggaaattatattaagatggtatatgtataggcaacttttatgtccttagaaatgtattttgcctgtgacatccaagccagctgcagtggtgggcaaagcagcctcac

SEQ ID NO: 466853 - DNA, 646 bp, Homo sapiens
gataatggccttagaactttagagctgaataaatcaggcctctcaggcatggacttaaatctgtatttcaatgaactctttcaaccagaactatgccttgaactatgaccctaaatgtattctcactactgcctgacaaaactgggcctgtgaccttctccaagtatctatcatgcataggtatttcagaggcaataagtttatgataatatttaaatttcatcagttcttgggtcatgaaaggggaacattctacctcattctctgttactattcagcatgtcttctaggtagagtttttttatttgtttgtttytcctttggtgtcctaatattcttgtcaaatcagagactgagggattaagaagagactgaggtattaagacacacatacccaagaatggaacagacaaagctggaaccagtttatcaatagatcctttgtaagaggaaaaagaaaatgactctcttctgagatcagagaatgaaaatcaaataattaagcagtgaggaagactatggttcactctacaaatattggaaattatattaagatggtatatgtataggcaacttttatgtccttagaaatgtattttgcctgtgacatccaagccagctgcagtggtgggcaaagcagcctcac

SEQ ID NO: 466854 - DNA, 646 bp, Homo sapiens
gataatggccttagaactttagagctgaataaatcaggcctctcaggcatggacttaaatctgtatttcaatgaactctttcaaccagaactatgccttgaactatgaccctaaatgtattctcactactgcctgacaaaactgggcctgtgaccttctccaagtatctatcatgcataggtatttcagaggcaataagtttatgataatatttaaatttcatcagttcttgggtcatgaaaggggaacattctacctcattctctgttactattcagcatgtcttctaggtagagtttttttatttgtttgtttttcctttggtgtcctaatattcttgtcaaatcagagactgagggattaagaagagactgaggtattaagacacacatacccaagaatggaacagacaargctggaaccagtttatcaatagatcctttgtaagaggaaaaagaaaatgactctcttctgagatcagagaatgaaaatcaaataattaagcagtgaggaagactatggttcactctacaaatattggaaattatattaagatggtatatgtataggcaacttttatgtccttagaaatgtattttgcctgtgacatccaagccagctgcagtggtgggcaaagcagcctcac

SEQ ID NO: 466855 - DNA, 341 bp, Homo sapiens
taaaactttgtacataaagaccacattctctgacaagagtgcaatttggtgaaagtcaataacaaaatgatgaaaaaatcctcatacatttgaaaattttaaaacagtcttctaaacaaattgtgggtcaaagaacaaattgtattgcatatttaattactcagatcagcataataatgmaaataatacatatcaaaacatggcatgcagctaaaacagaacttggagagtaatttataatcttaaatgtttattttggaaaagaagaagccttaaatgtaatgagcttaagaaattagaaacagaaaaagagaatacactcaaagaaagaaagagataat

SEQ ID NO: 466856 - DNA, 341 bp, Homo sapiens
taaaactttgtacataaagaccacattctctgacaagagtgcaatttggtgaaagtcaataacaaaatgatgaaaaaatcctcatacatttgaaaattttaaaacagtcttctaaacaaattgtgggtcaaagaacaaattgtattgcatatttaattactcagatcagcataataatgaaaataatacatatcaaaacatggcatgcagctaaaacagaacttggagartaatttataatcttaaatgtttattttggaaaagaagaagccttaaatgtaatgagcttaagaaattagaaacagaaaaagagaatacactcaaagaaagaaagagataat

SEQ ID NO: 466857 - DNA, 573 bp, Homo sapiens
aaaatctataaggttggagggactctagttaatctttgggcttagaggaggaaaaaaagatagtcccatactgcatttcacatctcttaaaaatagttttagcagcttaaacctttttagttataaaacttattacactagggtttactttgaaatatagtttacaaccaaatcaagtataacatacatacactggcactttagcacaagggcaaactttaaaaacaagttattttggacctttaaaattaggccatattataaaaaacagtccacggtcttacattcagcaaattcatactaaaataytccatttttgtaagataaaggccaagaaaactttacatatgctacaagtttattacagatatttacatggctctttctcccctaggtacttaaaattttcacattatccaactccccaaagcaagcttggcaggaatgaggaggccagatcactattagaatagcttgtgcagtgctgtaatacaaaaatgtattttgaaagctattgagtgaccattaaatactgtttctataaaaaatggttttggtgtatttgttgacaga

SEQ ID NO: 466858 - DNA, 573 bp, Homo sapiens
aaaatctataaggttggagggactctagttaatctttgggcttagaggaggaaaaaaagatagtcccatactgcatttcacatctcttaaaaatagttttagcagcttaaacctttttagttataaaacttattacactagggtttactttgaaatatagtttacaaccaaatcaagtataacatacatacactggcactttagcacaagggcaaactttaaaaacaagttattttggacctttaaaattaggccatattataaaaaacagtccacggtcttacattcagcaaattcatactaaaatattccatttttgtaagataaaggccaagaaaactttacatatgctacaagtttattacagatatttacatggctctttctcccctaggtacttaaaattttcacattatccaactccccaaagcaagcttkgcaggaatgaggaggccagatcactattagaatagcttgtgcagtgctgtaatacaaaaatgtattttgaaagctattgagtgaccattaaatactgtttctataaaaaatggttttggtgtatttgttgacaga

SEQ ID NO: 466859 - DNA, 573 bp, Homo sapiens
aaaatctataaggttggagggactctagttaatctttgggcttagaggaggaaaaaaagatagtcccatactgcatttcacatctcttaaaaatagttttagcagcttaaacctttttagttataaaacttattacactagggtttactttgaaatatagtttacaaccaaatcaagtataacatacatacactggcactttagcacaagggcaaactttaaaaacaagttattttggacctttaaaattaggccatattataaaaaacagtccacggtcttacattcagcaaattcatactaaaatattccatttttgtaagataaaggccaagaaaactttacatatgctacaagtttattacagatatttacatggctctttctcccctaggtacttaaaattttcacattatccaactccccaaagcaagcttggcaggaatgakgaggccagatcactattagaatagcttgtgcagtgctgtaatacaaaaatgtattttgaaagctattgagtgaccattaaatactgtttctataaaaaatggttttggtgtatttgttgacaga

SEQ ID NO: 466860 - DNA, 573 bp, Homo sapiens
aaaatctataaggttggagggactctagttaatctttgggcttagaggaggaaaaaaagatagtcccatactgcatttcacatctcttaaaaatagttttagcagcttaaacctttttagttataaaacttattacactagggtttactttgaaatatagtttacaaccaaatcaagtataacatacatacactggcactttagcacaagggcaaactttaaaaacaagttattttggacctttaaaattaggccatattataaaaaacagtccacggtcttacattcagcaaattcatactaaaatattccatttttgtaagataaaggccaagaaaactttacatatgctacaagtttattacagatatttacatggctctttctcccctaggtacttaaaattttcacattatccaactccccaaagcaagcttggcaggaatgaggaggccagakcactattagaatagcttgtgcagtgctgtaatacaaaaatgtattttgaaagctattgagtgaccattaaatactgtttctataaaaaatggttttggtgtatttgttgacaga

SEQ ID NO: 466861 - DNA, 525 bp, Homo sapiens
ctatgacattcactcttatctaggggctgtttataaattacatatcagggactacctgtattaacaataaccttatcacactcccaaactccaaagaaaactaacatctaaatgcattcccttaargaagcagcacaaatgactatagtgtgtcacccttttcttctgtagagtctgagaatttgcttggaatcaacctgatatgaatggaatttctcacaggagttccacaaagactcaatcagtctccctctctctcaacctctctctttccctaagacctagatgaaaacaaggcttgaaatcagatattgggctgctcttcctgatgtagagagggaatattattataagtataaaactgcttataaaattcttacagtaattggaaagaaattggaaacattaacagctaaatcccagttcagctcacacttcattaaataaaatatccctcaaacgtgataatcattcgaagaggacctgactcagcacagttgagcagaagcaaattgaaggccagtg

SEQ ID NO: 466862 - DNA, 525 bp, Homo sapiens
ctatgacattcactcttatctaggggctgtttataaattacatatcagggactacctgtattaacaataaccttatcacactcccaaactccaaagaaaactaacatctaaatgcattcccttaaagaagcagcacaaatgrctatagtgtgtcacccttttcttctgtagagtctgagaatttgcttggaatcaacctgatatgaatggaatttctcacaggagttccacaaagactcaatcagtctccctctctctcaacctctctctttccctaagacctagatgaaaacaaggcttgaaatcagatattgggctgctcttcctgatgtagagagggaatattattataagtataaaactgcttataaaattcttacagtaattggaaagaaattggaaacattaacagctaaatcccagttcagctcacacttcattaaataaaatatccctcaaacgtgataatcattcgaagaggacctgactcagcacagttgagcagaagcaaattgaaggccagtg

SEQ ID NO: 466863 - DNA, 560 bp, Homo sapiens
ctttttgtagaagtggggcttcaccatattgctcaggtgggtctcaaactcctgagctcagatgatccacccgcctcagcctccaaactgtgggaataagatragccaccatgcccagttcctaaggttttccgtgtgtgtgtgtgtgtgtttgcaaatggaaaaaataatgagaaatgcacagaaaagtaacagaaacaaatggacaaaaatcatgaacaggcattttacataggtcaccacacaaaaaaagatatttattaataacttcattgtaatcagtgacatcaacatcaaaaccactgtaattttctgtctaattcttgttacattggcaacattaagattttacaataccaagtgttagacgtagtggaaatctgtagaatctcttatatattaccaattggagagttagttatctatcactgaaacagtttggcattattttttaagttgattattctcatgttttatgacacagaaaatttatttctaggaatgtctaggagagtctcttgcacttatacaatcaaacacaggttcggaaatgttgtatc

SEQ ID NO: 466864 - DNA, 583 bp, Homo sapiens
tttagccttttcaggttggctttcttcacttagtgatgtgaatctaaggttactccatatctatcatggcttgataacttaaatcattttagtactgaatactattccattgtctggaggtacctgagtttgtttatctcttcacctcctaaaggacatcttgtttgtttgcaagttcatacarttatgaataaatgtgctatacatgggtgtgcaggtttttgtgtgggcatatgctttcaacgcatttaggtaaataataagcaatccatgactactggatcttgcggaaacagtatatttagtttctttacaaactttcaaaatgtattccaaagtagctaaacaattttgtattcccaccagcagtgaatgagaattcctattgttccacattttcaccaacatgtgatgtcgttacagctccaggttttgggcattcaaataggtgtatagtgatatctcattgttgttttaatttgcatttccctgatgacatatgatgctgagcatctttttatagtgatatgccatctgtatatcttctttggtgagatatctgtttagatcttttatacatttt

SEQ ID NO: 466865 - DNA, 583 bp, Homo sapiens
tttagccttttcaggttggctttcttcacttagtgatgtgaatctaaggttactccatatctatcatggcttgataacttaaatcattttagtactgaatactattccattgtctggaggtacctgagtttgtttatctcttcacctcctaaaggacatcttgtttgtttgcaagttcatacaattatgaataaatgtgctatacatgggtgtgcaggtttttgtgtgggcatatgctttcaacgcatttaggtaaataataagcaatccatgactactggatcttgcggaaacagtatatttagtttctttacaaactttcaaaatgtattccaaagtagctaaacaattttgtattccyaccagcagtgaatgagaattcctattgttccacattttcaccaacatgtgatgtcgttacagctccaggttttgggcattcaaataggtgtatagtgatatctcattgttgttttaatttgcatttccctgatgacatatgatgctgagcatctttttatagtgatatgccatctgtatatcttctttggtgagatatctgtttagatcttttatacatttt

SEQ ID NO: 466866 - DNA, 530 bp, Homo sapiens
gactgacaacctgtgacacctggcacagcatctctttgaattgggctaagggtggagaactttcctattgtccagtggatagacaatattactttctctggttattcctaaagttgaccgtgaagagaatggccaagttattgtgtgccatgtgagaaacgggtagaaaaatatggcaataaaaatggaaagggagaggtttttctgcctcacattgagctgtttcattttcccggtcagagcatctgggaatatggcttccttttggcgaaacccagtaatgtaygtttttatattgaccattttccttaacctttttaagccacttagttgctgtgaagtcaattcttcctaacttttgatatttggaatatgaaaagaaacaatttttttgtagggatataggtcagaaacaccttcatttcactttcataagaaattcacaggtaaaattggatttaaaagctggtcaacgactgttaagaaacataccaatgttatgatagtttaaaaaaatcatttcaaaaggc

SEQ ID NO: 466867 - DNA, 479 bp, Homo sapiens
aaacaagaagggagggagggaggggaagggaggggaggggaggggagggaaggatttagtgtctggcttgtttgataaactgaaagatgttmcctatggttaagaaaagtacttgacggaggcagtacaagatgagatctcagaagtaatggaagaggtcagatcttgtaggtactttaaggcctatatatatatatatatatatatatatatatatatatattctgattttcctttgagtgatgtgggaagacattggatggttttgagcaaagatataacacgagctggcttatattttaataagatcacagtggctgcaattttgagaggaaatggaaaacaaggcagaagaaagacaatagagacagttatttcaataacccacatgagaaagattgttagcttgttgtaaagtgaaaggtggtctaattctgaattttgaagagaagccagagaatttcctgatggttttgaga

SEQ ID NO: 466868 - DNA, 543 bp, Homo sapiens
agtcaaaacatctgagtctgcctaggaaaaaatgaacaggaaaataaataattattaactgtttaaaacaaaatcagaaaagtcattcaagaaaaaaattaaacatcataactaagttgtacagatctgaatacttgcttagttatagtaatgtaatcacagaatattgatttaatacaaatcataatataattgtattgggaacactatcagaagtaagtatgtatagaggatggtgatgggagaaggttcttaagtatctaaaactgaaaattcactaaatggtagcctaagcatagtatttagaaatatggatggaaccatctgaagacataggcaacaatagtaagtttttacttgtggggtgcctgaattgggagtagggagagctagacaagrcctctatttttgcttacatgtcaatgggtatctattttaaatagtgttctagtaccaataaaaattgaatgagaagtagaaaaaatcaatttctcttctacaaacagcagtaacctagatggtacaataatattaatgatacta

SEQ ID NO: 466869 - DNA, 631 bp, Homo sapiens
acattaaataaaaaaggttcaactagttggttccctttgcctggagcactcttccttcagatattagactggctagtggtgtccccagcatcaggccccggctaagatattcctttctcagtgagctatttcctcaacatcccacaggcacatataatctttatcctccttccgtcttctgctttcttacataggtttcataaagctgtgatataagttttacttttagttgtttgtttttcattgtctttgtgttccgtttagaatataaaccatatgaaggcagggttttttcatctgttatatcactgctatattcccaaaacttaagagtagyatctggaacacagtgactcaatagatacactccatagatacaccatatgtttgaataaacgaaaagtgccttttaataaattaagagatggaagaaaaacagaatagtgtaagcatttatgttttctcaaattaatttatagatgtaaaaagacatataacacctcttcacagggatttttattagagcttggcaaaataatttttaaattcaatgtaatcaggaagcattgtagtacaggtagtaggggtatcagagtgtagcggctattatcattaaattattcaaataaag

SEQ ID NO: 466870 - DNA, 647 bp, Homo sapiens
tttttcagcttcccaaactgaactytagacccttgaaataccaactcttattccccccttccctcagtctctatgaatttgactactctagttatctcatgtaagtggaatcatacagtatttgtctttttgtgactggcttcttttacttagcataatgcagaatttcttttcttctgaaggctgagtaagattctattatatagatattttacatttcatctatccattcatctatcaatgaacattggatacatctcattttaaagggatctttcctccactgaccctaccttacattcccacacagcataacatttgaaaagattctgaaggcaattagggagagtgcacttcatgaattagcaaaatgagagaagagagaagaacattatttaatttgtcctgattcctgcgtgctgacgaaaacccgtagctgaagtataagtcaaaaatgtcttgggcttgggattttctccaaatctcagttttcatagacacaagagcccccccctttctttctgttaacacaacctctaaaaaataatgaacaggttttcaaactgtataagatttagcttgtcaataatataataaaaagagggattgtgtatgaaaacctctagcacactggttagtgacataga

SEQ ID NO: 466871 - DNA, 636 bp, Homo sapiens
tcggttttctttgtttataaatagaaacaggaagacctaggttataaggctgaatgcctggctgtggaagcaggtccttctttttctgccatgttattttcttcccataaagacygttggttcttgggaaatttgcttcttggtgagccacatgaaaactcaaattgataatgaggaatttgcattttcactagctcacgggagactgtcagccagagagagaacattcccagtttgccatttttcaggccagcatgtggtctgccactagtgaatcacagatcatgagtacaattcctctcaacagctgcatttgctgcagtggaagtttgtggaaacaccacatttggcaaagagtaattctacataaagttccctggtactgagaccagattttttttccctgcacctctcttcaaaatgtctcatattagtttagaaaatcaagtagtgaaacagcttctaatggcattcccataacctgtcagcagccccaaagtcaagttataagagccactcgcagagcccttgtagacttgtttagagaattcctttcctttgtactacagcagagacctaataatacccatttaggtaaaatgcttcaccagttcaatatcctgcctggatattgct

SEQ ID NO: 466872 - DNA, 636 bp, Homo sapiens
tcggttttctttgtttataaatagaaacaggaagacctaggttataaggctgaatgcctggctgtggaagcaggtccttctttttctgccatgttattttcttcccataaagaccgttggttcttgggaaatttgcttcttggtgagccacatgaaaactcaaattgataaygaggaatttgcattttcactagctcacgggagactgtcagccagagagagaacattcccagtttgccatttttcaggccagcatgtggtctgccactagtgaatcacagatcatgagtacaattcctctcaacagctgcatttgctgcagtggaagtttgtggaaacaccacatttggcaaagagtaattctacataaagttccctggtactgagaccagattttttttccctgcacctctcttcaaaatgtctcatattagtttagaaaatcaagtagtgaaacagcttctaatggcattcccataacctgtcagcagccccaaagtcaagttataagagccactcgcagagcccttgtagacttgtttagagaattcctttcctttgtactacagcagagacctaataatacccatttaggtaaaatgcttcaccagttcaatatcctgcctggatattgct

SEQ ID NO: 466873 - DNA, 615 bp, Homo sapiens
cattccagcctgggtgacagaacaagaccctgtcttaaaaaaaaaaaaaatatatatatatatatatatatatakatagatagatagatagatagatagatatagatatatatgtatatacacacacacatacacacattcactgtggcattttagtaacaatgaaaaactgaaaacaacctaatgccaaattatgacacatctgtaattagaaatgttataaagctataaacatgtttccaataattttaatgacatgggaacatgttaagtgaaaagattagtatgtaaagttttatatagattgtatgattataattttgtaaaaaggaaacaaacgtgcgtgatatataagtatataggcagaggaaaaaaggctaaccataaataaacagtagtgattactgaattataaatctgtggataatttatttttcactgagatttaaattttttaccaaaagagactgcttgcaaagaggtcatctttttgttttaatttttgtacttaaaacagctttaaaaattacgtgtggccaattttatctcagaatatttgcattttttacagtagattttggatataataattttaggtgctcttttttcatagaa

SEQ ID NO: 466874 - DNA, 577 bp, Homo sapiens
tcaaagatttttcatctttatatagtcaaaacctcctatcttttatcaatcttttcatttatatgtctctggatctttttcacttatgttttctgcctgagaatgtcttkgccacccccaagacactacaaaaatagtctatattttattctcttactggtatagctttatttttacagtgagcaatctaattgccctggaagttacttttgaatgtagtgcataattcaaatagaaattttcccaaatggcagctgacacaaccaatccttttttcattaatttgaaaatgtcttctttatcatatactaaattgctaaaatctgggatttttaattctccttaactaatctgttaccaccctgttttaatgacttcaactttgtgatatgtttgatatctgtatgacatcttctttcattgtacttcttcaaaatttttattagctattattgtacaatttttcttcataaattttgtgtacgtattttttctatttttcattttttgaagattgtataattttattttttattcattaatttttaaaatgcataatgacacaataattttacat

SEQ ID NO: 466875 - DNA, 581 bp, Homo sapiens
tattaatgtttgatctttgtattttctagtctcattaaaagtaagggcaaaaactacaattacttttgcaccaacctaatataaagcaaacattaatagaccaagggggaaatgaagacagcaatgaaataatagtagaaaactttaacaccccactttcaccaatggacagatcatccagacaaaatatcaacaaagaaacactggacttgaactgcactgtagaccaaatagagcaaacagacatttacggaacattccatccaacagctacacagttcacattcttctcaactgcacatggaacattctccaggagattatacattaggccacaaagcaagtcttaactaacttttttaaaatgaagtatttttttcctgccaataatggaataaaactataaatcaacaacaggaggaacaactgtacaaatacatggaaattaaagaacatgcccctmaacaaacaatgggtcaatgaagaaattaaaggagaagttaaaaaatttcttgaaacaaatgaaaatggaaacataacatgccaaaacttatgggatacagcaaaagtagtccttaaag

SEQ ID NO: 466876 - DNA, 583 bp, Homo sapiens
ggctcaaacacatctttatttatcaaaataggaaccattacaatcaacacatttttgccaatgaaaaataagtttattcatgtagcttaaaaatccatgcttcaggatttgacaaactcttggaaagcattttctgcatcctgttgcttgtggaagcattttgcctacaaaaagttgttgagatgcttgaagaagtggtagtcggttggcaagaggtcaggtgaatatggtggatgaggcaaaacttcttagtccaattcactcaacttttgaagcgttggttgtgggacatgcagtcacgtgttgtcgtgaagaattgggccctttctgtagaccaatgcgggctgcaggcattgcagtttttggtgcgtctcattgatttgctgagtatacttctcagatgtaatgktttcactgggattcagaaagctgtagtggatcagacgggcagcagaccaccaaacagcgaccgttttttggtgcaagtttggctttgggaagtgctttgaagcttcttctgggtcaaccactgatctggtcattgccagttgtcatatacaacccacttttcatcgcatgtcac

SEQ ID NO: 466877 - DNA, 632 bp, Homo sapiens
tgttggcaaatcttggatttctgggcactaggtgattttccaggactagcagcctataaatgccaagtcacaggttatcccagtcttttctccttgatccacttttaaaataaagaaaaatataaatcattcccctctttactgtgaatttgactgttcaatcttaagtatattttcctttgaccattaagagcaagtaaaacattttattaaaaacacacaaaatacagaatgtacaggatatattaatataacataagaaggcactttatatttaggttgggaaaaaggaatgtatttttttattttttgasgctagtaattggggctaagccaaaaatgtgtgaagtctcaatgatttgtaaatgctgacttggaatatattgaattcttttcattttctgctagcttataagggttaggattatattactcccctaccaaaaaaaagaaaaaaaaaagctacaagtttctctattggatggaactgaaatttctcagcctgtctttcaaaacccttcacaacccacctccaaacatgttttcaatttcatctccttttattcccttctatgcaccctcccctctagccccccagtggttcacattactcccctgggcaccctacattt

SEQ ID NO: 466878 - DNA, 598 bp, Homo sapiens
ttctagtatgttactcttggctatgcttactctttcagtgtcagagaagctcaataaatacattggagaacaaaacaacatttgcactgaaagaagtagcatgctgtcataggaagatttttggacatagaggtagaagatctctctagatgaaacccacctccactacttacttgctaagtgatgttgggcaaatcacttaacctttcttattttaataacagttttattaagatataatttatataccataaaattcacccttttaaaatacaaaatttgtgagttttagtatatccaaagagatgtgcaatcatcactactatcctagaacattttgatcacccataaaagaaaccttatacccagtagcagtcactcccctctccctctttccctcagcccctggaaactacacatatgctgtctctatggattgcctatcctggaaagttcatataaatggastcatccaatatgtggcctcttgtgacaggcgtcttttacttagcataatgttttcaaggttcctctgtgttgtggcatgtgcagtacttcattgcattttgggctgagtaaaattctattgcattgattt

SEQ ID NO: 466879 - DNA, 549 bp, Homo sapiens
tgtgttaaccttaaactgcatatttggtgtcagtggcagatccttcactgatgctactcatacctctgcttggctctaacagttgtgaactcttgccttttcttcatctttctctttttaaaaactttttatgtagggataattttgacccataagaaattgcaaaaatagtgcaccattcccatgtacccttcacccagcttaccctaatgataacatcttacatcatgttagcatattaacatttcattgcatgaaatgttaccaaaaatatctatacatgggatacaatgttactgaactttaaycttttttttacctgataccagccccctccctcaaaataatttaggccagcatttctcatagagttcttcaaaatacttattaaatactactggtggttaagaaggaagaaggagatattctaaggccagttacattgaggaaaggctaggtggtatttttttattacagaatttctcacaatgttaatatgtgttctactatgttaatgtgtgttgtgaaactctaagaggaaaatatatg

SEQ ID NO: 466880 - DNA, 635 bp, Homo sapiens
gggactttgaaaagaatgtggattttttttctctgaataatttttacttcaaaaaatatatttgtctctggatagattttgtgaatttgatggacagccaaaccactttaatatgtttaatattttgatttgaaattatgacactttaattaattataataatcattgtttttcttcattattttgattaatactatgttaaatgtcattaaactgctctgtggattgaaaccattcactacagtgggaacacagatcawtgctgaccttatgagaaatggacaagtggaagtaataagcagaaaccatactgaggtaggtgaaaggataagagaaaacaagaacttccattttcttttttcatctagagagtcactttgtttcttttacttttattatattgagacttacatttcttcttttgcctcaacttatgcaaatgtaataacggcttattaaaaaagtttaatggagaaagaaaaatgatgacttgaaaattatgggaaataataatacagattctttgcattaccagattctttacatttttatttccctgttgaggtactaaactcaagatgaaatagggagtaattcagaagcaataagacaaccctggcaaagaaaaatactaa

SEQ ID NO: 466881 - DNA, 553 bp, Homo sapiens
aaaaacaccacttttttcttttctttctttttttttttgtaayggacaatttctaagatagaaaattcagggatagtgatttccaattgaacttctaactgtgctcatggggcagtcccatagcctaccaacgttcatctttatggaagaggagcctgagcatgcaagatggtcacatctctcacagtgcttttgggaggtcatgaatggaaattaaaagctattatctcaaatatgaaatggcatcaaaatcctaaactatgcagtcctaactgcagggccagtcagcacctgcttcaccataaaacaaaaaggcaaaccatcatctctttttatttttactgcctgccctccacgttaatgtgctacatgtgcttgcctttgcttagctagcagtggaaaaccacttcccctctctgtggccctgaaaatgacaaccacatgttgttccagtcttttctctcagttttattttccaggtcttaactcatgattgccctctgggtttctgtaatggtaagggaatgttttcaattgaaacaagagttcctcc

SEQ ID NO: 466882 - DNA, 581 bp, Homo sapiens
aaatggttttataaataaatttttttattcacaaatactatgtgttcaatactgatgttaggtacacttgtaacaattccatcctgtttcacctgcctgaagtacaaaaacaagctcacattcttctctctacagttattactgcatcacatgcacaagtgtaagaaagatttatacaatgcaattaaatgaaaaaacattctttctcacttttcygtccctacttccaatctacggaagcaacttgtttttcgttttgtttcttttcttttgccatttattataaaccatgtaaatctacataatgtaccaaaatccttattgatttaccaatttagactatagcttttgacttcatgttctaactatagtttatttatatcactttccacctctcctcttttctcccgtattttgttggatattgctgcagctgtttttataactattacccattctgtatttctttgttttccttattaacagaggcaatgtgtccagctataaacacattctaaggctccatatgaaatatcagaaactctgagagatcttccacttcctaattcagataatacccc

SEQ ID NO: 466883 - DNA, 634 bp, Homo sapiens
aaccatgtaaatctacataatgtaccaaaatccttattgatttaccaatttagactatagcttttgacttcatgttctaactatagtttatttatatcactttccacctctcctcttttctcccgtattttgttggatattgctgcagctgtttttataactattacccattctgtatttctttgttttccttattaacagaggcaatgtgtccagctataaacacattctaaggctccatatgaaatatcagaaactctgagagatcttccacttcctaattcagataatacccctcctacttgatgaaatgtggaggcaatgcttgcaggtacaaccgtcatgttatagccrtgagttgacaaatataacagtgacatggtaaaaataatagagcagaaaaagagtgcccagctcccaggcacatcattagaaagctggcctgctctaactgcctccatctagatcttttgtaggtggagaagacaaacccctttagtttaagctactgctaataaggctgtttgttagctgtagctgaatgcattcctaacagaaatagttatattattttcattcttcattggttcttcactgataactttataagtataataaaataatacactgtagg

SEQ ID NO: 466884 - DNA, 549 bp, Homo sapiens
ctgctttgcaattgtaatgcccttcatgtaaaggtttgttcatatttaacagagactaggctgtgtatgagtgraagtttggaaattttgctgtaattctggcttgggattgggcacaaagaaaatcatttactcatgtgaagccaatttgcctcatctgtaaaatgactttgatagaaactgatcaatataagagcaaatgatggtaataattataatgccaactatagctaaatatattgagggttgactcttgctagtcactattctgaacactttatgtgggttaactaatttgctcctccaacaaagctgcaatgggagtactgtttattatttccattttacagatgaggaaactggaacacagatgatctgagttacccagagttagcactgctagcaagtggtaaagctagtattttaactcaggcctactcaaatgattgaacagtgctttcacatatgtactgttttacaaatgctgaattaaaatttgcttcagaactctagaaggcagtattaactaaacagaaggtttggcttgca

SEQ ID NO: 466885 - DNA, 604 bp, Homo sapiens
tcttttgtttatgtctatgacataataccaaaaaataaaaacacaataaaatctctttttgactctgcttgctaactcattctcttttatttatatttttgtgctatggcttctagaaacccaaatccattgtatatgagcttttttacctcctttgtacctccacacatgttttatggtccattatgccccaacagaacgaggctttcccattgagcttttatttcccctgtggcccatgaggaccagcaacacattctctcccatattatatatcagggttcakattttctgcttggtgtatttctacactgccaattccagattattaagtcctagaagactatcatcttccttttctgattcttcttataattggcctcctgggccctcgctgatgtccactataagactcacctttaccctttctgtccaggccccttcctttatcttctgcaacttcagtgttcatgtggatgacaaatccacttttatgtaaaaatattctcatttatcacttcttgaactaataataataatactcaattgaatctacaactccttttagctattatccctttgcccttttttcattaataaggac

SEQ ID NO: 466886 - DNA, 509 bp, Homo sapiens
aatcaatcagaagatttgaggtcaagaaaccccaataaatacaaatatatagctcttttagttactttacttcatctgtttttctatacatctgtcactctgctgtcaaaatcaacactgctcacctttctcccccgacaaaaaatgtgtgactttaaatcagctctccatgtgattcttactcgtggaaatgacaaaaaagcttgggactgaccaatgctcctgctgtaaaatattcaaaataacagaaatacaaaatgttttaaattatttaaaggcatagaaagcacttgaagcactaaaacttaaggaaacacaacccaaaagaagggagatgtcaaggagaagagaatttacattgtgaagctgtattatattatgtgcgtgtatgcacacacacacatgcaggaacacatgyacatgcatgctagttttggagtaagggcaaaagactaaagatgcaaggaaaagacatagcacatggcaactattaaaatataaggtacctg

SEQ ID NO: 466887 - DNA, 509 bp, Homo sapiens
aatcaatcagaagatttgaggtcaagaaaccccaataaatacaaatatatagctcttttagttactttacttcatctgtttttctatacatctgtcactctgctgtcaaaatcaacactgctcacctttctcccccgacaaaaaatgtgtgactttaaatcagctctccatgtgattcttactcgtggaaatgacaaaaaagcttgggactgaccaatgctcctgctgtaaaatattcaaaataacagaaatacaaaatgttttaaattatttaaaggcatagaaagcacttgaagcactaaaacttaaggaaacacaacccaaaagaagggagatgtcaaggagaagagaatttacattgtgaagctgtattatattatgtgcgtgtatgcacacacacacatgcaggaacacatgcacatgcatgctagttttggagtaagggcaaaaractaaagatgcaaggaaaagacatagcacatggcaactattaaaatataaggtacctg

SEQ ID NO: 466888 - DNA, 583 bp, Homo sapiens
tttgtgtttttctacattttatttaactttcaatatgctataaaaaccccgacagatgatagatattaacttctatcaacargaattcttcacatggaaataagtggctaatcagaacaacaatttgtatgtattactaccatcacaagtgaaactgtaggtattttagttgacaagtttgacctactggattctaagattaaaagtgaaatgaggtcaaaaatacattgtgctaaagagcaccatatatagaacattatctccagtacttcattttacaaataataaaagaggctcagaaattttaaggttttgtttatagtaagaaagttagtgccttagagagctctaggctagacttcattcacctgcatgtttgcctagcggtttttcatttttcatgctctctcaagtatacagagatcaaagctaaataaagaagcaaaaaggactgtaacttacagtgtctcataaattatgtttatatttgagaaagaataggtaagttaaaatatagatgcaaacaatttcataaagctatcttttctctaactttacagaataacaaaatcactgaatgata

SEQ ID NO: 466889 - DNA, 583 bp, Homo sapiens
tttgtgtttttctacattttatttaactttcaatatgctataaaaaccccgacagatgatagatattaacttctatcaacaagaattcttcacatggaaataagtggctaatcagaacaacaatttgtatgtattactaccatcacaagtgaaactgtaggtattttagttgacaagtttgacctactggattctaagattaaaagtgaaatgaggtcaaaaatacrttgtgctaaagagcaccatatatagaacattatctccagtacttcattttacaaataataaaagaggctcagaaattttaaggttttgtttatagtaagaaagttagtgccttagagagctctaggctagacttcattcacctgcatgtttgcctagcggtttttcatttttcatgctctctcaagtatacagagatcaaagctaaataaagaagcaaaaaggactgtaacttacagtgtctcataaattatgtttatatttgagaaagaataggtaagttaaaatatagatgcaaacaatttcataaagctatcttttctctaactttacagaataacaaaatcactgaatgata

SEQ ID NO: 466890 - DNA, 632 bp, Homo sapiens
tgtatatttatcatgaaatgtatcatgaataaagatagtttctattatttgagaagattagctgaaagagtattcagatgtattcaaattaccctgatattattgaaggtgcataacctggctactgtaacacatagcccacgatcttgtggattagcacaataaaacattgttttttgctcacctcaaagtgcagtgtggctcggagatctttgaygtttgcattcatttgaagactcaggttccttccacagaaggctccaggggcatctgcatcactgaggtggtaaatggggaaggaaagagagagtggagaagacgtaggtacttttaactctcttcattatcttcacctgaacatgacaatccactttctcccacttttcattgggagcagtaatcacatagcagcacttggatgcaataaagctgaccagtatggtttagctatttgtccttgaagaaaaacataaaataagtaagggtttaatgaacatatagcattgtctctactactatgttttgttttgttttgtcaaatgtacattacactcttattcctaccaaggccatattataatgtttgttacttttgtaaaaactaagttttcattaacatttagaaaatttta

SEQ ID NO: 466891 - DNA, 632 bp, Homo sapiens
tgtatatttatcatgaaatgtatcatgaataaagatagtttctattatttgagaagattagctgaaagagtattcagatgtattcaaattaccctgatattattgaaggtgcataacctggctactgtaacacatagcccacgatcttgtggattagcacaataaaacattgttttttgctcacctcaaagtgcagtgtggctcggagatctttgacgtttgcattcatttgaagactcaggttccttccacagaaggctccaggggcatctgcatcactgaggtggtaaatggggaaggaaagagagagtggagaagacgtaggtacttttaactctcttcattatcttcacctgaacatgacaatccactttctcccacttttcattgggagcagtaatcacatagcagcacttggatgcaataaagctgaccartatggtttagctatttgtccttgaagaaaaacataaaataagtaagggtttaatgaacatatagcattgtctctactactatgttttgttttgttttgtcaaatgtacattacactcttattcctaccaaggccatattataatgtttgttacttttgtaaaaactaagttttcattaacatttagaaaatttta

SEQ ID NO: 466892 - DNA, 632 bp, Homo sapiens
tgtatatttatcatgaaatgtatcatgaataaagatagtttctattatttgagaagattagctgaaagagtattcagatgtattcaaattaccctgatattattgaaggtgcataacctggctactgtaacacatagcccacgatcttgtggattagcacaataaaacattgttttttgctcacctcaaagtgcagtgtggctcggagatctttgacgtttgcattcatttgaagactcaggttccttccacagaaggctccaggggcatctgcatcactgaggtggtaaatggggaaggaaagagagagtggagaagacgtaggtacttttaactctcttcattatcttcacctgaacatgacaatccactttctcccacttttcattgggagcagtaatcacatagcagcacttggatgcaataaagctgaccagtatggtttagctatttgtccttgaagaaaaacataaaataagtaagggtttaatgaacatatagcattgtctctactactatgttttgttttgttttgtcaaatgtacattacrctcttattcctaccaaggccatattataatgtttgttacttttgtaaaaactaagttttcattaacatttagaaaatttta

SEQ ID NO: 466893 - DNA, 686 bp, Homo sapiens
ccatattataatgtttgttacttttgtaaaaactaagttttcattaacatttagaaaattttaccttcaggggatgcttcctttatgcaaactgttaaaaaatatattttataactgcattggtaggaaggtaaatatgttaataacatataataaaatttgacctaagaatctatttcctctttggatgttaacataaaaacatttgtgtgggaccctaaaagtattgtgggccctaggcctcataactactttacctaatgaataaagtgactctgcttcccacaagtgaaatcctatcacttgccctaagagagatgacccaaagcaccgtacaggcactgcatcaaagttaaggtccagaagcttccagtgatctgcagtcccctccatcaagtataaatatgattgttcttgtgtgaaaaacgataaaayaaagggattagttgtacacattacacaatatacaaagttgaaccaggggaaaaaatattctccacgaaatctctcacttgtaaaaagtaagcaagccaacccaaatgcgcatcgatgatagactgaataaagaaaatatggtacatatataccatggagaaaaggaacaagatcgtgtcatttgcagagacatagatgaagctggaagccattatcctcagcaagctaacataagaacagaaaaacaatgt

SEQ ID NO: 466894 - DNA, 590 bp, Homo sapiens
gggcctacggggccaatggacttgatatctaaatctcaatgtaacattttcctctacaaataaataaagcaagtattcaggttagctaagacatacagaaatattggtcagcaagtctgcacatggtaaaatttatataaacagtgtagacaaaaaatatggaggttttgtaggcataaaaagatttagaagatatatgctttaaagattaatagaattttgctagttagtaatagaaaggaggtaatataatcaaggacattcttattgcctccccaatattcattcaaccccaggttattagtttaaaccagtcatgattttcatttctctctgttaataattggcttagaaaagagaattagtctcagttacggccagagacaaatgaagggaaatctattggtggtgtgaggttggagctagctttgggtaagggtacttgtctctaacacaaagtcataggaaaagctcgttcatcrccttactttcaacaattgtatgtctagatgtgatgcccagaacaactgaagctatcttagtaccagcttaaagagtcaaagccaagacatgtagggtggaaacacaga

SEQ ID NO: 466895 - DNA, 560 bp, Homo sapiens
gtggaagggtttttaactttgttattaatttacaattttaatgcattatgataaaaatgctgtttggactatttatatgattttaaatttattgcatgtttctttgtcatctaaattttaatcaacttgttctaaatgtatgatgtatatttttagtagagtcggggtttcactgtgttagccaggatggtctcgatctcctgatctcatgatctgcccatctcrgctccccaaagtgctgggattacaggcgtgagccatctttcatatcaattatggttcttataatttttactggtttattttgtacatttaatatgacttcattgagaaggtttaataaagtttcttattactgtatttctatttttcttgaatctgctgtacttctgttttatgaaagttatggctttattactgtgtgcatacatattaataagtgttgtcatgtgatagcatgacatgacatgatctgatagcataactttttctgtttaaatccttttttgtgtgaattctatttagtcaaatagaaagactgtgacttctgctttttaaag

SEQ ID NO: 466896 - DNA, 567 bp, Homo sapiens
tactcgtcttttcaattaatcaaaactatatactgggtagcagaaggtctgattgagaccctttatatgaataaaaagaaaaaaatatacagaactatttgctctttaatgagttaatgagatgttcaataactgtgttttataaaattatattcgtttagtgcaaaagtaattgtggcttttgctattatatcatatggtaaaagaaaattttaggaaggttattttgacacacatagataaggcttccagaaaagtaattaaggaaaatataatttgaaatctccaaacaatgaagcaattcaagcaaacatgattgaaagaatatatttctaataattagggtaattttcatataatttcattcatagtacaccwttttgagtgatactcgggatgcattgtttgttaaaagaaggcagtaacagaacaacatctttagtttgactttaacctggttacattacacatggcacattgtcctgtcaactttatcaattactctgtcaaaattgatttattacataagtttgcaactgtgccgctgaaacttgtgcagacaacttt

SEQ ID NO: 466897 - DNA, 558 bp, Homo sapiens
tgtgacaacattggattagcctagaggcttgaagattttggtatctaaatcaggtccaggtgtagatgattcttttcagtctagtatcatatctcagtgtaactctttcagttatcaaccttctcattcagaaaacaagcagtgtaacaagacatgtatttttccacatrcatcccaacatatgctgttggactaggtataggatatctgccatagatacttcccagcataaaggagaaatatagcaggaacactatagtcagtgacttggccatgacaatcctaaaatccagacatatgctgtcagttccttgattacagtatagcgctatggagaattatagctttggaaatattctccaaattcttgactcaaccctctggacctctcttttaccatctcagttattctttattttatataaaagttacccccaatttgtagttcagtatttttatcatccttcttgttgcccacagaaatatgagagtccaaaagcttctccccattttgagctgtcctggtcctgttaagtccaactaatacaattcatttga

SEQ ID NO: 466898 - DNA, 626 bp, Homo sapiens
atacaattcatttgaaagctatttgagttgtttatgaatgagtaaataatctgtaaaaggagttagcatttttttctgtaaaggtcagaaaagaaatatttctctttttgcagccatatgttctctgacacaattattcagctctgtggttgtagcatgaaaacaaccataaacaatatgtaaatgaaggtatgtggcagtgtgtgaatgaatttttacctgcagaaatattcagtgagcttgatctggccttttgtttatagtttgctgatgccctcgtccacccctagcaattacattagacataagtcatttccactgawctctttgaaataagtcccttcttgtttacatccctgttaaactactgtatggcaatgtccttaaattcaaaggagctttattatttaaaagagaggatttgcaaagaacagccctatgattctcagagggccttttgtctgttggaaagtcttttgtatatgtaaaacagtctataaaccactgccttaaatatttctgagttactggctacaggtttttgaataataaccttggcttcatttttctgtaccacccaaatcaaggggagggagcaaggccttggatttggttttatatgaaag

SEQ ID NO: 466899 - DNA, 538 bp, Homo sapiens
ttcttcaggcagttaatccttacaacacaaaaaagttacatcttctaagaaaacttgcttccatgtggaaattggaatgttcttttattagcttgcaggaaattgtgcatgattcattcactcagcaatgtggtatcaactgactgagagattttaatagtttcttgattgtaacatattgagcactatcatgggccttaaacattttaaagttaactttgtgctttatagataatatgttcctaaattttggaagagtttactccaatgggtaatttagatagcataaattttttactgtttaaacttgtaaatctgtaaattgttactctgtagggtagttatttctgaaactgaaataaacctatgtcctctccaaggaaatgttgttcctcacagaaagaatatgttagagtaaaatgawcctctaacctttgccaaattatatcaagaaaactatctccactgaattttttatatttcaatggtggttcagattttccctctgacttgcaagatactatacaaagtagaattt

SEQ ID NO: 466900 - DNA, 620 bp, Homo sapiens
tacaaaatgttaacattactttcctgcctgccttcacaatattcattctgttgcccgtggatcaagaagtaatttcaacttccaagttttattatttaaatagcacattttgtaaggctgtagataccatgtacagtgattcctttgacagatatcrgcaaaataaattgaaaacgttctggaaagaattcattatttcaaatgccattaagaacattcataattcatgggaggaggtcaaaatgacaatattaacaggtgttttgaagaagttgattaccagcctcatggatgactttgagggattcaagacttcagtgaaagaaataatgacagatgaggtgaacatagcaagagaactagaattaaaagtggagcctgaagatgagagtgaattgcttcaatctaataaaacttcatgaatgaatgaggagttgcttattatgaatgagcaaataaagtgctgtctttagatggaatctacacctggtgaaaattccatgaatattgttgaaattacaacaaataatttagaatattacataaacttagtaaatgaagcagtggcagagtttgagaggatcaactccaatttagaaagaggttttactgtggagaaa

SEQ ID NO: 466901 - DNA, 591 bp, Homo sapiens
ctaactcagtaaaattgaatgaatatttatagtgtgttaattcatcttctgcaagtgttcatatacatcaaactacatcaaactttattcctacaaaaacctttgagataggctataagaatatatttcagtttctcagttttaggcaatataatacatactttagagttatacagaggcagaatttgaaaataacctcttcatttctaattccatgttcttcatayatttgaaatgttatacatatttcttcaattagaaaaaataagaacaacaaaattttagatgaaaaacaagagactctttctaactttctaacatgatcaccaactaagcatatgcaaaataaaagagaaggctatagaggaaaactatctgtaagtgctctaacaattattatctttttaattgagtatcttttttattcagtatcaggaaagaaataaatcatgtagtagtttgcattggagagctgtcatggttacttttatgtgtaaaagtgactgggctatggggtgcccaggtatttggttaaatatgctgtgtgtgtctgtgagaatgtttctagatgagattaatacttgatttggt

SEQ ID NO: 466902 - DNA, 567 bp, Homo sapiens
tactcgtcttttcaattaatcaaaactatatactgggtagcagaaggtctgattgagaccctttatatgaataaaaagaaaaaaatatacagaactatttgctctttaatgagttaatgagatgttcaataactgtgttttataaaattatattcgtttagtgcaaaagtaattgtggcttttgctattatatcatatggtaaaagaaaattttaggaaggttattttgacacacatagataaggcttccagaaaagtaattaaggaaaatataattwgaaatctccaaacaatgaagcaattcaagcaaacatgattgaaagaatatatttctaataattagggtaattttcatataatttcattcatagtacacctttttgagtgatactcgggatgcattgtttgttaaaagaaggcagtaacagaacaacatctttagtttgactttaacctggttacattacacatggcacattgtcctgtcaactttatcaattactctgtcaaaattgatttattacataagtttgcaactgtgccgctgaaacttgtgcagacaacttt

SEQ ID NO: 466903 - DNA, 567 bp, Homo sapiens
tactcgtcttttcaattaatcaaaactatatactgggtagcagaaggtctgattgagaccctttatatgaataaaaagaaaaaaatatacagaactatttgctctttaatgagttaatgagatgttcaataactgtgttttataaaattatattcgtttagtgcaaaagtaattgtggcttttgctattatatcatatggtaaaagaaaattttaggaaggttattttgacacacatagataaggcttccagaaaagtaattaaggaaaatataatttgaaatmtccaaacaatgaagcaattcaagcaaacatgattgaaagaatatatttctaataattagggtaattttcatataatttcattcatagtacacctttttgagtgatactcgggatgcattgtttgttaaaagaaggcagtaacagaacaacatctttagtttgactttaacctggttacattacacatggcacattgtcctgtcaactttatcaattactctgtcaaaattgatttattacataagtttgcaactgtgccgctgaaacttgtgcagacaacttt

SEQ ID NO: 466904 - DNA, 576 bp, Homo sapiens
cacataaattaagtaactggttaggtttttgtgtttacctcgatgttcagcaagaacagaatcaaatctgtggtctatgagtaattayctaagttcccattattttgtagctcagtaccttgtccactttggtcaccatcagaaaatttttatttctgtgttttcttgtagtgtcttcgtaagttccatgaaggcaaggaccgtttctgtcttttatactttttatactgtctcccctagcacaaggaagtcagtaaataattgctacaagaattaataaattaaagcaggtatgaataagtgaatgaacaaaattcagtctaggtttagattttggaagaagggtacttctggtgataattccaggaggtggcagtagcagcagcttgatggagaggaggcaacagtcagtgagactgaaaccagggagtgcgcaggccaagatttggtattggttttcctcctggggtttcaggtttttcaagatgatgatgggacataggatgaaagtgatagtgagtcaatgtcaaaatcgtcagtgacaatgggtccatagaaaacagcaaccaggaaaga

SEQ ID NO: 466905 - DNA, 576 bp, Homo sapiens
cacataaattaagtaactggttaggtttttgtgtttacctcgatgttcagcaagaacagaatcaaatctgtggtctatgagtaattacctaagttcccattattttgtagctcagtaccttgtccactttggtcaccatcagaaaatttttatttctgtgttttcttgtagtgtcttcgtaagttccatgaaggcaaggaccgtttctgtcttttatactttttatactgtctcccctagcacaaggaagtcagtaaataattgctacaagaattaataaattaaagcaggtatgaataagtgaatgaacaaaattcagtctaggtttagattttggaagaagggtacttctggtgataattccaggaggtggcagtagcagcagcttgatggagaggaggcracagtcagtgagactgaaaccagggagtgcgcaggccaagatttggtattggttttcctcctggggtttcaggtttttcaagatgatgatgggacataggatgaaagtgatagtgagtcaatgtcaaaatcgtcagtgacaatgggtccatagaaaacagcaaccaggaaaga

SEQ ID NO: 466906 - DNA, 600 bp, Homo sapiens
tgtataaaaatatatgtgtgcatatatacacatatgtgtatatatgtgtgtatatatacacatatatgtgtaatatatgtgtatattaatgtatatatattkgtttcttttttcttaagcttagtaagtcctatcagcagaaaacagctgattgaatagaaaactaacatgttagagacacagcattaagatatgtttgggggaaggaaggcttaaggtctaattgccctaattcccctaccttagagggagacagttctgctttaacccccacctcctatcatacacccttttctacagagtggtggttctttatccttagaaaataatcttgccctcagaaactatttaaacttatttaagttgctttaattattattttattcaacaagcatttattaggtatctactctgcaacaggcctcatactagatgtcaggaataaactagtgaataagagagtctggtctcctagtgtaataaaaaatttcataacagacaaatgttgatttccttggggtcaatactgcattgactgcctaggaccatgcctggcacatagtagcccctcaataaatgtttgttgaattgaattgtagg

SEQ ID NO: 466907 - DNA, 378 bp, Homo sapiens
ccagcctgggcagcagagtgagaccctgtctcttaataataacaataataggctgggtgcagtggctcacgcctgtaatcccagcacttggggaggccaaggcgggcggatcacgaggtcaggagattgagaccatcctggctaacacggtgaaaccccgtctctactaaaaaaaaaaaaaaaaaataataataataacaataataatttgaaaaaagtcaacctcagaaaaggttgccaagttaactcaagtctccaatataaaaaagcctggggatgcaggggagactatggggttkgctgggcctgctctgatattgaggacacaatgatttggtggctctaaggctatgaagcagcaccatttgtcacatgtca

SEQ ID NO: 466908 - DNA, 552 bp, Homo sapiens
ctagcatggaggcaatttatgggcaaaagtgatgttaacaaactccactactaaagtggttgcttgtggtaaaaatgttcagaggctacatttatttgccgagtgttgcattgtatttcccctctggaagtagctaatgcagcaataagatgatgaaaaggaaaattgtgtagaatgaaaaaataaaagggagaacaaagatatttgtgttttgtttttgtttttgtttttttgagacggaatcttgctctgttgcccaggctggagtgtagtggcacagtctcggctcactgcaacctccgcctcctgggttcaagtgattctcctgcatcagcctcccgagtagcagggattacaggcaagtgccaccatgcccgactaatttttgtatttttagtagagatggggttttgccatgttggccaggctggtctcaaactcctgacctcaggtgatctgcctgcctcagcctcccaaagtgmtgggattacaggcatgagaacaaagatatttgaatagttcatcttttgaagtagcttttaagcatgtggg

SEQ ID NO: 466909 - DNA, 608 bp, Homo sapiens
aatcataataatcttcatatccataataatctggaggatatccataaccacctctacctcctcgccctccatctcttgttggagggggcatataaggtggaccataatagtagtaatcgtcatacatttgattttttgctgcttgcctctgagcttttttctttccttttctgatttggtggcttggcaaaaacaatttcaatattttctccctccaagtctttaccattcatttcttccatagccttgacagcaccatctcactcaccaaaatgaatgaatggataatcttttaacttcttcactcattccagctttcccaaactgactaaatgccttttctaaaatctcttaccgttacagcattggcaaggttgcgtacaaacagcacttttacctttgccataacctcacgatcaggatcttccataggatcagcccattcaacagttccaacattcccccagaccttgactttaccactcattaacctacgccttgcctgggcagctgttttgtgatcttcatattcaagaaagcaaaagcctgttttttttcwtgtcatccggttggtggtataaaatgacgtctgtaagaccctctgttac

SEQ ID NO: 466910 - DNA, 575 bp, Homo sapiens
gttcatttattatcatcgcttgtaatattctgttgtgtgatgygactaaacaacagtttattcattcattttttactgttgtaatttccagtttttggcttctaaaaacagtgctgaaatgaacaatcttgtacaagtcttggtgaacatacgcatacatttctgttggatgtgtgcttagaagtggaattgcaggatgtgctttaaatctagctgggtatagtggcaaatgcctgtaatcctagctgcctgggaggctgaggtgggaggatcgcttgagcccaggagttcaaggctgcagtgagctatgatcataccactgcaattcagcctgtgtgacagaggaagacactatctcttaaaaaatcaaagcctttcttgcccaaaagtttagtgttaaatacctgaaaacaaacccaaactactgtatcaatcagggtccaaccaagagatagaaagcacacagtaatttgaacctggaaagttttgtatgaaaaattattagctataacagagggttgatgtaatgaggattgtctagtaaaaagtaaagagaactgtaaagaatggaagaa

SEQ ID NO: 466911 - DNA, 613 bp, Homo sapiens
aaaatagcattaaatatgtagaattgctttaggcaatatggccattttaacaatgtcaatcttccartccataagcatgaaatgtttttccatttgtttctatcatctgtgatttccttcagcaatgttttatagttatccttgtagaaatttttacctccttggctagatgcattcctagaaattttattcttttagtggttatcctaaatgggactgagcccttgatttggttcttagcgtgagcattattggtgtatagaaatgctactgatttttgtatgttgattttgtatcctgatactttcctgaagttgtttatcaggtctaggagtcttttggcagaatctttagagtattctaggtatagaattatatcatcaggtaagagacataatttgacttctgcttctcctatttggatgccttttatttctatctcttatctggtcgctctggttaggacttccagtactgtgctgaatagaagcagtgagaatggacatccttatcttgtttctgttcttaggggaaatgcttccagcttttgcctgttcagtataatattggctgtgggcttgtcacagatggctcttattattctgaggtatgt

SEQ ID NO: 466912 - DNA, 604 bp, Homo sapiens
gatggacacatttcctggtcctgaagcagagaaattagaagcaaaaataggcatggaaagatgctctgcccaaaagaagtcccccctctcttccccaggagttgaataacagttctctttcatttgggtatattttacttttaaaagcttaatttagtcrtttttaacaacaaagtagaatagttcagagatttataaaaacagcagcaataacaacaaaaaactttgctgcagtgtttgcttttcctgcaggccctcctggtgaggctgctctttgaagcacttacacaggttctcacaactctgcttgggccaccttcccaaaagcaatggccttttatgcccccaggtgacccatcgcccccaccttcttcattctcctgatctatgtcattgtcccacttacttctcctcaaggcaggaaaagggctgtgggatgagctcattgatatcattcaggtgagcagcagactcctttgtgtccaggtgagaacatgggatggctccttcacgtggtttgggaataagtgtagactccttttccacttttagggaacccttgctcagtttcctgggaagagttgggataagaacagatcctagg

SEQ ID NO: 466913 - DNA, 646 bp, Homo sapiens
ggttgtacagtgatatgaaagggaataacaaagggatgcaaaagagttatgaaaggcctctctgaggaagtcatgtttaagctgaaaggtgaaggttgcctagaagaaggtcagrcaaaagacagggtgtgtgagtggggaaacattctaggcagaggtaacagcatatgcaagaccccatggaagattagaaaaaggaaacagcaccaagatatgacctattttccttagatgactgagggaattcaaattcaatgaataccttctttatcttaaaagctaaagcctttacatttattataaatagggatttctataaatcctgtcaactcccacttatcctgtattctcaatcctgtatttattcaccaacatctttgagctgttttctctggccttatccttattctttctaaggtatatctatcttttttagcaaccccgataattagataggataatctgttgagatattaatttgtgatttgtatttctgatttgtgctatagaagacttgaaggattagaagggactttcctcctacttccttcactggaaagacaaccaggcctttatcttctaagatcttttttctattttcaagcaattaacagtttatttttgtatcagaacatcctgtcccatc

SEQ ID NO: 466914 - DNA, 661 bp, Homo sapiens
ttattcatggacggttgacactcattgacagctgttaatttgatgaagatactgatgacggtagtgctggtgatgcagtatgtcgctgtgtgtgtcttggcattgaatggttaggagcatcagtaacccacctaataagacccagatataaaattttcggaggattttacttgctgtggtacaaagcttattcactgtaggaggaaaccctgaagcagggtgcctggccatcacctctatcatcagcctttccttaagccccctagagtacccaagtcttggaaaacacctggtgagtgggcaattcagtttccagtgagaaactgaaatatggacagtcaggaataatagctcaatggagcgtcatgtgctttgagtcccagaccatggtgagaamtgactttcttttatgaaagtaagaagtggtttctgactaaagagagaggtctacatggaggggctgcagaaagtcacccacttcttggtttgatgtgtttttttctagagaagaacactctcacctaaatgaagtcaacattttctttcaatattagccttagcaacacgtgtacactctggtgcattttataaggttaagccaagaaagaagattaaaattcacatcccagaaggcacaaaggaccaagccaagcacagagtg

SEQ ID NO: 466915 - DNA, 592 bp, Homo sapiens
atgggtgattgataagggcctgacatgctccttcatttggaaaatggtattaatagaattggtttcccagtgaatagtgccttttacccaagactcataaccaaatattttcacaaagatgttatatccccatgcatgagcattcattttgagatgttcattataatagagtttaagtatgaatgtgttttaaaaatgattttaaaatcatctgcaaaaaaatgttgtgtttcaaatggacagtgtctgggttttgtatagtcatcataaaaatgtctataattgtactgtttgctaataaacctrcctgctttcagaaaatcatcctaacgtgtgtgtgtgcaccaatggttttataagttcatttttctttggggcagctacagcaattttaggtttgttttcatattcctgtgaccctggtattttttcaaggttggttactagctatgggtttactgcagaagaagtaaaaaccacattgttgaatgggcacaatatgctctgcaatccttacatattcataccaaacagcaaagatatttgcaaaaccagactgccttaagttaatttttgcgcaacttaaaatgac

SEQ ID NO: 466916 - DNA, 545 bp, Homo sapiens
ccctttcaaagtgctaacatctaaaaatatgtattttgtaggaaatgaaattatatgtatcagtttcattaatgttcacatcctttagtttccaggggaattatgaagaatttttaaaagaagcaaagaaatcaaaacaagactttcaaaggagcaaggggcttaacctgcctccatttacaagatctttcactgaacttctatgtgtgtgactcacattttgttgtatttgactaacattctatctttcagttcctataattctttcagttcacctggcaacctgaaatatttattaygtctcatcgtatcagtcatgtttaattatatagcagtatggcctcagtgaaatgaggccatactcatttcactgatatgtgaaatgagtatcctcagacatgatacagcctgacttccaattctggtttgacctaatctccttaccacgaaactaagaaaatgttctctgaaccgcattgctgttagatgggggaaaaaatattgtcaggctgcacgtggttgcccctgcctgtaagctatgattg

SEQ ID NO: 466917 - DNA, 545 bp, Homo sapiens
ccctttcaaagtgctaacatctaaaaatatgtattttgtaggaaatgaaattatatgtatcagtttcattaatgttcacatcctttagtttccaggggaattatgaagaatttttaaaagaagcaaagaaatcaaaacaagactttcaaaggagcaaggggcttaacctgcctccatttacaagatctttcactgaacttctatgtgtgtgactcacattttgttgtatttgactaacattctatctttcagttcctataattctttcagttcacctggcaacctgaaatatttattatgtctcatcrtatcagtcatgtttaattatatagcagtatggcctcagtgaaatgaggccatactcatttcactgatatgtgaaatgagtatcctcagacatgatacagcctgacttccaattctggtttgacctaatctccttaccacgaaactaagaaaatgttctctgaaccgcattgctgttagatgggggaaaaaatattgtcaggctgcacgtggttgcccctgcctgtaagctatgattg

SEQ ID NO: 466918 - DNA, 608 bp, Homo sapiens
gccaagaggtgcaaggaacccaaatgtccactactgaatgcatagatgaagaaaatgtggtatatatatacaatggaatattatccagcctaaaaaatgaaggaaattctatcacatactacaacatgagtgaatatctagggcatgctaggagaaagaagccagtcacaaaataacaaacactatatgatttcacttatatgaagtatagtagacaaaatcagacgagasagtgacaccagcaagatggcagagtagaagttccttcagcatcattctcctaccaaagtacaactaaaaactactcaaagagaagaatactaccctaaattcaccatatattggggaggggagtggaaaagccacctggacccacagaatcaagaaatgcttcaactagtaaggggaacagtcattttagactggactaacccctacctcaagctggcacaacgccactcacgaaaaattttcctaaacccaaggtttctgaggtggtaggagaaaactggaggtggacgttaatatccccaccagtctgggaatcttcttgggaagccaactccagttccatctcacagaaaacactgagagtaccaagaaggctg

SEQ ID NO: 466919 - DNA, 626 bp, Homo sapiens
cagccataataacagtttaatgggtcatgacagcactttaaaacaataaaatagaatagaaactatgagactatatcacacacagaggattatttaatgaattttttgctctagttgtatttgtgttgagtgtgtgtgtgtgtctcagtgggggggggtattgggtaacaacataaaaaatattttgtggcaaaaacaagctagtgattttccaatgaactcacaaataagcaacatcccactgcctcttttattcttaggaatggttgtatgctcgagttttaattaacagcatcccagtgacagtgatgaatgtcccttctagatctggttcataaaaatctgccacacagttctctactctccttctctcctctgatataccacctggagtctaaatactgagcccagaacaactctggaaactatatgttgaagatggccgtcttcatcaatatgaatctctgaatggttgtgtggaacaaacccctttaccacctcccctcctcacccccagcascaatggaaccctatgagaacaggaaaagacttctaatatggtaagctactcagatttgggggtagagagggttacctactacagcagatagtgttaccttaacaaa

SEQ ID NO: 466920 - DNA, 581 bp, Homo sapiens
ataaaatatgtataatattaacaatgagaatttagaaatgtaacatatgtaaacattttatgtccctgacacactataagtacagtatgcattagtttttgttgttatataagggttagctattcctgttgtagtacagtcatgatgtcacacaggatgtttaggtcaataatggactgcrtatatgacagtagtcccataagattataatgaggctgaaaaattcctgatgcctagtgacatcatagtcatcttaatgttgtagtgcaacccattacttgcgtgtttgtggtgatgctggtgtaaacaaatctgtgctgtcactcatataaaagtatagcacatacaattatgtacagcacataatacttgataaatgactatgtttctgctttatgtatttactatatgttactggtttcttttttttaaattatactttaagttctaaggtacatgtgcacaatgtgcaggtttgttacatatgtatacatgtgccatgttggtgtgctgcacccgttaactcgtcatttacattaggtgtgtctcctaatgctatccctccccccttcacccaccct

SEQ ID NO: 466921 - DNA, 603 bp, Homo sapiens
ttacttttgtttcaataggtatggatggtcatggtggctctgagctgcctggatgctatacttggtcatacctagcctggctcctggggctgagtctgtttacyctaaagcaacaagtccccccaggcagggaggagttggcagacagtcttagaggctgaggagggagggttatgggaaaaacaatcttggcttataagaccctcactaactcagggagctcagagtgtgactaagaccttgactacctcagcaagctcagagctgtgactaagcctgtacagctgtctgtcttggtgagccagactgagagagttactgagtctgcaccttttacatccttccattaattttaaaagcaggtttattgaggtataatttacatactgcaaaattcaacctttttagtgtatagttctgtgatttttggacaaatacatacatttctgtagccatcactgtaatcaagatacagaacagttccattgccctaaaaattattttgtggccattgtagtccacccctcttcccacctctcacctgcactgatctgttttctgttactatagttttgccttttccagaatgtcatgtaatgtagc

SEQ ID NO: 466922 - DNA, 617 bp, Homo sapiens
gtataggctacagcaataaaaatgaactatgactacacacaacaatgtggatggacctcacaactataatgttgagtgaaagaagttagacaggaaagtgtctatattgttttattctatctatataaactacaaaacagtcaagttggagtcagaatagtgacttyccttggaggtgaataatgccaaaataggataaaagagttttcctgagtgcagataatgtttcttcatctgacagttggctgtaagaatgcatttgtttgtgaaaatatattaagtcggaattttgacttatgtttcttttgctgtgtgtatattttgataagaaattgttttaaatattagtatcctcaaaccacaaaagtctcaaagaacttgagacttcactgtgcctagataggtcttgcatatggtaagttccagaaaaaaataatttggaaaatgtttatttagccattgttatgtttaagacccaagcaatccaaagatgaataggacaaaatccctgacctcaagcaactgataatattgtttagaataaagcaagatctccgattataacatggctagaatgctgtcagtgggatatgggaaaggatgataacagctagcac

SEQ ID NO: 466923 - DNA, 615 bp, Homo sapiens
attaagtcggaattttgacttatgtttcttttgctgtgtgtatattttgataagaaattgttttaaatattagtatcctcaaaccacaaaagtctcaaagaacttgagacttcactgtgcctagataggtcttgcatatggtaagttccagaaaaaaataatttggaaaatgtttatttagccattgttatgtttaagacccaagcaatccaaagatgaataggacaaaatccctgacctcaagcaactgataatattgtttagaataaagcaagatctccgattataacatggctagaatgctgtcagtgggatatgggaaaggatgataacagctagcacaaagtacacaggtactatgtgctttatgcatattaatatttcattttcatagtatccctaaatatagatattactattattcccattatatagatgaagatattggggcatggagagattgagtgctttgcatcatcttctctgttcctctccaayttactatcctctaatattcaagctcctctttgctctgttttcatcacagtagtctcagtttctctaggtgggtcccctacctcctgcccaggactttgcagacactatttcctctgc

SEQ ID NO: 466924 - DNA, 543 bp, Homo sapiens
cagtagctagcatagtagatacataataaatatgtgctgagtaaacgagttaagtatccaccatggccaatcactatatttttaagtgatacaaaatttagagcaagaattaaatataaatgacatgatatcrtctggtacaattttcattaattaagtgtaatcactgcttattcttcaaagccaagcagaacatgttcttctaacttactctgagccttttcattagaataataaatttttagaaatatttagaaacacattcagaggtctgtctacagcctgttttccactttcctgtggttttctttcttgctctggtaggaaagagagtctttgagttgcctgcttaaatgttctcaagggaaaggccttagttgtcctgccaacccctttgatctttcctcaaggcagaagcagagagataagactgtggggaaaaagattgaaagcatagcatatgcctatatatcagcagtgtgcatcccaataattgtgtttttccagttattggttttcccaacagtagactgggctaccatt

SEQ ID NO: 466925 - DNA, 630 bp, Homo sapiens
cactttcctgtggttttctttyttgctctggtaggaaagagagtctttgagttgcctgcttaaatgttctcaagggaaaggccttagttgtcctgccaacccctttgatctttcctcaaggcagaagcagagagataagactgtggggaaaaagattgaaagcatagcatatgcctatatatcagcagtgtgcatcccaataattgtgtttttccagttattggttttcccaacagtagactgggctaccattctagaaactttttctcccataagatggcttaaaattcccagagaaatagtatcttcagtaaactcttgggtttccagaggttataactgggtctctgactctgctttcttgattttaaatgtaagttttttgctgcaatcaaacagaatataataacattctcaaagagagacaaaaaagcagttgtccactgtaactgtgctatgttaggaattttatctgatctaagagtcaaaggctattcctggtgtcaaccaaagtgtcttctgctacatcatcaaagctttttatgatgggtttcaagtttgtagggtactgatgctacaagttcatcaccttttccacatgtgaatacaccttcctgtaatcacccaatc

SEQ ID NO: 466926 - DNA, 514 bp, Homo sapiens
ctatatatcagcagtgtgcatcccaataattgtgtttttccagttattggttttcccaacagtagactgggctaccattctagaaactttttctcccataagatggcttaaaattcccagagaaatagtatcttcagtaaactcttgggtttccagaggttataactgggtctctgactctgctttcttgattttaaatgtaagttttttgctgcaatcaaacagaatataataacattctcaaagagagacaaaaaagcagttgtccacwgtaactgtgctatgttaggaattttatctgatctaagagtcaaaggctattcctggtgtcaaccaaagtgtcttctgctacatcatcaaagctttttatgatgggtttcaagtttgtagggtactgatgctacaagttcatcaccttttccacatgtgaatacaccttcctgtaatcacccaatcttccagggaagcaaaaaataaaaataaataaataaataaaaaattccattagaacatt

SEQ ID NO: 466927 - DNA, 635 bp, Homo sapiens
aacatggactgctcctaaatgtgtgattttttgtgtgtgtagtcacccatccagagaaacgcttgttagacctcaatgccagaccaaggtttctcctcttgaactactggtttggtttccttttgaagatagtctgattcttcttgctgattcttttyctgtcatcatttgctcactacaaacctcaacggtgggaactttacaatgtgtgcttctcctcaccaaaattggtagcctttccttcaaaattcacatccacttggattctcagaatgtgaccttactaagaaatagggtctttgcaaaatgtaattaaactaagaagaggtcatacatgattagagtgggctctaaatcaatggctggtgtccttacaagaagaaaaacagaaacagacagaaatacaggaaagaaggctgtatgacgatagaggcggagactgggatgatgcagctgcaagccaaggaatgcctgggattgccagtgaccaccagaagttaggaagaggcatagcaggattcttccctagagccctcagaggaagcatggcttgcctggtaccttgattttggacttctagcctccagaactgtgacagaataaatttaagccactccatttgtggtactttgata

SEQ ID NO: 466928 - DNA, 534 bp, Homo sapiens
tttcctaagatcacacagctaataagtagtagagccagggcttgaaccaagtataaggcatatacttgaatcaaagtatraagcttatgtgggtcagagctcaaccaaagggagatatatagagagatgttaatgaaagcaattgggttatgcaattatggggactggtaagacaagctggaaatctgtaggtcaggaatgaactcttgggcacaggccgatgctgctatccacaggcagaatgtcctcttcttcaaggaatcctcagctctgctcttaagaatatttagctgaatcaggctcacccaggttatctaggataatcaactgattatggatcttaatcacatctatacaatatgttcacagcaatacctagattagtgtttgatggaataactggggctgtagactagccaagttaacatatcagaaaaccatcacaaagttcttcccactttgctttctaaatataaatttagagcaggaagttacccttaggccttatcaactctaacttccagtttagaggag

SEQ ID NO: 466929 - DNA, 591 bp, Homo sapiens
aagaggaaacaatgggagcagaggccttaaacaggatttgtttgaggtaagaagagaaaggtctggccacaaggaaagcacagaccttttcacattacagtataagcaataaactagctgaggctcacccaggcatgctgttctgggccctgctgggccctgactttatcttgacaaccactgctgcgcactaacatataaaaaaagaggtaaacatgtatctcagttgttaaatatagaggacaattgggaactctggcaactcagctagactcatccagctctgaagcaaaatctcaccattctccagtgttcatgattaggaagagccaaaccttcaccataacaggacrtgtcagcactgtgtctctggggatttttctctgcctcaggcattgtctgggcctctagctggagtggtctaaggattgaaggatcactgttctgttcgatggaatccttttatctggtggataagacttcctctgtgatgtggtggagtgacatttactaccctctgacaaagggggacagtgagggcagtcctgctgcagccaaaatgtgcagggaacagttctctgaagcaactaa

SEQ ID NO: 466930 - DNA, 596 bp, Homo sapiens
ctattgcacagtccctggcacacagtggacattcagacaatatttgatgaataaatgaacatatgtataaatgagtaaaggaatggatggaagactggatggatggatggatgaatggatgtctgaaacaatcaggagagttgctgaagatgtgggaataacccatgatgtcgtggtagaygacctcttataccacaggacgagaagtgataaagaaatggaatatgaagaccttattccaaaaaagcatagatgtggcaatggcatgaagccatcaatgaatgtagtgatatctcaaacagaccgcacttaaagtttacttgtctagccaacacatattaataagcatccattatgtatatatgagtgcatgttggcactgtgctggaagctccagaatcagaaatgagtaagacacagcttgtacccttaaaaaattcttggttatgaggacagacaaacatataaacagaatttttacaatacagtcagtctaaaacagaatgtatcaatcagtataggtcagttaatactacagtaacaatcgacaactttcagtgtttttaatcaacaaaccttgtcctaaatgttcatgg

SEQ ID NO: 466931 - DNA, 596 bp, Homo sapiens
ctattgcacagtccctggcacacagtggacattcagacaatatttgatgaataaatgaacatatgtataaatgagtaaaggaatggatggaagactggatggatggatggatgaatggatgtctgaaacaatcaggagagttgctgaagatgtgggaataacccatgatgtcgtggtagacgacctcttataccacaggacgagaagtgataaagaaatggaatatgaagaccttattccaaaaaagcatagatgtggcaatggcatgaagccatcaatgaatgtagtgatatctcaaacagaccgcacttaaagtttacttgtctagccaacacatattaataagcatccattatgtatatatgagtgcatgttggcactgtgctggaagctccagaatcagaaatgagtaagacacagcttgtacccttaaaaaattcttggttatgaggacagacaaacatataaacagaatttttacaatacagtcagtctaaaacagaatrtatcaatcagtataggtcagttaatactacagtaacaatcgacaactttcagtgtttttaatcaacaaaccttgtcctaaatgttcatgg

SEQ ID NO: 466932 - DNA, 575 bp, Homo sapiens
catttcgtaatttctccaggcaacctaaaggcacagtattatctcaattaaaacaaatgagaaaatgaaggctgaaaggcttaattaaccttaagcctaataagtggaggaagtgagatttgaacccaggtatagcttgatctaaaagccctgacacttataatcactgtgtaggctgcttctgatggaaatttccacattgcagggccacttaccctccttgttgctttttttcacctgggtttaccaacattcccacctttctcttggagcttctgcttccaattgctcctcctgacccagatggaggtggcaagctgggagaagcaagcacagagagtcagcattttgtcaagcataaagtcaggaaggaatcccactgttgtactagaatctgatggtttccatagcaacmgaatcaatcaatcagttaatcaacaataaattgttgagcatcatccataaactcagttcagtgttgcaacttgaagggcaaggaagagggaagagggtgggagcagaattatgaagatgaaggaggcacggggcgagctgtgggtgtgggcgtgggtatg

SEQ ID NO: 466933 - DNA, 620 bp, Homo sapiens
tggagttagctctctccctgttagttttaagggagagagcttttgccaactgtatttccagagcgctgcctacttctgctgcctgctgctgtgcagatccctgtttaaagactggaaatgaggaggcaggagagccaattctcaagccccaacacacataagaatcaccttcagagcttgtgaagaattcatattttggggcctcactgtcaagatttactgagtcggaggaggggtcaggaatcactctccaaacaccccacaagattctgaagcctgcrggaccacctctgggaaacactagtgtgcatggtggttgggagaatgaattctagtcagggaggtctgtattttcacctctcatatcttgtcctctcaattgtaaaatggggaaaagagcaccttcccttgggaggccaagtgccaccccaggccctgcagctagtaagtggcagaataaggcttgtacttgctggccctaaagttgcatttaacctcgatgtcagagtgggtctaaaagctgtgatatgactcctccccaggtctccagccaccgcaggccaagtggggtgtcatgtccatgaggatgataaagaacatatgagtagtgctcaccacag

SEQ ID NO: 466934 - DNA, 620 bp, Homo sapiens
tggagttagctctctccctgttagttttaagggagagagcttttgccaactgtatttccagagcgctgcctacttctgctgcctgctgctgtgcagatccctgtttaaagactggaaatgaggaggcaggagagccaattctcaagccccaacacacataagaatcaccttcagagcttgtgaagaattcatattttggggcctcactgtcaagatttactgagtcggaggaggggtcaggaatcactctccaaacaccccacaagattctgaagcctgcaggaccacctctgggaaacactagtgtgcatggtggttgggagaatgaattctagtcrgggaggtctgtattttcacctctcatatcttgtcctctcaattgtaaaatggggaaaagagcaccttcccttgggaggccaagtgccaccccaggccctgcagctagtaagtggcagaataaggcttgtacttgctggccctaaagttgcatttaacctcgatgtcagagtgggtctaaaagctgtgatatgactcctccccaggtctccagccaccgcaggccaagtggggtgtcatgtccatgaggatgataaagaacatatgagtagtgctcaccacag

SEQ ID NO: 466935 - DNA, 634 bp, Homo sapiens
tgatggaaagggggattggataagcccagccacagtgaatcaggatagaagaaacatttcccttctcatcaggggaaacaaatacatttcttgtcactttctacctctagtggaagcagtttgcctgcaaggatttcacatgaataatgtgctaattataattaattagctcccatttgttacaggagaagatagcataagtgactggaagggttacaaccctaagtttgaggtaataaagctgcatttccattcacatcatcaatagttagttacgtaaaggcaatgtagcaatggggttaagtatgcaggccctgaaaccagatgacttgcaatcatgccccaacttttccacttaactgtgtgactgtggataagtttcttaacctctttgtttctgtaatatgatgacartaataagagtaataatgatgcctacttcatagagttgatgtgggaattaatgtatgtaacatacttataatgggtatatggtaagccctatatacatctgattttaatatccttgtaatgaattatggcaggaatctctctacctcccaaacattactcactgacaccttaatcagaattagtggggcttcattgtacttagaaaactatattgttaata

SEQ ID NO: 466936 - DNA, 582 bp, Homo sapiens
ggtttaactgttgtgccacctttccaactgtccactgaatttgcttagttgattaccttctaaaaatactggagtaggagaaggtggtttccagtatgtctgattacaagcacaagagaaaattttcactggcccctatatcagaagattggatccaaytggaaagcaaccaaatcctaaagttcactggccatttactaagcatctaccacatgccaggcaccatgtttggcacagtatttaggtacggcagtaaagaggtggcatgagcgtgaactcatgaagttcagtagagcagataggcaagcaaccagattaagtgcaagacagagggataactgctatgatagggggtaccaaggtgaggctggtatagtctgtgctcacagcgagttcagggcctagtgggagatatatactagcaaataaacaattacaatacagagtgatagtctatgggagaagggagctcagggactgtgggagcacagaagagaagatgactccttcctctatttgtgggggatgggaaagggcttcacataggaggtatcattaaaccagatcctgaaaaatgaaatg

SEQ ID NO: 466937 - DNA, 552 bp, Homo sapiens
ggatttttttagttggttttggggtctctggagttggctgcttaatttgattagaccccaaaatgctaaggactctacttctaatagtatggagaagactgatagtccttggcgtgaactgtttagaaagttatgcaaaatagggccaggcgcggtggcctgtaatcccagtactttgggaggccgaggcgggcggattatgaggtcaagagatcgagaccatcctggccaacatggtgaaaccccgtctctaataaaaatacagaaattagctgggtgtggtggcgcttgcctgtagtcccagctacwtgggaggctgaggcaggagaatcgcttgaacccgggagacagaggtgcagtgagcagagatcccgtcattgcactccagcctggtgatagagcgagactctgtctcaaaaaaaaaaagttatgcaagataaatgcttttgatacgcctgatccaccactcatgagaggcgagaggcaaggagtttagtgactctatacataatacctttggccatttgtggagaaccagggaatataatgaag

SEQ ID NO: 466938 - DNA, 535 bp, Homo sapiens
gcgtgttgatgcatgcctgtaatcccagctactcaggaggctgaggcaggagaatcgcttgaactgggaggcagaggttgcagtgagccgagattgcgccactgcactccagcctgggccacaaactgagactccatctcaaaaaggaaaaaaaaaaaawatatatatatatatatatacacacacacacacacacatatatgtgtatatatatacatatatatgtatatatatacacacatacatacatacatacatatataaaagcagcagcccaaaaatgtattatgttgccagctaaatacagacctagttgtcttaacagcactcatggtgcattcgtatttttatcagaatgaaggaacctaatacctaaatataagcccatgtttccccttgtcctgaggcaggcagtggaagttcctaaaggcaggcctagaatcttcctcagaaaatcctttttaatccactctaggacataaagaaatgagtagttgatttcctaaagttctgttccttgcaactgaattaattc

SEQ ID NO: 466939 - DNA, 494 bp, Homo sapiens
taagtcgatactgttttcctagcaaaataatgaaggttccaaaggccctgttttcttacctcaaattcgtgaggtaaagcattcctccctcaaagcattcagctccataaccaaagttttagattctgctttttctttttctttctttcttttttttttttttttttgagacagagtcttgctctgtcgcccaggctggagtgcactggcgcgatctcagctcactgtaacctctgcctcctgggttcaagcgattctcctgcctcagcctcctgagtagctgggattacaggcatgtgccaccatgtccggctaaggtttttttttttttttttttgkatttttagtagagacgggttttcaccatgttggccaggctggtcttgaactcctgacctcaggtgatccacccacctcagcttcccaaagtgctgagattacaggcatgagccactgcgcctggccagattctgctttttcaagaaagggctcac

SEQ ID NO: 466940 - DNA, 568 bp, Homo sapiens
attgaactgagcttaaaacacggaattcaaataagcaaatcaccgaatcaagtgatattcaaaaaaaaaaaaaaaaaaaagcagggggaaacaactttgccactattgtgccagaccactgtcaactccaatttggacagaaccagattcaagaggccaaagaacagatccagagacagcaaacaagacatggtgtttttttgtttgtttgcttttttgtttttaactggggtcttacattcaagggagactccagtggtgatgggctggacggaactgcaaccacttgcaaatgcatggggtttatatagcattttcacctaacaccctccccctaacaacctgcagctggcaaccttcatttaaaccaaaacaaagggcctcaattccccgtatggcctgcatttcacgggacaggccaggagctcagatgttccccatagatcagaaatggatctctgggttcctgagctggaaactccctatcgcattcaggtgcatctgccatayggggccattctcaggctattgctatcttcagttattgctatcaggtgcatttaccata

SEQ ID NO: 466941 - DNA, 476 bp, Homo sapiens
atttattccctaattgacagagctagaaggaaaagaccagagtgggacctaaccaaaggcatttggaaatggcttttacctgtatttggaaactcaagccttcctagggaagaactatgagttcactgctagggtggaaagagtgcctgccctaaaataactttaaacagataacatgataatagtaagaataaaatatagcaaaacaaaaaattggggattatgtttaggatataatttatatagaaaagtgagattttaaaagccacaaagcatattaaaataaattctgtaagtttagaacactctataaaaatatatatgacttctcagcaaaagtatccaaaaccagaacatagatataggcttatttcacctagctaaaatagagtattctaacacactcacacatacacacacaaacacacacagacacattttcataatagtaycactgagtactttttaatgtataa

SEQ ID NO: 466942 - DNA, 604 bp, Homo sapiens
aatgttgcaaaaccggtacagccaccaactctacgttttttgttaatataatatactttttattaattttgaaagacagattttcttcaggttatataacatgtaattgaagtaaagatcacatttaataatctcagatttgtaagatcttttactgtcttcattcattcattcatatttccctttactcactcagcaaatatttattgaacatttctgtgccaggcaccatgccaggtacttaaaaatagtcgtaaacatgatacactcaacccttgttctcatgaggtgtataatttaataccattatgcttaagaatctcatggtaaatatgaagaaggcttttaatattgggattgacctctagaagaaattggaaagcaatttcaatattgtctggaagttcccatgcattttcttatgcagatttacagaggtaggctgctatgttaggcaaagcaggtattttccttagatgaaaatcgtaattttgtaatagatacttcaaaatgatgtttcgctacaagtactttgttttttttttcacttgccagacactgaaaaacawgagtatatgcagttggaatgcatctgaaaataaca

SEQ ID NO: 466943 - DNA, 547 bp, Homo sapiens
agcaatacattccattgaggactaaagtagacggataatagacgtgacccagtagggtactttttctatattctggcactcttaataataaaccrattcatgtaattcatccaatcttttatcaaacaatcatttaacctctactatgtgtcctatgcacagtagatatagcagggaaaaagaagacaaagtgtttgccttcataaatttatattgcagtgggaaaaagtagaaaagttacatgaatttaaaaatatatatttttttatttccagctacaaagaaatgaaacacatgaatgaaacagcaagtgaccagtgactagatgggtagaggacaacattagtgtggttatagaaaatgttgctaaagaagtaaaacttgagctgagatctaattgatgaaaagaaaacacccatgccacgatgcaaaatacgtggcttcttagaggtgaaagaagaaccaacaagttcaaaagcccttcaataataatacctctgccacattcaagggaagaaaataaagaaagaaaaggaaaaaaagaatg

SEQ ID NO: 466944 - DNA, 547 bp, Homo sapiens
agcaatacattccattgaggactaaagtagacggataatagacgtgacccagtagggtactttttctatattctggcactcttaataataaaccgattcatgtaattcatccaatcttttatcaaacaatcatttaacctctactatgtgtcctatgcacagtagatatagyagggaaaaagaagacaaagtgtttgccttcataaatttatattgcagtgggaaaaagtagaaaagttacatgaatttaaaaatatatatttttttatttccagctacaaagaaatgaaacacatgaatgaaacagcaagtgaccagtgactagatgggtagaggacaacattagtgtggttatagaaaatgttgctaaagaagtaaaacttgagctgagatctaattgatgaaaagaaaacacccatgccacgatgcaaaatacgtggcttcttagaggtgaaagaagaaccaacaagttcaaaagcccttcaataataatacctctgccacattcaagggaagaaaataaagaaagaaaaggaaaaaaagaatg

SEQ ID NO: 466945 - DNA, 577 bp, Homo sapiens
atctgcttttttttagtattatgaatcattcattcattcattcattcattctttcatctcttgtgtttggaacctttctgctgtgccaggtgctgggtagaagctgaggatatacttgagtgccgaccacagtagacaatctctaacttcagaaagctccatggaaggacacacatttgaaccaaataatcatggaaataaacatatatgctcccaaataccatgagtgtcctcatgcacataaatagagcaccaggagagaacctgagaggaaggccactttatactgcagagggggcagtgtgccaggaaaggggatgtggacattgttatcttcaggctctacaaaagcatcygtacagaggtcgctgcaaacttttctcagtcagtttcttagagctttgtcctctccatggctttctaagaacctctggctgatgactgtgatctccatgttctgtgtgtgtcctctgctgaaatccctgtttggtgtggagacttagaggataagaagtacaaaattccgatttttttttttttttttggtgagaagaaattttttcactggtgttttagc

SEQ ID NO: 466946 - DNA, 577 bp, Homo sapiens
atctgcttttttttagtattatgaatcattcattcattcattcattcattctttcatctcttgtgtttggaacctttctgctgtgccaggtgctgggtagaagctgaggatatacttgagtgccgaccacagtagacaatctctaacttcagaaagctccatggaaggacacacatttgaaccaaataatcatggaaataaacatatatgctcccaaataccatgagtgtcctcatgcacataaatagagcaccaggagagaacctgagaggaaggccactttatactgcagagggggcagtgtgccaggaaaggggatgtggacattgttatcttcaggctctacaaaagcatccgtacagaggtcgctgcaaacttttctcagtcagtttcttagagctttgtcctctycatggctttctaagaacctctggctgatgactgtgatctccatgttctgtgtgtgtcctctgctgaaatccctgtttggtgtggagacttagaggataagaagtacaaaattccgatttttttttttttttttggtgagaagaaattttttcactggtgttttagc

SEQ ID NO: 466947 - DNA, 606 bp, Homo sapiens
catcttggagatacaagagagtatccatgcaaggctagwtagtgcttggactaaggctaatgtttctaaagaaaaaaaatgtgtcaaataaaagtaggttggtaagaagatgagttataaataaggaaaatcaaatagataaagctaattttagctaaagaactaaattaagacttcctaacatcagatatgtaaagaaagaagcccattctgtgttgcaacatcaatggggaataatagaaataacaattgtacactcccatagttcttaatcctcttctcagactgagttggaatatccccccttataactgataaagcttacaggaatgtaatataattattgcttcagtgaatcaaatattacttgtctagaccagcactgtgcaatggaacactgtgtggtgatagaaatgatcttctctatgctgtcttaacatcttgttactattggtaatagagaactcaaaatgtgtgatacatttagatttaagtaccacatgtggctagtgactaccatattggatagggcagggttagacactctgctagggccagtacttgtggattttacatttttcttatccataagttcagcagcggact

SEQ ID NO: 466948 - DNA, 606 bp, Homo sapiens
catcttggagatacaagagagtatccatgcaaggctagttagtgcttggactaaggctaatgtttctaaagaaaaaaaatgtgtcaaataaaagtaggttggtaaraagatgagttataaataaggaaaatcaaatagataaagctaattttagctaaagaactaaattaagacttcctaacatcagatatgtaaagaaagaagcccattctgtgttgcaacatcaatggggaataatagaaataacaattgtacactcccatagttcttaatcctcttctcagactgagttggaatatccccccttataactgataaagcttacaggaatgtaatataattattgcttcagtgaatcaaatattacttgtctagaccagcactgtgcaatggaacactgtgtggtgatagaaatgatcttctctatgctgtcttaacatcttgttactattggtaatagagaactcaaaatgtgtgatacatttagatttaagtaccacatgtggctagtgactaccatattggatagggcagggttagacactctgctagggccagtacttgtggattttacatttttcttatccataagttcagcagcggact

SEQ ID NO: 466949 - DNA, 606 bp, Homo sapiens
catcttggagatacaagagagtatccatgcaaggctagttagtgcttggactaaggctaatgtttctaaagaaaaaaaatgtgtcaaataaaagtaggttggtaagaagatgagttataaataaggaaaatcaaatagataaagctaattttagctaaagaactaaattaagacttcctaacatcagatatgtaaagaaagaagcccattctktgttgcaacatcaatggggaataatagaaataacaattgtacactcccatagttcttaatcctcttctcagactgagttggaatatccccccttataactgataaagcttacaggaatgtaatataattattgcttcagtgaatcaaatattacttgtctagaccagcactgtgcaatggaacactgtgtggtgatagaaatgatcttctctatgctgtcttaacatcttgttactattggtaatagagaactcaaaatgtgtgatacatttagatttaagtaccacatgtggctagtgactaccatattggatagggcagggttagacactctgctagggccagtacttgtggattttacatttttcttatccataagttcagcagcggact

SEQ ID NO: 466950 - DNA, 568 bp, Homo sapiens
aaatccattaaaagctcttttaatgcagttgtttggaccctacaatcccagagattctgattaagtccatctggaatagaggttggaatctgcattttatccaacaccccagttggataaaagactgaccctgtggatcagtcctttagaagtactgtgtcagaagattaaataaagacatttctttattgaattcatcataatayaggctcatctaaattttttcctgcacagtggggagctatacttccagttctgcctaatgttaatggtagtctgtggaaaatgttttctttgttcaaattagcttgagaaatgctggagtaagaaaagtgtgtttctttactgcaggatttctcaatgtgtgtgtgtgtgtgtgtgcaagtgtgcatcctcatgcttataaactgtgcaaggggggaagtcactgaaagctatgcacaagtttacaaacgtatatgactatgaagcccttgtttccacaaaactactcattcacataaggagcttttggaaatgcggccctagagtgaataaatcacagtaaacaccaggaaccccttgggct

SEQ ID NO: 466951 - DNA, 608 bp, Homo sapiens
tcttgtcctttaaggtccaacaagggagattttttaaatggttggcttgaaagaggtcaaggggttgtaatatttgatcttcaaaagaagtaattattcaaagcaaaacttctttccctcttttcaagtcacagtccatgtggaaggtctrtactcatatataccaattataaaaaaatataaccactgaggtgcaataaaaagacatttctaggtttgttccaatatcctcattcaatgtgcttctcaaattacagatggaattcagagaaagagcatctaggggtggatagtcatcttttctaagacatgcagagtttcagacgctataaattttaattctgtctgaaggcaaagggatgtttatatataaaaaagaaaaaaaaacctgaaagaatacttcaagctcatagacattagaaaaggatattaaatattccagagaaaatgatcaataatgaggcagttaaagacactgaagaaaaacctgcttctgaagccttagggaagaaattgaaaccacatctgaaacccacagcaaaaaaaaaagttacttgggaaaagcacctggccccaacaatgctatgtctgagctcataaaagcagcg

SEQ ID NO: 466952 - DNA, 659 bp, Homo sapiens
cttttctcaagccctgtgctagcaccctttcccagtatttctggttctgccttttactctytttccttttctaggcttcctggccttctaggatgttcaccaggtcccctttctaacctccagtaatacagccatgtctttttaggtttctcccagcactgcacacctggcatcctcatgtggcagtgcagactcacctgaactctgggcttcctgctatctacaggttgaggatcaccagcaaatggtatttagtaagcatcttctccctgcatatttttaatcatttcagtattctgagaccagaatacatatttccagccaattcattcagattacataaacatatagcagtgcttagctaacttgaacttaattctagatcagctaatgaagagactagaagaatctccttatctaaaggcttcttgtaaaatcacacaggaaaatcttaataatctctaagcttgcagatggaatgttaactacattgcatactataacaaaatataatcactcaaaatactgtgtttatttggatatcatggctaaattttttttaatttcttgtttataagtacatattaatatttcatctttctgtactactaaactctgctaataatcacttgcccatatgccacagtttatcaatttga

SEQ ID NO: 466953 - DNA, 659 bp, Homo sapiens
cttttctcaagccctgtgctagcaccctttcccagtatttctggttctgccttttactctctttccttttctaggcttcctggccttctaggatgttcaccaggtcccctttctaacctccagtaatacagccatgtctttttaggtttctcccagcactgcacacctggcatcctcatgtggcagtgcagactcacctgaactctgggcttcctgctatctacaggttgaggatcaccagyaaatggtatttagtaagcatcttctccctgcatatttttaatcatttcagtattctgagaccagaatacatatttccagccaattcattcagattacataaacatatagcagtgcttagctaacttgaacttaattctagatcagctaatgaagagactagaagaatctccttatctaaaggcttcttgtaaaatcacacaggaaaatcttaataatctctaagcttgcagatggaatgttaactacattgcatactataacaaaatataatcactcaaaatactgtgtttatttggatatcatggctaaattttttttaatttcttgtttataagtacatattaatatttcatctttctgtactactaaactctgctaataatcacttgcccatatgccacagtttatcaatttga

SEQ ID NO: 466954 - DNA, 634 bp, Homo sapiens
atatataatatcttcctactattgagagggaagggattacattttatttattttgtaatctactgaagtccttagcaaaatttaatcattcattaatttatttattcatcaagtaatattttttgatcacctactaaatgtcagacactacaaggaatgaataaataagwcaatattcctgaagaatttcagagaaaccagatgaatagagttctgaaagatgaacaggatgtgtccaaaataaaaagtgagatgtagattatgaggttgggcagtgtaaacgcaagaaaaaaatatactaaagcctgatagctcatgagggtgtttggggacttccgtcagtctggtatgctgggatcagtggttcatagtcaggaatgctcattaaaatcattcacaaaattttttcaaaatatacatgtccagccccagcaccaagtatattttaaatttctacaaagatgagaaagaatcaatgcaaaacactgaaaactcaaacagccagagtgccccttttcctccaaatgaccacaacacctcttcaccaaaagcttagaactgggctgaggctgagatggctgaaatgacagaagtaggtttcagaatgtgggtaacaacaaattttgccaaagaa

SEQ ID NO: 466955 - DNA, 588 bp, Homo sapiens
ttttattttagattcagggggtacatgagcaggcttgttacctgggtatgttgtgtgatgctgaggtttggggtatgattgatcctgtcacccaggtagtgagcacggtacctaatagtttttctatccttgcccccttccctcccagtatctgtcgttcctgtctttatgtctgtgagtgctcgatgtttaggaggtttagctcctacttctaagtgagaacatgtgacgtttggttttcttttcctgtgttaattcacttataatggcctccagctgcatccatgttgctgcgaagggtatgcttttgttcctttctatggctgaacaatgtgagcatttccttttctccacaacctcacaagcatgtgttgtttttttgactctttaacacaagccattctgactgctgtgagatggtatctygttgtgatttgatttgcatttttctggtgattagcaatgatgagcattttgtcatatgtttgttggccccttgtatgtcttcttttgataagtgtttgttcatgtctttggcccaatttttatggggttatttgtttttcacttgttcaatttttaaattcc

SEQ ID NO: 466956 - DNA, 588 bp, Homo sapiens
ttttattttagattcagggggtacatgagcaggcttgttacctgggtatgttgtgtgatgctgaggtttggggtatgattgatcctgtcacccaggtagtgagcacggtacctaatagtttttctatccttgcccccttccctcccagtatctgtcgttcctgtctttatgtctgtgagtgctcgatgtttaggaggtttagctcctacttctaagtgagaacatgtgacgtttggttttcttttcctgtgttaattcacttataatggcctccagctgcatccatgttgctgcgaagggtatgcttttgttcctttctatggctgaacaatgtgagcatttccttttctccacaacctcacaagcatgtgttgtttttttgactctttaacacaagccattctgactgctgtgagatggtatcttgttgtgatttgatttgcatttttctggtgattagcaatgatgagcattttgtcatatgtttgttggccccttgtatgtcttcttttgataagtgtttgttcatgtctttggcccaatttttatggggttatttgtttttyacttgttcaatttttaaattcc

SEQ ID NO: 466957 - DNA, 554 bp, Homo sapiens
aggggggcaagggtggaggattacttgaggccaagagttcaaaaccagcctggtcaacatagcaagaccccatctctacaaaaataaaaaataaatgaataaaaatttagtcagacatggtgacatgtgcctgtagtcccaactacttaggaggctgaggcaaaaggatcacttgracccaggagttcaaggctttagtgagcgaccatcatgccactgcactccacgccatagcatgaccctgtctcaaaacaaataaagcaatggaggaaagagatggtaacatatatttactaaggactgacatactaatagtgagtgcttactaaatgtctactaagtgtctgtgtttactaagtactttacttatataatcctcagaaccactaagtaggttccattgttgttcttattaaagagctaaacaaactcttattgaatagtacagagagtttaaccagcctgccaaagtcacacagtaaatcacagaacagggattcagaccccgcacacttgggttcctgaatctcacatatgaacactccactcatgta

SEQ ID NO: 466958 - DNA, 549 bp, Homo sapiens
cccaccctcgttccataactaacttgttccacaacctaagggctgggatacaattagtgccctcatttccctttctttctgcctacagggaaaataatacttttcagaatatagattagagtttgtaaaytgaacattatccaatactatttccagcaaaagtgataccaatatttagtacttgtcaacatttcaaagccaggggcatatattaacaaatgggaaagcatctataggtttctatgagaaagaaaatatggcatggacaaaacagtgactgagttttttcatacagtgtcacagaggatgcaaaaatagaatgaaattaacagccccagtctagcctgaatacctaacatttggacatcctactcccatgggttgaatgatgctgctgattgattttgtttttatggttggctctgttacagaaattgacatttgggctgtatttacaggacatcagtacagtcagttgaaaagtaagcagattcatgcaaaccaattccaataacattttgattaagtagtgagcaagggaaattgtgt

SEQ ID NO: 466959 - DNA, 655 bp, Homo sapiens
agtcccatatttcttggaggctttgttcattccttttcatcctttattctctaatattgtcttcacactgtatttaattaagttgattttcaatctctgatatccattcttctgcttgatcgattcagctattgatatttgtctatgcttcacaaagttctcgtgctgtgtttttcagctccatcaggtcatttatgttcttctctaaactggttattctagttagcaattcatctaaccctttttcaaggttcttagctttcttgcattgcattagaacatgctcctttatcttggaggagtttattacccaccttctgaagcctacttctgtcaattcatcaaactcattytccatacagtttttttccgtagctggcgagaagttgtgatcttttggaggagaagaggtgttctggtttttggaattttcagcctttttgcactagttttttctcatcttcatggatttatctacctttggtctttgatgttggtgacctttggatggggtttttgtgtggatgtcctttttgttgatgttgatgctattcctttctgtttgttagttttctttctaacattcaggcccctctgctgcagatctgctggtggtcctcttcttcagacttctgtgcttgcagtgagaatttca

SEQ ID NO: 466960 - DNA, 535 bp, Homo sapiens
tattccaacagtaaactcattcagtatgtctcaagctgaactgattctttcctgccaaatcagttatcttctaactttctattaaactcctcatgattcttcattggaagcttccccataatggcttctacaacatattttgttttttaaaaattaatttaaattttgagtatataattaattcactttyaacagtaaaaggtttttctctcttctttatctgttagctccctgtatgatagtgtacacaaacactactataaatttcttataggttatctttttaaagatacatatgtatacacaaaaatgcatacttaggttagtctaaaataagttatgttccaggatctaccttatttttaaaaatacatattttttcaagagacagagactcactgtgttgcccaaatgaaatgcagtggctattcacaggcttgatcccactactgatcagcctgggtgtttggatctgctccacttctgacctaggctaattcacacccctaggcaagctggtggtcccccactccaa

SEQ ID NO: 466961 - DNA, 559 bp, Homo sapiens
aaattttgtttaagtctgtgggctaacyatattcacttaggaagcaatacatacagtaaaaatgcaaaattaatatatttaacttaaacaaatttagatttatgcatagggtatgcccctatttagggtacacccctattactcatattaagcagacagttgatgcaatcacacagaaaacaatcaatgcaagctatcaaaatctatgaaagtatgtataaagtttatttcagggtttcctgaccattagaaagaattaaaattcactgtttaagtgagcctcaagtagatagtgataaaattatcactattctcagggaagaaattgaagaaaattgagggcaataaagaaatattactaatatagaattagaggagcagatatatatgtgtgtgtgtatatatatatatatatatatatatacacacacacacacacaaagctttatgtgttacttaatgggagttttataagcttttcaaggattattttaattttatggaattgctgctttccttgaactgcctcgaaaaatgttactccacaatctattaacta

SEQ ID NO: 466962 - DNA, 569 bp, Homo sapiens
ataaatatgtactgttttaagccataacatttttggtaacttttatagaagtcataagaaactgaagtttcttcctcactatgctttaagcttccagatggcagggactatatcttgctggtacttggtagggattcagtaaatatttgttaaatgaatgaattaattaattaccaaaagttaatgttgttkgttctatttatgttatcacagtagaataaatttagtcatataatatcctctggggaactgttagtctggttcattcctttatggttgccagtgtgtattaaagttacagtcataagtttctagaaatagaattgtaataacgttttaaaagttttaaatcatgccgtatttgaaactctgtgagggcaggaaatttcatctggtttatgctttactgattctccatcccctaatacacagattctaaatatttgctaaatgaataaaagaaagcagcttcattcacttcaacaaatatagaaatatattagaaactatgatgtgccaggcaaggagcttgatgttgaccttcaacaataggtccatagtccctgccc

SEQ ID NO: 466963 - DNA, 579 bp, Homo sapiens
tgcatctagtagctgacactctgacttattttttaatatttgttaagggcaataagcaagaactagttcttctatcattttacaagctgaatggctggttagtagtcatttttattctgacctggtttgaacctgcataatactcacattgcctctggcatttgactgtgtgcagattacattttgcttctttcttcagaaattgggcactgccagggarcaccagcaattccttggaagtcatgttccaagcccattgatgtaaaaggctaaaatgaactgctttcttttgtcccaaatttcccttccaaattttgcttatgtatctgataatttattcaagatttagttttaaaaattcacactgtaaagctttgggtctgtgtctcagtctgcacagatactgaatcaaacatttgagaatttttaaaaaatcagatatagttttagtcaattagggccaagacagataagtaaagatttagataactaaaataaaaatatttccattggttatttctgtttctcaggcatatctgaggtgtacacacataaaacattaacatatttcttaactat

SEQ ID NO: 466964 - DNA, 674 bp, Homo sapiens
atgatcttctttagaaataggctcattgcaagtataactaataaagatgaagtcatactgtagtagggtaggcccctaattcrgtatgatagatgtctttataaaaagaggggaagagacatacagacagaaagggagacaaggaggacaccatgggatgacacaggcagtgactggattgatgcaggagcaagccagggaatatcaaggattgacggtcatcaccagaagttaggaagaattctacccagagtctcagagggagtatgacattgctgacacctgatttcagacttctagcctccagaactgggagaaaataaatttctactgtgttaagccaaccaatttgtggtttttttttttttttttgtaatggcaaccttagaaaattaacattccttcattttaaccaagagagatcctcaaactgaattttgcagtcagaacctgcaagtatcctaggcaacaaaagaagctgatgacaccctccttctttgctgctcttctctttgtgttagttcattttgtctttgttgcttctatatatcttcactgcctttaagatttttgactttcccatttctttcaccttttcaagtatgcagtaaaggaattttcatttgcttccttctccatcctacctaacaccagttcttcctctactctttatt

SEQ ID NO: 466965 - DNA, 674 bp, Homo sapiens
atgatcttctttagaaataggctcattgcaagtataactaataaagatgaagtcatactgtagtagggtaggcccctaattcggtatgatagatgtctttataaaaagaggggaagagacatacagacagaaagggagacaaggaggacaccatgggatgacacaggcagtgaytggattgatgcaggagcaagccagggaatatcaaggattgacggtcatcaccagaagttaggaagaattctacccagagtctcagagggagtatgacattgctgacacctgatttcagacttctagcctccagaactgggagaaaataaatttctactgtgttaagccaaccaatttgtggtttttttttttttttttgtaatggcaaccttagaaaattaacattccttcattttaaccaagagagatcctcaaactgaattttgcagtcagaacctgcaagtatcctaggcaacaaaagaagctgatgacaccctccttctttgctgctcttctctttgtgttagttcattttgtctttgttgcttctatatatcttcactgcctttaagatttttgactttcccatttctttcaccttttcaagtatgcagtaaaggaattttcatttgcttccttctccatcctacctaacaccagttcttcctctactctttatt

SEQ ID NO: 466966 - DNA, 417 bp, Homo sapiens
atgtctttataaaaagaggggaagagacatacagacagaaagggagacaaggaggacaccatgggatgacacaggcagtgactggattgatgcaggagcaagccagggaatatcaaggattgacggtcatcaccagaagttaggaagaattctacccagagtctcagagggagtatgacattgctgacacctgatttcagacttctagcctccagaactgggagaaaataaatttctactgtgttaagccaaccaatttgtggtttttttttttttttttgtaatggcaaccttaraaaattaacattccttcattttaaccaagagagatcctcaaactgaattttgcagtcagaacctgcaagtatcctaggcaacaaaagaagctgatgacaccctccttctttgctgctcttc

SEQ ID NO: 466967 - DNA, 570 bp, Homo sapiens
gtcacagatgttattctttcgaaatagatgtaccttttcttccccaccattggtgcatgaaaagcctctccggaatagacagcattcattaaatgttcttttaaataattaaaactgtgattaatattcagcaatgaccagagacagtaatgattacactttatatttctagtcttagatgctractctagtaatgacctttgataataacatcagctagatacctatagccaaatataattgtaagctgacaactgtttgttacattttcgtagtatttcttgtgttgactcttaaaactacaaaaatacaagcagggaataatggcaaaagggcctgaaatagcttttccctaaagtaactaaataagtgaggcaaaattgctccttagacctgattaaagtattcttcataataatatcgactatttccaggctctttagtacttgtcacatactgttatcccattaaaacattagaacagctctgtatgaagtagctggtttatttttttcattttcttaggggagaaaactaaggtaaagttagctcacatagcatgttagggta

SEQ ID NO: 466968 - DNA, 563 bp, Homo sapiens
caagtattaacagagtttttggtaaaagtggtaaaatattgccagttaaaaaaatcttcttcatccaatttctactcaatttaataaaaacagatagtcaaaggcactttaaatttaataaaaaagaaagcacagcctcttgtcataagctccaaaacttgagggccgcaataaacacagtgtttggcgaggccccagggcacccaaaatccattccgacctctgcattggaagtggtacatttataaaatcctagtaaagtttataataytataatacttgaacaagaacgagtggcatggatattgtcttcttacttggaggaagtgaaaatcatttccaacagaaaggcgttaaatagcagaggcaaataattaggatatgctttctctgatactaaaaaaaaaataggctttagggattattcccgagttgaggggatgacattaagttgcaagggtattccccatgggaacaagaagtacttcccagtaggtggagtaaatcctggtacagaatattttgctcattttacaaagtaccacagactagtagttccaagt

SEQ ID NO: 466969 - DNA, 563 bp, Homo sapiens
caagtattaacagagtttttggtaaaagtggtaaaatattgccagttaaaaaaatcttcttcatccaatttctactcaatttaataaaaacagatagtcaaaggcactttaaatttaataaaaaagaaagcacagcctcttgtcataagctccaaaacttgagggccgcaataaacacagtgtttggcgaggccccagggcacccaaaatccattccgacctctgcattggaagtggtacatttataaaatcctagtaaagtttataatactataatacttgaacaagaacgartggcatggatattgtcttcttacttggaggaagtgaaaatcatttccaacagaaaggcgttaaatagcagaggcaaataattaggatatgctttctctgatactaaaaaaaaaataggctttagggattattcccgagttgaggggatgacattaagttgcaagggtattccccatgggaacaagaagtacttcccagtaggtggagtaaatcctggtacagaatattttgctcattttacaaagtaccacagactagtagttccaagt

SEQ ID NO: 466970 - DNA, 643 bp, Homo sapiens
ctgtattccaattcatttccacatcaactatatttttaacatagatgaatgacaacacaaataagaggagataggctattttccacaatatctatacgaatggagtatactgtacaatatagatacacagtggggtccaaaattagtgtaaatatacacacatacatacctgataaatatatgcacatatatgcatatgtgtatattaggcataagagagttagcatttctcagargtccatagaatctgtcaagccagagtagagagagtttgctgaaccccttgagcattgagaccctagaaagaccacacttcagcagtaactgattagtctaatcctggaggaaagaatactcttgattgctttttatgcaagtctaacaacatattgaggtaaaattgatccagaattaaaataactacctgccaaaataaaactcaataatttctaaaggaaacaaagggagtctttaaccaaaaaacattataatgtccagtgctccttaaaaaattactagacatgttctacacgtagcctcagtgatggcccccagtgatctctaccttctgatactcataccactgtgtaatcacctcccattgagtgtgggctcagctgggcttggtgacttgttttcaata

SEQ ID NO: 466971 - DNA, 605 bp, Homo sapiens
taccttttgtgaatgtcagtatccctgtctatacagtgtgagttaactgagatgtagtatttaaaacacctgtcccagaataggtgtggaataattgctgattttaaaaatcaactttgttgaagtataatttgacaaataataaaatgcattcattttaactcttccayctgttactactaccacaatcaagatataaaatatcttcaccacgttaaaaaagtttccttgtctgccttcccagacaatccctaacaccaccctgggaaccaggcaactaatctttctgttaccatagattagattttcttcttttttgaggttcatataaatagaatcatatggtataccttctgtgtctggcttctttgcttactataatgcttttgagagatttatccatgttgttttacatattagcagtgtattcttttttattactgcttagtattaaattgtgtggatatcataccatttgtttacccattggcctgctgatggacatttgagtgattttctgtttggggctattatgaataaatctgttatgaacattcttgcagtctctgtgtagaaatatatgtatttatttctcttgggtcaat

SEQ ID NO: 466972 - DNA, 569 bp, Homo sapiens
gcagtgacagttcactaatgaagctgtgttatttacatcaaacaaacagaataagaaaattgtttgttgcccacttttaattccaactttttattgtatgcctgtgagaaaatgatatttacacagaaatttaaaagtttcataaatatttacctatacaatcatatactgtacataattggttaatcatgtttcaaatgttacaaaagcattcttgtgattagaaatcttacttgcaagattagcatgtcttctcttgcttatgtactccacagtaatcttctaatattatmttctgactgtttaggggccacataatcatttctatttgttaaagttattaatctgccttatcaattatttctgtatacgtaatgtaatccatactcagatagaggaaagtatgtaattacaagcttttctgttatctccatgttttttgtgttagtaataccaatgcccaataaactggtgaaagacattttttccctaaatcatctcaaaaaattcatgaatactttaacttaatttattcagttttccacattttttgttgttaagcatgaatt

SEQ ID NO: 466973 - DNA, 665 bp, Homo sapiens
attgtaagacagattgtaaatttgtattatttaagcctctagggtttgtggttatttgttacagcagcattaacaactaatacagattaaaattattatttttactttaaggtattacattgcagctggtttgttatacatcattagataataactggaacggaagagcagtttttgtctgtcattagatagtgaactttttgagcgkagtcatatttgtatcctgttggcctggtgctgaatttaaaagatataatgcatataattaatgctgaatgaataagtaaatatcaacaatgatcaaattattgtattagagttctccagagggacagaactaataagatgtatatatacatgaaagggagtttattgaaaagaattggctcacacgatcgcaaggcgaagtgccatgatagtctgtctgcaagctgaggaagaaagccagtagtgcctcagtctgtgtccaaaagcttcaaaagcagggaagctgacagtgcagccttcaggttgtgggccctggcaaccaccggtgtaagtctaatagtccaaaggccaaagaacttggagtctaatgtcacagggcaagagtaacggatggaagcacccatcatgggagaaagatgaaagccagaaaattcagcaagccagctcatcccaccttc

SEQ ID NO: 466974 - DNA, 527 bp, Homo sapiens
tattagcataaatgttaccattcatcttttcactgtgtaatgtcagttttaaatgccagttgtagttgtaactcatatgcagaatcattgaaattgcacaattgagattttatagctcatacatacatttgtattttgcacaaaactaacttatctgttttttgttttttggttttttttttttgagacagtckcgctctatcgcccaggctggagtgcagaggcacaatctcggctcactacaactttgcctccgaggttcaagcaattctcgtgcctcagcttcccgagtagctgggattacaggtgcctgccaccatgcctggctaattttggtattttcagtagggactaggtttcaccatgttggccaggctggtcttgaactcctgacctcaagtgatccacccacctcggcctctcaaaatgctgaggttacacacgtgggccactgtgcccagcctcatctgtttttatttgacttcttgatacatgtatattacaccaacactctacttttggctact

SEQ ID NO: 466975 - DNA, 527 bp, Homo sapiens
tattagcataaatgttaccattcatcttttcactgtgtaatgtcagttttaaatgccagttgtagttgtaactcatatgcagaatcattgaaattgcacaattgagattttatagctcatacatacatttgtattttgcacaaaactaacttatctgttttttgttttttggttttttttttttgagacagtcgcgctctatcgcccaggctggagtgcagaggcacaatcwcggctcactacaactttgcctccgaggttcaagcaattctcgtgcctcagcttcccgagtagctgggattacaggtgcctgccaccatgcctggctaattttggtattttcagtagggactaggtttcaccatgttggccaggctggtcttgaactcctgacctcaagtgatccacccacctcggcctctcaaaatgctgaggttacacacgtgggccactgtgcccagcctcatctgtttttatttgacttcttgatacatgtatattacaccaacactctacttttggctact

SEQ ID NO: 466976 - DNA, 619 bp, Homo sapiens
gtttagataacggttgggcttctctctctctctgtctctctctctctctgtctctctctctcagaccaaatatatcatgtctattgaaagtctgaagatcagtacatttcctcctgtttggaaaataataatgcctaggtttcactagaattctttttatctccaaggctctcttaaatattgactaattaaataaaaactaaggaagtctagctaaatagcctcactttgaggaccagcccagtggacttagaatacacagtgatttgctgtatctctgaaacaagcaactagaaatcttttattattggctataatagcaagtggcatctcttattatgtttggcagctgacatttcaaattgcattttggttggttgttatacatgaaatagtaggatatgagtagactaaaaatgagaatttgcagcccagggatgacatgaaatatctaacatctagggrttgccatgacaactcatcagaaagttgctttgtaatcttttggattaggctctggcccagggtcactggattggagttggagaacgctttggtaacaggatgtgaatgttgtacctttactcaatggcatttgaatttgcagtttggtcatgtt

SEQ ID NO: 466977 - DNA, 632 bp, Homo sapiens
atctgggagtcctgatggttgctatcctgagaaagaaactcagataagacaaatataactttctcaaggttcaaggctgggagggtcagtttctatgtttattcaaaagaaaccataaacatgagttctaagggacaattaggccagtttcagtcctcctttctatttatcaattcttcaatcatggggaatctggtagttgatctttctggctgctycatgatgaggaagggcattgtggccactccataccatgggtgaccatatggccacccaagaatgaaaggttaatctaatactattttttttctgaaatacaatatttctctctccagtcctccacttccaccaaagacaaatcacagcagggccaaactacctgaaaaataagcttcagtcccaccatacttggcctgattatccacgcaaagtgcagaatgaatcattgttcatataggctcctctaaattggctttgcagaaatctctcatggtaatcccatacttgacctccaaaggcctctcaagcccagccaaggatccatctgcacctgcagttacttacatgaattgggagaaccttttgtttcttgaggccccaaaacaaattgaggatcttaggcctgtcagaaa

SEQ ID NO: 466978 - DNA, 632 bp, Homo sapiens
atctgggagtcctgatggttgctatcctgagaaagaaactcagataagacaaatataactttctcaaggttcaaggctgggagggtcagtttctatgtttattcaaaagaaaccataaacatgagttctaagggacaattaggccagtttcagtcctcctttctatttatcaattcttcaatcatggggaatctggtagttgatctttctggctgcttcatgatgaggaagggcattgtggccactccataccatgggtgaccatatggccacccaagaatgaaaggttaatctaatactattttttttctgaaatacaatatttctctctccagtcctccamttccaccaaagacaaatcacagcagggccaaactacctgaaaaataagcttcagtcccaccatacttggcctgattatccacgcaaagtgcagaatgaatcattgttcatataggctcctctaaattggctttgcagaaatctctcatggtaatcccatacttgacctccaaaggcctctcaagcccagccaaggatccatctgcacctgcagttacttacatgaattgggagaaccttttgtttcttgaggccccaaaacaaattgaggatcttaggcctgtcagaaa

SEQ ID NO: 466979 - DNA, 632 bp, Homo sapiens
atctgggagtcctgatggttgctatcctgagaaagaaactcagataagacaaatataactttctcaaggttcaaggctgggagggtcagtttctatgtttattcaaaagaaaccataaacatgagttctaagggacaattaggccagtttcagtcctcctttctatttatcaattcttcaatcatggggaatctggtagttgatctttctggctgcttcatgatgaggaagggcattgtggccactccataccatgggtgaccatatggccacccaagaatgaaaggttaatctaatactattttttttctgaaatacaatatttctctctccagtcctccacttccaccaaagacaaatcacagcagggccaaactacctgaaaaataagcttcagtcccaccatacttggcctgattatccacgcaaagtgcagaatgaatcattgttcatataggctcctctaaattggctttgcagaaatctctyatggtaatcccatacttgacctccaaaggcctctcaagcccagccaaggatccatctgcacctgcagttacttacatgaattgggagaaccttttgtttcttgaggccccaaaacaaattgaggatcttaggcctgtcagaaa

SEQ ID NO: 466980 - DNA, 639 bp, Homo sapiens
cacaatagtgatatttttaaaagactacatagaaggagaacaaaagagagtgtgctcctacagcacttgctgtgattgtggggagctcaataaatyggacacagcagatctggaggaacacaacagtccccaggattctatgaacagagggaaaagggaaaagaaaatagaagcaggcaagtcgacactgccatctcagtttcgccttgacctgggagaagggtgatagaaatagcttctagctggcaataaaataaaataataaaataatgctttacttcttttcttgaacagtactcatttcgttccgattctcacaacaactttaggggcactattctgattttacaggagaaaatcaaggctccaagaaggcgtgtggcatgtgcttggccctttaactggtgcgcctgggagtccagtctgagcctctgaccccaagtacacatctctctccaccacacgtgactctcagaaggtccttccctctctcccattttcattaaaactatgaggatcaggggagacaggacaaataaaagtctgttttgcacacgccatgtccccgtgtccactgcagatttatcggagacacttccttatcatccagatagtgaccaatccctcttagcaaacaac

SEQ ID NO: 466981 - DNA, 639 bp, Homo sapiens
cacaatagtgatatttttaaaagactacatagaaggagaacaaaagagagtgtgctcctacagcacttgctgtgattgtggggagctcaataaatcggacacagcagatctggaggaacacawcagtccccaggattctatgaacagagggaaaagggaaaagaaaatagaagcaggcaagtcgacactgccatctcagtttcgccttgacctgggagaagggtgatagaaatagcttctagctggcaataaaataaaataataaaataatgctttacttcttttcttgaacagtactcatttcgttccgattctcacaacaactttaggggcactattctgattttacaggagaaaatcaaggctccaagaaggcgtgtggcatgtgcttggccctttaactggtgcgcctgggagtccagtctgagcctctgaccccaagtacacatctctctccaccacacgtgactctcagaaggtccttccctctctcccattttcattaaaactatgaggatcaggggagacaggacaaataaaagtctgttttgcacacgccatgtccccgtgtccactgcagatttatcggagacacttccttatcatccagatagtgaccaatccctcttagcaaacaac

SEQ ID NO: 466982 - DNA, 639 bp, Homo sapiens
cacaatagtgatatttttaaaagactacatagaaggagaacaaaagagagtgtgctcctacagcacttgctgtgattgtggggagctcaataaatcggacacagcagatctggaggaacacaacagtccccaggattctatgaacagagggaaaagggaaaagaaaatagaagcaggcaagtcgacactgccatctcagtttcgccttgacctgggagaagggtgatagaaatagcttctarctggcaataaaataaaataataaaataatgctttacttcttttcttgaacagtactcatttcgttccgattctcacaacaactttaggggcactattctgattttacaggagaaaatcaaggctccaagaaggcgtgtggcatgtgcttggccctttaactggtgcgcctgggagtccagtctgagcctctgaccccaagtacacatctctctccaccacacgtgactctcagaaggtccttccctctctcccattttcattaaaactatgaggatcaggggagacaggacaaataaaagtctgttttgcacacgccatgtccccgtgtccactgcagatttatcggagacacttccttatcatccagatagtgaccaatccctcttagcaaacaac

SEQ ID NO: 466983 - DNA, 555 bp, Homo sapiens
aaaattagttccaaatggattatagacctaaatgcagaatgttagactgtaaaatgtttagaagaaaacataggagaaaatcttcttgacttggagctaggcaaggaggtcttgtatgtagtaccaaaagcataatccataaaagraaaatttaatatattgaacttttgccctaccaaagacactgcctagggaacaaaaatgcaaattagagattaagagaaaatatttgcaaatcacatatctgataaatgacttacatccataacatataaagaattctcaaactcaataaagaactctcaaactcaatagtaaaaaaaatttaatttaaaaatcttttttaatggtcataagacttacataaatgcttcaccaaagagaatatatggataatgaataaacacatgaaaagatgttcaacatcactaaccattgaaaattacttaacattaaaaaaattccttaatgtaaagatgaaaaaccacattagcatctcaattgaggcaaaaacacaaataagtaaaatacaattcaatacttcttcatatgaga

SEQ ID NO: 466984 - DNA, 599 bp, Homo sapiens
ctgaaccaactctttcacaagttcagtgtttggtgctcaaaaaaggcattggaggctgcatagaggcctcagcacagatacagctggcagaaggactgtctttagggattagggaaaaatagtgaaagtgatcaagagatgagcacctattatacactaagtatagcactatgggttttacatgtgttatctcagtttgggaggttcaatcccattgctcttggtcctgaactcccaagtaaactgtagatggttttccattagagctttctgtcttctttgccatgccatctgttcctatttagtaaaatacagcacaagaggccaccacatggactaaatgaaagagaaagggtaaggggaagagagcttcttggtgaagaaagggtgcatatgagggagaaacagatgggaagagtaataccagtgagctcacctcttaatttaataagaaaaggccattttatagccatctctattaytttgaagtaatgaaacattttccaaagtgagaaatcatgtcatctgttgtgcttcagtaggcttaatctaaagagaagcaaagtatttcatatgtttttatgagaaactttgaaaaa

SEQ ID NO: 466985 - DNA, 597 bp, Homo sapiens
gctggagaggtgttgcggtcatttggagaagaggcagtctggctttttgagttttcagcatttttgcattctttctcatctttgtgggcttatctacctttgatcttcgaggttgctgaacttcaaatggggttttgtggggtcttttttgttaatgttgttgtttgtttgttttaacagtcaagtcactcttctgtagggctgctgcagtttgctgggsgttcactccagaccatagttgccttgttcctcccatacctggaggtatcaccagtgaaggctgcaaaacagcaaagatggtagaccattccttcctctgggagcaccatcccgggggggcaccgacctgatgccagccagaacattcctgtaggaggtgtgtggagaccccgttaggatgtctcacccagataggagaaatgggatcagagactcacttaaagaagcaatctggctgctccttggcagagcaggtgccttacactgaccactcggcctcctcagagataggagcatagaaagattaagtctgctaaccacagacatagtggatgcccctctcccctgggagccgcagcaccagggaatgatgagagt

SEQ ID NO: 466986 - DNA, 572 bp, Homo sapiens
tgttgccctggctggtcttgaactgctaggctcaagtgatcctcctgcctcagcctcacaaagtgctggtattacaggcttgagctaccatgcctcgcctggcttttttgtttaatgttggtgcctagcagcctacttgactggacacaggcagctgttgggaaagtggtttttcacttgcctttgatgcttgtatttttttctgacttgtttctggatgtctctttctacccctttccctatatatttatttacgcttactgtgtcaggtccttaagaaaactggtactgtctttcccattaagatgtattaaaagcattgatgctacctaatccaatcctcacctttgaaaagccaaggagctggtatrtggatattatgcatggaagttcagggcaatggagatttaaggtttaacgggcagattagatgattggattccttttctgtacttggtcaaagagtcttatttaaatgtgatgtaagtcactagtctttaccattggtgtagttgttaagtatactttcaggtcttccttgttctgttttaatgctgatttaccatttacta

SEQ ID NO: 466987 - DNA, 645 bp, Homo sapiens
aagaaagcaatgtttaaagaatgaaaacaaaaaggagcaataatcaacaatttgagattctaaattaggacacagaaattattttagaagaaactaataaaaattatggagttgaaaataatagagctaaaataaaatttactaaagggtcccagtagaaaattcaagatggcaaaagacagaatcactgaacttgaggattgatcaatagaaatcaccgatctgaagaacaaggaagaaaaaaatgaagaaaaataaatggaccatcacagaccagacctgtggaacaacataaattgtgccaaaatatatgtaatgggagtcccaagagatatcaaatagaaagggacagtgaaaacatttgaagacatagtggcataaaatttccaaagtttgatgaaaatctttaatctactgatccaagaagctcaacaaactctaagtgggataaataaaaaatttagaccyagacataccataaactcttgaaagacaaagagaaaatcttgaaagaagcaaaagaaaaataattcatcatgcacaagaagcatcagtatgattaatggctgactttcatctgaaacaatggaggccagaaggcagagaaatgacattcaaagtgctgaaaggaaaatattgttaacc

SEQ ID NO: 466988 - DNA, 665 bp, Homo sapiens
attcaaagctcagcaagctgattccagagcctggactgcaggggtgtgaggagagttaataggctataaggttaggaaagctagttaggggtcaaagtatgaaggacaagtcttgtcgtcttgtctgtgtcttgcaaataccatggaagcctggggagctttagaacaggggcgtggcttgatccagaacgcttaggaaggtccagggtagggtggaggaggatggatcatggtggccagagactgtggcaggaaagctgatgaggagttgttttcatccttcaagtgagtgatgagggagacctgggctaagcgaggtgacagtgacagtgaggatgctgatgagggtgtgatctaagcactaggggattcagagtgctctgaattccctaacttaggataatttggcagcggtcatgccaatgaccaaggtagggaatgaatcaggggaggcatttctgaagaggagaayatggtaagctcagtttgggatatttaatgagtcacattcagtggttattaaaaggggagtctgttgctcggaagagcaatccagggctgaacatagaaattgagagtggagggaggcatattcattaaggtggaggccaaagccctaggaagcctcacagaacagaagacagcatggcaggaagccagcatgc

SEQ ID NO: 466989 - DNA, 497 bp, Homo sapiens
aaattcataggtcatttgcaggcctcaggatggacaaaaccaagcatcacatggaatgctctgtgtacatgaaaaaatgaagaaggtaatcaggaaaaagagattggagttgagaggtgcagttttatgaccaggctgatcaggagtcccagatcaagctcacttgttacatataacactgcaggagaaagattagacagtatgcttcttcaacatgaggtgaatttcatcctggaggaaaatcaactaattcagcccaatgtaaggtttaaatataagttaggtttaactatcatcaagcactgggattgaaaatgtataactggttgatttgyaggtggggaaaaatcagttagattagggaagattctgtgcatagttaccaggaatgtctgttcatagcaaaacagaacatattttatattgaacaacaacaacaaaagcaggatgtcatgatttctacagatgcagataagccaatcagtagaaggaagttt

SEQ ID NO: 466990 - DNA, 605 bp, Homo sapiens
tgaaaatcgaaataaaagcttatgagctaatcctggggcacacataggagtgtgggatggagaaagaaggytgacatcagaaaccagggtcttaggccaatagggagtgggtaatttgaattgaagatggctttataaacctgaagctatcactaataggaatgtcaaagaaacttgcctttctacctgaactatgggtgggaaaagtcttccttcagtatttgtaaacattgactctatccatgtacataattgaggtgtaaatttgtactacccaaatgtcatgcaaatctcaatcacagaaagtaatataaaaagtggtttgaagatgactagccctgaagtagcaggcagaagcaaaaataaatctactctatagtgatgtgcccataaactagcagaacaggactccagtagacaatgtcccaccaaacatgagctcacaatctaaaacaacaaaacccacaagaacacaatccaccataaaagagtcagcaggtataacaaagagtgagtgtagacatacaagagctatcacataagactatataatagacgtgtttaaaattattaaatacccaaaataagttataaaaaataataac

SEQ ID NO: 466991 - DNA, 539 bp, Homo sapiens
atcattttgtggtgataacactttacctctctctagaagagagtgattttgtcaaagtccagtaaacatgtttcaaggatggaagtggtcaatatatgacatgctctgaaagcctttctgttctcctttacattaatttcatagaagaatttatcttcttttacaattaatcatatccaaatcctcttctcattcttttctgaaccattttcacccctatgattwgtggaagtcacaatttctcagttcatgtattatttaacctatgatcagaatttgtcagtttcttgaaacactttctgaatttggcttctggaataatactctttcatttttctttaaccgtgattcttcctcagtctcctttgtcattttctcctcagatttctgatctctattcaggcttctgcctaaagttctgggtcatcccctgcagttccatagctttaaatcctctatgcccatgactcccaacatcatatctccagctcatgtcttcagaaacttcagtttcaccttatgcaagtacctgtaaaaca

SEQ ID NO: 466992 - DNA, 591 bp, Homo sapiens
cactaaacattgagtatatgtcaggccctttgccaaatattttctcctgtacatttcatttcatcattacaacttatgatgtggttacttttctccattttacaaattaataagtacagcattcatagacactaatcagtaccctgaaaagtctctaagtaataakcaccgaagtagggattcataatcaggctatgagaagacagcattttatctcttttacagttctgttatcctgggtgagaacacaaaatgctgtaagacttccataagaaactaacactattatttattatactatttttctcttgattggtatttttcagaattcagaaatactaatatattgatttttataatctagaataataaatttaaccctttgaattaaagttcatctctagccaaaagtcaatctgtcatttttaaaaacctgctaagatataggatgcacacacatacacaatccttcatggttgtctactctaaaattatggatatatttgcagatatgcttgaaacaggtgtctcaaaactctcttcaaaatatctaagtgatagccatatcaaagaaactacttaattaattaa

SEQ ID NO: 466993 - DNA, 582 bp, Homo sapiens
agacatcatttattaatcaagcaagcctggaggctgtgacagagtaatgatgaaagaatagaaggctytatcctgtcatttacaggatatgtaccaactcattttgaacagagaccaagccatggtatttagcagaaagagcacagcactggattcaagagtttcatggtttgttctaatgctgccttttacttgtcccaaatccactataagttctttttaaattgacttaggtagtatgttctgctatgaattcataattacagaaaatatgttgttgttttttttaaaatattgccttgaattcagcattcaagtagggacaccaaaccaaaattttttttaatctaacatttactgaagaaaagtttacctatttcaccattttgtcagatactgattctatgatagtctctgtcataacaaacaaattaaacagaagtgttgagcatagaactcagtacaagagtcgacatgaacattggtttgaatgctggaggaactgagtccctatccttgttttcaagtgaaaattagtcatacatttgaacagaaattattttgctgtaaaatcaagatttc

SEQ ID NO: 466994 - DNA, 587 bp, Homo sapiens
ctaaaataatatatcctcaatacaataattgctggagacttctacactacactttcagcattggacagtgcatccagacagaaaatcaacaaagaaacrttggacttaatctgtactatagaccaaatggacctaatagatatttaaaagaacatttcattcagcagctgcagatacacagtcttctcctcagcacatggatcattctcaaggatagaccatatgttaggccacaaaacaggtcttgaaatattcaaaataattgaaatcatatcaagtgtcttcagtgaccacaaagaataaaactagaaatcaataacaagaagaattttgaaaactatacaaaacatggaaattaaacaatatgcccctgaataactagtgggttaatgaaaaaaagtaagaaggaaatttaaaaatttcttgaaacaaatgaaaatggaaacacaacacaataaaatctatgggatacagtgaaagcagtattgagtatctacatcaaaaaaagtagaaaaacctcaaataaacaacctaatgatgcatcttaaagaactagaaatgcaagagtgaagcaaacccaaaattag

SEQ ID NO: 466995 - DNA, 622 bp, Homo sapiens
tccaaggacctttgccaacactagagaagtgaacaaacaaacaaaaaacatacagaatggggtacaagctagtcaatcataggagaagggagcatttgcttctctcatctaaaacctgtrgtattcagggacaaacatcatgaggcacagctatttctgtcaggatacatttaaactatgtagaatggaacagaagcaactagacctttgtatgactaagacaagctctagaaaccatctccccacatttcggaccttccagtctcttgacctcaagccctgatgcatgcagacctcacccaccccactcccaatccacacttgtccctcttcattcccaacctcaacacaacccctctgcattgtgattcacatcactctccaggtttctactctggaggatgaggaaggtcattaataattatcttctagtcaagaggtcaataaggcaagatggggcaatagggcagtgacagcttcagggacagagacacattcaacggctgccctgtcctcattatgctacctggacagaatagactatttccttgccacagtcccttagagctcatcctcacagtcagcaaaacgaaaaactgctttgaaactaagtcagacagag

SEQ ID NO: 466996 - DNA, 548 bp, Homo sapiens
ttctagtcccaataattttggtgttagggattagaccaagacacgtgaaattgctaccctgttcttccttccctgttgcttggtccagatatcatgatttcaactccacttgtttcacttgtactattgattatgtatttttttttaaatgtaaggaaattttacatccctggaaagtcagtgttattcataaayagaagtttatatgaaaattgagaaaatggaaacattttaactagaagctattgcttaccaaggttgtatgcaaaaagtctgccctttgttgttgttgtttaaaaaaacaatgacagcacgttagcaaggtgctaagactaccatcaggcttagcttttctctttcctgaatacagaaagatttgaagtcaatgttatttaataatttcaagtaccactagtattaagtggccagcgttttggatgacacaactttgtcaatgttttacagttttcatcgttttccctagtattatgcaggtcctccatgctttacttagcctaatagttacttatatacatgtagtgagaggg

SEQ ID NO: 466997 - DNA, 678 bp, Homo sapiens
aagtaggaatgtgggtttttgatttctaaaacgtcaaagatcaaatttccttgacacagtaacctgtgacattttaaccaaaaagcacgtggcttctaaagggtgtgccagccagccagccaggcaccaagggcccaacagtttttctgtgaggtacctgtgttagtcccagttgtactacccagcagtgttcaccatagtacgagaaatttaatgtaagcatagttgaagaatctaaattcttccaggaagggtatctaactctcaatatggagaaaatacatttttcagagacataagaatacaaaagaaggtagctataggtgtgtttatgactaagaagagttagtcatgcatgtcccaccaccccaaacctaaaaatctcatgtaagtattgccctaagacttcaggcattcacagaggctaagcagggccaactagtcctttcttgctggatgccttgcaattcccaccagagatcaacagggtgccaggtggcttgggagtrcttccttagtcagccactccatctggccatgtcccatctctggaaagagcctttttgcccctaagtgtcagtttcccaacttgcagagccacgtttagatgaccaatctactagtactataaaatttcattatattattattttaaattagaaacctctggattatttt

SEQ ID NO: 466998 - DNA, 531 bp, Homo sapiens
tttgcttttcagcttgaactcatggtcaaaatcccattaagagaagccattactcagttatacatatatatatccccagagagatgacagatattcactgacagtgctattttgaggttaaaagcatggatgccgggacaacgttgcctggatttggatcccagctctgtcattcactgactttaagaactsaagtgaatttgtcaacctttttgtgccttaatttatttctctgtgtctgaaatggtgataattatagtatctgtgccatagagttgctatgatgtttaaatgtattaataaacactaggaatttagaacagaggctggcacatcattgacattaaataaatgttgtaactatttgttattgttgttatcattattattctttcgcccatctgccttacattagctgtttcttacccaccagctgctacccatctgagatagccagctctctcactgttattaccatcaaatatcactactttcagaaagccttccttgatttcttacctccttccttct

SEQ ID NO: 466999 - DNA, 531 bp, Homo sapiens
tttgcttttcagcttgaactcatggtcaaaatcccattaagagaagccattactcagttatacatatatatatccccagagagatgacagatattcactgacagtgctattttgaggttaaaagcatggatgccgggacaacgttgcctggatttggatcccagctctgtcattcactgactttaagaactgaagtgaatttgtcaacctttttgtgccttaatttatttctctgtgtctgaaatggtgataattatagtatctgtgycatagagttgctatgatgtttaaatgtattaataaacactaggaatttagaacagaggctggcacatcattgacattaaataaatgttgtaactatttgttattgttgttatcattattattctttcgcccatctgccttacattagctgtttcttacccaccagctgctacccatctgagatagccagctctctcactgttattaccatcaaatatcactactttcagaaagccttccttgatttcttacctccttccttct

SEQ ID NO: 467000 - DNA, 531 bp, Homo sapiens
tttgcttttcagcttgaactcatggtcaaaatcccattaagagaagccattactcagttatacatatatatatccccagagagatgacagatattcactgacagtgctattttgaggttaaaagcatggatgccgggacaacgttgcctggatttggatcccagctctgtcattcactgactttaagaactgaagtgaatttgtcaacctttttgtgccttaatttatttctctgtgtctgaaatggtgataattatagtatctgtgccatagagttgctatgatgtttaaatgtattaataaacactaggaatttagaacagaggctggcacatcattgacattaaataaatgttgtaactatttgttattgttgttatcattattattctttcgcccatctgccttacattagctgtttcttacccaccagcwgctacccatctgagatagccagctctctcactgttattaccatcaaatatcactactttcagaaagccttccttgatttcttacctccttccttct

SEQ ID NO: 467001 - DNA, 598 bp, Homo sapiens
acctgctttttaatcataaaatagctatgatttggatagcatcaaactgtttcaaattccaacctcaccctaaaaagtacacattatcttctatttaattaagatactaaaacacatagaatttgtcaccccttctcatgggcccccttcccaaattctttagctattaagtggcttagctgggatttggaccaaggtctgtccaactccacagtccctgacgtatccaaaagaactgccatctatacataaatacaacaatgacaaaagtcattttctctaagtgctctgatatgatcattccctgtcatagtaattcattttactttcaatcatcatttacctatgttttactctccccaagttgcactactcttacttaagtgtgtttatatagttttgtagtctttactagtatcaagtaaacctatgtcattaattgatttaacaatgagtattaatctatgtgctgagttcatccattactattcttggtttcttttattcataacttgattwaagtttttatttacccttttatgaaacttttcttaatatattctaacaagcttcaagttcatctattctaaacactcaa

SEQ ID NO: 467002 - DNA, 572 bp, Homo sapiens
atttacattattttgtattgtgtattccttgacaatttattttagctatagtttttattaatatttttgtcttttacctcttctatgagggataaaattgttttacacaccatagcaattcctataaggcaggtctagtggtgatgaacttccttaactgtctgggagatttttaatttctcttacatttctgaaagctaactttgactagtaatgtatgtttttctggcagtttttttttgcccatcagcactttaaatttatcatctcactctttcctgatctgcagggtttctgctgagaaatatcctgayagttgtatgggcacttctttatttgtgatgtgtttatcttttgctgctctcagaattttcatctttgtctttgtgatagtttgattattatattttggtgaactcctctttggattgaatttgattgaagacctctgagcttcctgtacctgaatgttgccatctatccccagattaggaaagtcttcagccattatttctttaaatatgctttctggtctctttttctctttcttttacttcagcaactcctattat

SEQ ID NO: 467003 - DNA, 417 bp, Homo sapiens
ctcgaaaaatatcagatactttagccctaattaattctcacacttttttttttgagacagagtcttgctctgttgcccaggctggagtgtgttggcatgagcttggcttgccacaacctctacttcctgggttcaagctattctcctgcctcagcctcccaagtagctgggactataggcatgcaccaccatgcccagcaaatttttgtatttttagtagacatgtggtttcactatgttggccaggctggtctcaaacttctgacctcgtgayacacccatctcagcctcccaaggtgatttttgatcaagtagttccttacatacttacctttttcttcctttaagaagattttataaaatatttatatatctattaatattatttgcctttacctgacagaagtagatatgcat

SEQ ID NO: 467004 - DNA, 571 bp, Homo sapiens
gcatatgttttataaaagtatgtgaatttataaatgtggtcaatattaatattaaattgtatcttttaatagtatcttcaattatcttttttttgctgctggattccatttagaaaaaaaaatgttctatatagcagtgttgctttctttttcttttctttttgcttttctttcttttttctaytgataaagtatttacttgatcttggggaagaggtatataatcaagtgaccacatttttctttgttacatattattcaaaatttataatcaatctttccaaattgtaatcggtctgaaacccatttgctttactcaaattatttagtgactgtaaaagtttcagaaacatatgaaagttacaaattagctttaaatgtgtcatgtttaaagcagttgttttaaaagctaagtcattatccattattatgtaactagtattctaaatatcacatctttgcattgtttgacttttaaggcatatgaaatgttttgggtcagagaaatcatttgcttcacatgcctaagagacagactctatgggtactgagtcatgctaatagtggcaaa

SEQ ID NO: 467005 - DNA, 571 bp, Homo sapiens
gcatatgttttataaaagtatgtgaatttataaatgtggtcaatattaatattaaattgtatcttttaatagtatcttcaattatcttttttttgctgctggattccatttagaaaaaaaaatgttctatatagcagtgttgctttctttttcttttctttttgcttttctttcttttttctactgataaagtatttacttgatcttggggaagaggtatataatcaagtgaccacatttttctttgttacatattattmaaaatttataatcaatctttccaaattgtaatcggtctgaaacccatttgctttactcaaattatttagtgactgtaaaagtttcagaaacatatgaaagttacaaattagctttaaatgtgtcatgtttaaagcagttgttttaaaagctaagtcattatccattattatgtaactagtattctaaatatcacatctttgcattgtttgacttttaaggcatatgaaatgttttgggtcagagaaatcatttgcttcacatgcctaagagacagactctatgggtactgagtcatgctaatagtggcaaa

SEQ ID NO: 467006 - DNA, 548 bp, Homo sapiens
aaaggcttttccccctttcacttgaagcagtaataatgttctcaactacagtagttttaaggggcgggggggtcttctcaagacctatttccacttattgctttgagacctgagacccatgaggatgtgtaatgtacaccaaaatactatagaactttcataaattatatctataaaaacctggagaacatgtgagggatcaggtggaaagaatatgaatttgcatcaggccaaatttatttatatggaatcactaarccaaaatgctaaaatcaaagtgttagttttttactggaaactaacagtctggactggaaatggttttaacatttgctaactgaaatttaaatccaaacatagtctaatttaaatgaaattgttatgctgaaacctttctagaatactgtaaagaaatgtatccagcagcctagggagactatattattagattaaatctatcatgtaagacctcttcactatgtcaagatgaaaggtcaagatgagactcacttcgccactgttgtgagacaagcattcaagacggaagc

SEQ ID NO: 467007 - DNA, 560 bp, Homo sapiens
tgcttttgccttaagcttttaagcttaaatacttggtcgtatataggcagtatgttaatatggtcattaactggagcttgggcattctagttcttttaattcatgtgtctactacttcttgcccatcacactcaatactctgaactgtgagctctgattcagagtgctttttcaagtggaagtactgagaggcctgggctgaggacatgtccctgtagaaccggcctacgttccacagtgttctgagttttattgctctgtaatcagtttggctgggagtggaggaaaggtctgaatttgttgttaggatatttctggagcatatcatttagtttaaattccaactgcaaacccctttgatgctcaacatagtagttatgaattctaagagggaattagttttgtgctcatattycctaaatccatccttaggtatagttttattgcaatcttagtcccaaatgttcactaaatgttttatctatttccataaaaatgaatatatagtaaattataattctttgttctagaacattttgtggttaagtaaaaagaagcat

SEQ ID NO: 467008 - DNA, 589 bp, Homo sapiens
gtgctgaatttcactttaaatcaatactgtatttcattaggtggtggtgttctgaggctgatgtaatcccttactttctttgattcctgatctatctcctgtcaccctgctgatgatgctagtgatatttttggataggaaaaatgttttggttaggagaatattactctctggcagagcagtagacaaatgaaggaggcctttcttcatgagaatatgcacagtaactgtgaaagctgttgcaaatatacatataatcaggcaagaaaatttcccccatctgaatatgtgctgataaaacaggtgagcttaaatatttgccccacctttgttgccagatatgaaagaaacaaaaggtgatctgagccaacctaaacctcctagggtaaatttgtaaatkaatgaaatgtacaatcaatttctatcttctctatttatgatagcattttgattttgatggggaagcctatgtccctaaattcactatattaaatatattctgtttcaaaaatacagaaatttccttcaccctagggcaatttcataaatgcagatgtttaaaataatacaaatttgcttcagctattgt

SEQ ID NO: 467009 - DNA, 455 bp, Homo sapiens
gccactattactgcattctgtagagaagaaaaggggacaggaaattaaatctcaaggaaacatttaaacaatactgaatcattcactctttatactgggaattaacaccttgtttcttttctgtaagttgatttacatttgcagtgcatggaaagcttctaaaatcaatgacagtaattagtaaaaataaaaaaatcmctgactttgaaaacagaaaatatgtttaccaaaactagattttctcttattttccctttttttttttttttttttttttttgagacagggtcttgctctatcaccaaggctggagtgcagtggcatgactatcgctcactgcagcctcgacctcctgggcccaagggattctctcacctcagccttcagagtagctggaattacaggcactcactaccatgtccagctaatttttgtagagatgggtttcgccatgt

SEQ ID NO: 467010 - DNA, 455 bp, Homo sapiens
gccactattactgcattctgtagagaagaaaaggggacaggaaattaaatctcaaggaaacatttaaacaatactgaatcattcactctttatactgggaattaacaccttgtttcttttctgtaagttgatttacatttgcagtgcatggaaagcttctaaaatcaatgacagtaattagtaaaaataaaaaaatccctgactttgaaaacagaaaatatgtttaccaaaactagattttctcttattttccytttttttttttttttttttttttttgagacagggtcttgctctatcaccaaggctggagtgcagtggcatgactatcgctcactgcagcctcgacctcctgggcccaagggattctctcacctcagccttcagagtagctggaattacaggcactcactaccatgtccagctaatttttgtagagatgggtttcgccatgt

SEQ ID NO: 467011 - DNA, 668 bp, Homo sapiens
aaataaaataaaagtgagatataatacactaaatttgttttattgcacaggggaagattccgttattattttctgacactcttacttttacttgtatgatccatataataattacctagtgataatatctgaaataggaactaatattagtattatctgtagktctatgcctatgtgtatgcataaacacttctaaatatgctgtaaatatattcttctcattctctagtgatagatagatggatagtaacagaggccgaatcacacattgtaatgtaaagtagtttcttctaatctgaattgacaggtaatctaatagttgtttataaaaatgggttatacaattacttgtgcatggattgtgatttaagatttcagggcctttaattctttaagtccagcactatgttttatctccctttcatattttcttattgttgagtagataatagaaaataaataattttggaattaaatagatgctaagtgaacataaacaaatacataaataaacagaaatcacaactattaatttcatggatctaatgatcaaaagctagtcaaatttcaaacaataaaattttttgacaaaacaatgaagacaaccaagaattacggtgcacattttgtaattcttttgccagggagtatgacttgttccttaaata

SEQ ID NO: 467012 - DNA, 560 bp, Homo sapiens
ggaagttactttaccttcttatgccttcttttcttcatactgttacaggaccaacaggtttgtaagcccactacacagtaaaagatcagtacactgaaacagcagggtttgcagcagagaaaatgtttaataactgcagggcagccaagtgaggagacaggaagaggccctcaaatccatctcctccrggagttcagggctggagttcataagtgtattatggtgggtaaaggattgcaaaagtggggccatagattggtcaagataagggagatgaagtcatcaggctgtgaaaactgcattctttggagggtcagctcctcatggggtccattagactagctggtgttggtagtttcactactttgcagcaactgaaagaatatcacaaatggaaaacttaatgtttcacaatgcttaagttgttatctatagagcagttgagcagagctataatcttgtgacagggtttacatgtttctggggcaataagcaaaaaaatatgaggaagcgggtcagagagcaagctgacctaatgattaatgccaagtgtgctgtaa

SEQ ID NO: 467013 - DNA, 560 bp, Homo sapiens
ggaagttactttaccttcttatgccttcttttcttcatactgttacaggaccaacaggtttgtaagcccactacacagtaaaagatcagtacactgaaacagcagggtttgcagcagagaaaatgtttaataactgcagggcagccaagtgaggagacaggaagaggccctcaaatccatctcctccgggagttcagggctggagttcataagtgtattatggtgggtaaaggattgcaaaagtggggccatagattggtcaagataagggagatgaagtcatcaggctgtgaaaactgcattctttggagggtcagctcctcatggggtccattagactagctggtgttggtagtttcactactttgcagcaactgaaagaatatcacaaakggaaaacttaatgtttcacaatgcttaagttgttatctatagagcagttgagcagagctataatcttgtgacagggtttacatgtttctggggcaataagcaaaaaaatatgaggaagcgggtcagagagcaagctgacctaatgattaatgccaagtgtgctgtaa

SEQ ID NO: 467014 - DNA, 625 bp, Homo sapiens
gacaagtcgatgtgagcaatattttagaagggtttgcatggccatggcataacatggtttagaagctgggtatgaaagtcacctaggatgctatgttggtgatgtatrcattctgcctcccatagaactgtgcaggctatattttgagggagcaaccagcccaaagtgggcgtctggcccccggtggaggaagagtatctgcatacccccactatagttctgataatgactgagaaccaggcaaggccttggaggagaggcttaacttgcagctcactcagtcctcctgagaagagcctggaattacttagcaatcagggaaatttggccaacatggcagatgggcaggagcaacactcctgcttggcctgaggttgaaaatgaggtaggctgccatcgtgctgagcagggacagggaaagcagaagctcacaggaaggatgcagtaaaagctgccaaggtgaatgtcaagcagggctaacagagttccggaaacctgagccagcaagaagtgataagtagacacaaggttccctgcagaaccctggcagatagaagagtgttatcaggaaatacccttttctcaccatggtggggaaatttgttacttgtctggtccagatatt

SEQ ID NO: 467015 - DNA, 625 bp, Homo sapiens
gacaagtcgatgtgagcaatattttagaagggtttgcatggccatggcataacatggtttagaagctgggtatgaaagtcacctaggatgctatgttggtgatgtatacattctgcctcccatagaactgtgcaggctatattttgagggagcaaccagcccaaagtgggcgtctggcccccggtggaggaagagtatctgcatacccccactatagttctgataatgactgagaaccaggcaaggccttggaggagaggcttaacttgcagctcactcagtcctcctgagaagagcctggaattacttagcaatcagggaaatttggccaacatggcagatgggcaggagcaacactcctgcttggcctgaggttgaaaatgaggtaggctgccatcgtgctgagcagggacagggaaagcagaagctcacaggaaggatgcagtaaaagctgccaaggtgaatgtcaagcagggctaacagagttccggaaacctgagccagcaagaagtgataagtagayacaaggttccctgcagaaccctggcagatagaagagtgttatcaggaaatacccttttctcaccatggtggggaaatttgttacttgtctggtccagatatt

SEQ ID NO: 467016 - DNA, 581 bp, Homo sapiens
gttttacaaaagagcttcttatttatccaaattttaaaatcaaaagggaaatgctaacatatgagaagtttaacacaattttattttatctgcctctaccagatatattagtctttggggagactgtttttgatcaaaattgtttttataacattgtattctttttaaaaatataacagctttattgaaacataattcacatagctcacccttttaaagtgaagaaagttgtgcayggattactgccatctaattacagaacatttcttatcaaccccaaaagaaagctcataccaatggagtcactccctgtactcccccctccccagcccctgataagcactaatctactttctatatatatatagataaatttatatatatatataaaatctatatagataaatttatatatatataaaatctatatatataaatttgcctattctggacatttcatgtaaatggaatcacatcatatgtgttcttttgtgacttcttttagttagcagaatgttatgaaggttcatctatatcagaataccattctttatggcgcaatactattccattgtataaat

SEQ ID NO: 467017 - DNA, 581 bp, Homo sapiens
gttttacaaaagagcttcttatttatccaaattttaaaatcaaaagggaaatgctaacatatgagaagtttaacacaattttattttatctgcctctaccagatatattagtctttggggagactgtttttgatcaaaattgtttttataacattgtattctttttaaaaatataacagctttattgaaacataattcacatagctcacccttttaaagtgaagaaagttgtgcatggattactgccatctaattacagaacatttyttatcaaccccaaaagaaagctcataccaatggagtcactccctgtactcccccctccccagcccctgataagcactaatctactttctatatatatatagataaatttatatatatatataaaatctatatagataaatttatatatatataaaatctatatatataaatttgcctattctggacatttcatgtaaatggaatcacatcatatgtgttcttttgtgacttcttttagttagcagaatgttatgaaggttcatctatatcagaataccattctttatggcgcaatactattccattgtataaat

SEQ ID NO: 467018 - DNA, 652 bp, Homo sapiens
tcagaattatacattttgaaaatgatattctatatcatgatttttggtaaataaatgaagtttaatagtgctgtttgtattataaagagttgtatcacaggtttgaaaagggtaaaattaactatagttcacttctgtgataaaggtatggcttttaaaataacttgggcttagagtaataataaacatttccaacgatatggagacacacttgattagctaaggtcttcagccattgttttacacatcttgtgttttactataygcattggcttaattcagacatgttaacatcattgatttttaaggaagcccaaacctaagtttagataaataaaaatatgtagttaaacttagatctcacctttcttgaatccttcatttcaattttgactgcagtgtgtacttgcttgtattttttttctagtgaaattgtttgtgataatggttaattatagattcacagttgtgttttattacatttaaatgtgaaattataactaaaaatttttaaagatacatctttgttcagggtatatcattaagttcaacaacaaagtcaaaattatttctaaggtaatgcattcataatggtgatcaatttataattttttaaaaatataatattcaaaacattttagaaaattatatt

SEQ ID NO: 467019 - DNA, 582 bp, Homo sapiens
aatagcacgggaagaccagcccccatgattcagttacctccccctgggtcccttccacaacatgtgggaattctaggagatacaattcaagctgacatttgaatggggacacagccaaaccatatctgtatgttacattttgctaagaagtctcaattagtaaaaacacctatttgtacaggaatagcattattttacctgaacaagaaagaacatttaaaaccccagggttatttaccaaagtagacttttactatttcaggtctttttcattttttataatatccttatgaaatcacaaagttataaagagctttaagactagggaaatttgactcttaggcaggagctgaaaaacctaccttcagtctccttagttagaaatgtatgtggtctcctcccaccttgtgtagatgaaggcagtacttmttaaaaacttgtattaatgaaaagtacaataatcaaactttaaaatttacagccaggcatggtggctcattcctgtaatccccatactttgggaagctgaggtaggaggattgcttgaggccagcagttggagaccacccttggcagcatagt

SEQ ID NO: 467020 - DNA, 588 bp, Homo sapiens
aatgatggacccagagcagagatctgttgccctttgatgttgggaaatcctttattgcttgaatctaaatcctttatgctgcagtttacaccgtatttcctctcgtttcaacttcagttaaaatagcgaaaatctggcctaataccctagtcactcagaggttttttagcaagtcatatctggctcactaccytagcatagaaaagaaactattttcctctcaccccaaaaccctgcagctagacttttctagctgctgcactatgaacagtttctaagagattcctcccactagagccttccctagaagggtggaggtgggcagggcaatcagcgaatcgggcggcctgccccagataactgcacttggaaagagtctgcattgtaagcatttctcatggtgtcttcactgaagacagaatttttgaagttaaatgacatatgaaagacaggaataaagtacagtgtctcacaacatcctgtaagagatttttaccagcctatgggtcatattaaccaaggaggtcatattgacatccagacctaaatttcattagctctggtctcctactgaaggtctatagaact

SEQ ID NO: 467021 - DNA, 550 bp, Homo sapiens
ttatcaatggatttttacattagctggcaatccaaattatccctccattatgatagtctatggctccagaaaaatcgaaaagatagctaaagtaaaaaaacaaaaatttggtaagtaaagttgatgtgtatctcaaaacaaacaaaatgaatctttcgtttcaaaggcagcattcagtaaaagcggtctagaagtaagttattgccaagaaaagggaaaaatcatagttcttgagaacctactattgtcagcatgcaaaataatagtgactcaaatactaaacaagattcagtataagaaaccaaaagtgttctaattttaagtagtatgataaattgacataccgatgatattccccatgatgtttaaaagattttgtgtgataaactggaaaacgagctctatarccaaattgacgttaacaaatttcaccaacaaatgtcatgctgtatcatttgtaaaaactataaattatagtgatattcaggaaaatagtttcttctgcatagtgtttcccacaaacagacataagccaagacatattttatat

SEQ ID NO: 467022 - DNA, 543 bp, Homo sapiens
ataccactctggccaccaaatacctaagaacttaagggagttcacccaaacaagatctacaatttccatttaccctgttacaatttctctacatgtgggctacttcttttggtgatgtgcaacctacatttctcacaatgtctcagtcaggtatgaggttggactcatgattcccaactgcttttaattagtacaacaatttacaatagtaagttttcattcatttcagagtcttccttccagacccatatgaacaaggtctttgtcctacacattgtcttctggtatcttttgccaaccactacaccaccaattctcccccaaaagacttgtagcattactagttgtaacttgggaaaaatgaggatgggcttcaaatctcacctgagggaggggcaagacacagcccatgtcctatccttgtctcccagcatcccagaaaaatrtatgaatgcaatgaaagctgtatgagtctcaataggtagtgggcattcctgtggtttctgcccacagtctttgaagacaaccactgtattttctttt

SEQ ID NO: 467023 - DNA, 466 bp, Homo sapiens
gcagtaacactatcacagctcactrtagcctcgaccttcccaggcaaaggtaatcctctcatcgcagcctcccaagtagctggactacaggtgtgtaccaccacacctggccaccttggcctcccaaagtgctgggattatagagtgaaccatggtgcctggcccaaagccctcatttctaagggtaatgttgtgctgctcattctatgcatgggagtgaatattcgacctgaagtcaggagctctggtttccatttccccatatgcccttaacgggctgggtgaccttgggcaagtcaatttaccaaatgaacttttatttccctatctgacaaatgagggactggattaaatgattctaagctctcttggggcccaatgtttttatgattctaggtatttgaatgtagggtacaagagttcaatgtttctttaaaagtctaaatcttccctttggggcaaagca

SEQ ID NO: 467024 - DNA, 466 bp, Homo sapiens
gcagtaacactatcacagctcactatagcctcgaccttcccaggcaaaggtaatcctctcatcgcagcctcccaagtagctggactacaggtgtgtaccaccacacctggccaccttggcctcccaaagtgctgggattatagagtgaaccatggtgcctggcccaaagccytcatttctaagggtaatgttgtgctgctcattctatgcatgggagtgaatattcgacctgaagtcaggagctctggtttccatttccccatatgcccttaacgggctgggtgaccttgggcaagtcaatttaccaaatgaacttttatttccctatctgacaaatgagggactggattaaatgattctaagctctcttggggcccaatgtttttatgattctaggtatttgaatgtagggtacaagagttcaatgtttctttaaaagtctaaatcttccctttggggcaaagca

SEQ ID NO: 467025 - DNA, 558 bp, Homo sapiens
cacagctagagacagggctgcagtgcaaggagcagcgtcgagacccatggagcacagactggggtggacaaagcccagtgtgtgggcttaggctaggcgggctgtgcttcagggcagggagccaggccaacccaagggcagagaccatgaggaatggggcagtaggcaggggtcctgacctggcctgtgcagctgggcctaaggccctgcaggttccacagcacacaagcacctggacacagaccaccatgggattcttgttaggcccaccctctagcttccagttactcctaaagctgcaggaagaggaacayggaggtacaggcaggaactccagcagacaccgtgaccatcatgagtaatccttgcatggaccctctggagccagcagagaatcaaaagacacaatggcaaagagtctcagctgtggactcgactctcactcattagctgtgtccctgaacagaggaacaagagctcctggaatgacattgtcataataatggcacccatacttcccttcagggttagctgagggagctgatgtgataccatatt

SEQ ID NO: 467026 - DNA, 535 bp, Homo sapiens
gcaggaagtctgcgagtcaygcagtaaatgacactaaatgaggccgagagatcagaaggggccactctttccagggacccatggaccacattaaggatgttaatgggattgctcttaggttaaaaaccatagagcaggggcgtatgtgacccaacagatcactcttgctcctggttggagaatgatgtggcattaggtataaattagagtccaggtgagggatggctgcagctcagagaggtggcagtaaagtcattgagggagaagtggatggtttcaaattctatttaataggtaaaatcaatatagcctagtgactaattggatcacagcagtaaggcagagagagatggcaaggataactcccaggttttcaactgagtatacagtggtgccattcactggaatgaataactcttggaaagcttcaggggtggtaagagaggtggaatataggggaaagtgagaaatccagctttagatagatgaagtagaaggtgaatatgagacagacagtcacatggagaagcaaagt

SEQ ID NO: 467027 - DNA, 644 bp, Homo sapiens
caactctgggaactggcagcactgcatccattgactctggggagattcttccagccacagcacaaaatacagctttctcttttctaccaagccgtatygaactctttgccttgatctaaggacctgggatctccactccttcaagtgttctaggcagcagtgagggagccaggaccctgcagagcaagccacctgcaggttgcaaaattccagcagagattggatttttgaagtatcaaaagcctcacacctgtgggtgatctccacgcagataccgcgagcaagagtagccaacccctgacccctccaaaactcacatctgtatcagcctttcagggaagagaatgatcccttttgttttcctagacatttcaggaataaaaagaacataaggtgtgcatagggttgagagagaaaagggacaatggagccatatcagagagcacggacgttggactcagagacctgcattccaatcctgcacctgccaagcttctagctgggaaaccttctcaaagcccctgcacctccctgaatctcagtttctttatttataaagcaggttaatagtaagtacctgacaggtctgctaccaggattatttgcaatgtgtttgtgaatatgccttgcccttgtgtgcctac

SEQ ID NO: 467028 - DNA, 644 bp, Homo sapiens
caactctgggaactggcagcactgcatccattgactctggggagattcttccagccacagcacaaaatacagctttctcttttctaccaagccgtatcgaactctttgccttgatctaaggacctgggatctccactccttcaagtgttctaggcagcagtgagggagccaggaccctgcagagcaagccacctgcaggttgcaaaattccagcagagattggatttttgaagtatcaaaagcctcacacctgtgggtgatctccacgcagataccgcgagcaagagtagccaacccctgacccctccaaaactcacatctgtatcagcctttcagggaagagaatgatcccttttgttttcctagacatttcaggaataaaaagaacataaggtgtgcatagggttgagagagaaaagggacaatggagccatatcagagagcacggaygttggactcagagacctgcattccaatcctgcacctgccaagcttctagctgggaaaccttctcaaagcccctgcacctccctgaatctcagtttctttatttataaagcaggttaatagtaagtacctgacaggtctgctaccaggattatttgcaatgtgtttgtgaatatgccttgcccttgtgtgcctac

SEQ ID NO: 467029 - DNA, 644 bp, Homo sapiens
caactctgggaactggcagcactgcatccattgactctggggagattcttccagccacagcacaaaatacagctttctcttttctaccaagccgtatcgaactctttgccttgatctaaggacctgggatctccactccttcaagtgttctaggcagcagtgagggagccaggaccctgcagagcaagccacctgcaggttgcaaaattccagcagagattggatttttgaagtatcaaaagcctcacacctgtgggtgatctccacgcagataccgcgagcaagagtagccaacccctgacccctccaaaactcacatctgtatcagcctttcagggaagagaatgatcccttttgttttcctagacatttcaggaataaaaagaacataaggtgtgcatagggttgagagagaaaagggacaatggagccatatcagagagcacggacgttggactcagagacctgcattccaatcctgcacctgccaagcttctagctgggaaaccttctcaaagcccctgcacctccctgaatctcagtttctttatttrtaaagcaggttaatagtaagtacctgacaggtctgctaccaggattatttgcaatgtgtttgtgaatatgccttgcccttgtgtgcctac

SEQ ID NO: 467030 - DNA, 644 bp, Homo sapiens
caactctgggaactggcagcactgcatccattgactctggggagattcttccagccacagcacaaaatacagctttctcttttctaccaagccgtatcgaactctttgccttgatctaaggacctgggatctccactccttcaagtgttctaggcagcagtgagggagccaggaccctgcagagcaagccacctgcaggttgcaaaattccagcagagattggatttttgaagtatcaaaagcctcacacctgtgggtgatctccacgcagataccgcgagcaagagtagccaacccctgacccctccaaaactcacatctgtatcagcctttcagggaagagaatgatcccttttgttttcctagacatttcaggaataaaaagaacataaggtgtgcatagggttgagagagaaaagggacaatggagccatatcagagagcacggacgttggactcagagacctgcattccaatcctgcacctgccaagcttctagctgggaaaccttctcaaagcccctgcacctccctgaatctcagtttctttatttataaagcaggttaatagtaagtacctgacaggtctgctaccaggattatttgcaatgtgtwtgtgaatatgccttgcccttgtgtgcctac

SEQ ID NO: 467031 - DNA, 508 bp, Homo sapiens
attagttaggtatgttgtaagtcagggaaacatgagtacagaaataaaggaagttatttctatgaaaaatgaarttcaagttcaatatttaaaaataattttaaaagggtaacttgttaaaacaaaatgctactctccatgactcccccaacagagcacacggactcagaaggacgcgacattttggttactttccaagtgctttaagatccttactccactttaaagaaatcaaaactggaaatcaaagaatatatgttttatgcttatacacttcattaccaagaggcagcactccaattagcaaactgtattccaatgtcaagaaaagtccttatgctaacttgtgataaaaagatctataactggatgtacatttatatttccagttgaaataaaatttaaagaaaggcagggtttttttttattatttcagactttaaatttttttttttttttgagtacctgacaaactacaggttccaatcttctctgataagtgctatta

SEQ ID NO: 467032 - DNA, 556 bp, Homo sapiens
tggaaatagttcgatccttttaggccttgcttttaagctttgttaggtgggaccagagcagtatttagtgtagggctaatttttccctactacctttcagaataccctaccaatgttccatgaattatgaggtttttttcactctggctggtgggaataggatatattccaggccctgtgtgagctcggaggattgttccctataattcctttaagtggttcttccctcagcctcaagcagtttcctcacattcatgtgctgatcctttctcagctggagccttaagggagaccatctgcagattttctgagctccttctctgtgaagctttctcctctccaktgctcagccctgtgaactctagccacgttaggctttccagacttttagttccttctccccaacttagggaaactggggctctgcttgggtccctcatccaaaactacagtccaaatatctctccaaacagtaagctgacatcatcatgtggatcactttgtgtgtgtgtgtatgtgtgagacagggtatcactctgttgcccacactggagtt

SEQ ID NO: 467033 - DNA, 556 bp, Homo sapiens
tggaaatagttcgatccttttaggccttgcttttaagctttgttaggtgggaccagagcagtatttagtgtagggctaatttttccctactacctttcagaataccctaccaatgttccatgaattatgaggtttttttcactctggctggtgggaataggatatattccaggccctgtgtgagctcggaggattgttccctataattcctttaagtggttcttccctcagcctcaagcagtttcctcacattcatgtgctgatcctttctcagctggagccttaagggagaccatctgcagattttctgagctccttctctgtgaagctttctcctctccattgctcagccctgtgaactctagccacgttaggctttccagacttttagttccttctccccaacttagggaaactggggctctgcttgggtccctcatccaaaactacagtccaaatatctctccaaacagtaagctgacaycatcatgtggatcactttgtgtgtgtgtgtatgtgtgagacagggtatcactctgttgcccacactggagtt

SEQ ID NO: 467034 - DNA, 585 bp, Homo sapiens
gaataaatgccttttgagtactactggttttctatttgtggaagtgagtttgagtttttaaagtgagtcaagttatagaaaaatattaagctcatggtgcatggtggtgacacacagaaatggccaaggtcacagtgaaggaagtgtgggggctgtggatgacagcctaggaagctggcatttggtgagtgcatgctatggactgtacattttctrtccatggtcatcttgaagactctcgcagcaacctgtgaggtgaacatctctattcccattttgcaggaaacagaggctcagggaagtgaagtcactcaaccaagtgtcacaccaccggcaagtttgcacccaggttctccctttctcttgccctggcatggcccttgaagcttctgactccatggtccctaaggggatggtagaagtctaagagggtactcagagctgaacgctggggaagttggggttacaggcatggagaagagtcattgcatcatgttttctgatgggcaccagagagggaaaaggaaggctctgcactccttcacccacctccctaacaacatccctgctcaggtcaacttgaac

SEQ ID NO: 467035 - DNA, 543 bp, Homo sapiens
ctccccacattaccatgctaaccagctcccatctaaacccagccatgctcttacctgaagctacaaccacccaagaccctatacaattcggtgtgaatgctgctcttacatttttccaaacataacagaccaacaccttccagatgcctcctttacttggtttgtagattacccagtcctgctctgtctgctactcagtatcaccccaaggttccctccagccacagccttttcctacccaccaagcctggggcctggtatccaggcaagattggcaagtagacttcactcacatactgcccaataaatggttctactatcttctagtctttgtctgtactttcttcgggttrgtagaagtgttcccaacaacttcagaacatgcaaatgtcatcacacaaactctcatcatgcatataactccccattttgaactcccaacatgcatccaatccaataacaggcccgccttttatcagccaaattacctaaggcgtctctacacccttcaggcctcaatcttcaggcaaagttggaaaggtc

SEQ ID NO: 467036 - DNA, 584 bp, Homo sapiens
ttttaaatttagtattagactatatcccaaagtataaaagtccatgagtctatgccataaatgaatgattgaataaataaattaatgagggagaaaggacacatattttttacagaaggattccagatcatatatgtagattattygatactttccaccccaggatgtaaagccttattgatggatcttgcactcagaactggagccaaggatccagcagcctctacactgccatgggggaacataatgtcaatatcaactggtcatgtgaatgggattacagtaaggaggttgaggtgggaaagttatcctggattttccaaggggacctgatataatcacaaggattctgataagtgggaggcaggaagatcagagagaggaaggcaatgtaacaattaaagaatatgtattattattatggtagaaacttcattaagatttttgagattctggaaaaatggtggtggtggcagtgtagtttgttgggctctctaagtcctcacataaaacacagcaaataagataacaaatctaaagatccacagacaacatctgacatccctgaggatatgaaaacaccc

SEQ ID NO: 467037 - DNA, 584 bp, Homo sapiens
ttttaaatttagtattagactatatcccaaagtataaaagtccatgagtctatgccataaatgaatgattgaataaataaattaatgagggagaaaggacacatattttttacagaaggattccagatcatatatgtagattatttgatactttccaccccaggatgtaaagccttattgatggatcttgcactcagaactggagccaaggatccagcagcctctacactgccatgggggaacataatgtcaatatcaactggtcatgtgaatgggattacagtaaggaggttgaggtgggaaagttatcctggattttccaaggggacctgatataatcacaaggattctgataagtgggaggcaggaagatcagagagaggaaggcaatgtaacaattaaagaatatgtattattattatggtagaaacttcattaagatttttgagattctggaaaaatggtggtggtggcagtgtagtttgttgggctctctaagtcctcacataaaacacagcaaataagatarcaaatctaaagatccacagacaacatctgacatccctgaggatatgaaaacaccc

SEQ ID NO: 467038 - DNA, 586 bp, Homo sapiens
taggccattttttttttcttgaagtgtataatttaatagtgtttagtgtattcggagttgtacaaccatcacagtcaattttagagcattttttatcacycccccaccccaccaccaaaagaaactctgtattcattagcagtgaatctccatttcctcccaaacctcctcccagtcctaggcaaggttaggtaatttgccttaggtcacacagctggtgagtagtggaggtaagaacaaaggctaggtatctgaccctgttttatcttgctctttcagatagcctgttagtggtttatggaatggactggagtctgaaggcatagacccggctgggtatgggcctcggctttcctctccaaaccagcagaaggcctggtcgggaaccacggtgtctcagccaagggctcaagcagtctgatcagctgtggtcattcaggcaacttctctctatgtttaaaaccacagtgaatttgaccaatgaggactcacttttgcaatgagaacattttgagtgttagtcaacttaccgcaccttcctaaccacctacaggattgttgtcttggtctttttcaatttggagag

SEQ ID NO: 467039 - DNA, 622 bp, Homo sapiens
attccttcattcgtgcatttgacaaacatttacttactccacataatgttgtagcaactgtcattctaggttctgggaatacagtagtgaatwaaacagacaggacctcttactcttgtggaacttgcctttatttggagaagatatatcaaaaaagtaaagcatgatctaagtcattttagaatctaaataaaatttaaacagtgaaaagtgataagcatagattgaaaacagtgactgatggagaagtcagtagtgatggatgttattttggagagaacggtgctatagtttagatagccctgctgaagctcctccatggcaccagctcatacctgacaggcccactgcagctccagcttccaccagatgcctgcagcagttacatcatttcctcactctgtccctcagctagcaggtagtagcagctttcttttgttgctaatttgtagattttctcacctggtccgtttgcatctcaacaacctcatcagccatctaatcacttctctgtattaaactctctctgttctaaaagtcaacagttgtgtcttctccccaggctggccccaggatgatttagttcttcagggtgacaaaggatttcacaggttgggcaaca

SEQ ID NO: 467040 - DNA, 431 bp, Homo sapiens
cttatgcaggtaagaactgccgtaggtttgtcgtttctggttttctcctactaaacatcaatgttgtcattcacttataactaaaataaatatttttctctatattttcaaatgccccaagagatcgcctatgaagaccaacaaggatgtgaggagaaagtacagcctaattcacctaaaaaaaatctgtagaatacccttggaattccttgaaaaatttgaaatgttttttgcaagaatttgtttaataattagaaataaacatttactaagaaagcattgatattgcttagttccttgggatgttcaatatagtagtaaatttctgactggagctgagcctgtcaaaagttgtatyctagtattctaatcctagacgcagcattgtttgattagcatttttttttctgattccagtttcacaaagtata

SEQ ID NO: 467041 - DNA, 572 bp, Homo sapiens
atgggaatgctggctatatttgcatgttatacaacttttcacattcatttcctatctacgtcaacttgtaatcttatacttattactatacctataaattatcctatttttaccaactgtcctatttttaagactatttagaaaatgagaaaacactttaattttctggcattcataatacacctcttgcaaatgtaaatagaaaaataggtatacacatttaaagaggaatatgtgatcttatctactaaaacatttttatagatttataattttatccacatctatatgaaataggcattttatccattcaaagaggagggcaatttgcccaactctaaattataaaatatttagtttctgaactatggaaaaataatattgtattaaaayaatttgcttctaggagcccacaaaataatcactcaaaagtcataaatattagaacaatctttatataatcaactaccatttaaagaaatgatatggtttcattggaaatattctgaaatcctctagaaatactatttgacccagccatcccattacagggtatatacccaaaggatttt

SEQ ID NO: 467042 - DNA, 593 bp, Homo sapiens
ctctaccctcagcaccactgactaccctagatgtccactattctctttcccccttagcctctccttcaattattttatatttgctcacacagtatctcctgagcttcttggctctagcagaagactgtccttaaatacatgaggctattcaatgccttttayccttgtctacaaatctaccaatcaacatataatattctgtgcacctcagctctttccattgttgctgagtattcaccggttgctttccagggatatttctccctctatttgcaataagcattaaatttttctttagaaggatatacatacatacatatatattcagcctatctgcaaaatgtaatgggacagcagcaggaataatgatagcgtagttacaagtatactctcattgctatgggcaactatgataatggcaatgtaagtacatattcattttctctatacataggcatcctcccacaccctgctatgtatgtatgttctcagtaaatgtttagaggacagaggagaaagtaaggtcttaacctcctggtatgcaaattataggaagaagagagaactaagcaaacaaacttaagttacataaa

SEQ ID NO: 467043 - DNA, 593 bp, Homo sapiens
ctctaccctcagcaccactgactaccctagatgtccactattctctttcccccttagcctctccttcaattattttatatttgctcacacagtatctcctgagcttcttggctctagcagaagactgtccttaaatacatgaggctattcaatgccttttacccttgtctacaaatctaccaatcarcatataatattctgtgcacctcagctctttccattgttgctgagtattcaccggttgctttccagggatatttctccctctatttgcaataagcattaaatttttctttagaaggatatacatacatacatatatattcagcctatctgcaaaatgtaatgggacagcagcaggaataatgatagcgtagttacaagtatactctcattgctatgggcaactatgataatggcaatgtaagtacatattcattttctctatacataggcatcctcccacaccctgctatgtatgtatgttctcagtaaatgtttagaggacagaggagaaagtaaggtcttaacctcctggtatgcaaattataggaagaagagagaactaagcaaacaaacttaagttacataaa

SEQ ID NO: 467044 - DNA, 611 bp, Homo sapiens
tcagattagatagcttagaaatttttaatagcatcattgaaaacattttggtcattaaaacatgtcatttcctaatcgtagtgttttcatagcagttcagacttgaaaaggacataaaagttcatcttgtttttatatttgttttcctcagaatggtttgcagcttcataatgagatttattttgaatttccaaaagaataaacagccctaatccattattgaaaatggaattacttggaatatatcatacaacatagcagtttagaataatctgcatgacattagttctacttgttccttaataagagacaaggtttgtaaaatactatagtgtttgtggcttcacatattcctttattcagctgtttytgtgctacattgttagtagtgggtagcaaaacactgttgcagaaggcttacatggatgaattctagtagatgtgccacgttttctttatccagtctattattgatgggcatttgggttggttccaagtctttgctattgtgaacagtgttgcaataaacatacatgtgcacgtatctttatagtagaatgatttacaatcctttcggtatatacccagtaatcagattgctgggtcaaatg

SEQ ID NO: 467045 - DNA, 586 bp, Homo sapiens
tgtgtcacccaggctggagtgcaatggcacaaacacagctcattgtagcctggagttcctgggctcaagtgatcctcctgtctcagcattcctagtagctgagactacatgtgtgcaccagcrcacccagctaatttttgaaaatttttatagagatggggtcttgccgtgttgcccaggctgggaagaacttttatacacatgaatccattgtattagacattgagtcacattagtcaaaactatttcatctaaatattatgggtgtatgctgattgtttaattctaatgctgacctaactgtccctattaaattatagattgttttgaactatgtcacaattctgttgtttacttatagtgcctgctcatttgttgatttaagcctaaattccctctttaaggaatattttagtttattatttttggttaagaataacatttggcaaggagcccccactaatacaacctctcctgatttcacataaaattcctgagaagacactgaaaaggtgaaaatccccgacaactcccgctaaagagagggaaacagaaccgatccattgatagaatctggcaggaattg

SEQ ID NO: 467046 - DNA, 631 bp, Homo sapiens
aaatataaatgattaaaccacaacataatgacacaatacaaggtgaatatcaagagaagagcccaatagaattcaatatatgacttccaagaggtgactatattcaattaaaattataagctcttggattgatatcaatatttaacagtatttacttgtgtgaaaagacattttctaaggtaaaatatgtaaaatcttatgacatatcagcaataaacacttatcacaaatcaacccccactaagcagaatatctttaaaccattgcccctggccrtgggtgggtgtgtgtgcggggtgcatgactgaagtcccacactcgtgtctctctgggcatgataaattttgcatacctcacacagctcaaaaaaatgttaagatcaaagggtttttttctttctaatttgaattgtgactttctaatttttactggacttcctttgttttctctacttttttttttttaattctgcatctttatccttctctctggatcttccaagttttcattgtgatatttgtttcatcatgtcctccaatttttcttaaagcccttcatctggctgccaatcattgcatcctcttttatcaatttgaatttttgcccctagccttgcaacacagttgtcata

SEQ ID NO: 467047 - DNA, 631 bp, Homo sapiens
aaatataaatgattaaaccacaacataatgacacaatacaaggtgaatatcaagagaagagcccaatagaattcaatatatgacttccaagaggtgactatattcaattaaaattataagctcttggattgatatcaatatttaacagtatttacttgtgtgaaaagacattttctaaggtaaaatatgtaaaatcttatgacatatcagcaataaacacttatcacaaatcaacccccactaagcagaatatctttaaaccattgcccctggccgtgggtgggtgtgtgtgcggggtgcatgactgaagtcccacactcgtgtctctctgggcatgataaattttgcatacctcacacagctcaaaaaaatgttaagatcaaagggtttttttctttctaatttgaattgtgactttctaatttttactggacttyctttgttttctctacttttttttttttaattctgcatctttatccttctctctggatcttccaagttttcattgtgatatttgtttcatcatgtcctccaatttttcttaaagcccttcatctggctgccaatcattgcatcctcttttatcaatttgaatttttgcccctagccttgcaacacagttgtcata

SEQ ID NO: 467048 - DNA, 658 bp, Homo sapiens
tggggtttttttggggtcttctttgttgatgttgttgttgcttctttctaattgtttgtttttattgtaacagtcatgtcactcttctgtagggctgctgcagtatgctgggagatcactccagaactgttgccttggttttcccttacctggaggtatcaccagtgaaggttgcaaaacagcaaagatgacagcctgctccttcctctgggcactctgtcccagagggcactgacgttttgctggcccacatgctcctgtaagtggtgcctgaagacccctgttggggggggctcacccagtcaggagggacaggatcaggaacacgcttaaagaagcagtctggttgctttttggtagagcagrtgtgctgggctggggagaaaccttccttgtccagactgcctggactctccagagccagcaggctggaagggctgagttgactgaaccacagggttggtagctgcccctcccaccatggtctctgtctcaggaagagattagagttctgtcaatataaccctggctagaattgttgaagttcccacacggaggccctgcccagagaggagggataaatgggagtcccacttaaagaagcagtcttgtcacaatgtggcacagcagttgtgccacattgtgggggactcctcct

SEQ ID NO: 467049 - DNA, 548 bp, Homo sapiens
taagtcaaattctgataaaagtggcttttctcatttctacttctccaattagttaaagaagatgcctgacaaaacagtaatataatttaagaattaaaaaattgagatatgggttgttttctctctaatattttgaaagttaagtggtaatcttgactcacttatagaagttaagtcatttgaacaaacctacagtttagtcacttattgctgtatgtcacactaactccaaatcttatgccttagaatgataatgatttatcaatgttcatgcttctgtatattgggaaaagctcagctgggtcgtcctgctattctcatttgggrtctcatgtagttacagccagatgtcaactggggcttcaatatcctcatggttttccaatataactaaatagacttgagcttctttgaagagagggtggattttatggactaccacccccagtattcaagggcttatgaagactctgctggtgtcccacttgctaacattccagtgaacaaaccaagtcacaaagccaagcacagagttaatgtaagcaggg

SEQ ID NO: 467050 - DNA, 548 bp, Homo sapiens
taagtcaaattctgataaaagtggcttttctcatttctacttctccaattagttaaagaagatgcctgacaaaacagtaatataatttaagaattaaaaaattgagatatgggttgttttctctctaatattttgaaagttaagtggtaatcttgactcacttatagaagttaagtcatttgaacaaacctacagtttagtcacttattgctgtatgtcacactaactccaaatcttatgccttagaatgataatgatttatcaatgttcatgcttctgtatattgggaaaagctcagctgggtcgtcctgctattctcatttggggtctcatgtagttacagccagatgtcaactggggcttcaatatcctcatggttttccaatataactaaatagacttgagcttctttgmagagagggtggattttatggactaccacccccagtattcaagggcttatgaagactctgctggtgtcccacttgctaacattccagtgaacaaaccaagtcacaaagccaagcacagagttaatgtaagcaggg

SEQ ID NO: 467051 - DNA, 634 bp, Homo sapiens
acttcaacatatgtatgacaggtcagtgcccatgactgagagatgtgtcagaggctcctttatcctcattcatttcatcattttagaacccaaatcaggagtgtgagaggctgtgcctgatttctctttccattactcaaaaagaactcaggacatatttttaggaggatgttgggggatgtgattcaaactcgtctcccgagacagtgattttgctctttgactgcttctgtggggaaggcggaatgcattacattccagccaattgcrttaaaaacttccatgagcagacaagttgggtaagcctgagaacccacatgggcttgtggtcttatttttcttttgcttaaactctgaaatataaataaattagcacattaatttaaaaatcacttgattcctaaaatggtaataaactacgtaattttgaaataggcagcatgattttcccactgcttaattggctaaagaaagatgcaagttcccctctcaaattactttagtccaaaaaattccagagagatctgcaacttccggcaaagctcagagtaacattctgaattttttatcctgaaatattttgaagacactcatccatttcccaatagcttatggcagaccaattagaactgcc

SEQ ID NO: 467052 - DNA, 580 bp, Homo sapiens
gtcctccatgcaatggctttcaaaacacacggcttcaattccatggtgtttttaacttaatgtgatgtgttagaatttaccacaacaggaagaagagagcttgggggaattaagcaccaagaaatctacatggaagtgacacatgttattttttcttccaaatgataattgagagaagaaaatttactgaagaaaaaaaagtaaatgagaaggaaaaaatgattgtaaaaagaagtaagcagaaggaaagttctaggaggtgaagtagagtcttcctttgtttaagacattagggacccagctgaggaaagcatttctcaaatatggcatcayggtcactatttttactagaactacaagctcctgttgctttggggagtagtaggtctagaaggttcatatttccctaccgtagaagacaaacaactttcatacattgctgcttttgagtcttggttatttccatatctatccagtgcagattcagggagagggctgggaagtgattgattcagcaccaatgactaatttgagtaattcaggatctcaaacatgacttcttatttaattaactggatgt

SEQ ID NO: 467053 - DNA, 587 bp, Homo sapiens
gaaaaagagtagctttactttcagtcagggcagccctaggaacttgtggaattcagtgaaggaacatggacagctagtggggactaggacagagggaagccatggttaaacactctggcattgtgcccctcttcttctgtctcctgttggtgcttcctgctggcctagtccactagcaaagtcagagagcaagagatttatgcagtgcataaaaatcagcctcgyaggacacaaagtagtagaaaagtccggagagtggatctgtggggcaactaagactgtctgtgcagcacactctcctaaacccaacaatgagggttgccaaaagcaggaaagaaatcagatccaagaaacagcttccaactcaggaaagaggcaaacacattcccaaaatcccagcaaaagtagtagagctagagaacaattagcgcattctggagtaggtcagaagtctccaagaaaatgaaaacaatacaacacctaatgtgtttgaagtgtttacaggtggctttgttaaacaggagagagtttggatacgtcatattgtatgaaactaaacaaataaaaaaaaagacaattgttgacta

SEQ ID NO: 467054 - DNA, 542 bp, Homo sapiens
ctttgtcataaatatttatgttatctactcatacatggtttcaaaaatggcaatgatggtaaatattcaattgtgatgaagttttagttatccaatacagaaaagtatagacagaataattttatttgtattgttttaggacattaaaatgtcaatttggattaatctatagtcaaaatgattgattatggatgatatttaaattgtatccaaatattaattgaacacctttcaaacacactgacttctgtgatggtagaaaaacataaaaatgcttctgtctcaaaatctttttatgtatgatccttgcctaaaattmttttctccaaatatgcacatagatttctcacttaactccttcaagtctttaccagggcactacttataactgcatatgttgtggtctgcacagctgaggaaacatcagtcacttagattacaatgtgaatgacagcattcacattgcacctgttgtgtagttgtgtgaagctgcaactcgtgtttcaaataactcacctatgaatgaggccttccctgaccat

SEQ ID NO: 467055 - DNA, 600 bp, Homo sapiens
catgacattattaccttccttgtagtgtaaggtggtatgtattactgtttaagagtattaaacacagacatrgcattaaattttaaagactcttcatgcacctgttctcctggttagcaagataattctggtcaataagatggtgaaggagaggttgatcattctcttatagaaaagagatacagaacttactctggggaaatacagcaatataaaaaataatgtgtttaaaacataataacactggaaggagatcatgttctttgcagcaacatgaatggagctggaggttattatcctaaataaactaatgcaggaacataaaatcgaataccacatgttctcatttataagtggaagctaaacattgagtatacatgaacacaaggaaggggataatagacactgaggccttacctaaaggtggagggttgaaggaggatgaaggttaaaaaactataacacttactgagtactctgcttattacctcgtctctactaaaaataaaaaaaaaagccaggtgttgtggtgcacgcctgtaatcccagctactattacctggctgacaaaataacctgtacaccaaacccttacaacac

SEQ ID NO: 467056 - DNA, 600 bp, Homo sapiens
catgacattattaccttccttgtagtgtaaggtggtatgtattactgtttaagagtattaaacacagacatagcattaaattttaaagactcttcatgcacctgttctcctggttagcaagataattctggtcaataagatggtgaaggakaggttgatcattctcttatagaaaagagatacagaacttactctggggaaatacagcaatataaaaaataatgtgtttaaaacataataacactggaaggagatcatgttctttgcagcaacatgaatggagctggaggttattatcctaaataaactaatgcaggaacataaaatcgaataccacatgttctcatttataagtggaagctaaacattgagtatacatgaacacaaggaaggggataatagacactgaggccttacctaaaggtggagggttgaaggaggatgaaggttaaaaaactataacacttactgagtactctgcttattacctcgtctctactaaaaataaaaaaaaaagccaggtgttgtggtgcacgcctgtaatcccagctactattacctggctgacaaaataacctgtacaccaaacccttacaacac

SEQ ID NO: 467057 - DNA, 569 bp, Homo sapiens
ggggacacagttcagtccattggacttagagttcacacttcctggacaagattttggaacgttgtaaagctttcttcagaaaaacaactagtttattttcccccaagcatttatagcccactttagcagcactcaactgcatgcctctgatctatatgctaattttggatccgccttatctcttaagtaatccaagagtttgtgtgtgtgtggatgctccttgatttgaaatccttatgtgcttagaactaatggcgttgtaaaacacactccacaatgtacccttctctaattcagcctgattttctcccatccytccacgttagccgggctcccatgcccctgtttttgatcacgattgattgtccagctccaaagcatcatctgaacgacttatggtctttctcccgagtgttggagcccagggtaggcagatgggagagggtaggggatttgaaccggagaaagacatttaaatttcctcctgttcatcttagcttaggaagttacctgctgtctgaagggtgtatccctattttattatttatttatttttacaaaaccaaggg

SEQ ID NO: 467058 - DNA, 424 bp, Homo sapiens
agcaaagaaaataataaagcaaaggttctgggactggggatgagaatgggaatgaagagagaagtgaaaaataacctgagagagaaaacatttattcctccagcattttcccatcctgctctcatatataatgaatgagcaatttccagagcaratggtttgaaaatttaacagctacttcctgcctcagaataagcatgttgcctctagactaatagccattatcacaacagtaaaggttacagcccacctgagggcccagcctgtggaccactgggcctgtgaggcccagcaagtaactaaatatcttcatgtaatcctgtgcttctcatcctgtgtgtcaaggagctaaaggcatttcctgacaaatacgcagctgagttaactcccaggatttagaatgtctatgaggaaaggcaagaat

SEQ ID NO: 467059 - DNA, 574 bp, Homo sapiens
gatcatcatccaagagatcatcatctcttcctcatcctccccctttttctccttatcctcattctcttatcttcattatcattatgatcactggctcatactgagatgcatgaaaaggagagaaggaaggaaagaaggaaggtgcaagagaggagagtctcctgaattgtccctggatctgaataccatcctaggtgggggatttagcctttttcaccatccctacctctatacctctggactcttkttaagatctgtcaatattcacacacatcaaaataagtgagattgggaggatagaatagaccatcttttacttctaacatatttaatggtttctgtaagagtcaaggagctgctttcaaatcagcttgttggtgggtataaaggaaaagaatcaactggctttggccaaagtaatgaaaaggtcaaccagttttctttcacctttgttctcttactaatcatgggaaggacacagatggctccagtttaacttcctctgttctcacaggtgccggtccattaacttccaagagaatcccatgagtatatagtatggtttcaaaagaat

SEQ ID NO: 467060 - DNA, 574 bp, Homo sapiens
gatcatcatccaagagatcatcatctcttcctcatcctccccctttttctccttatcctcattctcttatcttcattatcattatgatcactggctcatactgagatgcatgaaaaggagagaaggaaggaaagaaggaaggtgcaagagaggagagtctcctgaattgtccctggatctgaataccatcctaggtgggggatttagcctttttcaccatccctacctctatacctctggactctttttaagatctgtcaatattcacacacatcaaaataagtgagattgggaggatagaatagaccatcttttacttctaacatatttartggtttctgtaagagtcaaggagctgctttcaaatcagcttgttggtgggtataaaggaaaagaatcaactggctttggccaaagtaatgaaaaggtcaaccagttttctttcacctttgttctcttactaatcatgggaaggacacagatggctccagtttaacttcctctgttctcacaggtgccggtccattaacttccaagagaatcccatgagtatatagtatggtttcaaaagaat

SEQ ID NO: 467061 - DNA, 574 bp, Homo sapiens
gatcatcatccaagagatcatcatctcttcctcatcctccccctttttctccttatcctcattctcttatcttcattatcattatgatcactggctcatactgagatgcatgaaaaggagagaaggaaggaaagaaggaaggtgcaagagaggagagtctcctgaattgtccctggatctgaataccatcctaggtgggggatttagcctttttcaccatccctacctctatacctctggactctttttaagatctgtcaatattcacacacatcaaaataagtgagattgggaggatagaatagaccatcttttacttctaacatatttaatggtttctgtaagagtcaaggagctgctttcaaatcagcttgttggtgggtataaaggaaaagaatcaactggctttggccaaagtaatgaaaaggtcaaccagttttctttcacctttgttctcttactaatcatgggaaggacacagatggctccagtttaacttcstctgttctcacaggtgccggtccattaacttccaagagaatcccatgagtatatagtatggtttcaaaagaat

SEQ ID NO: 467062 - DNA, 593 bp, Homo sapiens
aagcaatagttaccaaaacagcatggtactggtataaaagtagacacatagactggtggaacagaatagagaacccagaaataaggccaaatacttaacaaccaactgatcttcaacaaaacatacagaaacataaatttgggagaggacacccaatttaataaatggtgctgggaaaactcaatagtcatatgcataagaatamaactttgggttcctatctctcaccttatacaaaaaatcaactcaggatggatcaaagacttagatgtaagacctaaaaccataaaaattctagaagataacctaggaagaactctcctggacattggcctaagcaaagaattcatgactaaactcctataagcaaatgcaactaaaaccaaaataaataaatgagacctaattaaactaaaaagcttctgcacagtaaaagaaacaatcctcagagtaaacagacaatcaacagaatgggagaaaatatttgcaaactattcatccaacaaaggactaatatccagaatctacaaggaactcaaacaaatcagcaagaaaaaaaaaataatcccagcaaaaagtgggcaaatgacatg

SEQ ID NO: 467063 - DNA, 569 bp, Homo sapiens
ttactagtattttgttgaggatttttatgtttatattcataagcagtattggtctgtagttttctttgtagtggctttgtatggtttggtaatgggataatastggcctcacaaaatgaaatggaaaatgtcccctcttcttctacattttagaagactttgtgaagaattgacattaattctttaatttaaatattctgtataattcaccagtgaagctgtctgggcttaagctgttctttgtgggaagttttaaaatgacaaattcaatttctttgttatttggtagttttaaaattttatttttattttttttattttcataggttattggggaacaggtgatgttttgttacatgagtgagtcctttggtggtgatttgtgagattttggtgcacccatcacccgagcagtatatactgcaccatatttgtggtcttttatccctcatccactccccaccctctccccctgagtccccaaagtccactgtgtcactcttatgcctttgcatcctcatagtttagctcccacttatgaatgagaacatatgatgattgattttcca

SEQ ID NO: 467064 - DNA, 599 bp, Homo sapiens
cttcagtggattttaatttcttcttttccctcaaaacttgaaactctttgaaagatgccaattttaacatgggatttttttagaggctaaagataggtttcttttttaaaggaatttaacctgaatcatgaataaatataatagccctttcaaagaatattgtaattatcttatttttcattcaacagaaaccatcttaatgagtgcaggatctcttgattgtagatgccaagagttgacaggggaacataaacaattcagccttgagttccagagcgacccttgaataaagtacttttttgccctttctctttccctcctgtctttgtcttctccctttgttcccaacctccactttataagtacataattgtgtgtatactatgtggcttacactattctgagtgctgagacagatggacattagataracaggttcactgcactcaatgttcaatgttctagaagaaagcttgtagtctaagtggagagttaatagtctctcttactatcccagtcattaaatccttaaaacaggacttttcaaacttctgtgtgcatgagaatcacttgaatgatttgttaaaaacagtctctta

SEQ ID NO: 467065 - DNA, 583 bp, Homo sapiens
tacgtagaaagccctgaagacttcatcaaaaaaactgctagaactaataaatgaatttcataaagttataggatgcaaagtcaacatacaaaaatcagatgagtttctctacactatagcaaacttyccaaaataggaatcagaaaaacagttccctagcatcaaaaatataactagaaataaatttaaccaagaaagtgcaatatctatacactgaaaactataaaacattggcgaatgaaattgaagaagacataattaaatagaaaatagcctatgttcataaattggaagaattaatattgtcaaaatgtccatattacccagagtaatttacagattaaattcaatccctaccaaaatttcaatggtattttttataggaataggaaaacacaaaaataataggaatcacaaaagacctcaaataactaaaacaatcttgagcaagcagaacaaagttggaggcagcacactccctgatttcaaattatattgtaaagatattgtaatcaaaacagtatgatacttgcataaacacagacacataagccacatggaacagaatagtgagcccaggaat

SEQ ID NO: 467066 - DNA, 562 bp, Homo sapiens
tccagggctgagaacccttagtcaagagaatcactgcattctgccaagttctaccagtatgtgtatgaaaacaagaaatcacaagcatgctacctatacctccatcctcttataaacatttattgaacatgtcatttccattttatagctacgtttatgtaatgacaccatcgattgggttgaatgacagagaaaaggcaactgatatagtggcaatatcaccagcttctgcacacttatttgtaaagaatttctcactgtttatcttgcctatgacaattccagattattgttcargaccttaccctgccacaaatcctttagccctgcacaagcaggttaacttctctaatcctaatttggctcattcacaattagttgattaatatcaaaggaaattgcacacgtgattctaagattctgtgatcattttcttatttcatagaatatgatctgatggaaaataaaaacctaatttatttcaggcttataaagcattatttttacttttatttgatcttcatgtttaaaaaggccagtgattgatgactttgttgtgttc

SEQ ID NO: 467067 - DNA, 562 bp, Homo sapiens
tccagggctgagaacccttagtcaagagaatcactgcattctgccaagttctaccagtatgtgtatgaaaacaagaaatcacaagcatgctacctatacctccatcctcttataaacatttattgaacatgtcatttccattttatagctacgtttatgtaatgacaccatcgattgggttgaatgacagagaaaaggcaactgatatagtggcaatatcaccagcttctgcacacttatttgtaaagaatttctcactgtttatcttgcctatgacaattccagattattgttcaagaccttaccctgccacaaatcctttagccctgcacaagcaggttaacttctctaatcctaatttggctcattcacaattagttgattaatakcaaaggaaattgcacacgtgattctaagattctgtgatcattttcttatttcatagaatatgatctgatggaaaataaaaacctaatttatttcaggcttataaagcattatttttacttttatttgatcttcatgtttaaaaaggccagtgattgatgactttgttgtgttc

SEQ ID NO: 467068 - DNA, 603 bp, Homo sapiens
  misc_feature (1)...(603): n = A,T,C or G
ctcanagtatttcaaatttcagagtatttaagattggatttttgggttagggattctcaacctttgtaatttattgtcatccattttatatactcagakttttggagttggtcttttctgttttttgtttgtttgtttttgtttcgcttggtactcatccatagtattcaaaaaatagtgagtctttgagatgttattttgctttggcttccatgacataacacttccatggtttctccctcttctggacactccttatccatattttcaggctgatttcctttcaccaagatactgaattttggacttcttcaaggctcagtcttggaccctcttctttttctatactctctaggtaatatatgtactcacaaattcattttcatctatgtgcaaattagtcatgaaattttatttctaacctagaccttttctctgagtttgactatatagcccatttgtctatttgccattcctttttactatcttagaggaattcataatcatagccatgcacctcctcccccagctcctcttccatatctcagagaatggcaccacaatgtattatgcaaatcagaaatcttggtgtgatgcttaatt

SEQ ID NO: 467069 - DNA, 547 bp, Homo sapiens
caacccaagatgaaatcactgaaataccagataaagaattcaaagggttgattactaatttacttaaggagatacaagagaaaggtgaaaaccaacataaagaatcattttttaaaaaactaagaatataaatgaaaaaattttaaagaggtagatattttaaagaaaaatgtttcataacttctgaaaatgaaagaaacatttagggaactagaaaatgcaactgaaagttttaacatagayagaccaagtattgaatttcacaggtcaaagagaaggctcttgaattaacctaataagaacaaaaaaaagaataaaaaagaattagaataaatgaacaaagtctctgagaaatatgcatttttgtaaaatggccaaacttaatcattataggtgtttctgagggagaaaataaaagcaaaatgtttggagaacttctagagggaataacttaggaaaatttctctggcgttgctatagcttttgacttccaaatataaaaaatttacctcctgggagactcattgcaaaaagacaacaccaaggc

SEQ ID NO: 467070 - DNA, 588 bp, Homo sapiens
actggtgaatacataaaattacagtataactaaagtcaaaccatagtatatattaccccttttacattacaaaaacataatacagtttggctacacagaaagaattgacattacatgccaaccaaaatctcacaacagtcaatatcttcatgttctatgaattttcaactctataccactttcttcttccagaaaaaaaaaggattattaaagaatatagcaataaaaatctatycaaaaacgccaaggaaaacctgatttcttaagaaagtaacttcaattactataagattctcaatttatgatttaagtatttctctagatatgttttatatcatactgaacaatgcaaattaccaacatatctttcaacccaatttcaacattttaccatatttctcatattttagaaaagatcaaacctaagtaattttttaaatgtagtcttcaccaaagataaaattagaatcaaatgcaataatatagaagagaaatactacaatgggcactggagatcatgacaaaagaactcaggaactttgaagagtaggagtagaggtgatactcaagatatttagctatttaaca

SEQ ID NO: 467071 - DNA, 588 bp, Homo sapiens
actggtgaatacataaaattacagtataactaaagtcaaaccatagtatatattaccccttttacattacaaaaacataatacagtttggctacacagaaagaattgacattacatgccaaccaaaatctcacaacagtcaatatcttcatgttctatgaattttcaactctataccactttcttcttccagaaaaaaaaaggattattaaagaatatagcaataaaaatctattcaaaaacgccaaggaaaacctgatttcttaagaaagtaacttcaattactataagattctcaatttatgatttaagtatttctctagatatgttttatatcatactgaacaatgcaaattaccaacatatctttcaacccaatttcaacattttaccatatttctcatattttagaaaagatcaaacctaagtaattttttaaatgtagtcttcaccaaagataaaattagaatcaaatgcaataatatagaagagaaatactacaatgggcactggagatcatgacaaaagaactcaggaactttgaagwgtaggagtagaggtgatactcaagatatttagctatttaaca

SEQ ID NO: 467072 - DNA, 578 bp, Homo sapiens
tgcagactgagatgctggcctgagattgtaatccaaccttgcattgtaaaacgggcagagaccagagccctgctttgagatcattcggtggagacttcctttgaggaagaaaatgtgtgtgtgtgtgtgtatgtgtgtgtgtgtacatgactgcacatgtcgcactggagccctcagcacctgctgcaaagacacctgatgagcgcccaggctccacggactcctcgcgactgataggcacgttcaagaccaggctgacccaacaggcttaggcaccttgaatatgtttattgcttcagtgacactgtatttctaaaccaacagattttcgaaaacacagaagctctaagtagaaaaagyagtatccctagaggaatcatggaaggaatcaaacagtagttcagtgcccagtgttgaaacaagaaaatccttggattgcttaagactgataattccatccctacataattatttttatggggggaggtgggggtcagtactccctcaatgcaggacatatttctacatttaaaaagttaattggaagctatggtatcataacagcagtattgtacaaa

SEQ ID NO: 467073 - DNA, 558 bp, Homo sapiens
tctggttcttcctgcctggaaaatccttccttgtggtaggcacaattttaagatggcccccaagattctatcctctacatgcatgtcctatatgatctccttctcttatatgtgagcctaatcacgaacaggatgaacagtcactcccatgattaggttattatgtatggagaaggtggagggattttgctgatgtaattaaggatctcaaatcagttgatttttgagttaaccaaaaatggcaattattttgggtgggcctgactgaatcagaagaacatccataaggaggagttgggcccttcctgaagaggaacattctcttgctggtcttgaagtaagtggccacgttgtgagaggatctgccaaaggatgaggaactgcaggtggcctcaaggggctgagagctgccccaggctggtgatcagcaagaaagtgggaacytcggtcctaaaaccacagcaactaaattctgccaacaacttgaaggagcttgaaagaggaccctgagccccagacatgaatgccatctgcaaacacctgatgtcagcctcttga

SEQ ID NO: 467074 - DNA, 444 bp, Homo sapiens
ttcccagtctccagctggagcccagggaagccatccttgattatatatcacagggatccytggagaaggcagccagtgaacttaaggaggggttgcagggtgaaagaagctcccaactaaattttgtgataattttgagtgggcgtgaattcccttaaacagaacccagggagcaaatagaaactgctgcagatacaactgtgggagctggatgctggcattatgggcagacaaagagggggcagggcctgaagaccatgcttgctttctcatcagggaagcttatggccctggggcaggtctgggttctttgtgaaggttgtctggatctaaactcggcactgttagcagggtgctgttggtgtgagactggccttgccaactgcttggtagctgagtgaggcctacagctaccagttattccccactccccatgcggactct

SEQ ID NO: 467075 - DNA, 580 bp, Homo sapiens
ttctcaatcttctggaatactttcagtatgattggtaccaattcgtctttgaatttctagtaaaatttggctgtgagtctgtctggtcctgggcttyttttagctgacaatattttttattactgattcaatctcactgcttgctattggtctgttcaggatttctgtttattcctgattaaatgtaagggggttatatgtttccaggaacttacccatttcctttagattttctagtttgtgtatatagaggtgttcatatcaggctcaaataatcttttttatgcctgtggtgttggttgtactgtcttcattttcagttctaatcaggcttacttaaatcttgtgttttcttagttaatatagctaatagtctatcaatctttgtatcttttcaaataactaccttctgtgtcattgttcttttgtattttttgtttccagttcatttagttctgctgtgacctttgttatttcttttattctgctagctttcagtttggtttgttcttatttctctacttccttgagttatgacattaggtttccaacttatgatctttccgactttttgatgttg

SEQ ID NO: 467076 - DNA, 580 bp, Homo sapiens
ttctcaatcttctggaatactttcagtatgattggtaccaattcgtctttgaatttctagtaaaatttggctgtgagtctgtctggtcctgggcttcttttagctgacaatattttttattactgattcaatctcactgcttgctattggtctgttcaggatttctgtttattcctgattaaatgtaagggggttatatgtttccaggaacttacccatttcctttagattttctagtttgtgtatatagaggtgttcatatcaggctcaaataatcttttttatgcctgtggtgttggttgtactgtcttcattttcagttctaatcaggcttacttaaatcttgtkttttcttagttaatatagctaatagtctatcaatctttgtatcttttcaaataactaccttctgtgtcattgttcttttgtattttttgtttccagttcatttagttctgctgtgacctttgttatttcttttattctgctagctttcagtttggtttgttcttatttctctacttccttgagttatgacattaggtttccaacttatgatctttccgactttttgatgttg

SEQ ID NO: 467077 - DNA, 580 bp, Homo sapiens
ttctcaatcttctggaatactttcagtatgattggtaccaattcgtctttgaatttctagtaaaatttggctgtgagtctgtctggtcctgggcttcttttagctgacaatattttttattactgattcaatctcactgcttgctattggtctgttcaggatttctgtttattcctgattaaatgtaagggggttatatgtttccaggaacttacccatttcctttagattttctagtttgtgtatatagaggtgttcatatcaggctcaaataatcttttttatgcctgtggtgttggttgtactgtcttcattttcagttctaatcaggcttacttaaatcttgtgttttcttagttaatatagctaatagtctatcaatctttgtatcttttcaaataactaccttctgtgtcattgttcttttgtattttttgtttccagttcatttagttctgctstgacctttgttatttcttttattctgctagctttcagtttggtttgttcttatttctctacttccttgagttatgacattaggtttccaacttatgatctttccgactttttgatgttg

SEQ ID NO: 467078 - DNA, 532 bp, Homo sapiens
atttagtgtgctgtggagggtaaccactttgaggattaataatttagatggcctttttttttgtaggctgaggattagaagatgtttgtagacaacttaktgtctcttcacacttggaacagctgataacgagtaattcttcctgctttacttgggaggtagaaaactagaaattttttaaaaaatgagttataggagagaaaaataagaaagttagcccatcagaatgtacatgctgtaaacctggtctattctgactttccttggtggttttcaaataaattcctcacttggattctggaaggagattctatagagtgaggttgcagtgcagcagggagcccattgacccagccatagacatttttgatcccagctgggccctgctgctaatttactgagcgcattcagcacaaaacaaatagtttctatgtttgatttggaaaatgaaaagtttgtatcagatagtatctagggttctcttagttccaaaattgtgtgctttaagtcattgccttttaactgattgctt

SEQ ID NO: 467079 - DNA, 610 bp, Homo sapiens
tgccactttaaaaaccatcagatctcggtcagacatggtggcccagcactttgggagatgggtggatcacctgatgtcaggaatttkagaccagcctggccaacgtggtgaaaccctatctctactaaaaatacaaaaaattggctgggcgtgttgatggatgcctgtaatcccagctactccagaacctaaggcaggagaatcacttgaacccaggaggtggaggctgtagtgagccgagatggcgccattgcactccagcctgggcaacaagagtgaaactccatctaaaaaaaaaacaaaaaacacaccagctcttatgagaactccctcagtgtcatgaagtgtcatgagaacagcatgggtgaaattgtccccatgatccaatcacctcccaacacatccctcacttgacatgtggggattacagttgcagttgggatttaggtgggaacacagagccaaatcataccaatggtgctaaactattcatgagaaactgtccctgtgatccaatcacctcccaccaggccccacctccatgattaggaatcataatttgacatgggatttaggcagggacacagatccaaatcatatccactattat

SEQ ID NO: 467080 - DNA, 444 bp, Homo sapiens
ttcccagtctccagctggagcccagggaagccatccttgattatatatcacagggatccctggagaaggcagccagtgaacttaaggaggggttgcagggtgaaagaagctcccaactaaattttgtgataattttgagtgggcgtgaattcccttaaacagaacccagggagcaaatagaaactgctgcagatacaactgtgggagctggatgctggcattatgggcagacaaagagrggcagggcctgaagaccatgcttgctttctcatcagggaagcttatggcctggggcaggtctgggttctttgtgaaggttgtctggatctaaactcggcactgttagcagggtgctgttggtgtgagactggccttgccaactgcttggtagctgagtgaggcctacagctaccagttattccccactccccatgcggactctac

SEQ ID NO: 467081 - DNA, 600 bp, Homo sapiens
taattccttgtgcgaatgctaatattgttgtgacaggtgctctaaaatcacatactttctgatggaacagatgacaacattttttaaatgttattttaaacattttaaayagcagatctattatctattttttttcaaaaccagctaaacaaacagaaactaacaaagcaaaatcttatctaaatttctttagaatttggaaatacatctcttatactcttgttcatacaaccctgctcatcactcaaacacaacctgatctgtctttacataaacacacacacacacacacacacacacacacacacacacacacacacacacacagaaataaaaacttcaaacatagtgcctgttcaggtagataccttaatatatatggctagtggatagaacttagctcctctaaccaaatatatgtcttcacaaacagaaagtgggcatgatgggtcctagagctcctccaattcattttagatttcaggcctctagaactgtaaattataaatatgtgccattttaagtcactaaccttgtagtgttacttctaagacagcaataggaaattaacacaaattattattcatttggtgaagcact

SEQ ID NO: 467082 - DNA, 507 bp, Homo sapiens
cctcttttgagctctccatgctcttgcatgtgagtgatcttgcaggtagtcatcgtggcacatgctgctgctagccgatgctggctgcctccacacactcctgatgccaccctccctgctccttggcctgccacctggaatccaccctcctgtttacttccttgtcttcctccagggacttgagcatgaggccagatttctgtctgtgattctyatggcattgcagtccagatttttacctttgtggaattgctttttttcacctatctcattcagtttgcactcctgcaaactcttatcttggtgggctccgtggtggggtttccacccaactccagggatggtaccaggaactcatgctttaactcaccatggtgctggcgtaaatggctcttctcttatacctgatgactttcagctgttcctccctcatctactgtttgtttcacctgcaatgcacccactaaaacatacttcactgtgtcttttaatatcctccttatctcc

SEQ ID NO: 467083 - DNA, 586 bp, Homo sapiens
tccatccaatgacaacatcaaggtttcagaatttttgtatatgaaattgaatgacgagattggacaggtttacttggttttggtaaagtggcttgtttttcacgatgcatcattccttttcctataaagcctcataattgtgcacctaataaatcagtatgtaaataaaaatacaaactcaaatttctagcagagtttgtgcyactgcctttgtctcctgttcttgaattgtataaggtaccatgtgttccaaaaagtggaatgagtcatgaaaaggataaattcatataatgaatcttaatttaattttcagactgctttagataatttcagactggttaagataattttgaaataatggttcttctggatgttttatgagagttatttcatctgttaacagcatttaaatgttttatttctccttttctgaagaaaaagaatccattagtgcacatgatcctgaactagggtagcatgattgtgatgccaagctggcctgcgtcactgctttaatcctacgtggccaaagcagcttgctctgattgtttaggactttaatggaacttcatagaactcatgacca

SEQ ID NO: 467084 - DNA, 471 bp, Homo sapiens
agtggctcttatgccacagagttgtccaaacccatgggcaaaaacagataaaatggaagccaggagtctccacccacagagacagggacaagttattctcctcagatgtctatagaatgtggccagcacattgttcgcgatgtcctcaagttcagttttggacagaaacggtcatacttatatgacacacacccatttgcctcagtttcccccactaggagacagtaaaaagattggyggttgccaggggctgaggggagggagggatgaacaggagagcacaggggattttcggggcacgagactggtctgcatgatgttctattggtggatgcatgtcattacacatttgtccaaatccatagaatatacaataccaagagtgaaccctaatgtaaactatgaactctgggtgataatgatgtgccaatgtaggttgatcgattgccccacccccaccagccacacaac

SEQ ID NO: 467085 - DNA, 471 bp, Homo sapiens
agtggctcttatgccacagagttgtccaaacccatgggcaaaaacagataaaatggaagccaggagtctccacccacagagacagggacaagttattctcctcagatgtctatagaatgtggccagcacattgttcgcgatgtcctcaagttcagttttggacagaaacggtcatacttatatgacacacacccatttgcctcagtttcccccactaggagacagtaaaaagattggtggttgycaggggctgaggggagggagggatgaacaggagagcacaggggattttcggggcacgagactggtctgcatgatgttctattggtggatgcatgtcattacacatttgtccaaatccatagaatatacaataccaagagtgaaccctaatgtaaactatgaactctgggtgataatgatgtgccaatgtaggttgatcgattgccccacccccaccagccacacaac

SEQ ID NO: 467086 - DNA, 599 bp, Homo sapiens
agacccatgagtgccacaacctacagccttgagaaggttcccaggccacagcatggggagcagaaacccaggcacaggctagagactgagaagacaggtttgggagctggagaatgccaaagtggctgaaattattggaaaggagaaagttgcacaaaatgaacacaccagtgatrtgcaaaaatcacccatcacgatttcaattgagtacaaatcaggtaacagaggttttgacttaaaaaatcagcaagttcatgtgagaaactacacaggaatagggaaagatctgcctgaaatgatcagagggaacactgtgtgttacccacacaggaccaggaacagtgcttgcttcaaagagcaaaaccaaaagacctcataattcaagggtcattggttggataccaaaaggggccttgcttccacagtggggaaaaattactgcagactaaatgtggctttgatcccaagtaactaagactaaaagcaagcaccaaaaccatcaaactgtttttacataacttaattatgtcctcaaagagaaccttagcatatttttaggacaaaaaaattgtctaccagtttaaattcacaatgtcttg

SEQ ID NO: 467087 - DNA, 599 bp, Homo sapiens
agacccatgagtgccacaacctacagccttgagaaggttcccaggccacagcatggggagcagaaacccaggcacaggctagagactgagaagacaggtttgggagctggagaatgccaaagtggctgaaattattggaaaggagaaagttgcacaaaatgaacacaccagtgatgtgcaaaaatcacccatcaygatttcaattgagtacaaatcaggtaacagaggttttgacttaaaaaatcagcaagttcatgtgagaaactacacaggaatagggaaagatctgcctgaaatgatcagagggaacactgtgtgttacccacacaggaccaggaacagtgcttgcttcaaagagcaaaaccaaaagacctcataattcaagggtcattggttggataccaaaaggggccttgcttccacagtggggaaaaattactgcagactaaatgtggctttgatcccaagtaactaagactaaaagcaagcaccaaaaccatcaaactgtttttacataacttaattatgtcctcaaagagaaccttagcatatttttaggacaaaaaaattgtctaccagtttaaattcacaatgtcttg

SEQ ID NO: 467088 - DNA, 525 bp, Homo sapiens
ttttctctcctaggaaacattgcaaaatttaagcaagtgtattgactgctttttgcttcaatttctattcacttagacaaataattcaataaggtgtttcataaaaacacctgctctttcaaaatatgaagacagtggccgggcgtggtggctcacgcctataatcccagcaaaagtgcaaaaktggcctctcaaaggggaggccaaggcaggcagatcacgaggtcaaaagatcaagaccattctgcccaacatggtgaaaccccgtctgcactaaaaatgcaaaaattagctgggcatggtggcatgtgcctgtagtcccagcttgggaggctgaggcaggagaatcccttgaacccaggaggcagaggttgcagtgagctgagatcataccactgcactccagcctgggcaacagagtgagactccatctcaaaaaaaaaaaaaaaagaaaagaaaagaaagaaagtatttttttaatttcttaattttcctataatatagtatatgaataagggtaagtgt

SEQ ID NO: 467089 - DNA, 553 bp, Homo sapiens
tggtagaggagatggctatccagccttgagatactatcactatattcaggtgaagattcttgtctccaaaagagcaggtcaaaaacttaaaaaagtataggtttattgaatatctgttacatgccaagtactrtgataggaactgaagatgagagatatctattttttaaagagagagagaaaaggtaacatttcactgaacttgaggaacataatagcacctattgaagaaggcaaaaaaatgttaaagcatattacaatgcaatatgtgaaataattggatattaggacatttgtctctcttatagcatagtaattagcattaaaagagaattgagagaagagactttgttgattaaatattgcatttcctatcactcctagtacttgggtgtgcactcctcattgtttaaaggaaaagttacatttttgaaataactgttacataatagacattatcaaccacattgcaaatatataaatatatttaatttttaaaagtttattttcaatatttaaaataatctaaatcaagaatctctgcgagaaaaga

SEQ ID NO: 467090 - DNA, 557 bp, Homo sapiens
ctggcacggggtcatttatcttgtcacaccctcctctctggcccagcagccttgtcctgctccccatactcctgtcaggcccagcttgttctctgtgtcaggtctgccaggtgccctccctcttagtcttcccacagctcaggcaaaccctgggagggccccctcatttctgtgctgaaaactgctggcctcacctgcagattaaggcaactgggacaaggggctttactctgaattctgttccattgtttccaaatattcagaagctgatgggattgttttgagggctgaatattttccaagtctctaaggtcattccaggcatagaacagtcactgtatctgtgacatcagccatcattgyctcccacaggccccaacacaaccccaagcctgtgggaggtgctgccgacccagggtgagatccgtcggttgattgtaggccctggaagtgaagccttgaccttctttctgatattcttcttttggagaacagtaggactggtggaggtccacatggagaaaggaaatgggattcatgagggaacagaagcaggc

SEQ ID NO: 467091 - DNA, 590 bp, Homo sapiens
tctgtagccccagctactagggaggctgaggcagggggattgcttgagtctgggaggttgaggctgcagtaagccatgactgcaccactgcactccagcctgggtgacagggcgagactctgtcttttagaaaaaaagtttattaatattaatatcagttagaaatctagttgttcattgcagaactaaaccagtttatagcagaaataagcacttggagggaaatgttacattttcactccaggccttgagtccttagccaccagctgtttgtccttcagggttctgtggttcctggttccagagaaatcatttgctccaacgtaatgrgtgaagagttcttcaggtgatggctgctgggcccagcttggctgttgtctttgctgtcttgtaagccttgtgttgctcaagttcagttgtgtattagtgcactaactgtactgcaagcttctccaagcatgtgcaagcaatttgagaggagcctaatgtttgcaaggaatttgagaggagccttttaaggatgttttattgggtgggtcagatgagggagataacatgggggcaagaaggaaagttattaattcacgtga

SEQ ID NO: 467092 - DNA, 567 bp, Homo sapiens
gagtttctatgaatgcttctttctagtatttatctggagatattttctttttcaccaaagacctcaatggactcccttgtatcccttcagagattctaaaaaaaacagtgtttccaaactgctaaatcaaatcaaatgtttatctctgctagatgaatgcacactttgtaaaatggtttctaagatagcttccttctagtttttttcctgggatattagcttttttgccattggcctcaatgagctcctaaatgtccattagcagaatggaaaaaaacagtgtttacaaattgctgaatcaaaagaaasttttaactctatgagatgaatgaacacatcacaatgcagtttctcagagagtttctttctagttttcatctaaagataatttctttttcaccgtagtcctcattgtgctcccaaatatcctttcatagatactacaaaaacggtgtttcaaaaatgctgaatgaaaagaaaggcttatctctgcaagataaatgcccattaattaaaggggtttctaagatagcttccttcaagttttttttttttttttcctgggac

SEQ ID NO: 467093 - DNA, 631 bp, Homo sapiens
ttacatgatatctaatatcacgtgtatttttcttatatccatgggcactatgtaaaatttaaaaaatraagggagtatgaaaaagggtatcaggattgaattacaccagggaaatagagatatttcaatcttcacaactaattttcaaacggttcttttgtgctagaaattgtgcctgacccagagtagatgaaagttaccaaaataaacaaccttttgagggaaacaaatataaaaaaaaaatcccaccaaataccttcaattagtactacaatgaatgttgtaaagcaaaatataggatatttaggcaggctatatcaaagaaaactcatctaggacatctaatgcttacttctgaggtagtgcattaatttaaagtgagaagtaaaagaagagatgggagttacagtgagcatcttaatgagaaggtatgatggtgagtgtaagaagactctgaggtgggaaagagtcccagtacatttgaatgaagtgcttgatagctgtgttagtcagtgttcttcagagaaatagaaccaacaggaaatatacatatagatatataagatttattacgggaattgacttatgcaattatggaggccaagaagtcccacagtatgtcacctggcaa

SEQ ID NO: 467094 - DNA, 539 bp, Homo sapiens
gatctattacattattgagaccaattctaacagcagctgccatttataatacctgggagataccaagcagtttattaaagtgcttattttcactaataggaaatctgatcactagctccttttctagtgttattatgagggtgaaaatgcattttctctagattagatctgggggtaatttatctcagtagtagatgtagatttacccttattgttttaatatatcaaaagcataggcttttaaaaagttgtttaataaaagcaatctgcagaaagtgcaaaaaatgaacatgcatcctgccagggatatttccccaggagaattaagtgaaataatggatccattccyatccctactccccaatctcttatttacttgtcttttttatttctcataagcacaaacattgaaattgaaaaatataggtgtcttcagaaatctaggtttctataccatgtttcttctgcatggcttattttgttattattgagcataacaccaagctcaagggaaatttgactttggttttctttgctaa

SEQ ID NO: 467095 - DNA, 592 bp, Homo sapiens
attgcatgtctttggacaaaagtgattttaactggggtgagatgatttctcattgtagttttgatctgcatttctctgatgatcaatcacattgagaacttttctaatatacctgtttgccatttgtgtgtcttcttttgataattgtctattcatatcttttgcccatttttaatcagcaggaaagatttttttcctactgagttgtttgagctccttatatattctggttattaattacttatcagacagatagtttgaaaatatattcttccattctgtggactgtatcttcacttttctgwttttttttctttcctgttcagctttttaacttgatgtgatcttatttgtccatctttgctttggttgcctgtgcttataaggtattactcaagaaatatttgcaaagaccaatgtcctgaagggtgtcccaatattttctcataggaatttcatagtttgaggtctcagatttaagtcttcaatccattttgatttgattgttgcatatggtttcattgatctgcatatggatatccagttttcccagcaccatgtattgaagacattgtcctttccccaatgcatg

SEQ ID NO: 467096 - DNA, 613 bp, Homo sapiens
ctcttaacattacagaaaaaagtagaacacttgatatacacagtagattaaggtctgcagcctaccactaagatggatgattcctcttgtaaacagaatgtgtaaatttacagaatgggtagtatagtacagtcctgtaaatgaactttccttccttatgatttgcttaataattttttctttgctgtaacttactctttttgtaaaaatacagtatataatacacatacaaaatacatattaatcgactgtttatgttatcagtaatgtttctggtcaacagtaggctattaggagatgagtgttggaggagtcaaaaattacacatgagcttttgactgtgtggggagccaatgtcactaacccctgcgttgttcaagggtcaactatataaactttatttctgtgaccttgctaaagcatcctatgtaacttatggtagatttttgtttattcctttgaattttaatgttaataatcatgccaactctgcttgaagagttttatatttgttcttttcaatcttcawacctttttgtattgttttgtttggttgtatcatatgagattattttccagcacaagattgaatagaaatggtgaagggagagat

SEQ ID NO: 467097 - DNA, 610 bp, Homo sapiens
agtgttggaggagtcaaaaattacacatgagcttttgactgtgtggggagccaatgtcactaacccctgcgttgttcaagggtcaactatataaactttatttctgtgaccttgctaaagcatcctatgtaacttatggtagatttttgtttattcctttgaattttaatgttaataatcatgccaactctgcttgaagagttttatatttgttcttttcaatcttcaaacctttttgtattgttttgtttggttgtatcatatgagattattttccagcacaagattgaatagaaatggtgaagggagagattcttgtcttcttcctttrcttagggaagaagcctttaatgtttcaccattatacttgatacttgtaggctatttgtagatgctcttcaatagataacacaaaatggcctttttattcctagcttgcagcaagtttttttcaagagtgtgttgaaattttatcaaaggacttttctgtatttattgagatgattgcataatttcttctgatttttaatattaaactacctttcttaggataaaatctgcttcttcatgatatatcagcctcttatgtatagacggatttgatttgcta

SEQ ID NO: 467098 - DNA, 576 bp, Homo sapiens
taaaaaatataaagagataatagaggtcattatgcaataataaaggggtcaaatggacaagagaataaaagaagtataaatatatctgaacacagcacagtgaatatataatgtaaatgttgttagatctaatgggatagaaagactgcaatagaataatagtaggagactttaacaccctgctttcaacaatggacagatcattcagagagaaaattaacaaagaaacattggattttaactgcatcttaggccaaatggatctagtagagatttacagaccattctatgtaatagctacagaatacccatttttcacaacaggacatggaactttatcaagaatagatcacrtgttaggccaagtagagatttacagaacattctacgtaatagctacagaatacccatttttcacaacaccacatggaagtttatcaagaatagataatgtgtaggccacagaaactctcaacaaattaaaaaaaaattatctcaagtattttttctgactttctgaccatagtggaataaaactagaaatcaataatagaaggaactttggaagctataaaa

SEQ ID NO: 467099 - DNA, 599 bp, Homo sapiens
  misc_feature (1)...(599): n = A,T,C or G
ttttacccacattaattctgctacatttttagtggatttccaggtaaactttaaatattgatttagggatttcttatgctaccatctcatgcctctgctagctgcatgcatgggtgtcactgaacaagagagagatggagcattcccagagacttttcacttcctcaaaacaatggtgacagccactggcaggccactggccagaccaagatatgtgattaaaaccgaacgcaagncatcaggggagtgtaagaagctcttggatatttagtgagttttaaaaatctctgccgtagtgaacctgctctagatttagaaatgttagaaatgatagacgctgcaatgatagatactacaatgatagactatttacatacagagtacagacctacagaccaggaaacgagartacacaatccaccatactaagtactttaattgagatgcatatgtggtcctttggcagtggattcggtcttcacagtaaacttgcactaggttaattcagaaagtttaagtgatttgtcaaattgccattagtttataaggggcaaaacagtgtttaagttttaatctattactatgaagtctctgttgtt

SEQ ID NO: 467100 - DNA, 598 bp, Homo sapiens
ctacaggcaggtccaaagtggaaagatggaaaagctcagatgatacaggcctacagactagattttttgtttatttgtttctgtacactactactacaaaggatagcaaatagagctgaaggaaaaggatggagatactcaaagtcctaaaaatggaaaggagaaaagggaatgtcaacctcaaggacaactgagatgttcacagaacttctgcagattctcgtcccccacctcacctcacaaatgctaacctgtggacagtcctcctgtcyaacagtcctggcagcttataagcttccatctataggaaattggtaatgtagacaccgagactgggtgggttgcagaacaaatgtcatgctctgaccaagatggataagctcacaatgagttggggactttcctaaaagccagagcactagtagtcacatggccactgttgtagctacgtgaacatggtagtggtggtgaagatggaaataagaggaaacatgcaaaagatttttagaaggaaaaatagacaagatcggttgaataattggatgtgaaggatgaggaaatgctatgtatcttaagttcctgtctcacatgactaaat

SEQ ID NO: 467101 - DNA, 598 bp, Homo sapiens
ctacaggcaggtccaaagtggaaagatggaaaagctcagatgatacaggcctacagactagattttttgtttatttgtttctgtacactactactacaaaggatagcaaatagagctgaaggaaaaggatggagatactcaaagtcctaaaaatggaaaggagaaaagggaatgtcaacctcaaggacaactgagatgttcacagaacttctgcagattctcgtcccccacctcacctcacaaatgctaacctgtggacagtcctcctgtctaacagtcctggcagcttataagcttccatctataggaaattggtaatgtagacaccgagactgggtgggttgcagaacaaatgtcatgctctgaccaagatggataagctcacaatgagttggggactttcctaaaagccagagcactastagtcacatggccactgttgtagctacgtgaacatggtagtggtggtgaagatggaaataagaggaaacatgcaaaagatttttagaaggaaaaatagacaagatcggttgaataattggatgtgaaggatgaggaaatgctatgtatcttaagttcctgtctcacatgactaaat

SEQ ID NO: 467102 - DNA, 624 bp, Homo sapiens
tgcccatttttgtggaaaacaatgcactatgtgtactccgatttggtttttacaatttctttagacatgccttatctcatacaatttcacagcagcactatgcagttattattattcactgcatttatttagcgccaagacttgtgttctaagccccaggattctgctcaccacatcactctaccttcagaggcaatagtgttgcatatgcccagccagagttctttcccagtgtgtttcctaagacagcacattttttaaatcctgagtatcaacctgctctgccatatctgttyatgtaaaactgatggatagcatggatatctgaccctctggagtaccagaaccttcttgccagtgtttccaggtgagggatcttaggtctatcctgctcttaggcacaaattgtgctgcatgtccactttgcatttattaggaccaagaccttgcagctgctctgttttttttaatacatatttctctggccctccagctcctttggtaagaaaggacttttctgtttgaccctaaagattatttttacaaaattaaaattactctgcactgaccttccaaacatcatctcatccttctcaaaagtctctctagtacagataacaggca

SEQ ID NO: 467103 - DNA, 577 bp, Homo sapiens
aatcagtcttcaaaatataccttttggcatttaggtggatattttgaaatgcttttgaaaagaaatttacatctataaaggaactgtccatttgtgagggtgtttgcctctgtacaccaaagagaggaaggactgagccactagaaattcttaccattgtatttcatttacataacaagtcttacttttgtttaaggtgcttttcctggccatcttgtcttaaatgggcttttacctacatgctttttctttggcttgaggaaatgatggtaggatatttaggtctgaagtctcagctctgtrcttttaagatacaaattttccaccttgtttcacctaggagtcatcgttttagaagtgcaaatttaggactgcctagctaacagttgcgtagggcaatgaaacaagccattggaagactgatagtctgaatggggaaaataaaaactgtttggaagttgacaaatgaaacatcttaatgaaagctataagatgtgcctctgtctgtttatatgatatttctatgtgatttaagataacatacagcaaataaagctagttttaaaattattgttaa

SEQ ID NO: 467104 - DNA, 646 bp, Homo sapiens
ggctacaattgcaatgctgctcttcagcttgggtgacggagtgagactttgcctcaaaaacaacaaaaagctttaagtagctatcttattttaaaagtataattctttcttctacaatgaataaatttacatatgactaggccagatgtatcaggcagagattgttctctactacttatatctcaagaaaaatgaaagacacttacaaggaagctctaagaaaaacattttttttcatcattctggactttgagattataattctttagactgatttcctgtctcggtggtggatatcatcctggaacttaatttgttcaaaaacctcacataatctgatattttaaaaaacatgaaatgcatagratccataaattattgtgcgttaaaagtcttcagaaattcaaggataatttctgtgggatctcaggccttctgcattgttgggactgagactcacagcactgggttgcagacctctgttaacaggtctggacaaggaatgatgtcagcccagataattctaaggaaggctttctgctttgttataaggcgagtaatcattgaagtctctagacaagctcacaatcatcattccagcatacgcaaatacatcagaacagtttcagtatgctcctggtttatg

SEQ ID NO: 467105 - DNA, 646 bp, Homo sapiens
ggctacaattgcaatgctgctcttcagcttgggtgacggagtgagactttgcctcaaaaacaacaaaaagctttaagtagctatcttattttaaaagtataattctttcttctacaatgaataaatttacatatgactaggccagatgtatcaggcagagattgttctctactacttatatctcaagaaaaatgaaagacacttacaaggaagctctaagaaaaacattttttttcatcattctggactttgagattataattctttagactgatttcctgtctcggtggtggatatcatcctggaacttaatttgttcaaaaacctcacataatctgatattttaaaaaacatgaaatgcatagaatccataaattattgtgcgttaaaagtcttcagaaattcaaggataatttctgtgggatctcaggccttctgcattgttgggactgagactcacagcactgggttgcagacstctgttaacaggtctggacaaggaatgatgtcagcccagataattctaaggaaggctttctgctttgttataaggcgagtaatcattgaagtctctagacaagctcacaatcatcattccagcatacgcaaatacatcagaacagtttcagtatgctcctggtttatg

SEQ ID NO: 467106 - DNA, 564 bp, Homo sapiens
tttgcaagtcttccagagggaactcacctgtcccatctgcatgaactacttcatagacccagtcaccatagaatgtgggcacagcttttgccggccctgtttctacctcaactggcaagacatggcagttcttgctcagcgctctatatgcaagaagacaacacrgcagagaaacctcaaaactgacatttgtttgaagaatatggcttcctttgttagaaaagctagcctctggcaattccttagatctgaggagcaaataagtgggatgcacggagagacaaagaaaatgttctgtgaagtggacaagagcctgctctgtttgctgtgctccaactctcaggagcaccggaatcacagacactgtcccattgagtgggctgcagaggaacgccgggtaagtaatgcctctgaagatctatttctatgcaggacacatgaaattcttgtaagtctatttccttggagattggatgatgccatctctgtgtccccttaagcatgtctgttatgagcttccttgacttcacacctctcagattcgacaaacatgaggagaaacac

SEQ ID NO: 467107 - DNA, 539 bp, Homo sapiens
atgccatctctgtgtccccttaagcatgtctgttatgagcttccttgacttcacacctctcagattcgacaaacatgaggagaaacacagcaaactctcttttctgtgggctaatttgtctctcattttgggcccttcgtatatcagagtgtgaatgatactttattgtcttcacttgtgcttaaattcatggctcttttgcaggaggagctcctaaaaaaaatgcagtctttatgggaaaaagcttgggaaaatctcagaaamctgaacatggaaaccaccagaacaagaagctggaaggttagtaccgtattactctaccttctccaggaacttatagggaacaaatgggtgattcttaaaataggaacttgatctcaacccataatgtttctggaattcaataaagaaggagaaaacacttgagaaaaaaacaccctaattttttataaaagttagtgtgactctttggtaggatttctaatcagaccacagattttacactagcatgctcatctgtttccatacaaacctatagc

SEQ ID NO: 467108 - DNA, 539 bp, Homo sapiens
atgccatctctgtgtccccttaagcatgtctgttatgagcttccttgacttcacacctctcagattcgacaaacatgaggagaaacacagcaaactctcttttctgtgggctaatttgtctctcattttgggcccttcgtatatcagagtgtgaatgatactttattgtcttcacttgtgcttaaattcatggctcttttgcaggaggagctcctaaaaaaaatgcagtctttatgggaaaaagcttgggaaaatctcagaaacctgaacatggaaaccaccagaacaagawgctggaaggttagtaccgtattactctaccttctccaggaacttatagggaacaaatgggtgattcttaaaataggaacttgatctcaacccataatgtttctggaattcaataaagaaggagaaaacacttgagaaaaaaacaccctaattttttataaaagttagtgtgactctttggtaggatttctaatcagaccacagattttacactagcatgctcatctgtttccatacaaacctatagc

SEQ ID NO: 467109 - DNA, 539 bp, Homo sapiens
atgccatctctgtgtccccttaagcatgtctgttatgagcttccttgacttcacacctctcagattcgacaaacatgaggagaaacacagcaaactctcttttctgtgggctaatttgtctctcattttgggcccttcgtatatcagagtgtgaatgatactttattgtcttcacttgtgcttaaattcatggctcttttgcaggaggagctcctaaaaaaaatgcagtctttatgggaaaaagcttgggaaaatctcagaaacctgaacatggaaaccaccagaacaagaagctggaaggttagtaccrtattactctaccttctccaggaacttatagggaacaaatgggtgattcttaaaataggaacttgatctcaacccataatgtttctggaattcaataaagaaggagaaaacacttgagaaaaaaacaccctaattttttataaaagttagtgtgactctttggtaggatttctaatcagaccacagattttacactagcatgctcatctgtttccatacaaacctatagc

SEQ ID NO: 467110 - DNA, 539 bp, Homo sapiens
atgccatctctgtgtccccttaagcatgtctgttatgagcttccttgacttcacacctctcagattcgacaaacatgaggagaaacacagcaaactctcttttctgtgggctaatttgtctctcattttgggcccttcgtatatcagagtgtgaatgatactttattgtcttcacttgtgcttaaattcatggctcttttgcaggaggagctcctaaaaaaaatgcagtctttatgggaaaaagcttgggaaaatctcagaaacctgaacatggaaaccaccagaacaagaagctggaaggttagtaccgtrttactctaccttctccaggaacttatagggaacaaatgggtgattcttaaaataggaacttgatctcaacccataatgtttctggaattcaataaagaaggagaaaacacttgagaaaaaaacaccctaattttttataaaagttagtgtgactctttggtaggatttctaatcagaccacagattttacactagcatgctcatctgtttccatacaaacctatagc

SEQ ID NO: 467111 - DNA, 603 bp, Homo sapiens
agtataatttggttttccacaccccttgataatagggagactctgcaccaagtgtatacgattccattggtagtgatggttcccattaaaaattaccaggctggcattacagtttacccttcattaggtgagtcaaactacagatgactcacccattcttgaaaaggtgctggcagatttcaaaggttgcaaagcttaaggccagactctggaatgacaaattcctatatgtcatctacccgttaggctttaagaaagccagctgactagcctgacccaaaagaacctcccatttcattgtgccctactttgaactcctaattcttctctctctgtataattattccagtgcaaataattctctcaaatgcaaatcatgttcttctaattgtattatgacttaaaaaatagttttcttgaaaggaaactgggtcatttcacagaattgcatcaatttacaatacgtcttcataacagataatacataakaatgctaaaacaggtctagaacatcttcactgaaacctgtgggaccagatacgtttaggatttcagaatattttgaattttagagaagcaattaagcacatattatgcatattg

SEQ ID NO: 467112 - DNA, 621 bp, Homo sapiens
tgcatggtgccatgctactagccctgaacttttcattatgtaagataaacagaacactccctgtttaggtgattgttacagaaagttcaattttttgttaccaaatgcatttttcatatctacagagagtgatttgtcttcatgtatcagtaatatttagaatgatgagaccttatattcagttatttaaattttgggaattawtccaaagagatggatttataaaagacccatgtgccctaaaataaatgagcttggttaaaaaaaaattacatgcaaaaagtatttatttcagtattatttataacactgaaaagtagaaaaaacttaaatggtaagtaggcgatgaaaagtaaattaaacaagttatgcttattttatgggccattatctagcaataaagcaactcttaaaatgaatagtgctaaaaaatttttcaatctaagcagaacactaagaaattaatatttaaaattaaacacaatatgattaaaattccacattaaagcaagtaatcctaaggtttgtgtcaagttgatatatgttatggaatattttgttgctatttcattatatgttttttcccttaatatgactacagtagggattaaatagaaactt

SEQ ID NO: 467113 - DNA, 594 bp, Homo sapiens
cattcaaggctcagaaagtttgtattcaaagcccaattttgaaaagactattggaaaaaatatcctaagagaaataaatctaggcagtcatacaggaataagggttgagtaaataactaatttaaataatgtttaagaaaaaaatgtgtgtgtgagtgtgtgtgtgtgtgtgtgtgtgtgtgtgtgtgatgatccaaaactaaaattccatgtaacagcaacaaagcaggtatgtgtagtttggctggggaagtggggaagaaaagagggagctgagagagttctgaagtccctgtcttaatcagaaagaaaacacaaatgttgataggtataggttgtagtgggttagtcaaatagaatatatmattttcatatcagcagaaaaataataaatctatcataggaggtgggaaagggaaaaaaaaagaactcattcagtatcttctcccattgtattaaatccctacttcctttattcttaagttcttaatgcgtaaattggcaacctcagtatgaattaacaattggtaacacattcaatttgcttattcccttgtcactactaagaccagtaacatagtggctttaaattat

SEQ ID NO: 467114 - DNA, 560 bp, Homo sapiens
ccctcccattgcacatttacagtatgcacaaattttagttattacaaattagttgaatagtgctaggctcccaaaaatatgattcctatttcagttaccataatatattaactgggtgtaattgcataactattacagttcatgcacacacagcaaaccatgtagctgtgttgcttccttgtctcccagcgataaactcacatgacattttacaaaaatgcaagagagaactggccaagaaagacgaaagtgcacaaataaatgttatgtgataacactggaagtaaaatccgaatccgttgcaaatgtaactatagaagaaagagcagacagggagaatgttgacactgctgaccttttagagactccagagaaggcaaatttatccatgtaagtgaggaaagtgattgtgactaaaaggatgaagatgtcccagrggtagtgatgctagccaaaacagataaacaaacaaagcttcacattaaaggaattctcggagatatttcacaacatttaaaagcacagaggataaaatgttggaagtagatccaaatgtggaa

SEQ ID NO: 467115 - DNA, 596 bp, Homo sapiens
tgtggttgataaaacttctggaccaagacttaagaggccaacatatggtctttaggggattttcttatccactgaaattatttgcaaaaatacatgatggttgatggttcgaagtgcatttttctaaaatgaccctattcatcttcatcaaattatcaaagcaatctatagtttgaaataagaatcacttgttwtaaaggaaaataaaattgaatcaaaatacaaagcttaaatttctctgagcaccatttcctgcatgactggtaagtcttgccttctctgggaagccattcttccttcttgcccatgtgccatacagctcttcatacataccagcagcttagacctccaggaatttccatttcacccagggaagcagctttggtaacttctctttgagatcagagctcccgtatggtgaatctggggtctcaatttactgttctctactctaaagtaatttgtatgaagtgaatgattgtccatgtctggggccacagggcctttctcatgggccacagctggccccatcagcttctaacacctatgagggaagcacagctgtggggaaagtattggactgttcagattttcct

SEQ ID NO: 467116 - DNA, 617 bp, Homo sapiens
gtttggtccagctcacttaaaccagaattctcttgagtgcttattaaaaatttggaatcctgggactaactctctaatatctgatgaatcagaatttttgagaatggagtcccactattattgtggttgataaaacttctggaccaagacttaagaggccaacatatggtctttaggggattttcttatccactgaaattatttgcaaaaatacatgatggttgatggttcgaagtgcatttttctaaaatgaccctattcatcttcatcaaattatcaaagcaatctatagtttgaaataagaatcacttgttttaaaggaaaataaaattgaatcaaaatacaaagcttaaatttctctgagcaccatttcctgcatgactggtaagtcttgccttctctgggaagccattcttccttcttgcccatgtgccatacagctcttcatacataccagcagcttagacctccaggaatttccatttcacccagggaagcagctttggtaacttcyctttgagatcagagctcccgtatggtgaatctggggtctcaatttactgttctctactctaaagtaatttgtatgaagtgaatgattgtccatgtctggggcc

SEQ ID NO: 467117 - DNA, 532 bp, Homo sapiens
ctgtgttccgcaaccatgccagttccactggaacatgtgtcagcttttattcggtgctgatctttttccctgaacaagcaagggtgtatatgacccattctctgaattttatatgagtgatggggtgttttgtcccttctactcgtctaggggatctgtccattgagtttatgaagaaaaactttttagtgtgctataacatgcacatgctaaagcatataaagctccatttttttatgtagttgtatacccatgtaactaccacttggaagaacatacaaaacatttccagcaacmctgaagtttgcccatgcccctctctgtcactgcctgccccataccaggattaccacttttctgaatttcatcaccgttgataaatgtttttatctgttcttgaacttcttttacatattacataatacatattcttttgtatttgacattttttgctcaacataacatttgtaagattcatacctgttgttacatatgtcagtattttattcttttttattgcagagtagtattg

SEQ ID NO: 467118 - DNA, 485 bp, Homo sapiens
gggaaggaaaagttagaaaaaaactttgagccctgaaaatgttcaaaaatactctgtggatgcgggctycgggaatttcagcgcgtgctgtgcgccaagcaacacggggcgcagaaagaaacgtgtgcttaccaaattgtccatctgcggcggtggagaattcggaaaacagaaaaagtgggcagggaagaaagagccacggtcaccctcccacgccctaaaccgggcctatttctaattattactttaatcatgtttttctgtttccctccctttgaaacggaaacggagaccctgccggatgtggtatgttataaattcttttttcatgttataaattcttttttcaatggtcagtgcattttttgctcttcgtatgggcaggcttttaagtagaccggcttgcgggcagtgtggacttcaggacgggccttatcagggctggacgtatttaggaaggagacgcgggaacgcccggccctggg

SEQ ID NO: 467119 - DNA, 645 bp, Homo sapiens
agtaaggtactttattatgtttctctaaataaatatggacattttaggacttaaccgtaataccctattacatctaacaaagttaacaattatgacaatgtgaaagcaataatttatcaacctaattgaataaacattttgtattcaaattcccaaattgacacacttaattatcttctcactctgtatttctcataaaatggaggtttgatttaaagcctttttttgactgaagtgaaacawtgctggcaagaataccttataggtgaaaggtgtgcaatgttttgttgtggcattcataggaagctaaagttaatcaccaaatgaggttggggatggttttattcatctgttgcaaagttctacttctttcccttaacagtcaaaatattgaatgatgtgatttttgtgtatgtcctgagaacatatatttcatatattttcttcataaatttgtactgtaattttaaaaatagtgattttctattttttttaattaatgaaaacagggatacaactcatcaaaatctcaggaatgcagctaaggcaatgctaaggggaattttatagtgctaaatgtcttcatcaagaagtttaagagatcttaaattaacaatctaacattgcacctaacagtactagaaa

SEQ ID NO: 467120 - DNA, 538 bp, Homo sapiens
cttaaaaaacacgcgaaccctgtgtaacaacatatatgttttatttaatagtcctatttatatttgactgcttagattggttttatgtaattgacagtgttttaaaatgttaaaatcaagagcatgtgaatatgggtcacacacacaaaatgaaagaaagcatagtgtgcaagttgatattctcaggggactgttcagcagaagggtacagtgttagatgtaatttgtttattgacaatctccaacaatggtkcagtgaaccagcaaacaccacaaaagtaatgaatcctttcctcttttaagtaattatatgtgaacagttcaaattaacctgtggtttgaggctactgcttgggcgaactaattcgctgatgtaatgacttttctcatttttgcttcaatgatttaggtaacaagggagggggaaatgaaaatgtggggctatgagtttatattttagtgaaaagatttgctgttttctgtgagtcacatttgaagactatctccaactgatttaatgtaggacagggtagttaaa

SEQ ID NO: 467121 - DNA, 538 bp, Homo sapiens
cttaaaaaacacgcgaaccctgtgtaacaacatatatgttttatttaatagtcctatttatatttgactgcttagattggttttatgtaattgacagtgttttaaaatgttaaaatcaagagcatgtgaatatgggtcacacacacaaaatgaaagaaagcatagtgtgcaagttgatattctcaggggactgttcagcagaagggtacagtgttagatgtaatttgtttattgacaatctccaacaatggttcagtgaaccagcaaacaccacaaaagtaatgaatcctttcctcttttaagtaattatatgtgaacagttyaaattaacctgtggtttgaggctactgcttgggcgaactaattcgctgatgtaatgacttttctcatttttgcttcaatgatttaggtaacaagggagggggaaatgaaaatgtggggctatgagtttatattttagtgaaaagatttgctgttttctgtgagtcacatttgaagactatctccaactgatttaatgtaggacagggtagttaaa

SEQ ID NO: 467122 - DNA, 633 bp, Homo sapiens
ttattctgcctatcacaaggacattgatatagtcatactttttctccccattctgttgcyatttaggttattattgccattgttcttcttctgttgtgtttgaaataaaattctggtttagtggttcttaggatcatgaggcacaccagcatgtcaacatcacctctgaagtgcatagcaagtaatttgtaaccagactttttaaatgattcattcctttttaaacacgttagtgtataggcaaggtcattcccataacttatgctctttctgctaatgccttgaatgggagaaaaaggaatggatattacaataagcttacaaaaattacatatatctcaaacctacaataagtgtctattttggctgtattaatattatagctatatcagtagctataattataaattataatttaaaaatttgtgatagtagggggtgtttatccaagcctggtacctgtccaagaatattttatacctatgaatgtcatttttcatgctgctcatggatcagtgaacagaatttgatactttttgcccttgtgggtcaaaaattaatgcaatgtgaatagctaatatagtctacaaagaagcttaggtaaatacaaataatgacaataaaagcaataat

SEQ ID NO: 467123 - DNA, 564 bp, Homo sapiens
aaataaattttctattggatattcatgcatttgattctattccaaaaaatattgggtatattttctgaaattctggggaccgatgccaaattgaacacattcaaagatgggataatctagcttaggaatagtttatgcaaaaaacatttgagtttattcttcatcatttttttcctattggagttaaaataataacakaagacttgaataatgccatttgcagcttaaagtcagaagtagaaattggggttagaatcaggtatctaatagtctaaaacctctggtcttatatccacagaactcggaaaaaaaagataaagaaaatttattttttcttgacaaagaattttggtttatagaatgttaggctttcatggagcctgaaaatcaccagctcccacctcaccccatctcccatatctctcatggtatttttgtcatatgatcattcatccaacctctgccttatatcctaggcagttccacagttggaaagatctagtggctgaaattgttgatatggagacaaaacttcctccccaaagtgcttattaattgtttctg

SEQ ID NO: 467124 - DNA, 411 bp, Homo sapiens
gctttcacattatcaggtatttgttatcagcaacgccacattcttagtaccaattttctgttttagtctcttttctgttgctgataacagaatacctgaaactgggtaatttctaaagaaaaggaatttatttctaatacttacagaggctgagaagtccaagcttgaagtgtcacattcagtgagagccttcttgctggtggaaacyctgcacaaagtcctgaggcattacatgtaggacattacatggtgaggggactgagtgcggtgatgtgctagctcaggtctctcctcttcttcttacagagccacaggtttctctcccatgataattcatttatttattaacccattaatccatttatgagggcagagcccttatgatcccataacctcttaaaggcaacacct

SEQ ID NO: 467125 - DNA, 411 bp, Homo sapiens
gctttcacattatcaggtatttgttatcagcaacgccacattcttagtaccaattttctgttttagtctcttttctgttgctgataacagaatacctgaaactgggtaatttctaaagaaaaggaatttatttctaatacttacagaggctgagaagtccaagcttgaagtgtcacattcagtgagagccttcttgctggtggaaaccctgcacaaagtcctgaggcattacatgtaggacmttacatggtgaggggactgagtgcggtgatgtgctagctcaggtctctcctcttcttcttacagagccacaggtttctctcccatgataattcatttatttattaacccattaatccatttatgagggcagagcccttatgatcccataacctcttaaaggcaacacct

SEQ ID NO: 467126 - DNA, 547 bp, Homo sapiens
gatgtcaggtaatgaggacaggtgcctgtttccctcactgaagccactctttgtacaataaattacagggtcatagatctttgagtcactctgctggaccacaggggtcagagatgtcactagttaaggctctctggacccagccactcacggagttgtgggtaagggtgtggcctggtaggggtgagggtgttgggggtggagtcgcttccctcttctcccctttgttccttccagctctgttctatcgatgtgatttcatcattatstttaatgatcatttaaaacagcttgccatccttctggaatcagagtgtatggggggaaatagggaagaaagtgaaaggtgctctcccactgctaggtgccaagtcaaacaccattctcactgtttctagacagcttcctggctttctctaggacttcaaacatggaggggggtcctgtcatgagtaactgtggggaacttactctcccctcagaaagctagtgtggttctgactgcctcttacaaaacatctgactggggacaggtcgtaaaattcgc

SEQ ID NO: 467127 - DNA, 585 bp, Homo sapiens
ggaatatttaaacaacacaattaacaacattgacttgatcagcatatgtagaatactgcacccaactgctgtgcttgaatcattattttcaagtacatattgaatgtttaccaaaattgaccacatgctgagccttgaagaaagcctcaacaagtgtcaaagaatgtaaatcatagagattatgttctatgagcatagttgaattaagccagaaatcaataataataaaaacaactagaaaatttccaaatttttagaaattaagcaacataacttctttacaactcagaagtcaaagaagacatcaaaatagtaattagaagatattttaaactgaagatattttaaactgaatgatgacaaaatacttcatattcaaagttgtaggatgcasctaaaacttgcttagagggaaacattatttcaaatgtatgcattaggaaaggtagaaaaccaatgagctaattatccatcttaaaatttaaaaagcaatttaaacccagtaaaagtagaaggagaaaaataatagagataaggacagaaaataatgaaaagggaataaaagatcaaggaaaaaaataataa

SEQ ID NO: 467128 - DNA, 531 bp, Homo sapiens
atctggcccacgttcgaggaaggggaatcaggttgacttgtaaaggaagggttgttgaagagtcagtggaaatggtttaagaccacggcaccttgttattttaatagttccctcagatgcttagaacagttggatacctggtgagctggctgtccggatgcckcctttcccggcacgcacagtgtggattctctaatggctggtggtcgtgaggcgctgcgacatgctaagcagtgctgggtgacacagaggactaagataggccttcctttccggaaggtgagggcttagctggagagatgtcatcacacttgaaaggtggattatccaacgaggaacaaacactttcgcagtagaaacaacaaacatcagaggagctggacggtgtttttgggcctggaacctttcttgggttttatctgcgcagccccagctctgcagcagtgctcggtgtgtgcgaggagcttggtgtgtatttgctgaatacaagtacagggccctggagggccagagacacgggtgagcttgtgg

SEQ ID NO: 467129 - DNA, 567 bp, Homo sapiens
gaccgggagaaagaaaagctggagaaacatcgagaggcagaaaagtctcacagcagaggaaaggacagggaaaaagaaaaagacagaaggggcccggaaggaagagctccggcagaccgtggcccaccacaacctgctgggccaggagacacgcgaccggcagctcctggagcgggcggagaggaaaggccgctcaggtgggtccccgcttgccttcctgtggttccacccgaggtgccgcgtcgctgctggtgacaggttgatagctcgctgcctcccctccctctctcccccgattccctccttcccctttccttttttttctggacagggtcttgctctgcccccaggctagagagcagtggtgccatcacagctcacggcagcctcaacttcctgggctcaakggatcctcccaccgcagcctcccaaaggactggcattacagacatgccactgtgcccagctggctctatttcttttaaaagttcttgctgtttgggacattttcctcttttgaaatgttcatttgttatttttgttttctctcatagttttcacaaatgt

SEQ ID NO: 467130 - DNA, 600 bp, Homo sapiens
ttggcagtatggtcattttcacaatattgattctacccattcatgagaatgggatgtaattccatttgtttgtgtcatctactatttctttcagtagcgttttgtagttttccttgtagaggtctttcacctccttggttaggtatattcctaagtactttatttatttatttatttatttatttattttgcagatgtaaaaggagttgagtacttgatttgattctcttcttggtcactgttgatgtatagaagagctactgatttgtgtacattaatttcgtatgcagaaactttgctgaattctttcatctgttctaggagctttctggagaagtcttyagggtttttgaagtaaacaatcatgtcatgagcaaacagtaacagtatgacttcctctttactgatttggatgtcttttatttctttctcttgtctgattgctctggctaggacttccagtactacactgaagaggagtgggcatctttgtcttgttccggttttcacagggaatgctttcaacttttccccattcagtattatgttggctgcatgtttgtcatagatggcttttattagattgaaatatgtcccttg

SEQ ID NO: 467131 - DNA, 600 bp, Homo sapiens
ttggcagtatggtcattttcacaatattgattctacccattcatgagaatgggatgtaattccatttgtttgtgtcatctactatttctttcagtagcgttttgtagttttccttgtagaggtctttcacctccttggttaggtatattcctaagtactttatttatttatttatttatttatttattttgcagatgtaaaaggagttgagtacttgatttgattctcttcttggtcactgttgatgtatagaagagctactgatttgtgtacattaatttcgtatgcagaaactttgctgaattctttcatctgttctaggagctttctggagaagtcttcagggtttttgaagtaaacaatcatgtcatgagcaaacagtaacagtatgacttcctctttactgatttggatgtcttttatttctttctcttgtctgattgctctggctaggacttccagtactacactgaagaggagtgggcatctttgtcttgttccrgttttcacagggaatgctttcaacttttccccattcagtattatgttggctgcatgtttgtcatagatggcttttattagattgaaatatgtcccttg

SEQ ID NO: 467132 - DNA, 584 bp, Homo sapiens
agtaaatatttgttgaaagaagtatttaagaggaaaatcaatgtgacgatgttggtagataggaaagtcaaggatacttcaaaagtatgaagttaacttgtgccatcacttaagagggcaaaaacacaagagcatattttcagtgagaagacagtgatttcaattctaggtatgttgtttgacattgctgggatgtggaaatagagaggtctgatacacatgctctgtgctcagtgatgaaaggcccccaggaataagatttgtgaggaagtttgggaacttgttttcttaattagtggttctcaaagtatgatcttcargccagcaacatcagcaccactggggactttgtggaaatgtaaattttggggcccaggccacacctacttaattgaaaagtctgggatggggttcaactatcagtgttttaagaagtcctccaggtgatctgctataccatgaagtttgaggaccactatcttaaaaattaatcagaactaccaagctctaatgctcaatgctatccagacttttggtgataaacctactaaggcatgctaacattgtgttctttgtacagccag

SEQ ID NO: 467133 - DNA, 590 bp, Homo sapiens
tacacagagatggttctaagcactgggaatacaggactgaacaagagaggtatgatccccactgttctggaatttgcattctagttagaaaaaatcagagaaggagagcaactagaaatcatttttacatattataaattctttcaattgaagtaagaacattgtggaatgctacaatctgtgtttagttgtttttatgttgtcctttattaataaagttagaagcagaaaagactagaaaattagtcctcacttccaaagtagaagtattaatacagtaaatcagtctaaattttcattttgattacmcatttttgataaccatatactgcttaaggttgttatgaataaacaacaaaaatctacctaaaattttccacctgttgagatattgcttttgaaacttccttgaggacaatgttccacaaatttgctctgtaaaaggccagacagtaaatatttttggctttggaaggcaagatatgaaattgaggatattatatagatatttacattgctagagaggaaactattcttcacaaatttttattgatgaaattaaaaacataatatttgtttattgatgaaat

SEQ ID NO: 467134 - DNA, 570 bp, Homo sapiens
tgctcaaaaccatatatttccatggaaattaaataacctgctcctgaatgacttttgggtaaataataaaattatttcaaaaaatcaagaagttctttgaaactaatgagaacaaaactccaacataccagaatctctggggcacagctaaggtagtggcaagagggaaatttatagcactaaatgcccacatcaaaaagttagaaagatctcaatttaacaacctaacaacagaactaaaagaactaaaggaccaagaacaaaccaaccccaaaaacagcagaagacaagaaattaaaattagagctgaactaatggagattgggacacacacaaaaaaaatttcaaaagagcaaccaatccaggagttggatttttgaaaaaattaataagatagaccactagctagattattaaaaaaagagagaagatccaaataaacacaatcagaaatcaaatcccacaaaggggatattaccacttaccccatagacatagaaataaccatyagggaatattatgaacatctgtatgcacacaaactagaaattatagaagagatggataagt

SEQ ID NO: 467135 - DNA, 594 bp, Homo sapiens
agcatatcataaagataatacaccatgatcaagtaggtttcatgtgagggatacggaaatggtttaacatatgcaagtcaataaatgtaatacatcatgtaaacataatttaaaaaatttgtgtgatcatctcagtagatgcagaaaaarcatttggcaaaattctgtatccctttatgatgaaaaccctcagcaaatttggcatagaagggacgtacctcaaggtaataaaagccatctatgacaaacccacagtcaccattatgctgaatgaggaaaggttgaaagcattccccctgagaactggaacaagacaaggattctactttcaccacttctattcaatgtggtattgaaagtcctagcaagaccaaacagacaagagaaagaaataaagggcattcaaatcagaaaagaggaagtcaaactgtagctgtttgcaagtgatatgattgtatacctagaaaaccctaaagactcatccaaacagctactagaactgataaatgaatctggtaaagtttcaggatacaaaatcagtagcactactatacaccagcagtgaccaagctgagaaccaaatcaagaactcaa

SEQ ID NO: 467136 - DNA, 554 bp, Homo sapiens
tcaaatactttcttctgattttgaatgcgtcctctctgggcattgcaggagactgtagtagctaaaagtcttcatagttagtaattggagatacctcaagaaaatagcaatcaggaattttttcctgtaaaatggtaagttatattgyaaagctctaagaattaagacctagaagccagattcctggataattttgatatagaactagtagctataagagtttacacaactgagagcctgcttcactggatttaacattagggtaggtacttgtgatagttttctattgctgtggagcaaatcgccacaaactgagcagcttaaaacaacatccattcaccagcttacagttctataggtcagacatcagcatgactatattctcttgctcaggctatcacgaggtttaaagcaagttgctggccaggctggaccctcatctagacattgtggagagaaactgcttccaagctcattcagcgtgttggcagaattcagttcctcacagttgtaagactgagatctccatttcctcattggttgtcagccagagg

SEQ ID NO: 467137 - DNA, 600 bp, Homo sapiens
ctagcttccaactttttttcttcagctttatcacctctctcagctctcatagaatttaagagagttaggaccttgctctgtattaggctttagcctatgagaatgttstgactgttctgatcttctatccagaccactcaaactttctccatatcagcaatcaggctatattgctttcttattattcatgttttcacggagtttcacttttaatttccttcaagaacttttcctttacattcacagcttggttatttggtataagagaccgaacttttgggctatccagcttttgacatgctctcctcactaagctgaatcttttctagctttagatttagttagagatatgtgactctttcacttgaatacttggaggccatcattgggttattaattggcttaatttcaatattattgtgtttcaggagatagagaggcccaagaagatatagaaagacaggtgaatggtcagtgagtggaacaatcagaacacacacgtttagccattaagttcactatcttgtattggtgcagtttatggtgccctaaacaattacaatagtaatatcaaagaccatcaatcacagatcaccataa

SEQ ID NO: 467138 - DNA, 527 bp, Homo sapiens
ggtatctcataaatcctataggctttctgcactcattttcactctttttttctttttcttcctttaactgggtaatttcaaattacctgtctttgagctcgcaaattttttttctgcttgatcaagtctgctttgtcactgttgtatttttttcatttcattcattgtattcatcagcttcagaatttgttttattgtttttgaaaattatttatatctcttyatttaccccatttttttcatgtattgttttcttgatatcattgagtctgcttgtagcttgagctttcttaaggcatttattttgaaatctttctgtgacaatttgtagatctccattatggaagactggctactggaaattatggttttcctttggtagtgtcatgttttcttgatgttttctgcttttcttgtcttgcattgatgtctgcatatttgctggggcagtcacctattccagaatttacaggctactttctgtgaggaaagtccttcacctacaggtggtatgagggtactgatgg

SEQ ID NO: 467139 - DNA, 551 bp, Homo sapiens
ttaatttttgtacttagagttattcatattattctccaaggatcttttgtatttctgaggaattagttataatgttatctttgtcatttctgattgtccttattttaatcttctctttttttctcttttaatctagctagttrtgtattattctggctatttttttttcaaaaaacaagctcttgttttcattgatcttttgtatggatttgtacatctcaattttcttcagctcttctctaattttagttgtttttcttctactagctttgttcttttttttctagtttctttaggtgcaaattagattgtttagatctttctaatttcttgatggtgtttagtgttacaaactttcctcttgacattactttagctgcattctagagagtttggtaaattatgtcactatttttttagtttcaaataattttttgatttctgccttaattttcatgttcgctcaaggagttattcaggaataagttgtttaatttccatgtatttgtttagtttggggagatcttgatattgatttcaatttttattgc

SEQ ID NO: 467140 - DNA, 604 bp, Homo sapiens
aatggggagagtgaaatttatagatttattgttgacattaatacaatgtttcaatgatttgagtatgaaaggttgatagttgtgaacattaagatattctgagtatccaattttcattgattgccaactcaccgagactaacaatacttaaactacattgaatacatgctgtataccatacactgtrttattatatttaatcccattatataagtattgctctctttaactgatgaaatacagcaggcagagatttggcacaaggtcacacttctaataagtgacttcactggaattcagatctatttaagactctgaatgcaacgtctttctaccaggagccagtaatgtacagacatgttgtaagaattctcctcttctgcaacaactttctatcaactttggcctagcttcttggaaaattgcttgaataagatagatatccattcctatcctatctaccttgaaatgacaccaagcacatacttgggtactatatttggagcatcttctttacaagtctgcagcgactgtaaatattatagttggaaagacatggttgtcttctgcccaatatcccagtgccttatattgactagaccta

SEQ ID NO: 467141 - DNA, 593 bp, Homo sapiens
tctagtcctgactgaacacttcttacattatcgtttctcccaaactaaggctttctctgtcagtcctctctgttgattcagagtcctgaactctacattattctagtaggtcctatcacatgacattcacttcttttcaaattgtctactcttatcttcacatcatcatgawcaatatccttacctggacatctgccaactgccttttgttggatcttctagactgttctctctaaccacccacctggttgaatttttggtacctgaaaaccctgaagcactggaactcagccaagaccactacactgagataaaaagaaataaataccttctcaaccttaaaattctttgaaagtgcattttctgtgatcagctatttttttttctcttttaatcatttggttctttcttgctgtctctgtatatacacattacttttcatcattagggagtcattacatacttcatctagacagtgccttgtgctttaaagacctagaccaattataattaaagcagggtatggatcactgcatacatggtattagtccttggacactcagtagctattcacctactttaataattgactg

SEQ ID NO: 467142 - DNA, 350 bp, Homo sapiens
ataggacctcttttcaaagcatattcaaagccagaaggctcttgatttgtaatagctcaaagaattagccgaaactccaaaaggaaaattaatttcttcattcagcagaatgacaaaaatacctaaagacagtatttcctaaaatcgtttaccatttagaaaacayaatttgttttttgcagactgtgggaggaaataacattacataaaagtcattccttcaaaatagctaggtagttttatcagataaacaatatctatccaacagcaaatcaactgattattttcaaaacattgatactagacatccaaccatgagtaaggttgcattattaggtaattccaagttt

SEQ ID NO: 467143 - DNA, 522 bp, Homo sapiens
tccaccctcccgctgaatgcagccccatgtgcaagctcaggcaaaaccagcagtggaatctcacagccaacccacagaatcatgagagaaaaaaaaatctgtcattatttgattcattagattttggtgctgttttgtttctcagcaatcattaacagatatggactccataagaggcactggacatgtctctgaatcamtgattgatttcagtttcatcctacaatagaaatgtaggaaactatagatcatcaaaattccttccaggaaaatgaagtcatttgagtttgaatgtgaaagagtcacatataaattgataaaaatcaagctgtgtgtgtttatgagaggaaaaggtaattaataaagtcaaattatatgtgcaaaccacaccaaaactaatgatcaaacctacttccagcgtgtgtgtggccttgtttgggccatcttcccataggcagactgcactgccagtgtgcccgcccacccctgggtaaacaaggtgccgcaatgcacaggacactg

SEQ ID NO: 467144 - DNA, 522 bp, Homo sapiens
tccaccctcccgctgaatgcagccccatgtgcaagctcaggcaaaaccagcagtggaatctcacagccaacccacagaatcatgagagaaaaaaaaatctgtcattatttgattcattagattttggtgctgttttgtttctcagcaatcattaacagatatggactccataagaggcactggacatgtctctgaatcactgattgatttcagtttcatcctacaatagaaatgtaggaaactatagatcatcaaaattccttccaggaaaatgaagtcatttgagtttgaatgtgaaagagtcacatataaattgataaaaatcaagctgtgtgtgtttatgagaggaaaaggtaattaataaagtcaaattatatgtgcaaaccacaccaaaamtaatgatcaaacctacttccagcgtgtgtgtggccttgtttgggccatcttcccataggcagactgcactgccagtgtgcccgcccacccctgggtaaacaaggtgccgcaatgcacaggacactg

SEQ ID NO: 467145 - DNA, 589 bp, Homo sapiens
cagatttgttatgagctccctagagttgtcttattacccaacagatttaagacagagctaatggaataaagggggaatgataagctaattaaataatatgatagcattgataacatcttgcatttattgcacacttacataataaacataagcaaaagacttcatgagcatgatctccattagccattaaagcaaatctgtgaaatgggtaatatggacccagttttgccattgaaaagttaggcccagagaattaaagttccatagattataagtgagaaagcaaagaggctyaatccaaagatttcaggtgacaccttgtgtaagggatatcagtgagactttacccattcactaaataccaacaaggaccatattctgttctcctggcctattttcaggtgacggaggtttggtgataataactgcacttcggctgataagaaaaatttccagtcaagttctaaattaataggataacaaatcaccaaagttaaagttaagtagaaaacttgatgaaaatttagaaaaatgtactttctcttcaaaggtggagtccaaatttttactgactttttgccttctgcag

SEQ ID NO: 467146 - DNA, 545 bp, Homo sapiens
gatgtcagaccatctaaggtctgtttctgcctttcaaaattcagttaagggcatttaatctctctaattcaggaaaagatgcaaataacacttttgaccaaactgctatctaattagaccaagagcactaaaagccactccgttttactcaacccagctttgaaagacacaaaagtctgtctattttgtatgatttttttcttaggtagataatagaaatgattctagtttggctgctcaagcactgaagtgtcacagtgatgagtgtcataagataaatatagggatagctccttataaatatttctttttgcaatctggtgttgcatatggatgcctggaataggtaatacaaattggtctactctaatttacatttaaacaggggcttaagaaggatcagggagcaccactctgccttgaaaagttacagmctaataagagtgacaggaattgtcatcagtattataatcattaccaagtcccaaaaataaccttgttaggaatagatccatctctgcaggggatatccaagactgcagtgc

SEQ ID NO: 467147 - DNA, 471 bp, Homo sapiens
atatatggtcggtaattaggccctgttgatttattgtctcaactatatcttgttttggtacatacctctttgttctttagtataggcatttagaatcttttctctggactcctacagtagtttcctactttgcttctcttctaccactacaacctgtccagttcaactttcttgtcactaccagctttaattttctaacctcaagttagagcatattattccattagttaaagaaattattgattcctcatgtactttaaagagtttttgataaatggcttgttcatgatcyggccccctacatacctccacaggcttatttaacattaaatctgatatttaattgctggaaccactaacaattccttaaatagagtatatgtttttcatctctctggatctttaatctatgcttataaagctgttcacatttttggtctcaaatgaatttgatcaagcacagggttctta

SEQ ID NO: 467148 - DNA, 617 bp, Homo sapiens
agaattctaaaatcttggtgtgacttctggtactttctaatacaaatagaatcaaggaagaagaaaaatctacatgtgccataatatattttgggaccatttaaaatccatccatctcttctaattctacttagacaactgatttaatttgggtagctgtaccagtatggagaattgtggacaaataacacaaaagacatttttcttttttatgaaatgagaagtctaaccaatgacagtaacaagaagagcaattcttaagtcctcttattcaagtacaataaattagtaaaagattattggccatgtttatgatttactgttctatttttgttttgggaagacgtcttgaataggcttctagtaagactaggaaaataaagtacatggtaaagaaatggtagaatcagtcacatttggtctctgtctctgatacttagttcatcacatgtcaattcacygatcaccaaggtccactcaagtcataaaaaattctgtaattctacaaatatagtacttcttgttgatgcaaatccgttgaaaagattactacatcagagaaaaataggtaagcaggtgaccattctctgatgttagaggagagaagtaaaatatgg

SEQ ID NO: 467149 - DNA, 520 bp, Homo sapiens
catgaaataataaatgtatataaaattcatgaatacctgaaaacacattgtaaacattatgatattattaattaaaataatttcatatttttcagtgaccaaagtacatgagatgaacttttaaatagtattaaataagtaaagtagggttgttatagaatgcagccctaattagactctgctcattttgatcttcatttaaacatctcctaattctcttcttacagggaaacatagattataaactaaggtaaggctataatgagtcagacaaattttgagtgcttattatttcatagaagayggaatatcaagacagattcttgcaggtgaacatatgaactttgagctgtaacaaatatcaacagggcagttctggtctagacttgctctgggtacatgccagccccttcacttaaaaaatacaataacctcaataaatctggatttgtccatgcctgacttgaatatgagttgcaatcccaggaaattcctgattgaattcccagggatccagact

SEQ ID NO: 467150 - DNA, 550 bp, Homo sapiens
aacgattcatatgcacatcatgtgtggtgtgaaggttaaatgagtttctatatgtgaatgcttaaaatagtacctggatcttagtcaatgctaaaaatggcatttccagaagttatgtttacttcagtctatggcaaagacaatttgagtcaacaggttaattcatctcactgagactgcagatatgggaggaatggcaraatctgtgcagcttcggtcaacagggccttgatgacatacacagggttaaagaaaagcctataattcctattaggtgagaattagtataatttgatgctgatataacctgacaagatgaaaatactgttccactaaaatccatggagagattatatcctcaaagttttgaagcaaactattttcactaacaacatgtgattattgaaaagttattttaaatccttgctgaccaaactgatcagagataacgaaatatttaaggatcttctggtcaaatggacaccaaagcttgttggataaaatacatgccagttggatttatggtaatacataagtcagcaagtccctg

SEQ ID NO: 467151 - DNA, 608 bp, Homo sapiens
aacctcttttcactccctaccagtgcccctctggacctccttctgggacattagtgaatagtttcatttttgttcccagaaatttccaatatatctcagaataaaccattaactgatgtaacttgcagggtacaatgcacttttagccaacagctcattctctattcaatttccaactttaaattatgcccagccatattgtcacatagttcttatcagagaatataccaaaaaattcaaacaaaaatacctccaataatacagtataactttacagttgattccaacttaaatcacatggagttccctgtattattatattctcagagagaaattatggacccaaaacaaaatcggattaaagttcattaggttttaaagaaattaaaatctaaaatcttttctatccaatggttttctgttttcggccagaacaatttcactcatgtggaatctggrctctttcagaagcagattggcccttttccatgaaaataagtgtagcaacttcaaaatttaattactccaatttcaagtcactcaatttcaaggcacatcatgtgtgacatgccatcagacaaagaatccataaagtcaataggatacat

SEQ ID NO: 467152 - DNA, 567 bp, Homo sapiens
acatggatatgtttagaagtccattattctgcataccacaaggtgcctggaaaatgtgtcttaaagtttccattgtacatatgcatctagttaatggattggctgggtgtacaattctaggttgaaaataattccaataaaaatttataaagcattacttcatctcttgtatcttgcaaattgctcaactaggacgacgttctgagtctcaataagttttaaatctcaaggccttgttattattggtattacaaaattttgcaaacattagtcttggtttatatttttttatttattgttttgggcacttaagtggggttcttccacatttttccattctgaattttttctaattatttgcaattattgatgacktcatcatcatttttctattttctccatctagagctctaacggtttggatgttggactttctgaatatcacacattgtattagtccattctcacactgctataaataaccacctgagactgggtaatttacgacgaaaagaggtttaatcgactcacagttcctcatggctgaggaggcctcaggaaagttac

SEQ ID NO: 467153 - DNA, 538 bp, Homo sapiens
ctgagccgagtgtgcctcatgttcaccttctgtgggcatttgctggaacctctaagaccctccatgtgctaaagttctagtagatgcagcaccatatgttggtacaactctgtataatgctaggtgctctgtgacagtcccrttccaccagcctctgtgtgtgacagaggacagtgctgagtttgtcctagaaatcctcaacaactcactttttataaaagtggcagaattcccaaccctaaacaatgaggtcagggctactgagacaccttcaaaatgctgcttagaaaaagcatagagcatctgtagtccttgtggtaaagacaaggcaataagcagaccctgcccatgactgtgaatgttaacctcctgaaggaggtgagactaatgggacatcccagttgacccacagactggcacggcttcacagctgaaggaagcactgtgcacagtatggcaaattcttagtccgagctcagatgacttgaaaatggctcctccatatttctgagcaactgtggatgggaactccaatgct

SEQ ID NO: 467154 - DNA, 510 bp, Homo sapiens
aaatgtagacatttggtctaaattaaggtcagatatcagatttgctaaatgctttaaggtcaaactgtttctttgacttttgaaaattgttcaatctacctaccctaaagccattaaattctagataaggcctggggacatgtggaatttaccatgccccctagctatacaaagaagattataaagaaagagattttatataaaaaaggatcctgtatggtaaattcttgtcctaaagtaaaataactggttgtttaaaagaagggaggtttagggcaagtcagaaagtccaaaartgcctcagatattctgtgtgagtgatgaaaggatttgtgaaaaggaatttatgcaagaaatgttgtgtaattcaaaggttgtaaggactcctaaatgcttcataaaatgccactatgactcttaccgtacaacttgcctgctttactgctaggtaaggtctggggacatgcggagttagtcatgccctcagctgtgctggagagccagctctta

SEQ ID NO: 467155 - DNA, 525 bp, Homo sapiens
gggacaccaaacagcagaaacgcaagtgaaggaaaatctagaatgtgttgtgtaggagggagataatgtatcaccgaaggctttaggaccaattgtaccacacagctgtagttcatcaccctaacttgccttttggaagtttctccagaaatcatgacagttcctatgtagtgaacaatatgaaaaacaagagaacatgagcgagagaagagatggactccactgggtgttgatagcgatctgtttagatcctcttatccaggcagatggacccaaattacagtgaatggtggctgctaaccactccccattgccttgtcctccaraacttcacctctggttgaatagcagctgcttccctggagcagttgtccttctgctccccttccccacctctccctcagcagccagtgaccaataactgatttatgaagagtacaaaagtccatttcccttaaggtagaaccagctctgtggtgcaatgtggacttcagagctgccctcaagactagatggaagctagtt

SEQ ID NO: 467156 - DNA, 445 bp, Homo sapiens
ttctttgtaagtactatgaaacaaactcttctcaatgccaacatttaatgagggttgttaagatgagcaccatgatgtaaattaattcaatatacaaattttcaaaatgttcgctcacactgtgtaaatattaatttgttaatttgggtgatttgtcatagacttctttgtcattagtaaagattaagagaccttaattctaattatctgcagtgtgactctgtgtgatggtcatrttgggtaaggatttcaggaatatttatgcaaactcctgtacaaccgaggacttgcagtgggtgatggatgagccatggaatttctctgtgccttaacttgatcaatatcaagctattcttaaaaaggatgaagctccataaaaaaagagcccattcccttttcatttttaaattcccttcattgccaagcatagtgcctggtaccatac

SEQ ID NO: 467157 - DNA, 603 bp, Homo sapiens
gatctacactgagggaacttttacactctatagatgctgtggtgccagrcatttgttaggtgtgatctttgtggagaatgttctggagggtctcactactaagagtagctgaatcttctgcaagtcactccatccagtggctgttgtgaattacgtaactgaccagtttaccttttttcatgttggctctagaaaactaagggccaatgtgtgacccattcatagggttttgatggcatgggtattttaacctgattctttgttttgttttatattccctttcttctttttacttttcattttcattcaattacaccttggtttttaaatgtccttatgagcctttctgagatgaggtagaggtataaacaagcaaacaaatacaatatctacagctgtttcaacagtaatacaaacatttggaataaagaaactcaagtgtttgggtctgaatttgaaattggaggaatagttacaaataaataagccagactgactgtgtcaaatcatgactttctgttcatgttcaatctggtaccttcattcattcatgcttttattcaaatagtaatttttgagtaatgtgctgagtattgaggaagg

SEQ ID NO: 467158 - DNA, 505 bp, Homo sapiens
tagtatctggctgtgcaatagcctgttcacaaaactggcatcagctactgactgatctttgagattccgatctgttaataacattaaaagctttcaagctgaaacagcctgataggtcttcaagacacrgtcatcatcaatgaatatgtgccaactataaaatattcagggccatggtatttgattccaagcttaaagaatacaaccgtgtgcatcataaccatgtaatcataacagaagcatcataagtactaaaatcctaattgtaggaaatttctctcagtttgtgagaccataacctttagaccaacataagtgtgctttacctacccggaatttcttctgcagcatctgaggattcagtgttcggaagaggtgaatcaaagttctagcagacatcattacatctgtaaaataatacttttaattagaaattctggcccatagagtacaatgaggtaaaaaggagtcacactgtactctttggtgtgtagagagtaacatg

SEQ ID NO: 467159 - DNA, 542 bp, Homo sapiens
aatatttttgacatccaccaaatactgtgtccgaagattgactttaaattaggtataaaatgaaagyaacaatttaagatgttttaaattaaatgccctattatcttttcacatgtcaatcattctttaagctttaactgcatcagaattttctataatgctgtaaccatatgaagtcatcataaacgtcgaagatatcaggattttcatatttttaaaagatttataatcccagattttaagtctcataagaatgccataaatgagataaacctataaaattcagaccccaaaattgctttaaagactaaaacttttgaaaggctcataaatgagttgaaattttagaattgacatatgtatttcagttacagtgccaataagagaagttattaaaatgtgtgacttttaccataattatccagcatgtatactgaaaaggaaaggatatgatatagtaggtggtaaaaatgaatgaaaaagtaaactgcacattggactggacaactggcttgctaaattgtaccagaattaggtgtttt

SEQ ID NO: 467160 - DNA, 516 bp, Homo sapiens
tcattttatgatatttttcaggttcttgaccttaggtgaaatacaaaggtcagcaatctctgaattataaagtagaatatatgtgatctctgtttatttgccttattgtatgggatgatggaggaagaccctgagaagtttctacttctatttcaaagtgcctggaagaatacctgaagggtagctcaggtgggaatgtggcatgaagttataatttcactctattcgggatagttaggtgttagtaggaaaaaaaaaactaaggaaaatggattctttacaaaaatccaaccctttgctactatccccagagtaaataaagctatataagagtggaatgccattatcytcataaatttagatatttgaactctcatgaagaataaatgggaaagatatcctgctgtgaaatcatatttaatctcttttagatatttagaatgtaattttttagtaatctttgcttcgggagtaagctttatatctaaatgaaatctttttaatttatgttttctg

SEQ ID NO: 467161 - DNA, 555 bp, Homo sapiens
agttgttaccatgcttattaagttcccgaacaaatttttatctcctaaattaacatcaggttgacaggcatccaggatggatgctgattctctggttatctgcacactcgaaacttagttttatcagtcatttttcttccttgtggatcacctcagaaccttttacattttttccagtttattttttgtctttcagtatcatccctgctgttgacccagtgcacaccacagcaccaatggcttccttcattcttatgtcttttaattttttttcaagtaatttcataatatgacactcttgtacttttttcatcactgaaagaataggatggataatgtacacaaactaactcaaattgcagcrtaaatatcatgaacatacattagattaaaagatgttgctatggctgacattagaatgacatctcctgactgctaaattcatttgttgctgacagtcagggttggttgatatcccgttgttcttgaacacagacttgctcacttcagtgaaaattttaaggcagaaagttctcaagagctgctgtctgaagc

SEQ ID NO: 467162 - DNA, 529 bp, Homo sapiens
tcatgagtgaacttggcaattgccttgttaaaaccagttggacgttatcttccacattgcgaagctatacatgtctgatatgttctgaaagaatagaatttatagttagatatactatttttgattatttactcagaaggagacatgtaattattcttatgttgtcatgaaaatctattaaatgcatttatatttcacatcaatgttacgaarttccattattattattttacagaggggaagccaagatacaggagtggaaattacttggccacatcgcacaggtaggaaattagtcttggaagtttaacacagaaatctcattcttaaccactatcctgtctgcctctcattatttcatttgaaatagctcacggttagtgtaggcagggtccaataaattgtttcctagcaccatacaaatcaatccctagtaagttgttatggaagattttgtaagaatagtgtaaagctcctctgttgatattttgaagaatttactgttctcctcttttgcaaagtgaatatg

SEQ ID NO: 467163 - DNA, 626 bp, Homo sapiens
gacatctttgacatttactgcttgttgaatttttcttttcctccaaaccagttacagtgtttctcttgtttttcttgcttttcttatatcttartagggttttgataaatatgtatttgtagaaagactggtcgaatggatgaacagaaactctaatatcctgctaatttcttccagtgatgtgtagcagtcactaaatcctgctaggtcatactagaagctcttttcccatcttattttgctccccaatccccctacaaaatagagcacacagatctctctcactcagatatcatatctctaagttgatgtttcctaaaagtgtttctatagaagaacactagctttataacaggctctagtaaaaaaaaaaaaaaaagaaaaaagaaaaaagaaaagatgaaaggccacataaattacttgactgataaatgtatttttttctgagtaatatctattcatatcagaatcagtttggaaagcactcttctatgtattcattgttttctactacacaaaagctcttctcatttgaagatttttaaacattccctaaaatacagtaatttagcgtatgaaaattctggatacagagaagattcttaatatctttttcctttgacaat

SEQ ID NO: 467164 - DNA, 626 bp, Homo sapiens
gacatctttgacatttactgcttgttgaatttttcttttcctccaaaccagttacagtgtttctcttgtttttcttgcttttcttatatcttagtagggttttgataaatatgtatttgtagaaagactggtcgaatggatgaacagaaactctaatatcctgctaatttcttccagtgatgtgtascagtcactaaatcctgctaggtcatactagaagctcttttcccatcttattttgctccccaatccccctacaaaatagagcacacagatctctctcactcagatatcatatctctaagttgatgtttcctaaaagtgtttctatagaagaacactagctttataacaggctctagtaaaaaaaaaaaaaaaagaaaaaagaaaaaagaaaagatgaaaggccacataaattacttgactgataaatgtatttttttctgagtaatatctattcatatcagaatcagtttggaaagcactcttctatgtattcattgttttctactacacaaaagctcttctcatttgaagatttttaaacattccctaaaatacagtaatttagcgtatgaaaattctggatacagagaagattcttaatatctttttcctttgacaat

SEQ ID NO: 467165 - DNA, 608 bp, Homo sapiens
tgccacaaactatcatctattctcctaagggtctggtcatctttcccaaaagtcatttgctctcccctaagtttcctacattcttcctcctgccttccctataagctcctaaatctcactgggtttttttcttggtggtgttttgtttgttttgttttgtttttgattccacttttctttcctgtgattcccccatgcgtgtaataaatgtgtacacattttcttcttttgacatgcctgttatccatttattcaatagactcagttatcacaccttcagagggtagagggaaagttctccaastccaacagttccaaaagaaaatagctagtaactgcaaatgcaaaagtcatataaactttgagacaaagttagcttcttatacgatatgttcagaaagaagaggtgtgttgcacaccaagggacatttccctggtcttagctcctaagtttctctgagaagaagcagttactactacagcagttaaacacctgactcccaaattataaaagcctaagttatgattttaaatcattaattgtcacctgtgaatcataaagtctgaactctttaaattgcaaacacacatataaaagggattcttat

SEQ ID NO: 467166 - DNA, 659 bp, Homo sapiens
cagataggggccatttatttcacagataataataggtgaaaatggagagtatgtgggtgtagacgggaaagtgagtttaaatggtttcaggagtctgtggaagttgtctttggatgattcagtgttctcagggaagcacaaccaaaaagacattgaggatttctgggcaagtgttagggattagagacaggataagatacaaaactaggtaaaytagagaatgaatagattggaacatatgtagtatgattgattgataggcagcactgagattctcattttcaagtgggatatttttcaatttgatccatatagctagttgctcaaatatatgtggggatttggtggaaatttggatataaccagggttattttcctggttatattcagcaaagtgaaagagaaaccaggaagttgaagtttcctgggaatggttggccatggaatttaggcaggagaacaggaaatagagtacatcaagtaggtaagggtcattgtgaatatgataaaataatagtttggaggtctcagagagattgaaaaattttatgtcagcatatgaaagggaatgattaaaggaggagctcagagaatgggatgaataaaattgtgactacagagaagttcctattataagtaatgacgatgcttcactcagt

SEQ ID NO: 467167 - DNA, 659 bp, Homo sapiens
cagataggggccatttatttcacagataataataggtgaaaatggagagtatgtgggtgtagacgggaaagtgagtttaaatggtttcaggagtctgtggaagttgtctttggatgattcagtgttctcagggaagcacaaccaaaaagacattgaggatttctgggcaagtgttagggattagagacaggataagatacaaaactaggtaaattagagaatgaatagattggaacatatgtagtatgattgattgataggcagcactgagattctcattttcaagtgggatatttttcaatttgatccatatagctagttgctcaaatatatgtggggatttgstggaaatttggatataaccagggttattttcctggttatattcagcaaagtgaaagagaaaccaggaagttgaagtttcctgggaatggttggccatggaatttaggcaggagaacaggaaatagagtacatcaagtaggtaagggtcattgtgaatatgataaaataatagtttggaggtctcagagagattgaaaaattttatgtcagcatatgaaagggaatgattaaaggaggagctcagagaatgggatgaataaaattgtgactacagagaagttcctattataagtaatgacgatgcttcactcagt

SEQ ID NO: 467168 - DNA, 602 bp, Homo sapiens
acaaatgcttgcaagaatgtagggaaaagagagccctcttactctgttggtgggaatgtaaattagtacattcactatggagaacaatatggaggtccctcaaaaaattaaaaatagaactatcatatgatacagcaatcccactgctgggtatatacccaagggagggaaaattagtatatsaacgagatatctgcattcccatatttatttcagcactattcataatagccaagatttggaagcaacctaagtgtgcatcaacagatgaagggataaagaaaatgtagtacatgtacacaatggagtactcttcagccatgaaaaagaataagattctgtcacttgcaacaacgtggatggaactagggaacattatgttaagtacaatgagccaggcacagaaagactttgcatgttctcacacatttgtgggagctaaaaattaaaacaattgaactcatcaagatggagagtagactgagagtttccagaggctgggaagagtagcggtgttacgggatctttggagtgtcacttttctggacagaaacctctatggctggtggcacctttacctgagttttgcttgggccccgccc

SEQ ID NO: 467169 - DNA, 602 bp, Homo sapiens
acaaatgcttgcaagaatgtagggaaaagagagccctcttactctgttggtgggaatgtaaattagtacattcactatggagaacaatatggaggtccctcaaaaaattaaaaatagaactatcatatgatacagcaatcccactgctgggtatatacccaagggagggaaaattagtatatgaacgagwtatctgcattcccatatttatttcagcactattcataatagccaagatttggaagcaacctaagtgtgcatcaacagatgaagggataaagaaaatgtagtacatgtacacaatggagtactcttcagccatgaaaaagaataagattctgtcacttgcaacaacgtggatggaactagggaacattatgttaagtacaatgagccaggcacagaaagactttgcatgttctcacacatttgtgggagctaaaaattaaaacaattgaactcatcaagatggagagtagactgagagtttccagaggctgggaagagtagcggtgttacgggatctttggagtgtcacttttctggacagaaacctctatggctggtggcacctttacctgagttttgcttgggccccgccc

SEQ ID NO: 467170 - DNA, 286 bp, Homo sapiens
tgcatttaggttgtgatccactgaaaagtaaattaaacacattaatatttctatttagggaaattctgacaagtaattttataacaagatcacttcattaattataaagcttcaaaaatacttagtgaaaaaaactaacagatcaggttaattatatgagacttttcaggaaaaaaagccatacaaaagcaaaaaaaaaaatgagaggagagacaaaaactatctttgactaacattttaaaggtaaaattatttactcacrttatttttcaaaattacattgtca

SEQ ID NO: 467171 - DNA, 491 bp, Homo sapiens
ctgggtgacataggcaaaatcagacatttacctgatttcaattaactaaaattctaaaagaagaagttttgagtatttattaatcaacctagtattcaattttcattttcttttctaaatgaggaaataaggagaatattatggaatgatttttattcttcacagaagtaaaataagcatagtgtgttttgagtgttaagacacaaatgcaayttctcctttaccttactccaagcttgtttgtatggagaagttaagaccatcccatttctatgttatgccacaatgcttctctatagcacacaacttggctctgaaattttgaaagtcaaaatactaatctactatgtgtctctgataaattgcctgaacgttacctgattttgaagtgctgcactcctaagactttttcttggaatgagttaaacgttttattccaagaatcctctactgagctagaaagcagagctgtgcatctctgtttcagtaaa

SEQ ID NO: 467172 - DNA, 491 bp, Homo sapiens
ctgggtgacataggcaaaatcagacatttacctgatttcaattaactaaaattctaaaagaagaagttttgagtatttattaatcaacctagtattcaattttcattttcttttctaaatgaggaaataaggagaatattatggaatgatttttattcttcacagaagtaaaataagcatagtgtgttttgagtgttaagacacaaatgcaacttctcctttaccttactccaagcttgtttgtatggagaagttaagaccatcccatytctatgttatgccacaatgcttctctatagcacacaacttggctctgaaattttgaaagtcaaaatactaatctactatgtgtctctgataaattgcctgaacgttacctgattttgaagtgctgcactcctaagactttttcttggaatgagttaaacgttttattccaagaatcctctactgagctagaaagcagagctgtgcatctctgtttcagtaaa

SEQ ID NO: 467173 - DNA, 576 bp, Homo sapiens
ttcaaacacctgagtctgcgatgctccaataagcatttcctttgagtgtcatgttggcactcaaaaagtttcagactttggagcatttgggatttcagatttttggatcagagacattcaacctatagttgcacatcatgtatctcataagaagtgaacattcagaatacgtaaagtactcctacagagagactaccagaagcagagaggarcaaacacattttcacactagagcacctcctatctctcccggattccaattagggcagagtaagtgctagttatctgccaacccaggattaggccctgcagctgcagtgaaaataatcacagaagaaaactaagaaataaaaaatggagaaagtgagacatcaaactaaaattactagaaacccccaggaagaaggaaaaagaaaccaagaaaacagaaaaacaattaaaccagttaattaaaccttggcatgaccagaagatcagagtttcctaaaggagtggaaatttattgatttgaagaggatttattgattactgatttgaagaggaagaaaaaccatgaatggtctgaagcaaaagcct

SEQ ID NO: 467174 - DNA, 576 bp, Homo sapiens
ttcaaacacctgagtctgcgatgctccaataagcatttcctttgagtgtcatgttggcactcaaaaagtttcagactttggagcatttgggatttcagatttttggatcagagacattcaacctatagttgcacatcatgtatctcataagaagtgaacattcagaatacgtaaagtactcctacagagagactaccagaagcagagaggagcaaacacattttcacactagrgcacctcctatctctcccggattccaattagggcagagtaagtgctagttatctgccaacccaggattaggccctgcagctgcagtgaaaataatcacagaagaaaactaagaaataaaaaatggagaaagtgagacatcaaactaaaattactagaaacccccaggaagaaggaaaaagaaaccaagaaaacagaaaaacaattaaaccagttaattaaaccttggcatgaccagaagatcagagtttcctaaaggagtggaaatttattgatttgaagaggatttattgattactgatttgaagaggaagaaaaaccatgaatggtctgaagcaaaagcct

SEQ ID NO: 467175 - DNA, 576 bp, Homo sapiens
ttcaaacacctgagtctgcgatgctccaataagcatttcctttgagtgtcatgttggcactcaaaaagtttcagactttggagcatttgggatttcagatttttggatcagagacattcaacctatagttgcacatcatgtatctcataagaagtgaacattcagaatacgtaaagtactcctacagagagactaccagaagcagagaggagcaaacacattttcacactagagcacctcctatctctcccggattccaattagggcagagtaagtgctagttmtctgccaacccaggattaggccctgcagctgcagtgaaaataatcacagaagaaaactaagaaataaaaaatggagaaagtgagacatcaaactaaaattactagaaacccccaggaagaaggaaaaagaaaccaagaaaacagaaaaacaattaaaccagttaattaaaccttggcatgaccagaagatcagagtttcctaaaggagtggaaatttattgatttgaagaggatttattgattactgatttgaagaggaagaaaaaccatgaatggtctgaagcaaaagcct

SEQ ID NO: 467176 - DNA, 576 bp, Homo sapiens
ttcaaacacctgagtctgcgatgctccaataagcatttcctttgagtgtcatgttggcactcaaaaagtttcagactttggagcatttgggatttcagatttttggatcagagacattcaacctatagttgcacatcatgtatctcataagaagtgaacattcagaatacgtaaagtactcctacagagagactaccagaagcagagaggagcaaacacattttcacactagagcacctcctatctctcccggattccaattagggcagagtaagtgctagttatctgccaacccaggattaggccctgcarctgcagtgaaaataatcacagaagaaaactaagaaataaaaaatggagaaagtgagacatcaaactaaaattactagaaacccccaggaagaaggaaaaagaaaccaagaaaacagaaaaacaattaaaccagttaattaaaccttggcatgaccagaagatcagagtttcctaaaggagtggaaatttattgatttgaagaggatttattgattactgatttgaagaggaagaaaaaccatgaatggtctgaagcaaaagcct

SEQ ID NO: 467177 - DNA, 494 bp, Homo sapiens
gaggtttcagtgagtctcaatcatgccattgcactccaatcctgggtgatagagtaagaacttgtctccaaaaagaggaagaaaaaaaggctcagaatgctatgtgaaatcttccttgattctagctatctttctccacacacacaggtgtctgcttcgttggggtcccttagtaccttgtcaatttttctagtgtcactttaccacctgacctgcacatcatgtctttacatgttgaccccctttgctgctagactgtagaggacaatcttttgaatcatctttgtataaacagtcttarttttgctaaataattacttattgagttcctgctaagtgttaggcactggggaataaggaaggaaaatagaagctgtcagggatggctttcctaaagatcacccatgagctgagacttagagagtgaggttagccagattaagcgaggcagagggcaggaaagggtgagcacatgccaggcggcaacaagagag

SEQ ID NO: 467178 - DNA, 494 bp, Homo sapiens
gaggtttcagtgagtctcaatcatgccattgcactccaatcctgggtgatagagtaagaacttgtctccaaaaagaggaagaaaaaaaggctcagaatgctatgtgaaatcttccttgattctagctatctttctccacacacacaggtgtctgcttcgttggggtcccttagtaccttgtcaatttttctagtgtcactttaccacctgacctgcacatcatgtctttacatgttgaccccctttgctgctagactgtagaggacaatcttttgaatcatctttgtataaacagtcttaattttgctaaataattacttattgagttcctgctaagtgttaggcactggggaataaggaaggaaaatagaagctgtcagggatggctttcctaaagatcacccatgagctgagacttagagagtgaggttagccagattaagygaggcagagggcaggaaagggtgagcacatgccaggcggcaacaagagag

SEQ ID NO: 467179 - DNA, 502 bp, Homo sapiens
tgtggtggttgttgtggttgtggttgtttttgttttttgagatggaatttcactcttcctgcccagtctgaagtgcagtggtgtgatctyagctcatggcaacctctgcctcctgggttcaagtgattctcctgcctcagcctccctagtagctggaattacaggcatgtgccaccatgaacagctaattttgtgtttttagtagagatgggtttctccatgttggtcaggctggtctcaaactcccaacctcaggttatctgcccgcctcagactcccaaagtgctggattacaggcactagccaccacacccagcaatatatggggattttgttttaaaagttatgtttcctggatctaccaagctcatgagaaaatagagcaaacaagtcatttgcataggtaagaaactttggatttatagcttgtcctcactactttagaagattatcatcatgttttgcaaagcaaaatgttaaacacagacacaaggggaaaaag

SEQ ID NO: 467180 - DNA, 636 bp, Homo sapiens
tttatagcttgtcctcactactytagaagattatcatcatgttttgcaaagcaaaatgttaaacacagacacaaggggaaaaagaaattaaaactataggggtgggtgaaaaaatattgcataatttattactgttgacctcatcatatgactgattaagggcactgaatttaacttggatgtgaagtagacctcatattagctgcagttaatcagtagaccaggcgtcctagcagaattaaatttgatgctcctgtgttatctttaaaagacacagcttttctgaaaacccttactcatagtgcatgattatccattaagaaaaggtgatggaatatgtgaatacagctgaggagacaccacaaggcaaatgctaagtggttcccattaatattgcaaaaataaacactataaaacagaaagccatagacattatttaatatttggttttgggaggtatttttagtgacactgcatacagttgtacctaataattgctaaattagagacgtaaaagtaaaacaaaggcacattgtgtttgagtaggaaatctatagacatctagctggttttcccatccagccacaaaattctaaatataatcatggtacctgcactcaaatttatgttaaatac

SEQ ID NO: 467181 - DNA, 502 bp, Homo sapiens
tgtggtggttgttgtggttgtggttgtttttgttttttgagatggaatttcactcttcctgcccagtctgaagtgcagtggtgtgatcttagctcatggcaacctctgcctcctgggttcaagtgattctcctgcctcagcctccctagtagctggaattacaggcatgtgccaccatgaacagctaattttgtgtttttagtagagatgggtttctccatgttggtcaggctggtctcaaactcccaacctcaggttatctgcccgcctcagactcccaaagtgctggattacaggcactagccaccacacccagcaatatatggggattttgttttaaaagttatgtttcctggatctaccaagctcatgagaaaatagagcaaacaagtcatttgcataggtaagaaactttggatttatagcttgtcctcactactttagaagattatcatcatgttttrcaaagcaaaatgttaaacacagacacaaggggaaaaag

SEQ ID NO: 467182 - DNA, 636 bp, Homo sapiens
tttatagcttgtcctcactactttagaagattatcatcatgttttgcaaagcaaaatgttaaacacagacacaaggggaaaaagaaattaaaactataggggtgggtgaaaaaatattgcataatttattactgttgacctcatcatatgactgattaagggcactgaatttaacttggatgtgaagtagacctcatattagctgcagttaatcagtagaccaggcgtcctagcagaattaaatttgatgctcctgtgttatctttaaaagacacagcttttctgaaaacccttactcatagtgcatgattatccattaagaaaaggtgatggaatatgtgaatacagctgaggagacaccacaaggcaaatgctaagtggttcccattaatattgcaaaaatmaacactataaaacagaaagccatagacattatttaatatttggttttgggaggtatttttagtgacactgcatacagttgtacctaataattgctaaattagagacgtaaaagtaaaacaaaggcacattgtgtttgagtaggaaatctatagacatctagctggttttcccatccagccacaaaattctaaatataatcatggtacctgcactcaaatttatgttaaatac

SEQ ID NO: 467183 - DNA, 548 bp, Homo sapiens
agagtacgtttaaggttatgagtgaaccttatattatagacgaaacaagagaaaggaaaatgggtaccttgagcagtggaacacaggactcttggtaacagcatgacaagttttctgattactttgaaaatttagacctattaagaaaagccaagagcatagaattaagttatacatttttgacctataagataaaaatatttcagcatcaggtcaaaataatggtcagaaccagaggcaaaaatttagagaagctagctaaaaagctgaaggygagagttttatctcaggcccttttaaagggagacaaagttgaaaacagcaaggcacgataaaagttgaatttctaacatatgagtctgataactttttaaaagaaatagtttatagaattaaaatcaaaacctcttatgattgtattaagagtaaatcaataccttaagaaaacattatttgaacataggggactaaactttagaagactattttaaataattcccttttcattataactaacttaatcacgttcaaaactccttttataaact

SEQ ID NO: 467184 - DNA, 495 bp, Homo sapiens
acatccgggtcacactgatgtaagaggtggggttccacagccttgggcagctccccctgtggctttgcagggtatagcgccctttctggttgctttcatgaaatggcattgagtgcctgcgggcttttccaggcacatggtgtaagctgtcagtggagctaccattctggggtctgaaggatggtgaccctcttcttacagctccactataaagtgcccttgtgaagactctgtgtgggggctccaaccccacatttcccttccatactaccctagcagaggttttccrtgagtgccccatccctgcagcaaacttctgcctggacatccaggtatttccatacatcctctgcaacctaggcagaggttcctaaacctcaattcttgtcttctttgcacccacaggaccaacaccatatgggagctgccgaggcttggggcttacaccctgtgaagcaatggcccaagcctggatattgaccccttttaccatgg

SEQ ID NO: 467185 - DNA, 602 bp, Homo sapiens
aactttaaattttttgagcctgccaaaaggccagatgttatcagcagctgaacagcatctacagaaaccagctgcaaagacagaagcagamcaattgatttggtggagagatccaataacaaaaagttgggaaataggtaaaataataacttggggtagaggttatgcttgtgtttctccaggccaaaatcaacagctgatttggataccatcaagacacctgaaaccttattatgagccagacgctgaggaagagattccaggaggatcctgaggacccgctggttgcagccatgtcaaggctgacactgaggaggacccccaactgtcacaagcaacacccgtcaaacacagccacccacctggggagagatcaagaagctgtcacagatggcggaagaaaacctgatgaaagcgagacagccagtcacaatgaataatttaatggtagctatgatagcagtgatcaccattgccatgagtattccttcaataagggctgacacatggaacaattatacttattaggcatattttcaatcttggctggcaataatgcctagatgtaatcactctatgatgcagttacatatgctttctga

SEQ ID NO: 467186 - DNA, 602 bp, Homo sapiens
aactttaaattttttgagcctgccaaaaggccagatgttatcagcagctgaacagcatctacagaaaccagctgcaaagacagaagcagaacaattgatttggtggagagatccrataacaaaaagttgggaaataggtaaaataataacttggggtagaggttatgcttgtgtttctccaggccaaaatcaacagctgatttggataccatcaagacacctgaaaccttattatgagccagacgctgaggaagagattccaggaggatcctgaggacccgctggttgcagccatgtcaaggctgacactgaggaggacccccaactgtcacaagcaacacccgtcaaacacagccacccacctggggagagatcaagaagctgtcacagatggcggaagaaaacctgatgaaagcgagacagccagtcacaatgaataatttaatggtagctatgatagcagtgatcaccattgccatgagtattccttcaataagggctgacacatggaacaattatacttattaggcatattttcaatcttggctggcaataatgcctagatgtaatcactctatgatgcagttacatatgctttctga

SEQ ID NO: 467187 - DNA, 602 bp, Homo sapiens
tgagctaatcactatatcttgtatgcaaaaaattgcaccaattgggamccaaattctaacaattttaacctatttcataaggcctttccttctccaattaaaacgattatctaatctttactatgttaattagaaagccttctggtattgatataagaatattagaaaggtgtccaaaacatggtctgaaacctgttctaggctaggactgacaactttattctgaaaagaaatcggcattcctgatgaaatgcttaagtaatttattgatgaattttattgggaataagatttgttctgagaataatgggaaaaaaaagtttatacgcacacccagctggctgttagtgaactctagtgactgtaatcaggcttttgttttcctctttatactatttattacatttcctataaagatctcctaatcagaatgagtctttcacatagtctagtagaggcctttcactttccaagtaatattgtaataaaaatttaatgtatgcgtaccagtctgttttcatggtgcaataaagaaataccagagattggaaatttaaaggaaagaagtttaattgactcacagttcagcattgctgagaagg

SEQ ID NO: 467188 - DNA, 602 bp, Homo sapiens
tgagctaatcactatatcttgtatgcaaaaaattgcaccaattgggaaccaaattctaacaattttaacctatttcataaggcctttccttctccaattaaaacgattatctaatctttactatgttaattagaaagccttctggtattgatataagaatattagaaaggtgtccaaaacatggtctgaaacctgttctaggctaggactgacaactttattctgaaaagaaatcggcattcctgatgaaatgcttaagtaatttattgatgaattttattgggaataagatttgttctgagaataatgggaaaaaaaagtttatacgcacmcccagctggctgttagtgaactctagtgactgtaatcaggcttttgttttcctctttatactatttattacatttcctataaagatctcctaatcagaatgagtctttcacatagtctagtagaggcctttcactttccaagtaatattgtaataaaaatttaatgtatgcgtaccagtctgttttcatggtgcaataaagaaataccagagattggaaatttaaaggaaagaagtttaattgactcacagttcagcattgctgagaagg

SEQ ID NO: 467189 - DNA, 602 bp, Homo sapiens
tgagctaatcactatatcttgtatgcaaaaaattgcaccaattgggaaccaaattctaacaattttaacctatttcataaggcctttccttctccaattaaaacgattatctaatctttactatgttaattagaaagccttctggtattgatataagaatattagaaaggtgtccaaaacatggtctgaaacctgttctaggctaggactgacaactttattctgaaaagaaatcggcattcctgatgaaatgcttaagtaatttattgatgaattttattgggaataagatttgttctgagaataatgggaaaaaaaagtttatacgcacacccagctggctgttagtgaactctagtgactgtaatcaggcttttgttttcctctttatactatttattacatttcctataaagatctcctaatcagaatgagtctttcacatagtctagtagaggcctttcactttccaagtaatattgtaataaaaatttaatgtatgcgtaccagtctgttttcatggtgcaatraagaaataccagagattggaaatttaaaggaaagaagtttaattgactcacagttcagcattgctgagaagg

SEQ ID NO: 467190 - DNA, 625 bp, Homo sapiens
aggctcataggagtgttgctagatagtacagagagttcctgtaggcctttcactctgcttctcctaatattaacatcatatataaccacggtacattgatctaaactaagaaattaacattgatacaatactattaactaaatgacacactgtattaaaatttcagtagtttttccactaatgtcctctttccatcctaagatctaatccaggaggtcacatggaatttaggttttgcttggtgttaattgagctatttctctactctygatgtcctattgatatgatatcaccatttttgaaaagaagttctcaccttcgaatctgtaaaatgctagaaaggagataggaaagaaggtaaagtgggaaacaatgggaaaattttcttttattttttaattttcaatctacctgcagggagaacagcatgacttaggaacatggtttttctgaccctccctatctttttagccctgagaaaataaaagatcaagtactctctttagaagataaccttgtaaatctctaacggctcaacagccatttagtctgatgcagccctggattgctatttccatttcacagatggggaaaatgaagccctgccctgctgaatgattgttta

SEQ ID NO: 467191 - DNA, 342 bp, Homo sapiens
aaacattttcacactacctttaaaaaacatgggaattaaatgaagcaaagaaaaaataaacctacaatgtcattgtgaatgcagtgtttgttaatcctcttataaaatgaatcttccctaatcctcaaggaatatactatgataaaaatcaatgtcaaagcttgtccctacagaatttccaagatactgaaagtttttctgggagaaaaagtggagcatacatttttattacatagagtatttaatagaaaatagatcaaagtaaataaartggaacactgttgatggattatggaggaagaagagagcattactgaaaagaaaaagttacaattacagaat

SEQ ID NO: 467192 - DNA, 576 bp, Homo sapiens
actgtccagtatggtagccactacttacatagagctaatgagctcttaaaatgtgtctgaggaagtgaatttttaatattattttattttgattgatatcactgtaaacagccacatgtggctataatattttaatgctgtcatccagaaagtactaatgaactcaactgtgcttccttcactgtggacagagcctggaaatctagtgtttgctcagyagtggtattcccggagaggcagcagatgggaacagtcagctgaggtacagagaagaattttatcactgacatcatttagaattgctggtgctcagtgataacaaagcagacaaattttttgtcttattactgtttttaagctgtttacaatgtgcccactcattgcctgcacccacaggggactgctcccaccaataccacccttgttacaccactatctttggtcactttgtctcttcctgccctcatgccatgttccactgaaggtttttgactcatgatggataacaaaaagtttgcaagtaattgtgctgaaagtgattcaaaagtggcgaggaagattatcacactgagtatt

SEQ ID NO: 467193 - DNA, 592 bp, Homo sapiens
gagcaaactcagtcattatctggtttggttcctttggggttggactattacagattattttttgatggtttgggggtcaacttgatagagggatacggcatcatgacatactgttcaggagaactgcctgctgatttggcatggtggaaattttctcaactttctttctagaagctatgtaacagatatggctaaggttaaagggaatttgtcacattgtgagacattttatgggtgtgaaatggttctagcattggtattcattgtcaagtagttatgtagctttggaaatttgtcctttttggatcctgcttctcttacattaaatgtcagatatgaaagagaaatttctggaattctgactttgcatkttatgtaatctggaacatatttccactgcaaatattgaacttctaagaggaagaatagcaaatgcctggcactttgctgccaccttgcccatgatcaattccactactctaattctcttggtctaggcttaggtgtggactcagaatctttctccacacagtgcctaggaggccactaccaatcacttgaagttgaccttaaaggtggaagcttcttgctg

SEQ ID NO: 467194 - DNA, 592 bp, Homo sapiens
gagcaaactcagtcattatctggtttggttcctttggggttggactattacagattattttttgatggtttgggggtcaacttgatagagggatacggcatcatgacatactgttcaggagaactgcctgctgatttggcatggtggaaattttctcaactttctttctagaagctatgtaacagatatggctaaggttaaagggaatttgtcacattgtgagacattttatgggtgtgaaatggttctagcattggtattcattgtcaagtagttatgtagctttggaaatttgtcctttttggatcctgcttctcttacattaaatgtcagatatgaaagagaaatttctggaattctgactttgcatgytatgtaatctggaacatatttccactgcaaatattgaacttctaagaggaagaatagcaaatgcctggcactttgctgccaccttgcccatgatcaattccactactctaattctcttggtctaggcttaggtgtggactcagaatctttctccacacagtgcctaggaggccactaccaatcacttgaagttgaccttaaaggtggaagcttcttgctg

SEQ ID NO: 467195 - DNA, 584 bp, Homo sapiens
aacaccatatgaaagaagcaacgtgcctctaaatatcaatataatggagtgagtttttactcaagtgttatgtgtataagtcagatataggccagtgaagaaattagtgcagaaacgcagactcagagtttaatgatttgctgaagctagagacatgactagtgaaaatgttttttgccagaaaacacagagctagtaaattgattgaaataacatatctgttacaactctttatgttgcaaataagaggaaaaaaattcaatgtggtttaaatgacaaaaaaatccatcagctcatataactgaaaagttaatacattgtcatgatttaarggagacttgatctcagaggactaaagatttcagaaatagccccatttctcttcagctctttgcctggtctcaagtactcctaacagttttggataccttggttgatgttaacaaaataaattttgaattccaaatttcacattttacagtactatagccagggaggaattatagcattatggaagcaaattatcccaggattttgtgataaatgtctccttgcgtcttattagctttatttcagttacgtgt

SEQ ID NO: 467196 - DNA, 563 bp, Homo sapiens
gcagcccccatggccatgcaacagccctctcactccctgcccaccactgcagcttctccctaggcccacggccacccctaacatcrctttgttggtgcatatgtgtatgagtgggtttttccttccctgccctgccagtgagcatgtgtgcatcccccctgacccctgccactgctgcagcatgagtgcactctgccccctgcccccataccaccattgcagttggagccttggcatgtacagagccagccagctcccacccccaccagcaccccttccctgaaacaacactgctgcaggagtgaaactaggcacagagaacagcagaccttcccccaccctgagtgaccacccctgcttgcagcacaccgagagctcacacagacctagacacccaccagcctctcatctttgcccccatgctaacaccaccaccaacacaactccatgcacagtcaccagtaggaccccaaactcccccaaccccaccatatggtgtgctgcctctgccactgttgtgaatgtccacatggtgacaggaacaccagcatgtgctagcaccc

SEQ ID NO: 467197 - DNA, 512 bp, Homo sapiens
tagactccttaatttaaaccagcctctttctggcatccaaatgctccctaaatgaatctgtagtttaaacatatttactgaataaacatgggaagggaggaaggaaggaaggaaggaaggaagggaggaaggaaggaaggaaggaaggaaggaaggaaggaaggaaaaggaaagaaggaaggaaaagggaaaaagctaaggaaaaagaggaggaagaaagagaagtaagaagaaaggtccttatttcacagggcttattaaaatttaattggggagccaaaaataaatgtacagaaaaatatagtttcataaagcataacttttatcttttttgaaacagaactgttataaaacttccatactattaaataggtrcattatattcttcaaaatgagttagttaatttttgagacagagcagagttaaagtatatgtttgaattttgtaccatcaacactaatgagctcaaaatgtaattgtggcacatgaaataactttttcacttattttt

SEQ ID NO: 467198 - DNA, 570 bp, Homo sapiens
tgggccccacctaccaatattgttacaatggcaagtaaatttcagcatgcattttggatggggacaaacattcaaaccatagcagggagtaacattggaagaaaaacagtcttttgttaatgttgttcattgatgcaatcctaggcctagaacataagaattctcaaaaactacttgcttggtatttcaactgaaacatttttcatctgaaaggggagatttgatttgatttacagaccactagtgggcttgacaaaataagtgatggcataattttttagaccagatccagtttttattcttttgagataagcaatgagacaggaatttaggaactgagatgtaacaaagtaaaaagattcttcattasctttatatattctccttctagaaaagagtgttttgaccacctttacagtttccatcagaacaaaaatgactggtgactgtaatatctaagaggcaaaacaaaaggtcatgtccttctttcttctttaatggtgatactaaaaaaaaaaagctggtgcaatattgggaataattttatacaggaatgtataaacaattcat

SEQ ID NO: 467199 - DNA, 592 bp, Homo sapiens
accaacctaaatgcctatcaatggtaaactagataaagaaaatatggtacttatacactatggaatactacacrgccataaaaaaggaacaagatcatgtcctttgcagggacatagatggagttggaagccattatgctcagcaaactaatgcaggaagagaaaaccaaacactgcatgttctcacttataagtgggagctgaatgatgagaacacatagacacatagtagggtacaacacatactggggcctgtaagtcagggtttggagaaaaagagagagcatcaggaagaatagctaacggaagctaggcttaatacataggtgatgggatggtctttgcagcaaaccaccatggcacacgtttacctatgtaacaaacctgcgcatcctgcacatgtacctatgaacttaaaattaaacttgaagaaaaaaaaattaagctggccaaaaagaaaaaaaaaaaaaaaaagaaaagaaattgtaattagcttggtcttctttcccaagatgctttctctaaaaatggttcctattataaatgaatggtattgtaagacctttaattttcccttctgtcttgtttgtta

SEQ ID NO: 467200 - DNA, 602 bp, Homo sapiens
aataaatataataaactcttacaaatacaataaactcctggaatatttgtaaagaactagactttactcaacatcttttctctccttcttccttattaacaaaatctgcatttgttgggagtggaaacatggtcaactttgttgccattcccaacaaattatgaagttcctcagagtccttgactcttatctctacatttctcagcaacagwgcaaaataaactcatatcttactcaaatccagcttaagataatttcctctggtatctgttacatgcagccaaaatcaatctgtaattgatatacatacaccttgatgcttagaagtggtaggctgcaagtaaaaaactctaaaacaagaaaataaaatgtagatacaaggactcagatatggcacatgacccttgatgtgtggtagcaaaaaaagttttgtcaagttaacagctcctgtaccttaaaatcagtctacatacaaaccaattatgcagagaaagaggaaatggtggggaaattttagaatgttagtacatgcaagcacattcttgcagctcttcacaaagtcctgtaagagagaaccaaaggagctaatcagtctgcaagca

SEQ ID NO: 467201 - DNA, 602 bp, Homo sapiens
aataaatataataaactcttacaaatacaataaactcctggaatatttgtaaagaactagactttactcaacatcttttctctccttcttccttattaacaaaatctgcatttgttgggagtggaaacatggtcaactttgttgccattcccaacaaattatgaagttcctcagagtccttgactcttatctctacatttctcagcaacagagcaaaataaactcatatcttactcaaatccagcttaagataatttcctctggtatctgttacatgcagccaaaatcaatctgtaattgatatacatacaccttgatgcttagaagtggtaggctgcaagtaaaawactctaaaacaagaaaataaaatgtagatacaaggactcagatatggcacatgacccttgatgtgtggtagcaaaaaaagttttgtcaagttaacagctcctgtaccttaaaatcagtctacatacaaaccaattatgcagagaaagaggaaatggtggggaaattttagaatgttagtacatgcaagcacattcttgcagctcttcacaaagtcctgtaagagagaaccaaaggagctaatcagtctgcaagca

SEQ ID NO: 467202 - DNA, 627 bp, Homo sapiens
aaaacgaatgtctgaataccagcaaaatgttaacatttaggcaatctggatggaggttataccagaattatttgtactatctttgcaacttttctataagtccaaaattatttcaaaataaagttttagaaaattaggaaggaagaaatgaaaggaggagggggtgagggaaggagggagattggccttgccatctactcctgacttataaaggcctctatgatcctgttcattgttttgtttgtttagttgattttattcatttacatagtttgatcttgtcagtgaaatctgatatatcttcaggaagaaagttgagtyttcacaaatatttgagaaaatttagctaataaacatatctcaagatatctcacaggcaaatattcacagcaagtgtgattaaccttactagtaggtgaaaagatctaaagaatttggacagagtcatagaataagtcagtggtagaactggaaatagaaatcaagtttcctagtaactcattcagtatgattttttaagccagaattttgtgatgcagcagctattctacggtggaaaattgcccctgggaagctacaagagttcatcaaaggcagagggtcagagtcctgtgtctgctgtggtga

SEQ ID NO: 467203 - DNA, 591 bp, Homo sapiens
accttgtaacaaatattgtctctgcaccaatcgaaaaataaaaaacagtaataaataatttttggatatttgaccagaattataatggcaagtttaaagcagacatattttcagattctaagcatgtgcctaagaatacaaatcaaayaatcacaaagaagtcaaactaaaaataaaatgtttgagaacaaatttccagagttaatattcacaatgaattccatatgaaagtaaaattaatggaacaaaggaatgtttttttcttttgttttgtctctttcgggagagaacattgatatggtaatttttttatcataaactgattatttcttctatcattaggaaattttttaatttttaaaaacaatttttactagagtattaaatgcatgtatgtatgcctatgtgtgtgtatatatacatatataaaataagccatccattccattctcatctatagctctaattctcacagataacaactttattactctttttagttcatctaggattaagctacaattttctaactagtatcttcttgttatttgttgagatatgtttatacattactcattgacttgcttttat

SEQ ID NO: 467204 - DNA, 660 bp, Homo sapiens
ccaagttttgtcccagaacaactgtgcactctgattatatcgctactgctatttaaagttatccatttgcatgtctaaaaaatagattcatactgattgtcccattttgatctcaaaaaactcctgaatatgagagtcgtgatcaagggacgcttcatgaaatgttccaaagttaaagtgtgcaatgaaaccagatttatcatagccttatttaaaataattatttctaaaattgttattgtttaattataaacggtatcctttcaggatacttggaagatccatagcagtgtttttattttcacagaacaagcataaattatttatgaaataataactcagatacagagattacttcctattggccttacatatgaatataaataaatacatattatgaacatgagcatacttattttataattatgtaaaygcgtgtgtaatgttatatataagttcaataaagtcatgcttatacatggtttcaattcatgcttctaaaaaccactcaatgtagtcattatcatatgttaataaataatctctgaaaatgtgcttctagtagttgcacaatatcccatcataaagattgtcatgctgtttttaagtcatacttttgggtatataagttatatctgatatttttctgctacatatata

SEQ ID NO: 467205 - DNA, 573 bp, Homo sapiens
ctactaaacatacaaaattagccgggcatggtggcaaatgcctgtaataccagctactcaggagctgagrcaggagaattgcttgaacccaggaggtggaggctgcagtgagccgagatcacaccactgcgctctagcctggaaaacaagagtgaaactctgtctcaaaagaaaaaaaattaaaaataaaagaacaaggaaacaaaagtaacaaggcttgacaccagatgagcctgaatctaagcaagaaaagcccagaagaaatcccattttgggtcactggctgcatggtagtaataccatacacataagggaagagaggaggatgtggctttcactttgaattttttgagcttaaggtaacttttgcgtagctacaaagaagcattcaacagagagttaaacctatgatggaaagactgaaggggtccaagctgtagagaaacaggactgcaaaccacaaagggctgaatcagtcaaggagaactgcagggcgggatgaacagggactaatggaacatttggataagctgttgagaagaaaggagaattcagagaaaaagaactgtcagt

SEQ ID NO: 467206 - DNA, 573 bp, Homo sapiens
ctactaaacatacaaaattagccgggcatggtggcaaatgcctgtaataccagctactcaggagctgagacaggagaattgcttgaacccrggaggtggaggctgcagtgagccgagatcacaccactgcgctctagcctggaaaacaagagtgaaactctgtctcaaaagaaaaaaaattaaaaataaaagaacaaggaaacaaaagtaacaaggcttgacaccagatgagcctgaatctaagcaagaaaagcccagaagaaatcccattttgggtcactggctgcatggtagtaataccatacacataagggaagagaggaggatgtggctttcactttgaattttttgagcttaaggtaacttttgcgtagctacaaagaagcattcaacagagagttaaacctatgatggaaagactgaaggggtccaagctgtagagaaacaggactgcaaaccacaaagggctgaatcagtcaaggagaactgcagggcgggatgaacagggactaatggaacatttggataagctgttgagaagaaaggagaattcagagaaaaagaactgtcagt

SEQ ID NO: 467207 - DNA, 573 bp, Homo sapiens
ctactaaacatacaaaattagccgggcatggtggcaaatgcctgtaataccagctactcaggagctgagacaggagaattgcttgaacccaggaggtggaggctgcagtgagccgagatcacaccactgygctctagcctggaaaacaagagtgaaactctgtctcaaaagaaaaaaaattaaaaataaaagaacaaggaaacaaaagtaacaaggcttgacaccagatgagcctgaatctaagcaagaaaagcccagaagaaatcccattttgggtcactggctgcatggtagtaataccatacacataagggaagagaggaggatgtggctttcactttgaattttttgagcttaaggtaacttttgcgtagctacaaagaagcattcaacagagagttaaacctatgatggaaagactgaaggggtccaagctgtagagaaacaggactgcaaaccacaaagggctgaatcagtcaaggagaactgcagggcgggatgaacagggactaatggaacatttggataagctgttgagaagaaaggagaattcagagaaaaagaactgtcagt

SEQ ID NO: 467208 - DNA, 573 bp, Homo sapiens
ctactaaacatacaaaattagccgggcatggtggcaaatgcctgtaataccagctactcaggagctgagacaggagaattgcttgaacccaggaggtggaggctgcagtgagccgagatcacaccactgcsctctagcctggaaaacaagagtgaaactctgtctcaaaagaaaaaaaattaaaaataaaagaacaaggaaacaaaagtaacaaggcttgacaccagatgagcctgaatctaagcaagaaaagcccagaagaaatcccattttgggtcactggctgcatggtagtaataccatacacataagggaagagaggaggatgtggctttcactttgaattttttgagcttaaggtaacttttgcgtagctacaaagaagcattcaacagagagttaaacctatgatggaaagactgaaggggtccaagctgtagagaaacaggactgcaaaccacaaagggctgaatcagtcaaggagaactgcagggcgggatgaacagggactaatggaacatttggataagctgttgagaagaaaggagaattcagagaaaaagaactgtcagt

SEQ ID NO: 467209 - DNA, 605 bp, Homo sapiens
ggtaatttgtgtcttttaaagaatatgtttttcctctatgtttctaatatattgacttagaattttgcaatatacacccttattattctcttacatctagaaaatatatgatgagactatttctcatcatctatcattcctgaaactggcaagttttacgttctcttctatctgaatgagtcagacagacaagagtattatcaattacacggatattttcaaaggcccagctttattttatgtgttatttttatgtttcctattatattaatttccactcttatctttgttttttcctttattgtaattatttgctgtttaatttgaaattatttctcaggtttttaaaacagaacctttttatttattttagattgttcttcttttataagaatttacttctataaatttccccataagtactactttatccatatctttatatacatttcacaaatttttgttctgtttttattttgattcaattcaaaacatgttctaatttctttatttttataacagwtctattgatgtataactcacatactatacaatttacctatgtacattatgcaattcaattattttaaacaggttcacagagc

SEQ ID NO: 467210 - DNA, 530 bp, Homo sapiens
gggagcatcccttgcttcacatgaaaatgataaatgaatcacactggagaataccctttagatgggatgatttctctaagtatttgtatctttttttttttttgaggaggagtcttgctctgttgcccaggctagagtgtagtggtgcaatcacggctcactttagcctccaccttccaggttcaagcaattctcctgcctcaaccttccaagtagctggaattacagttgcacaccaccaaacctggctgacttttatgtttttagtagagatggggtttcaccatgttggccaagctggtcttgaactcctggcctgaagtgatccacccaccttggcctcccaaagtgctggaattacaggcgtgagccactgagcctcctggacagattttttatcttttgtccatctgactgacatatttctgtatgtatatacatattytgtatgtatataaaagatgaaatgaataatttgccaatgttgctataagcaaggattcaaccagaaaaaaaacagcttcaaactg

SEQ ID NO: 467211 - DNA, 601 bp, Homo sapiens
aaactatttaaatttcaatggcttgaaaacaagatttgaagtcagcaactctggaaaaagaaacagaattttaattttaaaagcaatatgcttggagtgggatggggttattaacatcttgactctaaattgtggctactacctgaatttaaatatatgttggtcttcctggaataatggttgagtgaggccattacagagccagaggatcttcctaagaatcacaatctaactaaagagaccattaacgcaaatgtctcacacaattacattttcttctggctctgtgtaccccactcctaagatgactggacaagccccaagaaaaatgggacaaaagcaaaaactgaataaacgctcaaacacaaacacacaatgtaatgaaggtacaaagttgccctgtttccggagcaacatgactccatgatgtcagtggggagaaatktctcctgctttaaaacagaggcagtggcatgctgtaaacatgtgaaataaggaaagaaggaaagagcatcatcataagcatagctggtggcctattattagcactccccagaacaccagccaacgctagacattgctgcagtttgacatctcttga

SEQ ID NO: 467212 - DNA, 606 bp, Homo sapiens
aatccttcatgtgaagaataagtaacaaaagatgtcagtatcagacacctctaagaagaggatcgttgactatatttggaagtaaaattcacaatcctgaatgtcaacattacagttataaagttgaggtagccatgctaaagaaacatgccaaacaattctttatttttccactgcctacagtgtaatattcttctcacaataaatatgaagaaaaacacacttcaatttgcagyatgaaaagtgaaatttataggtatcagtacatacatcaaaaaaagaaaaacattttttaaaataacctaataatgcatcttaatgaattagaaaagcaaaagcaaactaaacccaaaattagtaggaaaaaaaagaaataaagatcagagcagaaatcaatgtaactgaaatgaagaaaatacaaaatattaggatgcaaagttgttttttaaaaaagataaaattgacaaacctgtagccagactaagaaaagaagagagatatcccaaataagtaaaatcagagatgaaaaaggagacattgcaactgatattacaaaaatccaaaggatcattcgtggctactgtgagcaactgtatgccaataaat

SEQ ID NO: 467213 - DNA, 597 bp, Homo sapiens
agaagtgtagatttcttcaacagctgcctatcattaagagacttacacttggggctgattatggggtgcaacatccttggaagggattctggggtccttaacgaatgctgttttgccactaggctatgcatttgcattaggaccttactaacttttcccattcacacattaaattttttttttgagattatgaaaatcatacaggtcaggaatacatgagaacacaatggggacagtaaagtgacagtgttttgaatgcagtgacagagatatgtgtgtgtacacgtgtaataaagttatctgtgcagcaacaggatcaatccctgctccacttctgtgaggataatgcacatatttctggagtatctacagtcccatttcctgggcttcacaaaagttattgaattggtgctattggggacagaggaagaatttgaccttggttaaaaaccttctggtttcagagtatcaatatctacatttgatttttttttaaagcaaagtattygggtataaattgtgactgatattaagatatacttctaaaattccaatatgctacagtttctagaataaatagttggataatagataatg

SEQ ID NO: 467214 - DNA, 570 bp, Homo sapiens
agtcttctgttttctttttaaacaaacaaacaaaaacattgttttgggctaggcatggtggctcatgcctgtaatcccagcactttgggaagctgagacagatggatcacctgagattaggagttcaagaccagcctggccataatggtgaaaccctgtctctattaatatrcaaaaattagctgagcatggtggcacatgcctgtaatcccagctactcaggaggctgaggcaggagaatcacttgcacctgagaggcggaggttgcagtgagctgagatcgcaccactgcactccagcctgggtgacagagcgagactctgtctctaaataaataaataaataacagtgttttggctatttgggttccttcataattccacatgaattagaggattggcttttccatttatgcataaaagaccactggaatttcgatcaggattagaataaatgtgtagatcaatttgggacatcatttgaacaatattaaggtttccaattcagaacatcgtatggctttccatttatttagatagtctttaattttttcaataatgttttatagtt

SEQ ID NO: 467215 - DNA, 555 bp, Homo sapiens
taagaatatttgtagggcatatatttaggagtggaattgctgggttagagggcatgtggtgatgctacagtgttttctaaaatagttgtttctactattgtagttgtttaaaatacaatattttaaaaagtttatacttttaccaacacttggtactttcagaactcttaaatttgccaatgtagtaggagtaaagctatagctaatgagttgttttaatttgtactttcttgattattagtgtggctgagcatcttttcatatgtcttcaggtactgcttgttctgtgccatgcttgttcatgcattttatctgtttcatggaggtgtttttccccctaatcaatttgcaagagttcttggacatatcttggacatgaaacttttgtcagttatgtggattgaatatctccaagattgtggctttcctttataatttgtttttatatcttttgatgagtagaaattactttgatttagttgaatttatctatcttctcttgtgtttaacatttttaaartggctttaaactcttccaacctcaaagtaaaaaaa

SEQ ID NO: 467216 - DNA, 543 bp, Homo sapiens
atagcccctcctatagtctgttaaacatatctacttaaccaacccttttggcataaagtccaaattcagtaccctgcttttggtttctgctcaaggctatacttcccagcctgcaggctgcaaccctttataaggaataaagctgagtagggggtacaagatgggtgggagtgtggagttgcaattaaaataagatggtcagggaagacctcattaggaaggtgacatttgaaccaagccttgaacagggtgttaatatggaattttaacttacttaattttgtttaattacattttaatttagtacagaaaaataattttgttgtttttcttttttttcctttgctgtgctcccctgaaggatggagggcaaagaatttctctctcctcacagtttgaggatttaagctcatgctgccctggaggaaagackaagcagtttttcagttgctaatgaattagccatcaaggtttactgtcaaaagataagagaagtatctcagagggaaagaaaaataggggaagattttctctagaaataaa

SEQ ID NO: 467217 - DNA, 672 bp, Homo sapiens
tttcactgaaattatagtccttcgtatctctggctttcagcagttttctcctgtaagactgctatactgggcaggcactaggttttgtctcacactctcccatatcccaggtggtcataaaaattgaagctcagggtactagggccaggactgtccttatggaagcttctggtttgggggtctgcatacctctctggatttatgtattctccttatgcttggcctatgtggttcaccttagtttctattcaagtcagtaatatacttttgaaaaatgacatgtacattttatctggtatttgtagatttcatatagcaggatagtgattcagcaaatttagtctaccacaatgctgggaatagaattcccctaatttttgaaaacattatattaaatcatgtttattgccattaatagtcttataaatgtgcttttaastaactgcattttgtcatagctcattgtgattgtatatttaactagttcacccctacctcatgttttttgggagtgaaggttgtactcaactcattatgttaagtaatactacagtaaacatcaatctatacatgcattaataatgatttccaagaaagtagtgacacatggtcataatcatctttgaggctgatggtacatattttcaaattgcatctcagaaataatatacc

SEQ ID NO: 467218 - DNA, 562 bp, Homo sapiens
gaccctgtctcagaaaaataaaaaaaaaattgtaggatcatggagaaagtgtcttaagtgtttggtgctgtggacaggcaacacaggcagaaactggtggctagggaatcagagaagttttcaggagggagcatttgacttgggcttgaactgagcatcatagggcaatatagaaacaagtttatggataattcactgaattggtggcagtttataacttgaatcttccttcagatgattgaagttagtagcccagctatgaaagtctaggttacagatgtctcagccacagcttgcatatatatggatgaggttcatacatatgcagacttgggctcctgccaagatatgagagttttggtcagtctctgtctcaattctaatgtctctgcctacatacytgagtccagagttgtcatgcaaagaacagaaccctggaacaatcacacaaggatttggtactaggcttagccattttctagccatggggacaaaagaaaattactgaacctctctgagtcccagtttatttgtctataaaatagggatagtgatactgggg

SEQ ID NO: 467219 - DNA, 562 bp, Homo sapiens
gaccctgtctcagaaaaataaaaaaaaaattgtaggatcatggagaaagtgtcttaagtgtttggtgctgtggacaggcaacacaggcagaaactggtggctagggaatcagagaagttttcaggagggagcatttgacttgggcttgaactgagcatcatagggcaatatagaaacaagtttatggataattcactgaattggtggcagtttataacttgaatcttccttcagatgattgaagttagtagcccagctatgaaagtctaggttacagatgtctcagccacagcttgcatatatatggatgaggttcatacatatgcagacttgggctcctgccaagatatgagagttttggtcagtctctgtctcaattctaatgtctctgcctacatacctgagtccagagttgtcatgcaaagaacagaaccctggaacaatcacacaaggatttggtactaggcttagccattttctasccatggggacaaaagaaaattactgaacctctctgagtcccagtttatttgtctataaaatagggatagtgatactgggg

SEQ ID NO: 467220 - DNA, 608 bp, Homo sapiens
accaagcctgctggagaaagacagggctatgaagatgggaatgaattggcaaacagctttgggatgacaatgttaaggccaggcaaatgctctcagtaacctcaaatgagtgttgatgttcatgaagcctgctcaaaaaagacacagaaattgacgtcttttatctgaggacccttccttagcctcaggacttaaggctatgggagcatgagccacataaccatgagaggcagggggttcagtgagaagaataagctcaagagtctcacctgtgggtcagaatctcagctgtgccacacatactgtgtgatcttgagcaaatcaccaaacctctctattcctcatttttgtcacctgtaaagtgggactattacttgtacctacatcctggatttgttgggacagtaaatgagttagtgttcccaaggtgcttaacacagagcctttgcatgcagcaagcacccagtcaatgcccatgaccatggccccctgctcatgctgctcttttgttccccctgaggtcttttggggacagagagtgtgaaaatgccctctaccyacacaaggaaacaggactcagggacagaggacctgtgccctgaccaagg

SEQ ID NO: 467221 - DNA, 562 bp, Homo sapiens
gaggacctgtgccctgaccaaggcaatgcatccctcaccatatatgcagtggtgcatcctttcctgttgccttttggatcagcaattaaggctttagtcttttttgttggtgtgcaaaggtattttcttaatggtcctgcagcccagccatcacaaaaatgctttccagctctcagggagaacatttctgatgcatgctgaatccagaattcaaatgaagcaaaacaaaggcaccaggggctcttatgagacagagtgactcaaaatagagggaatgtggggacttggggcataagattgatcatgaatcaccaaatagaaaaaccttgggatggctttcaagaaaaatcytccttgaagttttaactttcacctacaagcaagttttctcactgctctgtacagcagggtaaggacagcagcctcacagcatcagtctgaggatagaatgggttaatgcagccaggcacagtggctcatgcctgtaatcccagcactttaggaggccgaagcaggcggatcatgaggtcaagagatcaagacaccctggccaacacggtga

SEQ ID NO: 467222 - DNA, 564 bp, Homo sapiens
gtcacaagaatattgcagtgattccatgagaagatgtatacaaagcaccttgcccaatakatagtcaacaaatgctggttgtcacctttattctgtcagtgttggtggagtgctggtactcatagttcactaagagtttttaggacagcaatgatcttagaagagaatcagatcaaagttctgagtgttttccctggaactggcattgtattattaatatcctacaaatgggagacatgcatcccctggtctcatacctggaatatcaaaatggtacttcattaacagtgtcaaagcaaaagtctgatggctctgcctgctcttgtgagtaggggtactcatattccctttaagcccttcccccaaattggcctagaggtccagggggttccacatgggctcaacattctctgattaactctcccctcatatcaacaacttcctcctatcaagcttgacatcttgtgctatttcttcctattctaggtgtaggcaagtctagtttgctcttcagctactctatccctctcctgcatattgactcttgaattcttgatccctagt

SEQ ID NO: 467223 - DNA, 564 bp, Homo sapiens
gtcacaagaatattgcagtgattccatgagaagatgtatacaaagcaccttgcccaatagatagtcaacaaatgctggttgtcacctttattctgtcagtgttggtggagtgctggtactcatagttcactaagagtttttaggacagcaatgatcttagaagagaatcagatcaaagttctgagtgttttccctggaactggcattgtattattaatatcctacaaatgggagacatgyatcccctggtctcatacctggaatatcaaaatggtacttcattaacagtgtcaaagcaaaagtctgatggctctgcctgctcttgtgagtaggggtactcatattccctttaagcccttcccccaaattggcctagaggtccagggggttccacatgggctcaacattctctgattaactctcccctcatatcaacaacttcctcctatcaagcttgacatcttgtgctatttcttcctattctaggtgtaggcaagtctagtttgctcttcagctactctatccctctcctgcatattgactcttgaattcttgatccctagt

SEQ ID NO: 467224 - DNA, 566 bp, Homo sapiens
agaaggtatcacactacctgatttcaacttatattacaaagtgatagttatcaaaacgtatggtactggcataaaagcagacacatggatcaatggaactgaatacagagcccaaaaataaacccaaacatatattatgagctgatttttgacaagtccaataagatacaatagggaaaagatggtgtcttcaataagtagtggtaagaaaactagatatctatatgcaaaagaatgaaactggacctgatgcctatcttacacatcatacataaaaagcaactcaaatagattaaatacctaacacctgaaaccataaaactcctagaaggaaatataggagaaaaactccttaatatcctccttgamaatgattttttggatatcacaccaaaagctcaggcagcaaaagcaaaaataagcaagtgggactacatcaagcaaataagcttctgcatagcaataaaaaaaacatggggtaaaaaggtagcacagggattaggggaaaatattggcaaaccacacatctgataaggggttaaaatccaaaacatataaggaactca

SEQ ID NO: 467225 - DNA, 563 bp, Homo sapiens
tttggctgatactgaaatttggatgttattcaaaataatattctaaagcggtgctaatagaaatataatgagaaccacatatgcaatttaaaacttcctagtagccacattaaaaagttacagtgagctgggtgcagtggatcatttgaggtcaggagttaagagaccagcctgaccaatatggtgaaaccccgtctctactaaaaatacagaaattagctgggcatggtggtggacaactgtaatcccagctacttgggaggctgagtmagggagaacagcttgaaccaggaggcagaggttgcaacgagccgagatcgcgccattacactccagcctggtcaacaagagtgaaactcctctcgaaacaaaataaaggttatagtgaacaggcgaaattaattttaatgccttccattttgaccgatatatctaaaatattaccatttcaacatgtaatatgtaattatgtgctgtattttatgtttgcaggacatctcagttcagactaactacattgcagatcccaagtgtgtgtcattaaaatagtgatagatttgtgg

SEQ ID NO: 467226 - DNA, 585 bp, Homo sapiens
atgtaattatgtgctgtattttatgtttgcaggacatctcagttcagactaactacattgcagatcccaagtgtgtgtcattaaaatagtgatagatttgtggtgtacatacctataatattatcatttatagtttcttgattagaattctgcataatcaagtcttactaagacaggtttattatattttctcattacttcttggtcyaaaggaattctacctctaaagagagaatgagttgaataataaaatgtcatgactccattttgctgtagtatcttagcattaatatttggaattgttattctagaccttagcaaaaatatatgttttgattatgaattttctgaagctttccagttaagtgtaaaacaagtgaaaaatataacttcgtattttgtgtattttgctttttataggtgtctactgcagatatttcatcaaataaggatgatgaagaaaactctgtgctcgatatggttgtgttgttttctagcagtgacaaattcactttgaatcaggtttgaacttgacaatttactgtcttcctcattgaattcctccttgcacatttctgctttatc

SEQ ID NO: 467227 - DNA, 623 bp, Homo sapiens
tgctagcactgccatttgcmgttttctgaatacctttgtgtttgccctaactaacttccttgctgtctttgaaatatttaatatatgatgataaaataattagcttccttatgtaatgtgctttgcttcctctctaatagttgttctcattcctttttatttcctccttagctctatgaaagtttttctgttaatagggatagttaggagaaaagggcaaggtaggaggagcatgtgaggcttagggcttttaagtttgatgactcagtgttacaggttttaaaaggtagcagttctcagtatattccattttttttaaaaaaatgtacaaatatggtctttttagatggatgcatgcagttcgtcagaacttaaatactgaggaagaagtggaaaatgtagcagacattggttttgattgtaacatgtgcagaccctatatgcctgcgtctaatggtaagagaataatttaaactgtgagtctgcactcttgtaccactcacttgcaccttactgtccataaccaatgaattagcttagctctactctattttgtctttgtgaaacttactttgacaagtattttatgaaaaatattattgttggttatacatgacttatca

SEQ ID NO: 467228 - DNA, 623 bp, Homo sapiens
tgctagcactgccatttgccgttttctgaatacctttgtgtttgccctaactaacttccttgctgtctttgaaatatttaatatatgatgataaaataattagcttccttwtgtaatgtgctttgcttcctctctaatagttgttctcattcctttttatttcctccttagctctatgaaagtttttctgttaatagggatagttaggagaaaagggcaaggtaggaggagcatgtgaggcttagggcttttaagtttgatgactcagtgttacaggttttaaaaggtagcagttctcagtatattccattttttttaaaaaaatgtacaaatatggtctttttagatggatgcatgcagttcgtcagaacttaaatactgaggaagaagtggaaaatgtagcagacattggttttgattgtaacatgtgcagaccctatatgcctgcgtctaatggtaagagaataatttaaactgtgagtctgcactcttgtaccactcacttgcaccttactgtccataaccaatgaattagcttagctctactctattttgtctttgtgaaacttactttgacaagtattttatgaaaaatattattgttggttatacatgacttatca

SEQ ID NO: 467229 - DNA, 572 bp, Homo sapiens
acactctaccttttctgaaaagattacatggatttttttttttcatttcagtgccttcctcagactgctgtggatcttcacttgtagcacaaattgtcacaaaagtaaaagagctagttaaaatttgaaatgctttacttaatttaattaatttactttgcttaatttttacataattggcttaccacttrtaaaatctgcttcaatcatatgggtgttctatccaaattctgtaatgttggtaatcatttccacaatgatatataaaatgtcatccagctttactggggcagtattcctataaatttcagcaagttggcaacaaaaataacagctcttagaataaccattaatgccatacttgctttggtttcattgatatattactgtgcttaattatcagttagcagaaaatacggcctagttagcaagcagatttcttttagaattaattcaatctcttaattttttaaaataattaataagcctagtatggtgattaatatgatattcttattaaacagtcattcttttgaatacttgtatttaatagcacctgatacaaaaacatt

SEQ ID NO: 467230 - DNA, 572 bp, Homo sapiens
acactctaccttttctgaaaagattacatggatttttttttttcatttcagtgccttcctcagactgctgtggatcttcacttgtagcacaaattgtcacaaaagtaaaagagctagttaaaatttgaaatgctttacttaatttaattaatttactttgcttaatttttacataattggcttaccacttgtaaaatctgcttcaatcatatgggtgttctatccaaattcygtaatgttggtaatcatttccacaatgatatataaaatgtcatccagctttactggggcagtattcctataaatttcagcaagttggcaacaaaaataacagctcttagaataaccattaatgccatacttgctttggtttcattgatatattactgtgcttaattatcagttagcagaaaatacggcctagttagcaagcagatttcttttagaattaattcaatctcttaattttttaaaataattaataagcctagtatggtgattaatatgatattcttattaaacagtcattcttttgaatacttgtatttaatagcacctgatacaaaaacatt

SEQ ID NO: 467231 - DNA, 572 bp, Homo sapiens
acactctaccttttctgaaaagattacatggatttttttttttcatttcagtgccttcctcagactgctgtggatcttcacttgtagcacaaattgtcacaaaagtaaaagagctagttaaaatttgaaatgctttacttaatttaattaatttactttgcttaatttttacataattggcttaccacttgtaaaatctgcttcaatcatatgggtgttctatccaaattctgtaatgttggtaatcatttccacaatgatatataaaatgtcatccagctttactggggcagtattcctataaatttcagcaagttggcaacaaaaataacagctcttagaataaccrttaatgccatacttgctttggtttcattgatatattactgtgcttaattatcagttagcagaaaatacggcctagttagcaagcagatttcttttagaattaattcaatctcttaattttttaaaataattaataagcctagtatggtgattaatatgatattcttattaaacagtcattcttttgaatacttgtatttaatagcacctgatacaaaaacatt

SEQ ID NO: 467232 - DNA, 596 bp, Homo sapiens
tttgccaagtaaacattatgaaggtgtattggcatattctgcgtgaatatcctcctaagttcccacagctggaagcatttgtaatcacagagcttttattgcaaacaagaagttagmaatccttctctagctgaatattcatctatcagtacctttgaagttaaatacaaaggagccccagaataaaaggagaaatcgtcatttaaaaaattcatcaggttatgattctgataatttggctacatgtaaattatcgaactactttttatttttgtcagaatgtttggtattattatgtagacacaaactgtgttgttattttaaatttacaaccctataaaatacctgttcaaatatcctaacatctgtgcagaaggcagcttctgaaatgactgtcatgtacaccagcctccagctactcacatctttgggtaatctgttccccttgagagtgagttagaccttgtgtcctgtttctagcaaacagaatatggcaaaaatgatgggacaccacttccaagattaggttaaaaggattgtgacatacgtctcacttgcatactctctttgttgcttctctttaccagatttgatga

SEQ ID NO: 467233 - DNA, 458 bp, Homo sapiens
ttggtgtgctgatgccctatggccttatcattctatagctcattagatctgtttgtgatttattcacctttattgggattaaaattttttacccacattctgtwttattcttgtcttatatgcatgagtacaaattgttaaactttgataggtatatgtatcacacatgcccccaccctgcaacacacacacccacacacacacaaacacacacagagagagagagagagagagagagaattagaaagtaaaaaaaatgtagggaagcaagttggctttttaaaactttgatttttctcttcttctgactactgtatgtatgacctacttttggctggagacaagttcagaaagctattttcaaaatggactataactttctgtgtaaagaatattgcttacaaaataccccataacaattgtgctatatattataggaagaaagaaaaaagaacata

SEQ ID NO: 467234 - DNA, 608 bp, Homo sapiens
tgcggtttgtgggtataaagtttctgttacacacatgaaagttctcgaaatctgctacaccacatgtgctcatggtgtacagtatacttaaacatttgttaagggatcagatctcattttatgtgttttttcactataataaaaataaattataaaataaaacatgacaagagaaaaatatgaaataaaacattaacaagcgtaaaacaaaagcttcacagtactaaaaacttttgacaaattaaacttagcagtttatttgagcaaaggaaacatgtatgaattgggcagcacttataaccagtaaatgttcaatgaggtccaccaagcaacctgggccagcaatatttatagacagaaaatagaagtgacacacaaattagcctgattggttacaccttgtgttttccttatttggacatgtctaggcagttggcggtctgtgactggctgaaagctcagctactgtaattrgccaagattttcttactttcataaaaatataccctcaagttaggttacagtttgctacgtgaggagtgagcttttgatcaaatttaatttaatttacaaaaggaatgctgacaaatcttaactgtaaagctatc

SEQ ID NO: 467235 - DNA, 593 bp, Homo sapiens
atagcctaataggctattacataaggactttaggtccttaaattcggaggatctcgtatgcctgatgccagctctaggggtgacagaatctgtttccacagccttggcactgccttctggctccctctcctcagtggaactctgagcacctaagagacagggacctggacttcattaagcttacagcacaggttgatgagcactttggggcctgccagcaaattaatgttcctttaataaatgttttgtgtgagctgaagctgctttgagagttgctgtcacaaaaattgaggagcaaagagtcaagggatgagccaggtttcacctgcttcaaacttccttagctacttcttgaacctatcaaaaagaaaccaagaggtgtatgtgaccaaattggcttgggtacgtgaccaattgactttttcagtgtgcctgtgccataagcttcaaaaaggaagatgcaaggcaagtttcctctgcttagtagcctctcagggtaaagagagctgtagctacccccayggattagcaggcaaaagccaccaaggtcaggagatcatagtcaaggtcataccatgaggaggtggacagga

SEQ ID NO: 467236 - DNA, 561 bp, Homo sapiens
gtgtgagctaccgcacccggccagaaattggtaatttttactgattaggtgaacaaacaattcttttccaaagcagaaacattcaagttacaatggaaaattttatctttccaaagaacaattttagacacaattatcattgtttacatgatcatatgyttaaataaagtcactttctttagcatttagaaaagaaaccataaaatgtaaatggccaaaacgtatttgatctatatacacagtatacgtaataaactgcagttacaagaggttcctctgatcttcactaatccgattctataattttctaagattcccttccaaaacccaaatgtaaaattaagattaaggggtcattacaattaagttcagttaaacatgcatccattcaacagtatgtcaaccaatagggacaatgtgcttttaagtaccaaaccccataccaagcattagattcatggaccagatatagatgtcttataaactatgatgaaactagacttgataagcaaaggagaagaacgaattataccacattgttccaggcattttgtagaaagg

SEQ ID NO: 467237 - DNA, 581 bp, Homo sapiens
agcagaatagggtaccaggcagagtcatgaggccccttttccaggccctagctactggacaacatttctagacacactctgggccaggagggaacccactgccttgaagagaagaactcagtccttgcagtattcatcacctgctaactgaagagcctttgggccctggataaccaacagccatacccaggtactatgttgagggccttgggtgagccttggacttgctggcttcaggtgagactcagtacattaccagttgggggagctatagggcaagactccttctgcttgagaaaagcagagggaaaagtaaaggggactttgtcttgcaccttaggtaccagctcagccacaggtgcttagagcagcaagcaggctcttggactccctgattctaggacttgactattggatggcatttctggacctgctctgggtcagagggaagcccagtgccctgaaaggtgagtcccaggctaggcagcattcaccacgrgctgactaaagagccttggggccttatgggaacattggcagtagtctggcagtactccttgttgccaggggtggcaatggcc

SEQ ID NO: 467238 - DNA, 593 bp, Homo sapiens
agggacttttgtaccttcagatgatttcttcttgctcattaatatccttttatttcagattaaagagctcctttagcatttcttgtaggacaagtctagtgatgaaatctctcagcttttgtttgcctgagaaggtctttatttctccttcatgattaaaggatattttcaccaggtatactgttctaggataaaaatgttttttctttagtattttaaatatgtcatgcctctcaattttgcctataaattttccactaaaaagtctactgccgaatagagctccattgtatgatatttgtttgttttcccttgccacttttaggatcctttctttatacttgacctttgggagtttgattcttaaatgacttcaggtttcctttgggttaaatctgcatgtctattaccttcttgtagttgaacattgatatcgttctctargtttgggaagttctttgatattatccctttgaataaattttctacctgcatctctctctctctttctcctctttaaagccaataactcttacattaactgagccagcatgtcttagtgcccaaggccaatggcatactccctgggtact

SEQ ID NO: 467239 - DNA, 624 bp, Homo sapiens
aagaatttgtccgttttttctaggctttctagtttgtgtgtatacagatgttcatcatagcccctgagggttttttatatttctgtggtgccagtggaagtgtttcctttttcatatccgattgtgtttatttggatcttctctgtttttttttttctgtcagtctagctagtggtccactaatgtatttattatttcagaagtattatgtaaaacccaacttctgtttttttgatcttttatatggttattctcatctccatttcattaagttcagctctgattttggttattttcttcttctagctttgaggttggtttgctcttgtttttctagttcctttagatgtggttttagtggttgatttggtatttttctaattttctgatatgggtacttagcactatgaactttcctgttaacactgctttagctgtgtcccaaagattctggtaggttgtttctttgttttcattagtttcaaagtattttyttatttcttccttaattttattctttaccccaaagtcattcaggagcagatttcttaatttccatgtaattgtatggttttgagggattttctgggtattgatttctattttcattgcattgtggtttga

SEQ ID NO: 467240 - DNA, 581 bp, Homo sapiens
gctttcttcaccagccgcacaccaggccacgtgatgagcctgcagggccacactggcaaccagaaacgattattgtttctagaaagaataaggctcaaatgcaggcctctgcagcctccctgtcattcgcgcccgcaggtggcacccagagctccgctcctcactcagtgaagcaattacgccccgcgcggggcctgggcgccrgccaagacttgcagcgttctcttgggtcccttagctttctacgagttaaagtcagatcctcctggtcacttaagccccctttgtggttcaggggggaagccactctctcagaactcttaactttgattggagactctggttaaaattaagaacttcaaaccccagatttgaaaaaatgaaacagatgtcctgtttgttaaccataaatgcctccgtacttagatcctttcctctctctctctttctttctgccgcattaagttttatttaatgcagagttcgcttaaaaggttaagagagaaaaagaaagagaagaaagcaaatatggactgtgatggaaaaactcctaaatctttctctagaatataacgaagaaa

SEQ ID NO: 467241 - DNA, 523 bp, Homo sapiens
cacattcccttgaatccatccttttggtattcttcagtttttattaactctttatgtcttaaaaaaaattggggttgcttccattaaaaaacacaggcagaataakatttttaaaaatgattaaaattggacagaagacagacacaagtaaacaagggaatgccaagaagctgtagaattgtttatcagaactgttgctctgaatttctgacagagaaataggagaataacttatgtacccttttattattattagaaggaaatacactagtttattaaaagttcaaccctttgctttaccctaagctctgaaaggaatattattattcaatgatatggatttatcaaaaactacctatgtgccaagctcagtgttaggcaaaacatttagaatgcattttctttcctccaaatgttcatagtgtagtaagaaagacagatatataaatgaaatgttaatatgggttaaggtatttaatggaactgtatacaagatgctgtaggatatatagagaaaggcaac

SEQ ID NO: 467242 - DNA, 523 bp, Homo sapiens
cacattcccttgaatccatccttttggtattcttcagtttttattaactctttatgtcttaaaaaaaattggggttgcttccattaaaaaacacaggcagaataatatttttaaaratgattaaaattggacagaagacagacacaagtaaacaagggaatgccaagaagctgtagaattgtttatcagaactgttgctctgaatttctgacagagaaataggagaataacttatgtacccttttattattattagaaggaaatacactagtttattaaaagttcaaccctttgctttaccctaagctctgaaaggaatattattattcaatgatatggatttatcaaaaactacctatgtgccaagctcagtgttaggcaaaacatttagaatgcattttctttcctccaaatgttcatagtgtagtaagaaagacagatatataaatgaaatgttaatatgggttaaggtatttaatggaactgtatacaagatgctgtaggatatatagagaaaggcaac

SEQ ID NO: 467243 - DNA, 621 bp, Homo sapiens
ttaaggataatgatgatttcacagatgtatacgtatgtcaaaacatcaatttgtatactttattttgtgcagtttattgtttgtcagttatatctcaacaaagctttaaaaaataactatatattcggtgtttggcattcaaaacacatctcatggacagtctcatgtacctggaaatagcacaaagttgatttgttgcataactgccccattttttttatcatggggggaggaaatgagatgacacttcacatatgtccctgagtaaaaaactgaggctggagctccagacttctctctgccwgaatgcaaagaaagagttttgataagcagctggaacgtggaagtcatgcactgttttctttgaacttcaatgaacaaagaatcataatttaagaagagtatgcaaatccagcaatcacccatcacattgcctctgggacaagtaggtgttcaacccattacaggatgcaaaggaaatataacaaaagtgtgcaatctgatgcctcatcttcaagaaccgccactgcacagagatttgctgatgaccagcttctgccagtcaccaggttatacctggggatgcaaagaaaaatagaatgcagtttattttccggagaa

SEQ ID NO: 467244 - DNA, 621 bp, Homo sapiens
ttaaggataatgatgatttcacagatgtatacgtatgtcaaaacatcaatttgtatactttattttgtgcagtttattgtttgtcagttatatctcaacaaagctttaaaaaataactatatattcggtgtttggcattcaaaacacatctcatggacagtctcatgtacctggaaatagcacaaagttgatttgttgcataactgccccattttttttatcatggggggaggaaatgagatgacacttcacatatgtccctgagtaaaaaactgaggctggagctccagacttctctctgcctgaatgcaaagaaagagttttgataagcagctggaacgtggaagtcatgcactgttttctttgaacttcaatgaacaaagaatcataatttaagaagagtatgcaaatccagcaatcacccatcacattgcctctgggacaagtaggtgttcaacccattacaggatgcaaaggaaatataacaaaagtgtgcaatctgrtgcctcatcttcaagaaccgccactgcacagagatttgctgatgaccagcttctgccagtcaccaggttatacctggggatgcaaagaaaaatagaatgcagtttattttccggagaa

SEQ ID NO: 467245 - DNA, 610 bp, Homo sapiens
caagttctttctcgctatcagttcgactagttaattcatctagttaaccctttaatgcccttgaacataactgaaaacaaagactttgccttttgtttaggaaagaatttcaaagtcttgggtttctattcaaaccaatataatacatgaattagaatacagggtagacaaaaytgttgagaaaaaaaatcactcccaaatcaaaattctccataaagttggctttattttttatgcaaaattataatcataatctctttattctctaataattcttgagcggaaaagattatgtctgtctctttggagttgaaacaaaaccacatttcaaaatcagaagtatttagtatggtttgatgaaataaagttcaatgagacttcggaaattaacttattgagactgttgggcaattagaagcttcagtgttttttatattcgttttcttctttcaccttaaggtcatagtaaatactatagcaatttataatcattttgacatttcttggagataccagatattaaagaaaaatctatatagctatttgagtagttattccaatattggttataatagccagaacaaataccattgtgtcaagaactttacca

SEQ ID NO: 467246 - DNA, 660 bp, Homo sapiens
acatctaaacggtgacagtttctaagatcttcaagtttgtgatgaccttggttgtttcgagaaagtatcgatcagrtattttgtagaatgctcatcgatagtagtttgtgagatgtttcttcatgattagattgggattttgggttttgtggaggaagaacaaagacatgaagtgccttttcatcacatcatatcaagagtacatactatgaacacaacttatcactgctgaggttaaccctcatcatctgactgagctagctttatcacgtttctctgttgcaaagttattctttttctcagtttttcatactgtagtcattggaaggaagtcactatgtacagcttgcatttaagggatggggagttgtcactgatatccttgagggatgtgatggttaattttatgagtcaacttgactggcccagatagttggtcaaacattattctggatgtttctgtgaaagtgatttttagatgagattaacatttaaattagtggtctttgagtgaagcatagtaccttccacaatgcaggtggaacttttatgcaatcagttgaaagccttaacaggaaaagactgacctctcctgagcaaaaaggaattctgccagcagactcaaaatgcagctctttcctgagtccccaaactgccagc

SEQ ID NO: 467247 - DNA, 660 bp, Homo sapiens
acatctaaacggtgacagtttctaagatcttcaagtttgtgatgaccttggttgtttcgagaaagtatcgatcagatattttgtagaatgctcatcgatagtagtttgtgagatgtttcttcatgattagattgggattttgggttttgtggaggaagaacaaakacatgaagtgccttttcatcacatcatatcaagagtacatactatgaacacaacttatcactgctgaggttaaccctcatcatctgactgagctagctttatcacgtttctctgttgcaaagttattctttttctcagtttttcatactgtagtcattggaaggaagtcactatgtacagcttgcatttaagggatggggagttgtcactgatatccttgagggatgtgatggttaattttatgagtcaacttgactggcccagatagttggtcaaacattattctggatgtttctgtgaaagtgatttttagatgagattaacatttaaattagtggtctttgagtgaagcatagtaccttccacaatgcaggtggaacttttatgcaatcagttgaaagccttaacaggaaaagactgacctctcctgagcaaaaaggaattctgccagcagactcaaaatgcagctctttcctgagtccccaaactgccagc

SEQ ID NO: 467248 - DNA, 660 bp, Homo sapiens
acatctaaacggtgacagtttctaagatcttcaagtttgtgatgaccttggttgtttcgagaaagtatcgatcagatattttgtagaatgctcatcgatagtagtttgtgagatgtttcttcatgattagattgggattttgggttttgtggaggaagaacaaagacatgaagtgccttttcatcacatcatatcaagagtacatactatgaacacaacttatcactgctgaggttaaccctcatcatctgactgagctagctttatcacgtttctctgttgcaaagttattctttttctcagtttttcatactgtagtcattggaaggaagtcactatgtacagcttgcatttaagggatggggagttgtcactgatatccttgagggatgtgatggttaattttatgagtcaacttgactggcccagatagttggtcaaacattattctggatgtttctgtgaaagtgatytttagatgagattaacatttaaattagtggtctttgagtgaagcatagtaccttccacaatgcaggtggaacttttatgcaatcagttgaaagccttaacaggaaaagactgacctctcctgagcaaaaaggaattctgccagcagactcaaaatgcagctctttcctgagtccccaaactgccagc

SEQ ID NO: 467249 - DNA, 595 bp, Homo sapiens
aaaataacatcacatgaattgttactgacaaaatcttatgtttttctcaactatgcctgtctaccttgaatcaaattttcctttaaaatgtagcattaatatgggaccatgcataccttcctattgttaatgtaaaacaaaatattataataaaatatttcwtctggattacacattatattttatgggccataatgtcatctgttccttacaacagcactctttctaggcacagcatgtgttattacacacacactgatagataaaactatattttcaggttttcctgaggtcatgtttttactaacagtttgaagcaaagattgaattgttatttttttattcgatatgataaaaaataagatctggggagcattcttacatcagatggcgatttactatatccatgcatacaaactccttatataatgttcaaatttgttctcaattatgtttccagctcatcatccacttttgcccatgcatctatcccttcacccaaatgtgtacattcatattacctgtacctactcccatataacaattagtcttcaaaataactaataaccaggcttaatatctgggtgatgaaata

SEQ ID NO: 467250 - DNA, 595 bp, Homo sapiens
aaaataacatcacatgaattgttactgacaaaatcttatgtttttctcaactatgcctgtctaccttgaatcaaattttcctttaaaatgtagcattaatatgggaccatgcataccttcctattgttaatgtaaaacaaaatattataataaaatatttcttytggattacacattatattttatgggccataatgtcatctgttccttacaacagcactctttctaggcacagcatgtgttattacacacacactgatagataaaactatattttcaggttttcctgaggtcatgtttttactaacagtttgaagcaaagattgaattgttatttttttattcgatatgataaaaaataagatctggggagcattcttacatcagatggcgatttactatatccatgcatacaaactccttatataatgttcaaatttgttctcaattatgtttccagctcatcatccacttttgcccatgcatctatcccttcacccaaatgtgtacattcatattacctgtacctactcccatataacaattagtcttcaaaataactaataaccaggcttaatatctgggtgatgaaata

SEQ ID NO: 467251 - DNA, 558 bp, Homo sapiens
tagattgcctaggaaaagaaagcatggagtgataaatgaagaggagctggggcagagcctaaggacattgtttaaagttcagaaagtcaggaaaaagaagattaaattgcaaatgaaatgaagaaagagaggctggcagtgtgggaaatcagartatgtaaatttaagccagattgaacataggaaatgtaaggtctttgaatgattactttattctccaaatcaggtagaatttgaggagcattaaggacaaagtggaaagtatatcctccactggaatagaattgccagttttgttcccttccaatataaggcagcccagagaagaggttcgtcatgactgaacttgtttgtcctgcattgtattacaccgagaagaatgccctgactagacaggagaatgtctgtgttgtgtcttaagattagtttgcaccttttaagtagcaccacacttgctctgttattatttttcacttcaatagatttctacttgacttaataaaaacaagagaaaatagggccttatttggctataaccttttttctggaaatgtttta

SEQ ID NO: 467252 - DNA, 577 bp, Homo sapiens
aagtgtatagttcaggggcattaagtacatttatattgttatgcaattatccccaccatctgtctctagaacttttcatcttctcaaactgaaactccgtacccagtaatcaataactcatcattccaacctcccagcagtccctagaaaccaccattctaatttctatttttatgaatttgattactctaggcacctaatataagtagaataatacaatgtttgtccttttgtgactgtcttatttcacttagcataatgagctcaaggttcatccatgttgtagtatagctcaaaatttccttccttttaaggctgaggaatattccgcattttgtttatccagtcatcaatagatactaggattgtgttcatcttttggctatcccgaatagtgctacaattaacatagggatacaaatatctatttgattgcctgttttcaattgttttggatgtgtacccacaagaggaattgmtgaatcatattgttattctatgttttattttgataaactgccataccattttctgtagtgtctgcatcatttaatgttctcactggcaatacacagtg

SEQ ID NO: 467253 - DNA, 573 bp, Homo sapiens
ttaagtcaaatgatccactttgtcagaggattaaaaagttaataacactaaaytctaggctgtctacaagcaaactgtttcaaatatagagacatggtaggttaaaattaagaggataagaaacctgtttcaaatatagagacgtggtaggttaaaattaagaggatataaaagatacaccatgaaaacactagtaaaatgaaagctagagtggtttctcagactcaaaacaaaatagccttcaaaacaggaaatgttactagagatgcataggggcatttcgtaattataaagaggccaatgaatttttaaaaacctaaatgtatacgtaccccaataaccagaagtccaaaatacatgaagcaaaacgtgatataactaaaacacacgcacacacacacacacacacacacacacacaattatagttggagatgtcatcattgtttcctcagcaattgatagaagaagtagacataaaatcaataagtatataaaagacataaacaacaaacactatcaacttaccaggccgaattgatgtttgcagaatgctctaactgaaaacagcaag

SEQ ID NO: 467254 - DNA, 573 bp, Homo sapiens
ttaagtcaaatgatccactttgtcagaggattaaaaagttaataacactaaactctaggctgtctacaagcaaactgtttcaaatatagagacatggtaggttaaaattaagaggataagaaacctgtttcaaatatagagacgtggtaggttaaaattaagaggatataaaagatacaccatgaaaacactagtaaaatgaaagctagagtggtttctcagactcaaaacaaaatagccttcaaaacaggaaatgttactagagatgcataggggcatttcgtaattataaagaggccaatgaatttttaaaaacctaaatgtatacgtaccccaataaccagaagtccaaaatacatgaagcaaaacgtgatataactaaaacacacgcacacacacacacacacacacacacacacaattatagttggagatgtcatcattgtttcctcagcaattgatagaagaagtagacataraatcaataagtatataaaagacataaacaacaaacactatcaacttaccaggccgaattgatgtttgcagaatgctctaactgaaaacagcaag

SEQ ID NO: 467255 - DNA, 608 bp, Homo sapiens
acttaggaggctgaggcaggagaattgcttgaacccaggagacagaggtttcagtgagctgagatcatgtcactgcactccaacctagatgacagagtgagactccatttcaaaaaaccatatgaacatctgaattgaaatgaaaaaagcttttgataaatccagcatcctttcatgataaaaagtcttaacagatgaggcatcaaggaaatgtcattgatgactgaaaatgttaagagccatctatgacaaactcaaagtcattgygatattgcacggccaaagctagaaccattccactcgagaactggaagacaaaggtgcctactctcgccactcttattcaatgtcgtactgtaagtcctagtcagagcaatcaggcaagaaaaggaaataaaaagcattggtataggaaaagaagaagtcaaactatcactcttcactgttgatttgattctataccttgaaaaccctaaagactctgccaaaaggctcctagaaccgataaacaactttagtgaagttttaggatacaaaataaacatacaaaagtcagtagtatttctgtacacaagtaacattcaagctgagagtcaaatgaagaacac

SEQ ID NO: 467256 - DNA, 493 bp, Homo sapiens
ttcattttcaattacatttttcttaagatagcagaagtttccctagggatggaagtttaattttaagctgatactctttggccaataatatgtggtttgaaggaaggacagaaataaatattaaaattatctcatctctctaggattatattttattttttcccttctgtactggtgttacataataaaatatatatttggtctctgctctcaccttcttttgtcccatagtgaggactggttgccaggggacccaagcaagtgattaaaaggytagaactttccctctccccacctctcttcaccgctgacctccagaaaggggtgagggactagaggttgagctaattattaatgaccaatgacttaatcaaccatggctagtaatgagccctccatgaaaatcctaaccaaaagtgtttggtgagtttccggttgctaaacatgtggagatgctgggaaggtggccatctagagggggcatggaagctcc

SEQ ID NO: 467257 - DNA, 492 bp, Homo sapiens
ataataaaatatatatttggtctctgctctcaccttcttttgtcccatagtgaggactggttgccaggggacccaagcaagtgattaaaaggctagaactttccctctccccacctctcttcaccgctgacctccagaaaggggtgagggactagaggttgagctaattattaatgaccaatgacttaatcaaccatggctagtaatgagccctccatgaaaatcctaaccaaaagtgtttggtgagtttccggttgctaaacatgtggagrtgctgggaaggtggccatctagagggggcatggaagctccatactttgccctctgcatctgttccatctggctgtttttgaactgtattctttaataatcaactgatagtctggtaagcaaattgttttcctgagttctgtgagccattctgacaaattattgaacatgagaagggggtgagaaccttccatttctagccagaatcacaggtgagaaccc

SEQ ID NO: 467258 - DNA, 646 bp, Homo sapiens
cttgtacatatatctattattatgtcatacacaaaaataaattctgatgaataaaaacttacaaataaatgtaaaagaacaatagaaaatattagaaaaatataagatcatgctcttatactttgggatttgggtatccttagtaaatgtaacacaaaatatgcccccgtatagaacttctatatggataaacctaatgcagagtttaaagacaaatatacttgaagctaatctttgcaatgcatattatagactaatggccaaaagtacattttatttaaatcgcttctactaattgatttttaaatgaataaatcaatttaaaaaatgagcaaagatgatttgataattcacacaagaagaaatacaaayggaaaacaagacacttggtccattagtgaatatgaaaatgcaagtaaaaacaacaataaaatataacttttaacaaattttcaaaacttaaaagtattggtaatatatattgttggtgggaattttaattttaaaaataggaactcttctccttactgaaggtaggggacattagtacaattttttgcaggtcaacttagcgctatttaccaagatattatgtaacaactcaatatttcattcctggaaatttatcctaaagaaataggtctac

SEQ ID NO: 467259 - DNA, 534 bp, Homo sapiens
agggaagtaaaatagccatttcccacactctgaaggtgggtgtggggcatgcactgctgcagctcacccacattcccactracttgctgtctcctcttgttgacatggccagccccacaggtcttccagttcctgttggaaatcctccttcaccttctgtagctcctgagccaggtctatgtgcagctcaccacacacaccaagggcaccaacttctcctgcaagtcactcatgtcttcagatttgaggacagttagagactaatatggatcccagtcgtttgttctaactacattatgtctaactttcttctccaactgctggccctgattacctcgggtccaacatcagatatagaggcaacagccttacatgggcttcttaactagctcccacaattgcataaattttaatccctgtaataaatcccttatgctatatcactcactattgttctggttttctaatcacactctaaatgatacactgttgacttcacagttacccctgccacctctggtaaggtaaacctcc

SEQ ID NO: 467260 - DNA, 601 bp, Homo sapiens
tttccatcaccctttatgtatgcattcccctggtgatagaaaagtacagtaggttgtgttcaactctacctcctgctactacaaacaaggctgcaatgaacaactgtatacatgtcttgaatgagaatttctctggkgtttatgccccagggggttgattgttaggatcaggtagttacttttttagcttcttataatgacagtttttaaaaatacaccaaagtaggaaaaattgtataatgaacaccataatccatctgccaaatttaaaaattatcaatattttgctctacttcagttctccttcccttcttttgttgtagcttttaagaaaaatttctgacggcatgccatgttactacaaatatttgcatctctaatacataaagacatttaaaaatataacctcaacaccagtatcacacctgacaaagccaacaatatttccttgatatcatctaatacccagtccagattcaaatttctctgactatctcaaaggcagcttttgtagctcatgtgttcaaatcaggccccaaataaggtgatatattgtatttgattgttatgtttcttaaatctcttttcctataaagtatac

SEQ ID NO: 467261 - DNA, 601 bp, Homo sapiens
tttccatcaccctttatgtatgcattcccctggtgatagaaaagtacagtaggttgtgttcaactctacctcctgctactacaaacaaggctgcaatgaacaactgtatacatgtcttgaatgagaatttctctggggtttatgccccagggggttgattgttaggatcaggtagttacttttttagcttyttataatgacagtttttaaaaatacaccaaagtaggaaaaattgtataatgaacaccataatccatctgccaaatttaaaaattatcaatattttgctctacttcagttctccttcccttcttttgttgtagcttttaagaaaaatttctgacggcatgccatgttactacaaatatttgcatctctaatacataaagacatttaaaaatataacctcaacaccagtatcacacctgacaaagccaacaatatttccttgatatcatctaatacccagtccagattcaaatttctctgactatctcaaaggcagcttttgtagctcatgtgttcaaatcaggccccaaataaggtgatatattgtatttgattgttatgtttcttaaatctcttttcctataaagtatac

SEQ ID NO: 467262 - DNA, 601 bp, Homo sapiens
tttccatcaccctttatgtatgcattcccctggtgatagaaaagtacagtaggttgtgttcaactctacctcctgctactacaaacaaggctgcaatgaacaactgtatacatgtcttgaatgagaatttctctggggtttatgccccagggggttgattgttaggatcaggtagttacttttttagcttcttataatgacagtttttaaaaatacaccaaagtaggaaaaattgtataatgaacaccataatccatctgccaaatttaaaaattatcaatattttgctctacttcagttctccttccyttcttttgttgtagcttttaagaaaaatttctgacggcatgccatgttactacaaatatttgcatctctaatacataaagacatttaaaaatataacctcaacaccagtatcacacctgacaaagccaacaatatttccttgatatcatctaatacccagtccagattcaaatttctctgactatctcaaaggcagcttttgtagctcatgtgttcaaatcaggccccaaataaggtgatatattgtatttgattgttatgtttcttaaatctcttttcctataaagtatac

SEQ ID NO: 467263 - DNA, 607 bp, Homo sapiens
tcatacacctggagtttggccaatccaggctggaccaggcagaatttggcctcagggtatgagtcaggtcccagtctgctccatatatctcattattctaggaccagcaggatacccagggggtatctttttcatggtgatggcagaaatgcaacagggacaaagggaacatatgatgcctcttaaagactaggcttggaatttgcacatggcaactcaaatcaagtcatcctagccaagcccaataccactgggacagtgaagtatatatatccttctcatggaagtggcagaagtgggaaatatttgctgaccaataatggaatctgtcacaatcattgcaaatcaaagcccatgaggagaaacagatacctttaaactgatgtctgcaagtgtcctcacttacagacacataggctctgacttctcttccatacaaactggtcatctatgctcttggagatatgyaatatggcattcctcatcttcaacttccaacatgtgcagctgtctgctgggcctcttgaacatctgtactcctataatgtactgtccttaaatgagatctaagtttacagttggtatggagtccactcacaacaatgaa

SEQ ID NO: 467264 - DNA, 523 bp, Homo sapiens
taagtctctctctttaattatatgagtagtaagactaatgaatctttgattataactttgtacctagattagccctcactgtttctaagcgtttcatttaacatttattttgtgagttcttacctccaagtttggacctatagtcaaaacttcaaatgcaactaaaattaaatttagcagataaatcctgagtcaagaacataatgttactgtgaccatctagctataagctatgttatcaagaattttatgttgttcaagtataatatatgagtgtttttagactaattcagcaaaatagaggaaaatagaagataaaaattatattttttsaaacaatcttgttttgattaaaaaacactatagataattaaaatatgctttatgtgagtttatgaaatggaagatactgaaaaaacacataaaattgtaatctagacattagtctttaactgaaatgtgcaaaaaataccgatttcttaatgcattagaacccttttgggatagatggagaaaataaaca

SEQ ID NO: 467265 - DNA, 554 bp, Homo sapiens
gatgagtaaatcgtgaaccagaatttacagtctaagagaaaagtcattgctcataagtatctaatttcaatgttacatgataaagaatgtatctatgctattgctcctcaacaaagtgctgtatcttctacaaaatgacttgtttctatctacttataacawctcattgggctttgtcatcttcttccacactcaaggtttctggatttagggatttgggtggaatctaattgaagatgagtaaaatatgttactttagcacattgaatactcaccctagtcattaattcaagaatggacctttatccacactcggccaattggtatctctatgatgactctactgtctgatggcagatgtatgcttaattactgtaagtgaccatgtttccagctgtgtaggaaatgctatacaggatcatgttattataatattttgttttacgggctggagtggcagccctttgggaggccagctgggaggatctttgagccaggagttagagaccagcttaggcaacatagtgagactctgtttttacaaaaaaatttaa

SEQ ID NO: 467266 - DNA, 579 bp, Homo sapiens
tgttgcaatgtataaacccaaagaagatgcattcccagaaagagtttgagaggctgctggaacctatagccatgctgattcaggtatgaaggtcttccgtatgaagccagctgataaaaactgggagaagtggcagttttttcaaacgcccaaatattggcaaaaataaataaaaaataaaaaataacaagacataagaagaaagagagaaacctgatgactaaattaaaggagcaaaataaatctccagaaaccaaccctaaagaaataggtaaatgagttacctgacaaagaatmcaaattaactctcttaatgaagcccagtgacaacagaaatagacaactaagtgaaagcaggaaataattcatgaacaaaatgaaaatattaacagagatagaaactaaaaaaacaaaaaggaaccatacagaaactctggagctaaggaatacaatagctcaattgaaaaattcactatcggaaatcaccaatagactgtgtaactgcccaatgggttcacctcgtgccctgcttagacagagctgatttatcaagacaggggaattgcaatggagaaagag

SEQ ID NO: 467267 - DNA, 579 bp, Homo sapiens
tgttgcaatgtataaacccaaagaagatgcattcccagaaagagtttgagaggctgctggaacctatagccatgctgattcaggtatgaaggtcttccgtatgaagccagctgataaaaactgggagaagtggcagttttttcaaacgcccaaatattggcaaaaataaataaaaaataaaaaataacaagacataagaagaaagagagaaacctgatgactaaattaaaggagcaaaataaatctccagaaaccaaccctaaagaaataggtaaatgagttacctgacaaagaatccaaattaactctcttaatgaagcccagtgacaacagaaatagacaactaagtgaaagcaggaaataattcatgaacaaaatgaaaatattaacagagatagaaactaaaaaaacaaaaaggaaccatacagaaactctggagctaagkaatacaatagctcaattgaaaaattcactatcggaaatcaccaatagactgtgtaactgcccaatgggttcacctcgtgccctgcttagacagagctgatttatcaagacaggggaattgcaatggagaaagag

SEQ ID NO: 467268 - DNA, 579 bp, Homo sapiens
tgttgcaatgtataaacccaaagaagatgcattcccagaaagagtttgagaggctgctggaacctatagccatgctgattcaggtatgaaggtcttccgtatgaagccagctgataaaaactgggagaagtggcagttttttcaaacgcccaaatattggcaaaaataaataaaaaataaaaaataacaagacataagaagaaagagagaaacctgatgactaaattaaaggagcaaaataaatctccagaaaccaaccctaaagaaataggtaaatgagttacctgacaaagaatccaaattaactctcttaatgaagcccagtgacaacagaaatagacaactaagtgaaagcaggaaataattcatgaacaaaatgaaaatattaacagagatagaaactaaaaaaacaaaaaggaaccatacagaaactctggagctaaggmatacaatagctcaattgaaaaattcactatcggaaatcaccaatagactgtgtaactgcccaatgggttcacctcgtgccctgcttagacagagctgatttatcaagacaggggaattgcaatggagaaagag

SEQ ID NO: 467269 - DNA, 622 bp, Homo sapiens
atagcctaagtttccaaataggaggagtagaactccctatgatatccagtaattcagttaaaaagatcactacaaaaagaaaaaaaagggagtaaaacacatcaactttaaatgggttaaccgaatagattttaaattctggttttgktgactacctgaataaataatatgttaagtaatagaaccaagttagtctttccttatttctgccatgcccttaaaatgaaagtctggtttagcggtttttagttgaaacactatctatatttttatttatagaaataaaattaaatcacaaatggaagtaaactatatttttttcaattagtattttaaaatctagacataaaaggcagcctccaaaaatgaaagacttggagactactgtcatgtggcagtttcttctccttagtaatataaaattaccttttaattctggctgattaaatctgccatgttaatgtagaacccatcacaagcaaagtgagttttagttaacttcaagactctttattttaaagttataagagtcatataaacacttctaaaatggccttattgaatggcattttagaaattctttagacttctttggcaaaagctcaatgcaaggactgaatat

SEQ ID NO: 467270 - DNA, 363 bp, Homo sapiens
acctcaatcttcccagcagttgggactacaggmctgtgccatggcacctggctaaggatagctattatgagagtagtaatgtaagatgaaactaaaaagactcataatagtaggattaaaaagcacaaaaattttaaagattctccggtacatttatttcacaaacttttttgtacagttgacccttacacatgggtttgaactgggtgggtacacttatgcgcatacttttttcaatcaaatgcaggtgaggtcacacagatcagcatttgtgcgtgggatgtgaaactcatgtgtatggagggtcaattggagggccaacttttctacatatgggttctgcaagactttctgtgagacttg

SEQ ID NO: 467271 - DNA, 363 bp, Homo sapiens
acctcaatcttcccagcagttgggactacaggcctgtgccatggcacctggctaaggatagctattatgagagtagtaatgtaagatgaaactaaaaagactcataatagtagrattaaaaagcacaaaaattttaaagattctccggtacatttatttcacaaacttttttgtacagttgacccttacacatgggtttgaactgggtgggtacacttatgcgcatacttttttcaatcaaatgcaggtgaggtcacacagatcagcatttgtgcgtgggatgtgaaactcatgtgtatggagggtcaattggagggccaacttttctacatatgggttctgcaagactttctgtgagacttg

SEQ ID NO: 467272 - DNA, 363 bp, Homo sapiens
acctcaatcttcccagcagttgggactacaggcctgtgccatggcacctggctaaggatagctattatgagagtagtaatgtaagatgaaactaaaaagactcataatagtaggattaaaaagcacaaaaattttaaagattctccggtacrtttatttcacaaacttttttgtacagttgacccttacacatgggtttgaactgggtgggtacacttatgcgcatacttttttcaatcaaatgcaggtgaggtcacacagatcagcatttgtgcgtgggatgtgaaactcatgtgtatggagggtcaattggagggccaacttttctacatatgggttctgcaagactttctgtgagacttg

SEQ ID NO: 467273 - DNA, 363 bp, Homo sapiens
acctcaatcttcccagcagttgggactacaggcctgtgccatggcacctggctaaggatagctattatgagagtagtaatgtaagatgaaactaaaaagactcataatagtaggattaaaaagcacaaaaattttaaagattctccggtacatttatttcacaaacttttttgtacagttgacccttacacatgggtttgaactgggtgggtacacttatgcgcatacttttttcaatcaaatgcaggtgaggtcacacagatcagcatttgtgcrtgggatgtgaaactcatgtgtatggagggtcaattggagggccaacttttctacatatgggttctgcaagactttctgtgagacttg

SEQ ID NO: 467274 - DNA, 547 bp, Homo sapiens
ttattccttctgtctaatagtattttcatccccattcactaacttgtctttctcctcccttctcccttccctttccagcctctggtaaccaccgttctactttctatgtccatgagatccacttttttagrccccacacctgagggagaatatgagatatctgtctttgtatacctggcttattaaacttaatgacctctagttctatctatgttgctgagaatgacaagattcaattctttttatggctgaataatattttgttgtgtatatatgacacattttctttatttgttcatttgttgatggacacttaggttgattccatatgttggctattgtgaattgtgctgcaataaacatgagaatgcagatctctcttcaatatacaatttcctttcttttggatatatacccaacagtgagattgctggatcatatggtaattctattttgtttttttgagaagttttaatactggtttccataatcgctagactctttacattttgctagatgactggcctcacctgaatctcctaaaacc

SEQ ID NO: 467275 - DNA, 599 bp, Homo sapiens
ctttccctttctatttttgttcacactcacatgctgtacttagcttttctgtcttaagggtcgctttgttgtttaacacatcataggaatttcatgtatccctttgttttcctgtcttctacagtagaatggaatatttttgaacaacacagcaaatgactattacagaacaggatattaytggctcttaaatatgagctccaagctagcttggattactctggtctggaaaaataggttttctttttatttgcttagcacagtcttctgtaacttgaggaatggacacttctgattttggttgacctggatttaatccttgcagggatacaaaccataggtgtcaaatataactggccttcatccaagattcatcaagtagttggtagctgttaggcatgtttggagacaggagttctgtggtctctaaatccctaaacttgagaatgaggaagattgtgggagtccctgggaagacctaaatggtcctctctttctaaattcccacaaacagtggctttctcaggtccccttggcatgtattgaatattctctcctctgtcattttttgttagctgagatgattatttaaaaaattc

SEQ ID NO: 467276 - DNA, 513 bp, Homo sapiens
atactgttccttgattgtcaactagcattttaaggacttccctaaattccaccaatagaattctcaatcttattggtcctacatgcctcaaagaattaaactgaaagaaaaagttctttcggcaacaccaatatacaaaaatacagtgaaaacaggcaaaaagawgataccccctccccatttgcaaaaccaaggtgactattcatggtaggtgatgacaaagacagaggtgtaaagacaaaacccagaggtgttgtaatttagagggaagactattgttcaaatacaatgagacctttccaggagaccactcaccatttcacagaatatccctaagcttttttgacaaatgacctttcagaccaggtccagaaagtgtctttagctgaaatttcatataaagaatattccacctgttaaataagcatcttggtttactagtggccatcaatacaggtttcactattcaagacagctagtgagaaaccaggaaaagctcacagaatttaaagc

SEQ ID NO: 467277 - DNA, 603 bp, Homo sapiens
acttactatgcttccttactactaaagatgtaagtacctcaaccggaagtaaatgacccaacaggcatatctaaggttctgaacatatggtgaagcacaaagtggtggttatctgtgtggaaaagtgaaggaggggtattacaggagaggatctgagagggcaaagagtgtattgctatgagactggaaaaggtctatttttcaagttggatgatggtttcaaagtttgattttataagtttctgattgaaaagttacatgtaacttacgtgtatttcttgtggcaaatactacaccaatttttaaaggattaaaaaaagaaaagaagaaaatttcaattgactgatttgtttgatctatattattttgtagggaacaaaaagctgtacaacaaaaggrgatagatgcaattcatgaagtattttgaattctgggcactaaaaacttatagttgggctaggcataattttctatagataatttatacattttaaaggaatttagggatattgcttaccaaaatgattcaaccctatttctcaatttcccctcatctttcagtgtaacatcattcttccaaatcttcaaatttttttttctctg

SEQ ID NO: 467278 - DNA, 489 bp, Homo sapiens
gaaaattagaggcaaatagagatgaatacatctagtttaagaaagtataattatcaaaccaaaccgagcattaatttttgtacttatttattaaagttgtcattagaagagagaaaactagagttagctaatctattcagcatcaaacaggacctcaacattaaatattccaccctacaataacatcwttttaaaaattctacacaacaaagataccgttttgctcattaaataaatgacagttggaacaagaaatggctaaagatgcaaggccttataactttaaatccaaggaaatcataaaaaatatcagccaagattatattttctaatcatctatgattcatttttctacaacataaaggttgtagataaagctgatagatttgattaatgaacatgttgtgttctattttgctgtattacgcagatatcaatccttgtctttaagaaagatagaagggctaatgcccttgtctcacagctatt

SEQ ID NO: 467279 - DNA, 489 bp, Homo sapiens
gaaaattagaggcaaatagagatgaatacatctagtttaagaaagtataattatcaaaccaaaccgagcattaatttttgtacttatttattaaagttgtcattagaagagagaaaactagagttagctaatctattcagcatcaaacaggacctcaacattaaatattccaccctacaataacatctttttaaaaattctacacaacaaagatacmgttttgctcattaaataaatgacagttggaacaagaaatggctaaagatgcaaggccttataactttaaatccaaggaaatcataaaaaatatcagccaagattatattttctaatcatctatgattcatttttctacaacataaaggttgtagataaagctgatagatttgattaatgaacatgttgtgttctattttgctgtattacgcagatatcaatccttgtctttaagaaagatagaagggctaatgcccttgtctcacagctatt

SEQ ID NO: 467280 - DNA, 489 bp, Homo sapiens
gaaaattagaggcaaatagagatgaatacatctagtttaagaaagtataattatcaaaccaaaccgagcattaatttttgtacttatttattaaagttgtcattagaagagagaaaactagagttagctaatctattcagcatcaaacaggacctcaacattaaatattccaccctacaataacatctttttaaaaattctacacaacaaagataccgttttgctcattaaataaatgacagttggaacaagaaatggctaaagatgcaaggccttataactttaaatccaaggaaatcataaaaaatatcagccaagattatattttctaatcatctatgattcatttttctacaacataaaggttgtagataaagctgatagatttgattaatgaacatgttgtgttctattttgctgtattasgcagatatcaatccttgtctttaagaaagatagaagggctaatgcccttgtctcacagctatt

SEQ ID NO: 467281 - DNA, 343 bp, Homo sapiens
cactttctgtttttccttctctctgcttccatgagttagtgatcatcaactgtcagagaagttaagtgccaggatttttcacaaatgcaacaaagtgcaggtacaagctttgcctctgggaccacagagatccaaaatgtatttgagatagatacsaaaattagaaatggagaccaactgattacaagtttgtgcttcataatttcagggtttccttctggtagcacaatccactatgcatgcaggtgcctatggcctatttgtgattgtaggtgagataacacagatcaggaaacataagtgagccagaaaacaggtaaataaacagatacagggcctgacc

SEQ ID NO: 467282 - DNA, 343 bp, Homo sapiens
cactttctgtttttccttctctctgcttccatgagttagtgatcatcaactgtcagagaagttaagtgccaggatttttcacaaatgcaacaaagtgcaggtacaagctttgcctctgggaccacagagatccaaaatgtatttgagatagataccaaaattagaaatggagaccaactgattacaagtttgtgyttcataatttcagggtttccttctggtagcacaatccactatgcatgcaggtgcctatggcctatttgtgattgtaggtgagataacacagatcaggaaacataagtgagccagaaaacaggtaaataaacagatacagggcctgacc

SEQ ID NO: 467283 - DNA, 343 bp, Homo sapiens
cactttctgtttttccttctctctgcttccatgagttagtgatcatcaactgtcagagaagttaagtgccaggatttttcacaaatgcaacaaagtgcaggtacaagctttgcctctgggaccacagagatccaaaatgtatttgagatagataccaaaattagaaatggagaccaactgattacaagtttgtgcttcataatttcagggtttccttctggtagcacaatccactatgcrtgcaggtgcctatggcctatttgtgattgtaggtgagataacacagatcaggaaacataagtgagccagaaaacaggtaaataaacagatacagggcctgacc

SEQ ID NO: 467284 - DNA, 629 bp, Homo sapiens
cagaatatagcaattataaatataaatgcactcaacatcagagcacccagatatataaagcaaatattgttagagctgaagagagagatcaacctcaatacagtaatagttggggatttaacatcccattttcagcagtgaatacataatctggaccaagtttcccaacccctggtactggtccgtggcctgttaggaacccagccacacaacagaaggtgagtggtgggccagcgagcattaccacctgagctctgcctcctatcagatcagtggtggcattagattatcataggagtgtgaaccctactatgaactgcgcatgcaaagaatctaggttgcatgcttcatatgagaatctaaccaatgcctgatgatctgaggtgcaacagtttcatcccaaaaccttcacctctgaactgcccctccacatyccaccatctgtggaaaaactgtctttcatgaaacaggtccttcgtgccaaaacggttggcgatcactggtctagacaggaaattaacaaaaaatatcagacttcatcttcaatatacatcatataaacttaacagacatttatagaacatttcattcaatagcaatgtacacattaccctaattagtacagggag

SEQ ID NO: 467285 - DNA, 590 bp, Homo sapiens
aaaatggagtgctaaaaaaaatgtgaattcagaaaatattttgaagtgtttttcaaaaatgaagaagtaatatgtattagtctgttttcatgctgtttataaagacacacccaagactgggcaaattacaaaagaaagaagtttatttaaaaccaycagatctcgtgagacccatttactatcatgagaacagcacgggaaagacccacccccatgatgcaatcatctcccactgggtccctcccacaacacgtgggaattatgggagctacaagatgagatttgggtgggtacacagtgccaaaccatatcataataacaaagaaaaactgaaataattaattgccagcagacctacccttcaaaaagtggtaaaggaagttctataggcagaaagaatatgatagcaaacaggaacttcaatctacacaaagaaataaagagtgctgaaaatagaatcaatgaatggaaaataaatttttttcatattttaattgtgctaaaatataactgactctctaaagccaaaatggtaccaacatattgtatgtttgtagcatatttcaatgttaaatttatgaaaataataa

SEQ ID NO: 467286 - DNA, 548 bp, Homo sapiens
cttatcttcggcactcttgactctagccttaaatttagatttctattccagaatacctctcatatcaatcttaaaacctaagatgggtaaagaggtcataagatttttagtatgaaagagtttgcttagttaaattatatctcaggaaactcattcatctacaagttaaattgtaaaatattgtttgttgtatctgaaaaaatctttagaacaagaaatgtaactgggtagcctgttatatcaaagaaccctcgatttattaagcctcctcatagccatatccttatatagccctctctgacactgacttaatagacacttgacaaatkatagtaaatttaggcttgccaaattaaaatggcagcaatgccaaatgagaacctgatctactctaccagagagactaagtggaggagaacccagctgatagcaccagtgaagtgccagatatttgagtgatgtcactttggactatgtaggccttgtcagtcatataaggaaacctaggcaagactccgactattatcctcctgagcccaaccaaagtt

SEQ ID NO: 467287 - DNA, 569 bp, Homo sapiens
ggttattgaatgcaattcaaatctaacttcatctgaggataaccccaggcactttgtgcctgtatttcttgtagttttgtactgactattggaaactcattcagttttgccttaaagcacccagtaacctatgaacaaaatgcataaaaactattacatgatgttcagcctttgtagacyaaacacaacaggtatatgcaattgcatagtgctgatgactcacaaaaacaaaacaaaacaaaacaaaacaaaacaaaaaactctgtcctcagactgatttgtgaaaataactatttaatctaaaaataaactaaagagtgaaaatgagaattagcaaatagagttgaaggtgtgtctcaaaatggattgtattttatatagccttttactataattattcttataacagggcttgttttcctctattagactgcaaatgtgttggttactgaggcggttgcacttgtttttgtatcacttatgaaacctagtatagtgctttgtattatagtaatcattcattagatattatgtgaatgatttgaattatatttcatagtagctcaaag

SEQ ID NO: 467288 - DNA, 423 bp, Homo sapiens
  misc_feature (1)...(423): n = A,T,C or G
ccgccctcctgtgcctggcaggcagccyctgggccatcagaggacccactgtgtggtgatcagtggcccaccacctgcccttgtggtgggtgcagttcacaggtgctgccccagtcctggcacactggccttcccagcctggcccaggataggggatgtgaatgatccttgcctgtgccccttcagaccatgtgaggttggacactcactgcagaagtccctccaggtcccttttcaactgagttgtgggggacttgcttagtcctcatgcccagggtcaggggaggggtgcaanantctgcaccctaaatcccctanggcctgagggaggtctcccaggtgacctctgtcctctccagtgacatgagtcctcccagatggcctcagccctctcaggtgacatgcttccatggtgactctggc

SEQ ID NO: 467289 - DNA, 423 bp, Homo sapiens
  misc_feature (1)...(423): n = A,T,C or G
ccgccctcctgtgcctggcaggcagcctctgggccatcasaggacccactgtgtggtgatcagtggcccaccacctgcccttgtggtgggtgcagttcacaggtgctgccccagtcctggcacactggccttcccagcctggcccaggataggggatgtgaatgatccttgcctgtgccccttcagaccatgtgaggttggacactcactgcagaagtccctccaggtcccttttcaactgagttgtgggggacttgcttagtcctcatgcccagggtcaggggaggggtgcaanantctgcaccctaaatcccctanggcctgagggaggtctcccaggtgacctctgtcctctccagtgacatgagtcctcccagatggcctcagccctctcaggtgacatgcttccatggtgactctggc

SEQ ID NO: 467290 - DNA, 423 bp, Homo sapiens
  misc_feature (1)...(423): n = A,T,C or G
ccgccctcctgtgcctggcaggcagcctctgggccatcagaggacccactgtgtggtgatcagtggcccaccacctgcccttgtggtgggtgcrgttcacaggtgctgccccagtcctggcacactggccttcccagcctggcccaggataggggatgtgaatgatccttgcctgtgccccttcagaccatgtgaggttggacactcactgcagaagtccctccaggtcccttttcaactgagttgtgggggacttgcttagtcctcatgcccagggtcaggggaggggtgcaanantctgcaccctaaatcccctanggcctgagggaggtctcccaggtgacctctgtcctctccagtgacatgagtcctcccagatggcctcagccctctcaggtgacatgcttccatggtgactctggc

SEQ ID NO: 467291 - DNA, 660 bp, Homo sapiens
gtgccatgctggtgtgctgcacccattaactcgacatttagccttaggcatatctcctaatgctatccctccccgctctccccaccccacaacagcccccagagtgtgatgttccccttcctgtgttcatgtgttctcattgttcaattcccacctataagtgagaacatgcggtgtttggttttttgtccttgcgatagttgactgagaatgatgaattaaaataaaaatgcatgcactttcaaatgtacttagtgcaacatattgaacttacattccagttttcctggaattacttgtgtcttgagctaaaggctgtatttggtataacagggaaggaaagaaattatttttcctataaaattagtttaaaaacacatataattaaacaaaataaaaatattatcccaycttttaaagaacatttactaagtcacagatattacccgaagtttagaaaatcacctaagaacaattgtttaaaaattatttacggaaaatgaagcaaaattgtttttacaatctgagattttaacagccagtgcactcctgttcttcagctgaatgtccccttcattctgaatgtctgcagtagaattgaattggggagcagttaggttccaggaacatattcactcctgttttgttctctccccaatc

SEQ ID NO: 467292 - DNA, 631 bp, Homo sapiens
ggccattattgttgcacctaccctcagttgttgcaaactcctccagctcaagtgactttgcgggatttaaaaagccagcacctttcgctccctgcttcattttttctttttctcttttctggacccagagataaaaaacaatgacattaaaaacaacacatatargaaaacttataaagtgactaaacatgaccagagtaaggcccagaaaaaaacctgagaagaccttaagtttacacgtcagtctggctcttggcccagagacaaactacaacaattaaaaataaataaagaaaaacaataacaaaaccagcaaaccttgggaagaaggagaatcttatttccagagttatcacattattgtattcaaatgtttgcttttcaatgacaaaaaaaaatcataaagcatataaggaaacaggaaaatatggcctagtcaaaggaaaaacagtaaacagaaactgtccctgaaacagacttgatggcggatctactaaactgtcttaaagatgccaaaagaactaaaaaaagatgaagaaagtcaaaacggaaataccaataaaaaggtagaagagctaaaaagaaacctaaaacaaagtctggagctgaaaaacgcagtaactaaaatgaa

SEQ ID NO: 467293 - DNA, 557 bp, Homo sapiens
ataagcaatattgataaaagtaggatattaaggaaattaatmattttcattcctaatgaaagtggcctgattttttaatacagaaaatttgatatccaaaactttgcatttaagtttggcatgttattagtcaacttgcttaacttcctgcactgttttctacatttgctttgctcttattaaactgaaatgataagcatcctgataaatgaatagttgcattgtatttatatttctctgctacatatgtaacaaatttggattaaccctgtctgtggcattcgtaaatttagaataacgctttattgtctgcattgggagaaacctttcaacctcttgtccatttggataatgaattattgctattcctgtgatatactggcactacactccatccttcttacaatttcagcaagtaaagtgtgcaaagtttgtcatttgtcaaattttaatgaagtttggggaacaaaggaggtgtatcacaatagcattggagattacacaataatatagatatacaactttggtcttagactgcactgcagccatcctcactt

SEQ ID NO: 467294 - DNA, 557 bp, Homo sapiens
ataagcaatattgataaaagtaggatattaaggaaattaatcattttcattcctaatgaaagtggcctgattttttaatacagaaaatttgatatccaaaactttgcatttaagtttggcatgttattagtcaacttgcttaacttcctgcactgttttctacatttgctttgctcttattaaactgaaatgataagcatcctgataaatgaatagttgcattgtatttatatttctctgctacatatgtaacaaatttggattaaccctgtctgtggcattcgtaaatttagaataacgctttattgtctgcattgggagaaacctttcaacctcttgtccattyggataatgaattattgctattcctgtgatatactggcactacactccatccttcttacaatttcagcaagtaaagtgtgcaaagtttgtcatttgtcaaattttaatgaagtttggggaacaaaggaggtgtatcacaatagcattggagattacacaataatatagatatacaactttggtcttagactgcactgcagccatcctcactt

SEQ ID NO: 467295 - DNA, 557 bp, Homo sapiens
ataagcaatattgataaaagtaggatattaaggaaattaatcattttcattcctaatgaaagtggcctgattttttaatacagaaaatttgatatccaaaactttgcatttaagtttggcatgttattagtcaacttgcttaacttcctgcactgttttctacatttgctttgctcttattaaactgaaatgataagcatcctgataaatgaatagttgcattgtatttatatttctctgctacatatgtaacaaatttggattaaccctgtctgtggcattcgtaaatttagaataacgctttattgtctgcattgggagaaacctttcaacctcttgtccatttrgataatgaattattgctattcctgtgatatactggcactacactccatccttcttacaatttcagcaagtaaagtgtgcaaagtttgtcatttgtcaaattttaatgaagtttggggaacaaaggaggtgtatcacaatagcattggagattacacaataatatagatatacaactttggtcttagactgcactgcagccatcctcactt

SEQ ID NO: 467296 - DNA, 563 bp, Homo sapiens
taggaaatcaatgttcagagaagatgattgattcaaggtcacatagtaagttgtgaagcaaggattcaaacctaggtttgtgttactccarccgctgtggtatacacaccctgtagttttcggagctgttaatctctctaacttaagtcttcgcctggaggaagagtccagctctgaagccaagaacacagtatcctgctttttcccattgttaaacattttccctgcagtcttggggtgagagcaaggcataagggttgggttctcagaaaaacatttccggaggttacttttaaaaaatcctagtctttgagatacagatacatgggaacaaagatcctgtggttaaataaatttgggaaccactacatgtaattgttcctcctggagtcacaagacatgtgagcaggcaacaagtcttaagaggtcctcaaagtaaagacgcccaatgaacatagtcctatccactgtctccccatattatttcgtccacttatgttttcaaggcacacctagaaagccccatgtctgcactatagccttgctacttcaagtactgtgct

SEQ ID NO: 467297 - DNA, 563 bp, Homo sapiens
taggaaatcaatgttcagagaagatgattgattcaaggtcacatagtaagttgtgaagcaaggattcaaacctaggtttgtgttactccagccgctrtggtatacacaccctgtagttttcggagctgttaatctctctaacttaagtcttcgcctggaggaagagtccagctctgaagccaagaacacagtatcctgctttttcccattgttaaacattttccctgcagtcttggggtgagagcaaggcataagggttgggttctcagaaaaacatttccggaggttacttttaaaaaatcctagtctttgagatacagatacatgggaacaaagatcctgtggttaaataaatttgggaaccactacatgtaattgttcctcctggagtcacaagacatgtgagcaggcaacaagtcttaagaggtcctcaaagtaaagacgcccaatgaacatagtcctatccactgtctccccatattatttcgtccacttatgttttcaaggcacacctagaaagccccatgtctgcactatagccttgctacttcaagtactgtgct

SEQ ID NO: 467298 - DNA, 563 bp, Homo sapiens
taggaaatcaatgttcagagaagatgattgattcaaggtcacatagtaagttgtgaagcaaggattcaaacctaggtttgtgttactccagccgctgtggtatacacaccctgtagttttcggagctgttaatctctctaacttaagtcttcgcctggaggaagagtccagctctgaagccaagaacacagtatcctgctttttcccattgttaaacattttccctgcagtcttggggtgagagcaaggcataagggttgggttctcagaaaaacatttccggaggttacttttaaaaaatcctagtctttgagatacagatacatgggaacaaagatcctgtggttaaataaatttgggaaccactacatgtaattgttcctcctggagtcacaagacatgtgagcaggcaacaagtcttaagaggtcctcaaagtaaagacgcccaatgaacatagtcctatccactgtytccccatattatttcgtccacttatgttttcaaggcacacctagaaagccccatgtctgcactatagccttgctacttcaagtactgtgct

SEQ ID NO: 467299 - DNA, 604 bp, Homo sapiens
ggagaatgagttgaaaaacgacctgttgagtactatgctcactacctgagtgatgggatccataccccaaacctcagcatcatgcaatatatccatgtgataaacatgtacacataccctctgcatctaaaataaaactttaagagaaaaaaaasagaatctaaattttggtactgcatggtacaatttctcctttgggtattcataggcatttacaaaattactcattcagtcttagttctatcatcctttaaatcctcacattaacctgaaaatgaagattggcaacaggaacagctctctacagtattggaaaccatgacatcaacaagctcattcagtaacttgaaagtgaagtatgcagcattcttataaatttgtgtctccctctccacacctatagccccccacaccaggtgcctcacattgcccttttcctttgattacaactaaatattttatcctgtataaaatcatcaccagttacaaaaatcacctcaaagaaagtacaatttagtgttcacatttttacttcatcttcaagttttctcaagttctgcttggtgagcccagagttgagtctgaaatacacagctacaccagc

SEQ ID NO: 467300 - DNA, 604 bp, Homo sapiens
ggagaatgagttgaaaaacgacctgttgagtactatgctcactacctgagtgatgggatccataccccaaacctcagcatcatgcaatatatccatgtgataaacatgtacacataccctctgcatctaaaataaaactttaagagaaaaaaaagagaatctaaattttggtactgcatggtacaatttctcctttgggtattcataggcatttacaaaattactcattcagtcttagttctatcatcctttaaatcctcacattaacctgaaaatgaagattggcaacaggaacagctctctacagtattggaaaccatgacatcaacaagctcattcagtaacttgaaagtgaagtatgcagcattcttataaatttgtgtctccctctccacacctatagccccccacaccaggtgcctcacattgcccttttcctttgattacaactaaatattttatcctgtataaaatcatcaccagttacaaaaatcacctcaaagaaagtacaatttagtgytcacatttttacttcatcttcaagttttctcaagttctgcttggtgagcccagagttgagtctgaaatacacagctacaccagc

SEQ ID NO: 467301 - DNA, 426 bp, Homo sapiens
cacataatccctacttatctcttcaaagatggaacacaaatttttcagctggcatccgattcccatgccattctcccatgacaccacttaaatcagtcatagacaagctgtaaggtggagaagcagacaagaggaccattatccgatctggatgttgtktgatgagtttaatgtctcagacacaaagtaaccaagatttatttctctctctctctctctgtgtctgtgtgtgtgtgtgtgtgtgtgtgtgtgtgtgtgtgtgtgtgtgtcttttttcaaaggatctggccagactttaaattatggacttcagaagtatttaccttactgtcttcatagaggaagttggccgctggttgggtgagtctgaaagagttctttgcattactctgaaatataaagcctctgactcagacactccctact

SEQ ID NO: 467302 - DNA, 604 bp, Homo sapiens
aaaactcagctagcaagatatgactgctgtaactagccaacaaaggcagcacagagagggttatgaattattagcaaagcatattgattttttgaaatgctggctgaggtttaaaaggaaacagaaaagtcaaatctttgattgggaaagtctggccctaatatgggtagaggaacatctttataaaaatttctaggtaagatatatatgattacaaaaataagttctttcattctgaagtcaatttctcatctcctctttctctctccctttcaactcctttggacaaagattttagaaaacagtgtgaattttgtaggctttgggccaaacaaattgaaagcagctaagacattttgcttaacaaaaatgtatgtaatctgagaagtttcatatgatgttttaccattgttgaagttgcacggttttgycactatgtcactacaaagtttgggagtgaggaatctctttttcccccctaaatctagcctagccttgatactgactgaatattttgtattccatgttagtcatttaaaaaaggcatccaaacaaaaggaagaaaaatgattatagggattgaaaagtcattgaggaaaagtga

SEQ ID NO: 467303 - DNA, 606 bp, Homo sapiens
attttgtgctatgaatttgactttctgtatctttctgtcagaaagaggggtaccttaagatagaacaggggcttagggccccataagccctctgttcaagacagcmcagcaaactggtcagttatgtccttgggagcttgaccttgtaaccacgtggcactactttctcttggtctctgccatctggaggacagaaatttgggggttcatgaaatagtcagccctaaaaattatcttgctaaaagacttcacaagctcaaaattggctgctctagactccttctgggaagagcattggaaactgcccaatgctgtagctcagcagctaaagttttgccattttacgggggcagcctaggttcaatttctggcttagggaatgagtcctttctgggttgatacctgcatgacatttaccatttgttaattttcttcccctccaaaaaccatgttgaattgtcctttctctgagcatatcggaggttacctttagtaaggttcaaacgccagaaatattggctgtttggcctggctaaaatcaggtaataagaaatttaaaagttttttttttaagagtgctatgtttaaaagtcagcttaattgaaa

SEQ ID NO: 467304 - DNA, 583 bp, Homo sapiens
acctaaggattgctctgtcatttctcaaagtttgccctgaagatcatcattccttgagatatttctccaaaaatcagaggagagtgtcatggtcaacaatttgagaatcacggagtacttcctaccctagagattcatgacaaaccctcgcataagagctgtacgaaatattgtatcaaataacccagtttaacttagagaaatcagtctttcccaatcttacttgatcatggatggcatttttatctattgacatcccatggaaataatactcacagaatgttcttttggaaatgctgcagtaataaatgacaaacaggtatcaattgttyttaaaagaatatctgtagactacttgtactattttccccagtgacattttacagagattaaactttgttgccctgttctacatatttccagaatctaatgtttacacgttgtagcaaattgtacaaattgaaactcaaaataaataggcatataagaagaaacaacctgtaacatgaaaagtcatgcccaaatgcaaaagaagaaaaaaaaaaacttattttctactcagtggacaaactgctgttaaaca

SEQ ID NO: 467305 - DNA, 581 bp, Homo sapiens
tcattttaaatttcattctgaagagtgaaacttacataatatgcccatttgtaactgcttttgtttactaaacaagtttgtaaagactttttaaaaaatctttcactaacactttttagaaacaaaaaaagttaagtacaataagaaaatgaaaataagagatttccatacccagcattaattactgttaacatcttagcagattaacttttatttttctttcttcactctaaagaaaaataactctattcttttaaaaagatgatacatgctaagtaagtataagatatcaagcaatccagaagactaaaagttttaaaatcactttaaactccactacccagaaattactattgttaatattaggagaagataattcaggatattttctatacaactacagakagacagactaaaacatgtatgtattgatgaatggatggatgaatggatggagaaattacttaaaaattaaatgggccaggcgtggtgcctcacacctgtaatcccagcattttgagaggccgaggcaggcggatcacaaggtcaggagttcgagaccagcctggccattatggcaa

SEQ ID NO: 467306 - DNA, 606 bp, Homo sapiens
tggcaggccatggagttattatctgtcacactcgatttagggagatactgcagctgacacactcctctgcagtttaagaaatgtatctaattgatttcaggggcaggaagtggtttttataaaatgtattgccaagcccttgaaatagatatatgtatatttgcacatctctaaattgaaatgacaaagtcagctgagattctcaggacaactctcatcacctgcctggaaggacaggggttgtgctgaggtgcaggtggcagcagtggcttgtcactgagctgtgcatcccaaatcctgtgtctaaacatcagctttactgcttgggaacacagaggcagacttgggaaactgaatgactgaccagctgtgcactggattagcatccttcctgagtcacagtggaaggagtgcctcagtgtggcagattagagctcaggctttgcattcaacttgtgtggaacactgactccactaaatgtgtagcccaaggcatggtgcctaaactccagtcctatttcctcatctttaratagggaatagagagttgtgggcattaaataaaatgacctaaaagcagttagcagagttaagtcagcagaaaac

SEQ ID NO: 467307 - DNA, 628 bp, Homo sapiens
tgcagccccaattacaaagcttagcagatgccagggcaggggtagagacaaggctgttcgctacaaaaagaggggtaggaggctcttctgttccaaaaatcaaggccactttcaggagaatagaagggaggaatagaaacctgtcccccactcatcactgatacaaggcaaaccccctctggcaytaaggaagggaaaagaaacatgcagtaatgggctgagtaacacccctagatacatcaagtctttatccctagaaccttcacatgttaccttatttggaaagaaggtctttgaagatgtgattaagttaagaaccttaacataattgggagcttatccaggattatccatgtaggccctaaatgcaaccacataagatggaggtagagggaaatttgactacacacacataagaggagcaggcaggcaatgtgactgtggaagcagagattggagggatgtggccaaaagccaaggattgcacgcagaccccagactctggaagaggcatggaatagattttcccctggagcctctagaggaagcatggccctaccaacaccttaatctcaaaattcttgcctccagaactgtaagagaataactttctgttgttttgagccac

SEQ ID NO: 467308 - DNA, 670 bp, Homo sapiens
ctgcggttgggggatagaatgaaaagcagttggttaatgggtacaaaaatagataggaataaattctagtgttcaacagcacagtagggtgagtgtgattattaataatttattgtacatttcaaaacagctagaagaagctgggtgtggtggcccatgcctgtaatcccagcactttgggaggccaaggtgggaggatcacttgagcttaggagttcaagatcagcttgggcaatatagagagacctcatctcaaaaaaaaaaaaaagaaaagaaaagaaaagaaaaaatagccagaagagaccatttggaatgttttcaacacaaataaatgataaatgtttgaggtgatggatagccccattaccctgatttgatcattacatgttatatgcatatattgaaatatcacatgtaccccacaaatacacactcttatggtaccagttgttttattttttaaagaagctattgtcatgactgtgcccagagaccatcccatgcccctccccaggaaatacattcttaactatcttttttsttagcccccaacctcctacccatattgcagggggggctagcttgcttctctacaaagtgggtgtctgaccaagttgcttccatctctcaaaaattttctgaaatgataacaagtttatagaatcaatga

SEQ ID NO: 467309 - DNA, 557 bp, Homo sapiens
ccgcctggcgactcccttccccgcaggcagagggtcagccgctgctgggctgccccagaccgtcccacacaatcgcacacccccaacccggcctcaaacaacaggaagtcggcaccactacaccacttccgcttccactacgtcacttccgggccgccgtcctgcgggcaagggtggacaccgtgtgggattgagaggggcctggyggggtgggttccaaccaacccgcccctcgagtgccggaatcagcaggacgaatcgggtcccaaagatgtgggcaagactgttccgagggtcgaaactctggttcaggataagattagcaggtatttcacagagtcgacttaaggaagctagtgccggagagggaagaagtacgaagggcttgccagtgagccttaatgactgattgatcaagtgggagggcactgcactggcggtcagagaactgttctgtcactgacttgctcttgtgataatggtaggctagtgcatttctagctcaggcgcaaatttctcccgactctaaagtcatacacttgccttagatgatgccc

SEQ ID NO: 467310 - DNA, 557 bp, Homo sapiens
ccgcctggcgactcccttccccgcaggcagagggtcagccgctgctgggctgccccagaccgtcccacacaatcgcacacccccaacccggcctcaaacaacaggaagtcggcaccactacaccacttccgcttccactacgtcacttccgggccgccgtcctgcgggcaagggtggacaccgtgtgggattgagaggggcctggtggggtgggttccaaccaacccgcccctcgagtgccggaatcagcaggacgaatcgggtcccaaagatgtgggcaagactgttccgagggtcgaaactctggttcaggataagattagcaggtatttcacagagtcgacttaaggaagctagtgccggagagggaagaagtacgaagggcttgccagtgagccttaatgactgattgatcaagtgggagggcactgcactggcggtcagagaactgttctgtcactgacttgctcttgtgataatggtaggctagtgcatttctagctcaggcgcaartttctcccgactctaaagtcatacacttgccttagatgatgccc

SEQ ID NO: 467311 - DNA, 580 bp, Homo sapiens
ccagggggcagataaataaatgtggaaagggccccaaacagtgccgagcaacctgagttccctggatccgtaggggcctaggaaaatagttatgtgcatcctagaaacaaggacaagtcagctcagctaacggtatcaaccttatgtatttatgttgattatctcatgctgatgggcactcagactagtgaaagtggatatttatttttgctcaataaatatgaaatatacttcctggttcctgatcaagaatgtaattcaaatgtattctcaaatcttcagtcaagagctgaatatttatctctggaaatgtaaatttattattgtgtattttggacagtttttaaacaaaaaaaaattctctcttggaaacaaaaccatcttgcaaagctttctttaattgataatcatttgagtgtctacatgcactaataatatttattattcacaaattatccagacatgaatgtattacatgaatgtagtttctttatcacctcccaaaattctgactrtcattccaagtggagacatgtaggtctttttttatccttgtgtttgccagcagcagagtctgttt

SEQ ID NO: 467312 - DNA, 549 bp, Homo sapiens
  misc_feature (1)...(549): n = A,T,C or G
ctccagcctgggtgacagagagaaactccatctcaaaaaaaaaaaagactaagaaattggacaatatattagaatacagccatatgatggtctggagtaaagatgattaataaatgtattgtagaagaattcattataaataatatgtaataaatagggcacggtggctcatgcctgtaatctgagcacttcggaggccaaggcagaagggttgctggaggccaagagtttaagaccagcctaggcaacatagtgagacagtctctataaagaattttttaaaaattagctgggcgtggtggcrcacacctgtagtcccagttactcaggaggctgaggcagaaggatttttttgagcagaataattctaagatgctgtgagctgtgacagtgccactgtactccagcctggatgacagagtgagactctgacacanganacaaaacanaacanacaccacccaaattatcatatactatgatatcatttataaaaagataaacatctatattttgcattgacatggacgcagggaggggaacattaca

SEQ ID NO: 467313 - DNA, 605 bp, Homo sapiens
atgccacccctggggcccaaagactggcccacctggcacccctgtccccagtaaaacttcaccagagcctccactagtaaccacttgttaaaccacagaggaaatcacaaataccactgatgctgttgtttatagccaaaaaaatcatacagagactacactaccacatgcacccataatcaaaactaaaagagyctatctaaacaacaccattgacaaatcttcaggaaaaagtcctctcctatgaaagcaaatttgaaaactggaagaagagactattagaccaggtgtacagatatcaatgtaaggaaaaaagcaatgaaatatgacacttccaagggaacacattaattcctcagcaacagattataataaaaaagaaattcacaaaattccagaagagaataaaaaatataatactaaaaagcacagtgaaatgtaagagaaattctaaaaaaaaatacaaaaaatcggaaaaacatttcaagatatgaatgacaaatttatatatcacaagaaaaagagaggaacatagaaaagctggaactaaaaaattcctttaatggaatacaaaatatacttggaagcttcaacaatagactaga

SEQ ID NO: 467314 - DNA, 611 bp, Homo sapiens
aagctcttttcatgtaaatctgatttttttcttttttaacatctgtatatatttaacaggtataattgatgttaaaatgcttatattatagtgcattaaagtgtaaagcttgttttaatataagcatacaattgtgamtatatcacatctgtcaagatggataaacatatccataattcctccaaattttctattgcccccttgcaatccctcccttctacccatatccacccctaccatgtgcccattccccaggcattcactgctaggctctctgtcaaaataacttagtttgcatcttctagatctttatataaacagaatcaaacactatgtactgttttctttctgatatattttgtatgattattttgagatttatccatgtatgctaatatttcaatagctcgttttattgctaaatagtattctactgacagataaatacaacttgtttatcccattcacatattgatgaaggcttaggttgtttccagtgtggggccgttgcgaataaagccactgtgaacatttgggtaccagttttggtgtgaatatttgctttaatttcccttgaataaagagaaatatattggaatggctgtgagtag

SEQ ID NO: 467315 - DNA, 611 bp, Homo sapiens
aagctcttttcatgtaaatctgatttttttcttttttaacatctgtatatatttaacaggtataattgatgttaaaatgcttatattatagtgcattaaagtgtaaagcttgttttaatataagcatacaattgtgactatatcacatctgtcaagatggataaacatatccataattccyccaaattttctattgcccccttgcaatccctcccttctacccatatccacccctaccatgtgcccattccccaggcattcactgctaggctctctgtcaaaataacttagtttgcatcttctagatctttatataaacagaatcaaacactatgtactgttttctttctgatatattttgtatgattattttgagatttatccatgtatgctaatatttcaatagctcgttttattgctaaatagtattctactgacagataaatacaacttgtttatcccattcacatattgatgaaggcttaggttgtttccagtgtggggccgttgcgaataaagccactgtgaacatttgggtaccagttttggtgtgaatatttgctttaatttcccttgaataaagagaaatatattggaatggctgtgagtag

SEQ ID NO: 467316 - DNA, 659 bp, Homo sapiens
tcttcctctttctctctttctcagtcctcattcccyttttctgtccgtattgaggtgcaaacatgttgtttcctccaaatgaaatgtatatgttaatttatttgatgggcttgacaaaatggctctaaaataaaatgccaatactctctaaatggtcacaaataaagggccctggacctttccaataatttatagtgatgtcatacgcaatgatgacattatgttcagaagagcaagccagttataaacacagttaggataatccaaaaaggaatgaggggtagcagggttgcatccctagacactgcagtgcagatccctatggctctggaccaagaccatgacctctgtcagagaactactctcagtttgaaaaacagctcttgacatgctactagctggagactgggcacccacctggaacaccacgtgacaaaacaaccggaggtaggcttgatgagctgggggaatcagtaagtcacaatatctgtggtacttggcgactgggtttaggcagatccagaagatgtgagatactcaaatgcatagaatacccaggctcctactgctattggactggtgcattttcttccatccatacctatggcttcgtgaagagttttctataaacaaacatcagaagaagaaaagacttaggc

SEQ ID NO: 467317 - DNA, 556 bp, Homo sapiens
gtatgtgcgcaagtgtaccctgcgatgtgatggtgcccttgccagggtaggtttctgccttgtgctgagagcttccaggacaggctctggccacctgtgaccttgaactaaattaagtgggttggaaaaggaatgaatacatgaacacagactattgtaaaataaaaatttgcggctgggcacggtggctcacgcctgtaatccaaacsctttgggaggccaaggcgggcagatcatctgaggtcaggagttcaagaccagcctgaccaacatgaagaaaccccatcttgtctaaaaatacaaaattagtcaggcatggtggcacatgcctgtaatcccagctatttgggaggcagaggcaggagaatcgcttgatcctgggaggaggaggttgcagtgagctgagatcatgccactgcactccagcctgggcaacaagagcgaaattccatctaaaaaaaaatttttaacttgatgttgcagtttccaagaacctatcaacaatataatctgaagacttactgtacttttttacaacagccataggaagctatta

SEQ ID NO: 467318 - DNA, 556 bp, Homo sapiens
gtatgtgcgcaagtgtaccctgcgatgtgatggtgcccttgccagggtaggtttctgccttgtgctgagagcttccaggacaggctctggccacctgtgaccttgaactaaattaagtgggttggaaaaggaatgaatacatgaacacagactattgtaaaataaaaatttgcggctgggcacggtggctcacgcctgtaatccaaaccctttgggaggccaaggcgggcagatcatctgaggtcaggagttcaagaccagcctgaccaacatgaagaaaccccatcttgtctaaaaatacaaaattagtcaggcayggtggcacatgcctgtaatcccagctatttgggaggcagaggcaggagaatcgcttgatcctgggaggaggaggttgcagtgagctgagatcatgccactgcactccagcctgggcaacaagagcgaaattccatctaaaaaaaaatttttaacttgatgttgcagtttccaagaacctatcaacaatataatctgaagacttactgtacttttttacaacagccataggaagctatta

SEQ ID NO: 467319 - DNA, 596 bp, Homo sapiens
tctgtagactattgtacttcgaaaaaataaccacttgaacattgtcctttatcccttcctccttcagagtcttctcattctctgttgagccttataagctcttctgtttcaagactgctactttcaaaaataggtatgagctgctctgggaaacagaagttgtttgttgtttgtcacttcagagaaatgaaggtgaacccagtgcaccgtggggaaccagttgttgcataaagcatgmatttgctataaatgcagagagaggtacagaggctcatctcagagacaaatactgtagatggatttaagataaagttggttttattgactagaaaaaaacaggaattaattataacatgctacttaaaatatactgcaagtaaaagaggcaaaaatataataaatcagctatggcagtaatctctatatgatttctttaacttgatatttccccttatggaagtgaggaatcagctctagggcactgaaaaagaatggaattcatgcaaacatcttctttaactttttttgaaaacaaaatcccaggataatctaagggatttgttttaatgtttctttattcgggaaaatcttatgga

SEQ ID NO: 467320 - DNA, 596 bp, Homo sapiens
tctgtagactattgtacttcgaaaaaataaccacttgaacattgtcctttatcccttcctccttcagagtcttctcattctctgttgagccttataagctcttctgtttcaagactgctactttcaaaaataggtatgagctgctctgggaaacagaagttgtttgttgtttgtcacttcagagaaatgaaggtgaacccagtgcaccgtggggaaccagttgttgcataaagcatgaatttgctataaatgcagagagaggtacagaggctcatctcagagacaaatactgtagatggatttaagataaagttggttttattgactagaaaaaaacaggaattaattataacatgctacttaaaatatactgcaagtaaaagaggcaaaaatataataaatcagctatggcagtaatctctatatgatttctttaacttgatatttccccttatggaagtgaggaatcagctctagggcactgaaaaagaatggaattcatgyaaacatcttctttaactttttttgaaaacaaaatcccaggataatctaagggatttgttttaatgtttctttattcgggaaaatcttatgga

SEQ ID NO: 467321 - DNA, 612 bp, Homo sapiens
ggggagcgagcacatcctgaaagagacggatgcccggggaactgataagtaaccaagctccaacttagcgctgggagtctcacgaggaatgtgtagcagtttctttgcagccttaactaaaacacaagtcgcttatgttcctttaaaacattttcaccaggcaaaaaaccaaggtagttaatcacacccttaataaacaaggtaagttatcatgcctacacagatacccctactcacacccaaactgagattttatatagcattagcaaacataaaatcttccaagagaagtggagattaggcatgatgagcgttttcattctctcattttcccctcaggtctgcctccttctctatattccaagtcacagtggggaatgccaaggcaaaaacagtcttgcttctcaagtaagctctttcatgcagatcgattctccttcctytcccagtggttgttctcaactcccacatccttccagataccctgagtcctaaaataacccttgttacatcatcacaagtcagttatgtatgtaatacaagaaggtttttagtataatttgatgaactctattttcatggtttctttttagaactattaagtaatagtaa

SEQ ID NO: 467322 - DNA, 612 bp, Homo sapiens
ggggagcgagcacatcctgaaagagacggatgcccggggaactgataagtaaccaagctccaacttagcgctgggagtctcacgaggaatgtgtagcagtttctttgcagccttaactaaaacacaagtcgcttatgttcctttaaaacattttcaccaggcaaaaaaccaaggtagttaatcacacccttaataaacaaggtaagttatcatgcctacacagatacccctactcacacccaaactgagattttatatagcattagcaaacataaaatcttccaagagaagtggagattaggcatgatgagcgttttcattctctcattttcccctcaggtctgcctccttctctatattccaagtcacagtggggaatgccaaggcaaaaacagtcttgcttctcaagtaagctctttcatgcagatcgattctccttcctctcccagtggttgttctcaactcccacatccttccagataccctgagtcctaaaataacccttgttacatcatcacaagtcagttatgtatrtaatacaagaaggtttttagtataatttgatgaactctattttcatggtttctttttagaactattaagtaatagtaa

SEQ ID NO: 467323 - DNA, 546 bp, Homo sapiens
gtgtacagaatattatgttagaaggaaacatttcctttagatgcttaagaaaatattgttagcatcaacgcacaacaaacagaacttgaggaaaaaaacttacatgagttgaaaatgagttgaaggasagcattattattttgagccttttaaaagaaagaaaaaggtggccttgttatgtaaataaagtccgttcagtagtcaacgtaaagaatctttgcttttttttttttttcctttttactggccaaatacggccaccaccacaccaactttgtgtgtgtgtgtgtgtgtgtgtgtgtgtttgggggggggcagaatttagccactttagaggccttgttccccataatttgaaattttccttcagatttgatcaagtcagatagagttaatcagaaccagtgggaaaaagaccaaaacaacaagaaaaacagaaacaaacaacaacaacaaaacaagcaaaacaaatgatggcacaacatatatgataactgagcactctcatggtaaggagaatttatgacaaatttgttgttaatctta

SEQ ID NO: 467324 - DNA, 546 bp, Homo sapiens
gtgtacagaatattatgttagaaggaaacatttcctttagatgcttaagaaaatattgttagcatcaacgcacaacaaacagaacttgaggaaaaaaacttacatgagttgaaaatgagttgaaggagagcattattattttgagccttttaaaagaaagaaaaaggtggccttgttatgtaaataaagtccgttcagtagtcaacgtaaagaatctttgcttttttttttttttcctttttactggccaaatacggccaccaccacaccaactttgtgtgtgtgtgtgtgtgtgtgtgtgtgtttgggggggggcaraatttagccactttagaggccttgttccccataatttgaaattttccttcagatttgatcaagtcagatagagttaatcagaaccagtgggaaaaagaccaaaacaacaagaaaaacagaaacaaacaacaacaacaaaacaagcaaaacaaatgatggcacaacatatatgataactgagcactctcatggtaaggagaatttatgacaaatttgttgttaatctta

SEQ ID NO: 467325 - DNA, 604 bp, Homo sapiens
gatgatgatgatggctgtttattgagaactttctgtgagccaggcacataatctcattttatcttcacaaacatcttctcagcagtcttgttatttttactgtttttcatagtaaaatagtctttactgagaaaccagggaagtcaaaatctgaaggctggaccgractttcaaaagctctggcaaagaatgaggagccatgttggagcagaggtctggcagagaagagaagacaaatgcagaccaacatcatccaatgaggtcagtaatgtaggagaagcaatggcccctcgccacagtgaaccaatgttactctaagtccacacctcttgactagcacacctgtgaggatgtaccccccaaatttaggagggcattgcttttagaatcactggggaatccagagatttcatcttcaagaaagaacatttgcttgcagcgttgcctatcagagaacatggtgtcttagtgaaatggtacctgggactgcctcacggtcctgctataccatgaatagtctgtgtggtgttagacagcattacacctccctgggccttgttccctcctccagaaaccagaggcagtgagaagggtgatgcctaag

SEQ ID NO: 467326 - DNA, 583 bp, Homo sapiens
aatcacatatgaatttataccccagttccatcatttacaaatcatataattttggaaaaattgtttaactctgctaaggcttaattctctcgtttattaaatggacatgatttatagaattcacaactttggcaagaatcaaatgagataaaatataaaaattacctggcaggctgtgcagctgattgtatgtcagatcacacacccccaagtttttctcatcacttgcccttcttcagggtccccttgtttgctaagggactccccagatgacctccctccacaatattttacagagtagcccacaggcagtgtagggctgcccattgcgaagccatccccgaaggttagagatgcactgttccatgcctggcactctttaatcacctattgatgtccatccgcgcagctacaraaatccttgatggtgcgactttcaagtctgaagtaagccctgaatttctttctttgctcagggttcatattttccctgcatcaaatgcttctgagtctccaggacttgccttgctatttctggacccctctccacgatccccttgacctttagttaaggaaagttggt

SEQ ID NO: 467327 - DNA, 591 bp, Homo sapiens
caagatgtttgccctgagctcctggaaagatagagttgccatttacagagatggggcaacttagatgcgagatccacagatcatgatgagctttggacagtttaagtttgacatgttttttaaatattcaagcagagatcttgagtagacagttggatgcatgcattggaattcaggtccagtctaagggattatttgggagatgttagggtatttaaagccataagacaagatgagactgccctcacttacagtgccagccttaatgtcttcctgtgcatccttactatgagtgggttcagtgcccaccgagagggttttacttcaaaaggcaccatgcttaaatacatcaggcggccccaggggccaaggatccagcttctctcagggaggtgtgaatgttcaggaggtctcttccttcccaagsccaagagtttgaaagccggcctgttgtccacctatggggttaggaggaaattaaatggcatcggtttgaaattaacttgaagataaggtttccatgatgtctaaacctacatgctctttggtcatctttttttggtgggtgtgctggtggaaatgacacagatg

SEQ ID NO: 467328 - DNA, 592 bp, Homo sapiens
cattgcattagtcccttgaactgacttcatcctgtatttaaactattacaccctcagcttgggttttaaactttaggtctcattacagtacattttccccaggcctcactcacaaatattacaacktagcctcagattgttcctcaaaatctctcaaaagagctgatagttatgactgcacctttaatcagaatatataagggctagagttattgtctggagtcactgaactagcactcagattcctaacagaggatgtggctatagaaatagggtcagttaattccattagttagtttctgttaattaacactgtcatcaaagaaaaaaacccataaatactcagaaatgactctaaaaagagttcttcatcctctaatttaaaaagtagttaatgcacaatttttaactaatgtggtggcttttgtctagtctctccgtaggagaacacatacttagagttgtgcacttggggtttttttcctgtaataacgatggatttcagctgatccatctgttttctcctctggaatgcctcataaccaagagtatgtatctccagatagcaagaaagggggaattatttagtggc

SEQ ID NO: 467329 - DNA, 592 bp, Homo sapiens
cattgcattagtcccttgaactgacttcatcctgtatttaaactattacaccctcagcttgggttttaaactttaggtctcattacagtacattttccccaggcctcactcacaaatattacaacttagcctcagattgttcctcaaaatctctcaaaagagctgatagttatgactgcacctttaatcagaawatataagggctagagttattgtctggagtcactgaactagcactcagattcctaacagaggatgtggctatagaaatagggtcagttaattccattagttagtttctgttaattaacactgtcatcaaagaaaaaaacccataaatactcagaaatgactctaaaaagagttcttcatcctctaatttaaaaagtagttaatgcacaatttttaactaatgtggtggcttttgtctagtctctccgtaggagaacacatacttagagttgtgcacttggggtttttttcctgtaataacgatggatttcagctgatccatctgttttctcctctggaatgcctcataaccaagagtatgtatctccagatagcaagaaagggggaattatttagtggc

SEQ ID NO: 467330 - DNA, 592 bp, Homo sapiens
cattgcattagtcccttgaactgacttcatcctgtatttaaactattacaccctcagcttgggttttaaactttaggtctcattacagtacattttccccaggcctcactcacaaatattacaacttagcctcagattgttcctcaaaatctctcaaaagagctgatagttatgactgcacctttaatcagaatatataagggctagagttattgtctggagtcactgaactagcactcagattcctaacagaggatgtggctatagaaatagggtcagttaattccattagttagttyctgttaattaacactgtcatcaaagaaaaaaacccataaatactcagaaatgactctaaaaagagttcttcatcctctaatttaaaaagtagttaatgcacaatttttaactaatgtggtggcttttgtctagtctctccgtaggagaacacatacttagagttgtgcacttggggtttttttcctgtaataacgatggatttcagctgatccatctgttttctcctctggaatgcctcataaccaagagtatgtatctccagatagcaagaaagggggaattatttagtggc

SEQ ID NO: 467331 - DNA, 592 bp, Homo sapiens
cattgcattagtcccttgaactgacttcatcctgtatttaaactattacaccctcagcttgggttttaaactttaggtctcattacagtacattttccccaggcctcactcacaaatattacaacttagcctcagattgttcctcaaaatctctcaaaagagctgatagttatgactgcacctttaatcagaatatataagggctagagttattgtctggagtcactgaactagcactcagattcctaacagaggatgtggctatagaaatagggtcagttaattccattagttagtttctgttaattaacactgtcatcaaagaaaaaaacccataaatactcagaaatgactctaaaaagagttcttcatcctctaatttaaaaagtagttaatgcacaatttttaactaatgtggtggcttttgtctagtctctycgtaggagaacacatacttagagttgtgcacttggggtttttttcctgtaataacgatggatttcagctgatccatctgttttctcctctggaatgcctcataaccaagagtatgtatctccagatagcaagaaagggggaattatttagtggc

SEQ ID NO: 467332 - DNA, 480 bp, Homo sapiens
gagctacctcattttagactttctaaagttatataacaacatgacaaatatgtgctactggaaaatattgtaggaaaggattaattttctcttccacactgtcttgatagaagaagtaggtaaggaaaatctaatttkttaacgtttttttccagcagtgtatgttaagatatgaatctgtagaaatacattctttagataattaaattgagatacggaatttcaggcaataggctcttcattcaaagaaaaagagtaaatcaaatccactgttgatattgacggtgaatgcatttatattttagtggattaaatggagagaactcattcaaaataaacctgtaaaaatacaagagggaacaatagaaggtgaaataaatgttatttttgtgttttttttgcagagatacttgcttttaattagagaagttagaaccaaatgtacttaaaaataaaagatcaaatgcttttgaagggcaa

SEQ ID NO: 467333 - DNA, 613 bp, Homo sapiens
acctccaataagggcaggcatgtttgatgtggtaacttggttactttatatgagcacacagagttcaggtcttcagagatggcctcattggcttaaaaggaactcagcatttctcctgttggattataacaataacctccacatttgcagaacacattttcacatgccttttaaatccattattgcacttaatctttacaacagctctgggtgatcatatgtttactctaactttacagacaaggaaatggaagctcagagtagataaagtcttcatagttctaaaactcgttgttgagcaactggtctggctctgagttctctgtcctgagtccttttcatcagtataatcaccttgaagacaggtggttttatcttccccagagttcccattgtagtgctgaacaagtaaaggtacacaattaatgcaaatctagatgactcttgtttcctttgtgcccagaggtcaagtttgatcatacttcatatggcataagcaccttacattttattcctcaagcacctttctacacttagwaagtagtaattatatttgtttccattattgaacatatcattttgtgccaggggagctatgtagttttgatgttat

SEQ ID NO: 467334 - DNA, 603 bp, Homo sapiens
gtgatctttagaagccaaccctccgcatcatgcaatatacccatgtagcaaacctgtacatgtacctcatgaatctaaaataaaggttaaagtcatttaaaaatttactatgtatatatataattttcgtgtctatttttaaataacagaatatcacatagtgtaagggtcttacttccaactcttctcttcctttttctatgctattgttgacatttattttacttttatatatgctatttacccccaatatattgctgctattttttttgtttaggcastcaacttcttttagaatgatgaataatatgaaaatatatttttatatttatttccattttaaattactttcagaactctttatttcttcatgtagatctaggtttctatctagtgtcatattccttttgcttgaagaatttcttttaacatttcatgtaaagtcagcctattggtaataacatctttctaattttatttgtctgaaagaccattattttaccttcattcttgaaaagtattttcactggctacaggatactaggatagccactttcatttttagtattttaaagatgtcactttcttctgacttgcatagtg

SEQ ID NO: 467335 - DNA, 549 bp, Homo sapiens
attttagatccgtattatttaaattattaaatgaatacatccccatacatgtgcatataactcattttcttaattctgttaaggaagaaagctgagctctgggccatatggatcctttaaaagagacagatgcatgaagtttggagcagtgaatgtaagagcaatatttgtttttcatttaatgattttgattttttattgtagagacagtagagcttgatatagttttggcaaaatgaatttaataaaaattatatatttgatctatcatttcctatttctgtrattaaactagggagatttacttcaggggtttccaattataaaaagtgggaaaattatctttgatttcctgtggggaagtaataaattggaaattatttggttgacacaattacaatattgttggtcagaggccagaaaaattattgatttttcttccaggtttccttctcaggaataaaatagttttcaaatacctgagttaagattttacattcaaatcattcacaggaaggtttaatatttgagctgataaaaggaggttac

SEQ ID NO: 467336 - DNA, 549 bp, Homo sapiens
attttagatccgtattatttaaattattaaatgaatacatccccatacatgtgcatataactcattttcttaattctgttaaggaagaaagctgagctctgggccatatggatcctttaaaagagacagatgcatgaagtttggagcagtgaatgtaagagcaatatttgtttttcatttaatgattttgattttttattgtagagacagtagagcttgatatagttttggcaaaatgaatttaataaaaattatatatttgatctatcatttcctatttctgtaattaaactagggagatttacttcaggggtttccaattataaaaagtgggaaaattatctttgatttcctgtggggaagtaataaattggaaattatttggttgrcacaattacaatattgttggtcagaggccagaaaaattattgatttttcttccaggtttccttctcaggaataaaatagttttcaaatacctgagttaagattttacattcaaatcattcacaggaaggtttaatatttgagctgataaaaggaggttac

SEQ ID NO: 467337 - DNA, 549 bp, Homo sapiens
attttagatccgtattatttaaattattaaatgaatacatccccatacatgtgcatataactcattttcttaattctgttaaggaagaaagctgagctctgggccatatggatcctttaaaagagacagatgcatgaagtttggagcagtgaatgtaagagcaatatttgtttttcatttaatgattttgattttttattgtagagacagtagagcttgatatagttttggcaaaatgaatttaataaaaattatatatttgatctatcatttcctatttctgtaattaaactagggagatttacttcaggggtttccaattataaaaagtgggaaaattatctttgatttcctgtggggaagtaataaattggaaattatttggttgacacaattacaatattgttgktcagaggccagaaaaattattgatttttcttccaggtttccttctcaggaataaaatagttttcaaatacctgagttaagattttacattcaaatcattcacaggaaggtttaatatttgagctgataaaaggaggttac

SEQ ID NO: 467338 - DNA, 547 bp, Homo sapiens
cgcctattcttgagcacatgtgaacacctcttgtgtacaccaataaaagcttcttagattgaagcaactgctttgtcagaaagagttgtgtcctagcaaatttgagcaataagctcttaaaatgtaggtagaaatgctgtataacctcatttatacccagcaaataatgaggtcyggagacgtgtgggttatataagaattaacatgccagccagctattaaatagcagctgtggcaacatagattatgattggaccatcactataatttagtctcattttgtgcaccataattgaataatcaaataataatacaaaagaaatcattagtgtcttaaattacagtcataccaataccagttcactttcttccaaatataggccttaaaaatatggttattattaacacccattttacaaagagtaaaatatcaagatcaaggaattgcaagtaatttcccaatttcatgtacaaagttgaaacaagaataaaatgaaactcctctgactacataattggtctcttgatccaacaaatcaaaatgttt

SEQ ID NO: 467339 - DNA, 568 bp, Homo sapiens
gaaacatacaaccatgacaaaaggtaaaggagaagcaaggcacatcttacatggcagcaggagagagagcaggaaaaactgccattttcttttttttgagacagagtcttgctgtgtagcccagactgaagtgcaatggtgtgatcttggctcactgcaacctccacctcccaggttcaagtgattcccctgtctcagcctcctgagtagctgagattacaggcgtgtgccactatacccagctatttttttttttttgtctttttagtagagatggggttttgccatgttggccagctggttttgaactcctgatctgaagtgatccacccacctcagcctccctaagtgctsggattacaggtgtgaaccattgcactggacaaaactgccacttttaaaaccatcagatctcatgacctctccctcactatcacgggaatagcatggaggaaaccacccccatgatccaattacctcccaccaagtccctccttcaacatgtggagattacaattagagatgagatttgggcagggacacagtgccaaaccacatcatcctcatt

SEQ ID NO: 467340 - DNA, 568 bp, Homo sapiens
gaaacatacaaccatgacaaaaggtaaaggagaagcaaggcacatcttacatggcagcaggagagagagcaggaaaaactgccattttcttttttttgagacagagtcttgctgtgtagcccagactgaagtgcaatggtgtgatcttggctcactgcaacctccacctcccaggttcaagtgattcccctgtctcagcctcctgagtagctgagattacaggcgtgtgccactatacccagctatttttttttttttgtctttttagtagagatggggttttgccatgttggccagctggttttgaactcctgatctgaagtgatccacccacctcagcctccctaagtgctcggattacaggtgtgaaccattgcactggacaaaactgccacttttaaaaccatcagatctcatgacmtctccctcactatcacgggaatagcatggaggaaaccacccccatgatccaattacctcccaccaagtccctccttcaacatgtggagattacaattagagatgagatttgggcagggacacagtgccaaaccacatcatcctcatt

SEQ ID NO: 467341 - DNA, 568 bp, Homo sapiens
gaaacatacaaccatgacaaaaggtaaaggagaagcaaggcacatcttacatggcagcaggagagagagcaggaaaaactgccattttcttttttttgagacagagtcttgctgtgtagcccagactgaagtgcaatggtgtgatcttggctcactgcaacctccacctcccaggttcaagtgattcccctgtctcagcctcctgagtagctgagattacaggcgtgtgccactatacccagctatttttttttttttgtctttttagtagagatggggttttgccatgttggccagctggttttgaactcctgatctgaagtgatccacccacctcagcctccctaagtgctcggattacaggtgtgaaccattgcactggacaaaactgccacttttaaaaccatcagatctcatgacctctccctcactatcaygggaatagcatggaggaaaccacccccatgatccaattacctcccaccaagtccctccttcaacatgtggagattacaattagagatgagatttgggcagggacacagtgccaaaccacatcatcctcatt

SEQ ID NO: 467342 - DNA, 568 bp, Homo sapiens
gaaacatacaaccatgacaaaaggtaaaggagaagcaaggcacatcttacatggcagcaggagagagagcaggaaaaactgccattttcttttttttgagacagagtcttgctgtgtagcccagactgaagtgcaatggtgtgatcttggctcactgcaacctccacctcccaggttcaagtgattcccctgtctcagcctcctgagtagctgagattacaggcgtgtgccactatacccagctatttttttttttttgtctttttagtagagatggggttttgccatgttggccagctggttttgaactcctgatctgaagtgatccacccacctcagcctccctaagtgctcggattacaggtgtgaaccattgcactggacaaaactgccacttttaaaaccatcagatctcatgacctctccctcactatcacgggaatagcatggaggaaaccacccccatgatccaattacctcccaccaagtccctccttcaacaygtggagattacaattagagatgagatttgggcagggacacagtgccaaaccacatcatcctcatt

SEQ ID NO: 467343 - DNA, 566 bp, Homo sapiens
agaaggtatcacactacctgatttcaacttatattacaaagtgatagttatcaaaacgtatggtactggcataaaagcagacacatggatcaatggaactgaatacagagcccaaaaataaacccaaacatatattatgagctratttttgacaagtccaataagatacaatagggaaaagatggtgtcttcaataagtagtggtaagaaaactagatatctatatgcaaaagaatgaaactggacctgatgcctatcttacacatcatacataaaaagcaactcaaatagattaaatacctaacacctgaaaccataaaactcctagaaggaaatataggagaaaaactccttaatatcctccttgacaatgattttttggatatcacaccaaaagctcaggcagcaaaagcaaaaataagcaagtgggactacatcaagcaaataagcttctgcatagcaataaaaaaaaacaaaatggggtaaaaaggtagcacagggattaggggaaaatattggcaaaccacacatctgataaggggttaaaatccaaaacatataaggaa

SEQ ID NO: 467344 - DNA, 534 bp, Homo sapiens
tatgcattaacctaacataatcaaatatactatataaattaatatggtgcttatgtacctagaagcagaaaggggcaatcaactaacatttattgagcrcctacggaggcccaatactgggttgggcatgttcatacatgcttttaggagcctactgagcagaataatagaaaatggcacatattttaatgcctttttaaagtccacataattaccttatgctgtacatttaatgtccactgtatttatagatatagtgaccagattttaaagaaatcaagtaagcttcactattattgatacataatttgaaaatacatcaacaaaatctccatctacatttccatgcttagaatcaatagaaaaaataccaaaaaaattaatgtaaagcatgagttcttagggacattttatgatcttagaagatttctatttagactatgaagctaggaattctgaagttcacattcactcctctgtttattctcccctctctcaagggtataagttagcagaatatttgggaatttccaa

SEQ ID NO: 467345 - DNA, 534 bp, Homo sapiens
tatgcattaacctaacataatcaaatatactatataaattaatatggtgcttatgtacctagaagcagaaaggggcaatcaactaacatttattgagcgcctacggaggcccaatactgggttgggcatgttcatacatgcttttaggagcctactgagcagaataatagamaatggcacatattttaatgcctttttaaagtccacataattaccttatgctgtacatttaatgtccactgtatttatagatatagtgaccagattttaaagaaatcaagtaagcttcactattattgatacataatttgaaaatacatcaacaaaatctccatctacatttccatgcttagaatcaatagaaaaaataccaaaaaaattaatgtaaagcatgagttcttagggacattttatgatcttagaagatttctatttagactatgaagctaggaattctgaagttcacattcactcctctgtttattctcccctctctcaagggtataagttagcagaatatttgggaatttccaa

SEQ ID NO: 467346 - DNA, 534 bp, Homo sapiens
tatgcattaacctaacataatcaaatatactatataaattaatatggtgcttatgtacctagaagcagaaaggggcaatcaactaacatttattgagcgcctacggaggcccaatactgggttgggcatgttcatacatgcttttaggagcctactgagcagaataatagaaaatggcacatattttaatgcctttttaaagtccacataattaccttatgctgtacatttaatgtccactrtatttatagatatagtgaccagattttaaagaaatcaagtaagcttcactattattgatacataatttgaaaatacatcaacaaaatctccatctacatttccatgcttagaatcaatagaaaaaataccaaaaaaattaatgtaaagcatgagttcttagggacattttatgatcttagaagatttctatttagactatgaagctaggaattctgaagttcacattcactcctctgtttattctcccctctctcaagggtataagttagcagaatatttgggaatttccaa

SEQ ID NO: 467347 - DNA, 534 bp, Homo sapiens
tatgcattaacctaacataatcaaatatactatataaattaatatggtgcttatgtacctagaagcagaaaggggcaatcaactaacatttattgagcgcctacggaggcccaatactgggttgggcatgttcatacatgcttttaggagcctactgagcagaataatagaaaatggcacatattttaatgcctttttaaagtccacataattaccttatgctgtacatttaatgtccactgtatttatagatatagtgaccagattttaaagaaatcaagtaagcttcactattattgatacataatttgaaaatacatcaacaaaatctccatctacatttccatgcttagaatcaatagaaaaaataccaaaaaaattaatgtaaagcatgagttcttagggacattttatgatcttagaagatttctatttagactatgaagctaggaattctgaagttcacattcacycctctgtttattctcccctctctcaagggtataagttagcagaatatttgggaatttccaa

SEQ ID NO: 467348 - DNA, 548 bp, Homo sapiens
gcaagtaatcttccttctgctccttggccaaaactgccacaaactacacayatatcctgaagttaagaaaacagaacatattttaaatggagactaagctaaaaacctacaaattttactttaaaaataccttcttaactaatatagctctatagctaaatattggatcacttctgtgtatatgagataaagcagaaatgtgcaaggaggaattcaatgaggaagacagtaaattgtcaagttcaaacctgattcaaagtgaacttgtcactgctagaaaacaacacaaccatatcgagcacagagttttcttcatcatccttatttgatgaaatatctgcagtagacacctataaaaagcaaaatacacaaaatacgaagttatatttttcacttgttttacacttaactggaaagcttcagaaaattcataatcaaaacatatatttttgctaaggtctagaataacaattccaaatattaatgctaagatactacagcaaaatggagtcatgacattttattattcaactcattctctctttaga

SEQ ID NO: 467349 - DNA, 548 bp, Homo sapiens
gcaagtaatcttccttctgctccttggccaaaactgccacaaactacacatatatcctgaagttaagaaaacagaacatattttaaatggagactaagctaaaaacctacaaattttactttaaaaataccttcttaactaatatagctctatagctaaatattggatcacttctgtgtatatgagataaagcagaaatgtgcaaggaggaattcaatgaggaagacagtaaattgtcaagttcaaacctgattcaaagtgaacttgtcactgctagaaaacaacacaaccatatcgagcayagagttttcttcatcatccttatttgatgaaatatctgcagtagacacctataaaaagcaaaatacacaaaatacgaagttatatttttcacttgttttacacttaactggaaagcttcagaaaattcataatcaaaacatatatttttgctaaggtctagaataacaattccaaatattaatgctaagatactacagcaaaatggagtcatgacattttattattcaactcattctctctttaga

SEQ ID NO: 467350 - DNA, 593 bp, Homo sapiens
aagtaataacaataataataaattttcctctaaatacaatggtgaatgaggtagaaatgttgagttcataagagaactgttgaatagtgaaggaaactgacttaattttaatgacaggaagaatactgttacacactagcaaaaatraacttttatgctgatgtagcagtacagaatatgcttccaacccagggacgctggagccaggcttgctagctaagcgaccttggacaagttacttaaccattttattcctcagcacactcatctcaaacgaggataataaaacctactatatgggattgttgagagtaaaaaatacttagattagtacatagtaagtactcaatagatgttagctattactgtaatcaccgcgagaccagttaatgagagagttcttccttatccttactctatattgaatacaatttgttgcacttcgaaatatctggataaggctatagttgttgtcgtcaccgagaatgcaggagtggcaaagagaaaaatcatgcaaaggcttgctgatagcgttcacagtgacagcccgaaagtatgattctaaggttgtaagcattttatatttagaattt

SEQ ID NO: 467351 - DNA, 593 bp, Homo sapiens
aagtaataacaataataataaattttcctctaaatacaatggtgaatgaggtagaaatgttgagttcataagagaactgttgaatagtgaaggaaactgacttaattttaatgacaggaagaatactgttacacactagcaaaaatgaactttyatgctgatgtagcagtacagaatatgcttccaacccagggacgctggagccaggcttgctagctaagcgaccttggacaagttacttaaccattttattcctcagcacactcatctcaaacgaggataataaaacctactatatgggattgttgagagtaaaaaatacttagattagtacatagtaagtactcaatagatgttagctattactgtaatcaccgcgagaccagttaatgagagagttcttccttatccttactctatattgaatacaatttgttgcacttcgaaatatctggataaggctatagttgttgtcgtcaccgagaatgcaggagtggcaaagagaaaaatcatgcaaaggcttgctgatagcgttcacagtgacagcccgaaagtatgattctaaggttgtaagcattttatatttagaattt

SEQ ID NO: 467352 - DNA, 593 bp, Homo sapiens
aagtaataacaataataataaattttcctctaaatacaatggtgaatgaggtagaaatgttgagttcataagagaactgttgaatagtgaaggaaactgacttaattttaatgacaggaagaatactgttacacactagcaaaaatgaacttttatgctgatgtagcagtacagaatatgcttccaacccagggacgctggagccaggcttgctagctaagcgaccttggacaagttacttaaccattttattcctcagcacactcatctcaaacgaggataataaaacctactatatgggattgttgagagtaaaaaatacttagattagtacatagtaagtactcaatagatgttagctattactgtaatcaccgcgagaccagttaatgagagagttcttccttatccttactctatattgaatacaatttgttgcacttcgaaatatctggataaggctatagttgttgtcgtcaccgagaatgyaggagtggcaaagagaaaaatcatgcaaaggcttgctgatagcgttcacagtgacagcccgaaagtatgattctaaggttgtaagcattttatatttagaattt

SEQ ID NO: 467353 - DNA, 631 bp, Homo sapiens
actattgcatatattctttgacatgctcaaattttcactataattatggttgattagactaattcatatctgttgtattataaataaacacatttaggaaattcagattttgataatttactgtaaagaataatatcaagataactaagtgacactggtagaattactcttttgcatcacaaagaagtatttaattaacataattaattctaattagtattggtgtaaacatttacacatgtggttttatttcacctgtgttctatatatttatacatctgtgttagtcttattgagttaataaatattcaaatattgatggcatgggatttgaagatggttagccaatctctacttgttacaactaacaatcagatgggggagtaggaacaggaaaattaattcacctgaataaataattataaaataaggtaagatatagtaatgragaagaatgattcaaagccaggcactgtctcttattatttgcagaactttaatattatgaaagttacccttattttactttatactgtggatgatgcctggtatatataaagctccaggagacaatgttagccattattgataccatattgaagctaaataatactatgggtgttcagtgaaa

SEQ ID NO: 467354 - DNA, 604 bp, Homo sapiens
taaattaggactagaggaagtatccctcaaatcgataaataatatcatctaccaaaaaagtagagctaacagcatacatctattcaacattgtactgaagttctgcctaatgcaataagaaaagagtaaataaaagttaagtattatatacagtttaggaaagaaaaataaagctggctttgcttgcagatgacatgacagtctatataaaaaatcctgaagaatgcacaacaacaaaactgcttgaactaataagaaattatagcaaggttgtaggatgcaaggttagtatacaaagtcaattgctttcttaaattttagtaatgagcaattaaaattttcttaagacatttttttccaagtggtgttagactcgcagaaaaaaaatcagaaggaaatacagagatttcccatataaccctgtccccacacatgcatagcttactctattatccccactaggatggtacatcttctacaattgatatacctacattaacacatcataatcaccccatgtccatagttgaatttagagtttactcttggttttatasattctataggtgtggataccagcatttggtggtgttagtgttctagg

SEQ ID NO: 467355 - DNA, 602 bp, Homo sapiens
agctggacaccatcattctcagcaaactatggcaaggacagaaaaacaaacaccgcatgttctcactcataggtgggaattgaacaatgagaacacatggacacaggaaggggaacatcacacatcgaggcctgttgtggggtggaggcagcagggagggatagcattaggagatatacctaatgttaaatgacgagttaatgggtgcagcacaccaacatggcacatatatacatatgtaacaaacctgcacgctgtgcacatgtaccctaaaacttgaagtatcataaaaaaaattacagcagaccttcagtttcacctcttgataacaatgtttgctactgctagaaaattgattagcctgaggagactaaatctgaagcatctttaaccatcctccttcctaattataaaatttaactgactccttttgtgtcctggggtgttcttagaatacgaaattatattacagaagaagacctatcatgagaaagataaaccatcrtgaaataatactgagccccagttgcccactgtttagtgcatgcctgccgggtacattttaggcattccacaaatacatttttagagaatgaaagaat

SEQ ID NO: 467356 - DNA, 471 bp, Homo sapiens
gagcaggtgcatcaatcctccagccacgtcacttagtagctgtcatctggagtctgccaggatggaccctggctggccaagaacctcaagtatctgctttcttctccctctgcctcaagcactgagccagagaaccccaaacccagtggagtgtcctggccctttcagycaagggacactgctcttcccagctcccattaatcctcatgaaacctcataagggaggtgtccctacattacagatgaagaaattgaggctcagagaggtgaaatgactttgcacagccagaagtatccaggttagatcaagacctcaaatctcctaattcccaaacttgcattggttcccttccaccccactccctcactggatccccaaagagccaggcattatccactctctagttaggtggcaaatgtccagacatgaggacagtccaaggggctcagcccccactcaggatgagcatt

SEQ ID NO: 467357 - DNA, 549 bp, Homo sapiens
gaagacattgtcaagatgttgtcattgtcatcactatgtttgttgtctatactacaatgtacctcctcagcaccaaatgcactaactgggaggaggtggcatggtcacctttgatgttgccagtgccggaaaatgtaggagcccttttccttggtcacaagctcytgaagccaaagtctgctttgaaagaaggtaatggaggaagagccacaatcctagaggactctcccgtatgccccaaagagcagctccatggcagcatctaaacgtctcaggatcacaaagtcttctcaaactgtgtcagtcattcagaaaacaccagacaaagaggaggcttcagacccatcccacgccaccctcctctgccccacacccctgtccttcaatgccctgtggtcagtctgcctcccccaccaacctccccacttattccccccagtttgggccacctctgcctccagcacatgctgcccaccatgatcaggcggtgccttttgctcacaccaatctctcttcttccattcccccactcactcatcacaagttacc

SEQ ID NO: 467358 - DNA, 549 bp, Homo sapiens
gaagacattgtcaagatgttgtcattgtcatcactatgtttgttgtctatactacaatgtacctcctcagcaccaaatgcactaactgggaggaggtggcatggtcacctttgatgttgccagtgccggaaaatgtaggagcccttttccttggtcacaagctcctgaagccaaagtctgctttgaaagaaggtaatggaggaagagccacaatcytagaggactctcccgtatgccccaaagagcagctccatggcagcatctaaacgtctcaggatcacaaagtcttctcaaactgtgtcagtcattcagaaaacaccagacaaagaggaggcttcagacccatcccacgccaccctcctctgccccacacccctgtccttcaatgccctgtggtcagtctgcctcccccaccaacctccccacttattccccccagtttgggccacctctgcctccagcacatgctgcccaccatgatcaggcggtgccttttgctcacaccaatctctcttcttccattcccccactcactcatcacaagttacc

SEQ ID NO: 467359 - DNA, 428 bp, Homo sapiens
atactgttgtattgacactttttttttctctcacaaggaaatagatattatgagagatttagtggcttggctgaggcgtattttttacaaacagcggagcctaaactcaagcccaagtccaactccaagtcaggggctctctgcctccacgtgggtgaggctgtattgtacgttgatctagccatgcaggctacagtcacaccacctgaatgtgcctgatctcatctgatctaaccatacaaagtgaaagcacgggcttctccagcgtcagggaaccagggtgcaaaatttggccctcctatttrcaagctgtgtgcctttggacaaattacttaactactctgagtctcccacatgggtgtgtctcatggggttgttttaaaaagcaaacattagtatatgtgcatcacctgagccagggcatgaca

SEQ ID NO: 467360 - DNA, 648 bp, Homo sapiens
ttttgttatgcttaactgaataatttataagtatgctgatcacattagtcatgtatcacacttaactaatgaagagagcatgctaatttttcaatagtctctgcataagtcattttaattgcttcataatattccatcaagtacatgttgctggggtaattatattttagtgctctggactagaaagtaattcagtatctataaaaatgtaaaagattaattattaatacaaactaytttaatcaaatggatttagacaggttagcatatcttagtgtatagcaatgtgcttaataataccttatatttgtacagccccatagagagtaaacactttcaagcagccttgtgatctggaccgtctgggtattactgttatgttatagatgaaggagccagtcaaggctatgtgtttaagaatttgcctttagatctgacctttgcaagagccaatactggggtgcaatgtgatgttttgatacttatatacattgtggaatgatgaaacatatccatcacctcacatattttttgtggtgggaacatttaaaatccactcatttagcaaatttgaaatatataatatattgcattccataaatatatacaattatttgtcaattaaaaataaaaattcttgtaaattta

SEQ ID NO: 467361 - DNA, 575 bp, Homo sapiens
atcctcttgctgaaataattcttttagcattgtataatgaccgtattgtctttttttaatgctgtttttgactttaagtctgttttatctgatatgagtgtaggtattcctgcttacttttggtatccatttgcgtggactgtcttttcctatccctttaattttacctttcagtctatgtgtgtcttttctggcatggtgagtttcttttaagtggcttataatttattatttttaaaatccattcaacaattctttgtcttttaaatggagactttagttcatttacattcaaggttatttttgatatataaggctcatccctgtcatattgttaattgttttctggttgttttatatatatatatwttttttttctcccattgtttttcatagtttggtggatttctgtaatgggaccatttaagtcttttctttctttgtgtgattgctttatcagtgagttttatacttttttgtgtgttttataatggtgaatgtcatccttttgcttcaggtttaggcttcccttgagcattattgtagcatcagtctagtggtaacagattccctca

SEQ ID NO: 467362 - DNA, 501 bp, Homo sapiens
tttttttgctagatttacaagatggaactctaggaatttgtgtgaatttgtacttttaagagtttctctaacaatagcaaagatgtggaatcgacctaaattcccaacaatgacagattggataaagaaaatgtggtacatatataccatggaatactatgtagtcataaaaaagaatgagatcatatcttttgtggaaacatgaatggagctggagtctattatccttagcaaactaatgtaggaacagaaaaccaaayactacatgttttcacttataagtaggagctaaatgatgagaactcctgaacacaaggaagggaacaacagacactaattgagggtggagggtgggaggaagaagatgagcataaaacataacttttgggtactgggtttaataactgggtgatgaataatttgtgcaataaaacttcgtgacatgagtttacctatgtaaaagctgtcacacgtacccctgaacataaaagtttaaaaaag

SEQ ID NO: 467363 - DNA, 556 bp, Homo sapiens
ttataccccatgaatatacattattacttgtcaattaaaaataaataaatgtatcccaaaagtctgatattggacaaatgtaatgtatatacaaaatatatttgtatgtatatctacatcctcatctatctctatatgtatacagagtgtaaatatccctgtaaatatccattccaacaattcatctcctcctgttatttatctcctcctgttatgaccctcttttcttatctgtgtatttacaaatgtgactacagctcctattgagagagggaaagtatttttttccttgatggaaatggcgggatatgccttcygaataagagttctggagatggtggcctcaagcaaaagaagtctttagtcatggacaagggaagtcaggttgaagagatggctgttgctcaggggagaaaagactctagtagcataaagaccttaagatttttttgaaatggaacttccaaaggccattcatgatgcggagagctgggtttcaggtggatttggacctcctgcatgctttgagtaggccctggctactgattaaatagtg

SEQ ID NO: 467364 - DNA, 608 bp, Homo sapiens
cattgcatgtgagatgggtctcttgacggcatacatttgggtcctgcttctttatccagcatatcactctgtgcattttaagtggggtgtttagcccatttatgttcaagggtaatattgatatgtgtggattttatcctgtcatcatgttgttatatacttaagtgtatttttgtggtggccggtaatggtctttcctgtccatgtttgacatgaccttaaggacctcttgtaagacaagtttggtggcaatgaattctcttagcatttgcttgtctgtaaaggattttatttctcctttgcttatgatgcttagtttgagtggatataaamttcttggttggcattttttttctcttaggctgctgaaaataggccctcaatctcttctggtttgtagggttctactaaaaggtctattattaccctgatggagttccctttgtagatgaaagcctcttccctctggctagatttactattttttcttttgcattgaccctggagaatctgatgactatgtctcctggggatggtaatcttatatagtatctcataggggttttctgaatttcctgagtttgaatgttgacttctgtagcaaggct

SEQ ID NO: 467365 - DNA, 609 bp, Homo sapiens
ggagacctgggtaatttataaataaaagagttctaattgactcacagttatggatggctggggaggcctcaggaaatctacaatcatggcagaaggtgaaggggaagcaaggcacatcttacatagcggcaggagagagagagagcaagtggggaagtgccacaaatttaaaccatcagatctcatgagaactccctaacatgagaatagcattggggaaatcyactcccatgatccagtcacctcccaccaggcccctccctgacacgagaggattacaattcaacatgagatttgggtgggaacacagagccaaaccatgtcattcttccactggagcctcccaaatctcatgtccttctcatatttcaaaatacaattattcagtctcaacagtcccccagtcttttttttttttttttaaatggaatcacaactttaatgaaaacttgttttaagtagctgcctattttgtgccagatgttttgtcaggtactttgaatgtctttttaaatttattattttaacaaaccagtgaagtgagtattcttcttcccattttacagataaagacagtctcagagaaagtttgtggcttgtcatttacac

SEQ ID NO: 467366 - DNA, 521 bp, Homo sapiens
tatacttattcgtgttatcaaaacttgtcatctttagttatctataaactccatgaatgcagtttcttagggtgtctccatcaccccacatagtgctggcacatastaggcactcaataaatattttctgaatgggtgaatgttttaatgagtgtgtttgcatgaattttcttcctttctattctttctgctcctggagtgtggaaattggctctgaggcagcagaggaaataaaaatccccaatcagaataattgctccttccagtaactacctgcagaacgatttgtcattgtgtcatgctgatttataacaaagttgggggattagcatgttaccatcttcccctactagactgctggcaggggttacatttggttcatcattgtatccaccgtacctagcatagtacaagagctcacacatctgtttcagggagaaaaacacaaagaactaatgaaaaattacagtctacaggagtaagatctcttagctcaggcgtgaagaaattcagagcacagg

SEQ ID NO: 467367 - DNA, 577 bp, Homo sapiens
ttatatactatattatcatacacaaacatacacacgtgtgtgcatgtgtgcatgttatcatatagtatataatatgtattataagtattgaattatacactacatatattaaggttaaatgaattcataagggagagcccttattctggtaggaatggtatctttataagaagaggaagggacaccagaaagctctttctccacacacagagaggaaagctatatgagaacacagaagggagcctccaataagccaggaagagacgagttactggaaaccaaccstgcataataggaccttgatcttggacttaaagcatccagaattgtagaaaaataattgtatgctgtttagtccatccagtttgtggtacttgttatgaaaacttgagataatttatacaatataccattggctctatttctctaaagaatcttggctaatacagattttggtactaagagtggttttataggaatgacctggataaatcttattttttggttctgaagtttctgtattgggctcaataatttgattaaattcagacactattaattatttccagtagtaata

SEQ ID NO: 467368 - DNA, 547 bp, Homo sapiens
atttgttctaatactccaaatattgattttcttagttcctcgctgattgcattcaaaacctcagtgtgctcacccacccttgctgtcattagtcttacctagttgttyctgcaaccacactggtgaagatcgtctttcccatacacctcttattccatatcagaatgtctgctccctgtcctgctaggctttaatctctatctctaatctttattaacagaagcaagcaaaaacagttttctgtaatttcagaaataagattgggctgctactcatgtggtctcagggtgcttctgggtcattaacgtaagctgaagcacatttttttaatgtaatttttcccagtatagctgagatcagaatatatgtttcaaagtgaattaaatgaaagcttttcctttattaattcctttttattttctttagtttcattttttctttttttttctatttttattctgttatttgaatacttgaacacttgaagtaattaatgtagctgttattcctctttttatatgtacttaattaggtcagtgatactgtg

SEQ ID NO: 467369 - DNA, 547 bp, Homo sapiens
atttgttctaatactccaaatattgattttcttagttcctcgctgattgcattcaaaacctcagtgtgctcacccacccttgctgtcattagtcttacctagttgtttctgcaaccacactggtgaagatcgtctttcccatacacctcttattccatatcagaatgtctgctccctgtcctgctaggctttaatctctatctctaatctttattaacagaagcaagcaaaaacagttttctgtaatttcagaaataagattgggctgctactcatgtggtctcagggtgcttctgggtcattaacgtaagctgaagcacatttttttaatgtaatttttcccagtatagctgagatcagaatatrtgtttcaaagtgaattaaatgaaagcttttcctttattaattcctttttattttctttagtttcattttttctttttttttctatttttattctgttatttgaatacttgaacacttgaagtaattaatgtagctgttattcctctttttatatgtacttaattaggtcagtgatactgtg

SEQ ID NO: 467370 - DNA, 631 bp, Homo sapiens
gatataaacaatgaagttcaggatgagatggtctcagatggagatgaggaacttgttgaaaactggagtaaaggtcagtttgctatgcaaagaggctggctgcatttttcccctgccctagagatctgtggaacttgaaccagagagagatgaatttagggtatctggaagaagaaatttctaagtggcaaagcattcaagaggaagcagggcataaaagtgtggacaatttgcgacctgacagtgtgatagaaagaaaaacaaattttctgatgagaaattcaaactagctgcagaaatttgcrtaagttacaaggacctgaatgttaattaccgagagaatgaagaaaatgtctctaaggaatcccggagaccttaccaatagttcctcccatcacaggtctggaggcctagaaagaaataatgttttcatggaccaggctcagggcccacctgctttgtgcagcccccagacatggtgccctgagtcccagctgcttcagctccagctgtggctaaaagaagccaagatacagctcaggccattgcttcagaggttcatgaaagccccaggctttggcagcttccatgtggtgttggtcctgtgggtatgcagaagacaagaattgag

SEQ ID NO: 467371 - DNA, 600 bp, Homo sapiens
acttcagcagctgagagttgatcctcaccagggttctgcctacaaaaacattcaaggaacacctctctcagcagtactgattttaaatcaggggttctgaaaattggaaatcttaaagacgcaaagggcttcttctttctggtaggatttcagatcctgtcatgggaggcagatgtgcactggtcaagtaaggacctactggacgtctcttataatagagtgccaaagtcaaggtcaggtgatgggtgcatagacaccccctcacccacagtctgtccatgggacatggtatgcaggggacattttattttttgacaggagkaaggtttttctttcttggttgggtagctgccttggtgacattctgtctttatgtatgtgcatgtgtatgttgtgtgagacacagtgcacacaggcatgaaggacagacaggtggacactgggcagcatctgtccccttcccagccccatgaacacatgctgagagcttaccacggggagatggggagggcagagcagagaggcctgggagcacagcgttgctgcttcagggcccagggacagagcaaaacgcccagctgcctatggaaccagcaccac

SEQ ID NO: 467372 - DNA, 573 bp, Homo sapiens
tcactaataaggccgtcatgaggtgcattgtctcttgccatggagacttggtaagacagatgccactaatccagaagtaccatcttcacccctgactgcattccctattgcagagctgcatttccagagcactgactgtgtactgatgtccttgrattttaaaatagcttgcttgtggctggttatcgccgttatttacctcttggtgcccctgagtctaaggatatgggttgggttctcaaagacaccaagaggagttgactcagttttagttggccagaagctacagctttgaccttgcccactgacccaacataggcatatcctcaattatgctagtggacagagtgtgtctgtgcatctgtgtgtgtgtgtttctgtgtgtgtgtgtgtgtgttactaccccagaaacggcaactcaaagtacatgttccatgtttaagaaggttgccagcagctgttgaggattgattcaccccttatgcacaatttaacatcaaaccaaggtctgggacacatctttttccattagcatctcttaaaaatactatccaatcctaagaacgaataagt

SEQ ID NO: 467373 - DNA, 535 bp, Homo sapiens
aagttgtttggttttcatatatttgtgtcattttgagagttcctcttggtatcaatttttaattttattccacggtggtatgacaggatagttgtgaatattttgaatttattcattacggccaagcatatggcctattgtggagaatgttccatgtacagatgagaaaaatatatatcctgcagttctggggttgaatgttctgtaaatgtgttaagtttatttggtctagagtgcagtaagtacacagtttctttgttgattttctacctcagtgatatgtctagggctgttggtgggatgttgaattcccycactgttattgtattgctaccaattccttttcataggtttcatagtatttgttttatgaatctaggtgctctggtgttgtgtgcatatatatttagaattgtgatatcttcttgtggaatcaaacaatttatcattatataatgaccttgtttgtctttctttcttttttttttctttctttctttttttgagacagagtctcgctctgtcacccaggctg

SEQ ID NO: 467374 - DNA, 576 bp, Homo sapiens
taggataatagtggagagaaggtcagcagataaacatgtgaacaaagttctctggttttmataggcagaggtccctgcggccttccacaatgtttgtgtccctgggtacttgagattagggagtggtgatgactcttaacgagcatgctgccttcaagcatctgtttaacaaagcacatcttgcagcacccttaatccatttaaccctgagttgacacagcaaatgtttcagagagcacggggttgggggtaaggttatagattaacagcatcccaaggcaaaagaatttttcttagtacagaacaaaatggtgtctcctatgtctacttctttctacacagacacagtaacaatctgatctctctttcttttccccatatttcccccttttctttttgacaaaaccgccatcatcatctgcgaaggtatgtataggagggctttgaggcctatggtgaaaaagaaaatatcttcagataaaaactagaaagaagctttctgagaaactgctctgtgatgtgtgcattcatctcacaggtttcaacttttctttggattcagcagtttacaaacac

SEQ ID NO: 467375 - DNA, 576 bp, Homo sapiens
taggataatagtggagagaaggtcagcagataaacatgtgaacaaagttctctggttttcataggcagaggtccctgcggccttccacaatgtttgtgtccctgggtacttgagattagggagtggtgatgactcttaacgagcatgctgccttcaagcatctgtttaacaaagcacatcttgcagcacccttaatccatttaaccctgagttgacacagcaaatgtttcagagagcackgggttgggggtaaggttatagattaacagcatcccaaggcaaaagaatttttcttagtacagaacaaaatggtgtctcctatgtctacttctttctacacagacacagtaacaatctgatctctctttcttttccccatatttcccccttttctttttgacaaaaccgccatcatcatctgcgaaggtatgtataggagggctttgaggcctatggtgaaaaagaaaatatcttcagataaaaactagaaagaagctttctgagaaactgctctgtgatgtgtgcattcatctcacaggtttcaacttttctttggattcagcagtttacaaacac

SEQ ID NO: 467376 - DNA, 535 bp, Homo sapiens
atcccttcacggactctgcaaaaacagtgtttccacactactgtatggaaaggaaggtttatctgtgtgaggttcatgcacacatcacaaagcagtttctcagatagcttccttctagtttatatccttggatattcacttttttgccattgccctcaatgagttcccaaatgcccattcgctgaatggacaaaaaccacgtttgcaaaatgcagaatccatagaacggtttaactctgtgaaaagaatgcacacatcacaaagcagattctcaaaaagcttctttctagtttttatctgaagatatttcctttttcatcataggcctccatgtggttataaatatcactttgtggatcatgccaaaatagtgtttccagactgctgaatgaaaagaaagatttatctctgtragatgaatgtacacatcacaaaatggtttctcagatagcttccttccagtttttgtaatgggatattcgcttcttcccctttgacctcaataagctcccaaatatcccttcacagattctaa

SEQ ID NO: 467377 - DNA, 193 bp, Homo sapiens
tgttataagatattttacaactatgaaagttgaaaaataactttattggttttgctgcatatagctgcctgtctrctataagagaactaatccataaaattaaggcattttgttatttcaagtgtagaggggcaagaacataagggaattataaaaaccccaagatgactcatttaaagtagatgcacattaa

SEQ ID NO: 467378 - DNA, 193 bp, Homo sapiens
tgttataagatattttacaactatgaaagttgaaaaataactttattggttttgctgcatatagctgcctgtctactataagagaactaatcyataaaattaaggcattttgttatttcaagtgtagaggggcaagaacataagggaattataaaaaccccaagatgactcatttaaagtagatgcacattaa

SEQ ID NO: 467379 - DNA, 621 bp, Homo sapiens
acgtacctgcaaaagggaactcagagaattgttcctgtcacacatactgtgtatggcacctaaggggttgatggatagacacagtagaatttatttaaaacacaaatgtcaattctaattatataaagactttggcttctgtagtgaagattatggagaactttggtattcaaagaaaagtagttctccaagctatcccaagtttcaactcaggagtatcaccactacagataaattccctgaagtggcaatacaatattactgaaaaaatatagggccctttcatatccttaataagcaagacgatagagttatggcaaaagagggtaagtcgggaccaataaagtcacattgaaatgagaaaattaagccatcggtgaggttcactcattagctacataattcattctcacaaagcatagaaattgtacttcagcaaaattataaattactggagctatcaaagtttcaggtcatctccaggtgatgaaatayagttatcaatgccagcatcaccttcatgcattacttcaatcatgtatccagaaaaacttttagcagctgcaaagtttccagtgataaataagactgaattctaaatgtgatgagatacctgtccat

SEQ ID NO: 467380 - DNA, 588 bp, Homo sapiens
aagacttccttttccttttcactgaaggtatacttatcagtgaattttggtgtagctcttaaagattataaatttgccaatgatctctcattttctaagaacaaagcaaaaaattccagatctctcagaggcatttgaggctacctagaaatcatgtttatctcatctgcctacccacctatccatctatctactgatctatctataaacgtatctataatctgtctatccccctataatctgctgtttatttccccatctttctgcaagttatgagtttgccaagtctgcacakggcaatctcttcataaaaaaataaagaaaataaatgatactctccttcatcaggagatctgtgctatctcatgtttgcaagtattaatcgtgagaaaggtaattgataaagtctcctctacaagaaaccagctgggaatctgtgtgctgcaaaatgaaatgcttgggtcatcatgggaacatgagtgcaggtgtcaaccttcttcccatccttgatcccttctaaacaaggctactccactcccactgttggagaccaaagacctttctgaactctgcgatgggaatgaaaac

SEQ ID NO: 467381 - DNA, 559 bp, Homo sapiens
gggtgcaatactgcatatcttcagcttcttcagttttgtactcccattactttggtcctagtcttggttatactcaaagggcagatttcacaaatgaactctagactcctcctgggcccaggaagtttgtcctgcttaccatggccataatctgtaggcaatgactctccatccctgagacccattaatttaactaggatgataaacagaaaaataaataaaggtgttgtgatatggggaagaaaagcagcatactgaggtcagcctaccttacccgtgggccccaattgtcctgggcaagttacttttcctttcttcgcctcagtttccttatctgtaacatcagaggctgagcaggatgatcttgtgggtctcttcaaactctgagattctatgagtctatacaaagagtgtttatccaaaccaagaacagaggagaagaaatggcaccaatattggaaccatgaagtcctgggtttaaattgtggctctattatctactacctgggtgcatctatcaggtaggattcaccyggttgcaagtgacagaaaattcaaa

SEQ ID NO: 467382 - DNA, 534 bp, Homo sapiens
attctgctttaactcttggtttgctctgataaactcattgttttgcggacctttgcttaatgcggattatctggttttctggggatcagaatcataaatctgactactcctgtccaggctgggaggtgcacgttggtcttgatcactaccccgggcagttgcctgctgtgacccctgcttcttttcttccagaatgtattaggttgatgcaaaagtaattgcagtttttgccattgaaartaatggcataacctgcattacttttgcacctacttaatagaatacaaagataccccaatccgcttaggggatggtagagaaagaaacaaaagaaggagcaccttggcaatgaagctacagaaaggagggctggagatggggagtctccctgctggagagtctgcctctccttctttgcagttgaattgaggagtgttttaagcctactttgtttgccatcaacatcaaaatgtctttcttgattgtaaacttctggaaagtgagacagagaacatgtgtggttacgcaaatggc

SEQ ID NO: 467383 - DNA, 595 bp, Homo sapiens
aaggtaaacaaaaacctttcattatcttttaatattatataaaaatcatttttaaaagagaaaaccaaattttatgtttccrttagtgtatttttaatgttaaagctagtttttaatatttcataaatatattcagttttaattactttgaccataaggtaagatttttataaaccttttataactcattagaattttttttctcagaacagaacaatgttccaagaaaactttgttatgcttttattcccatgtccaatttagggaaaaagcaataatgccattttatttagccaatatattcacacatagaatctcttacagttaattttttataaaccttccacaacctgttcaaacctttagctttgtataatttaaaacaatcctttaaccctctaacctaggcaaaaatttacatttccatatgttcttataatctcttacaaaaaatacatttaattctccttacataccttgcatgtaaacctatttttttcagtaggctcaattacatattacagtgttaactcatagcaacttttacttttggtaaaaaccttggtgagtaagggattttaattatgtactaggt

SEQ ID NO: 467384 - DNA, 648 bp, Homo sapiens
catttcagaccttccttatgggaccttattctttgtttgtttttgaagcccaacctttagaagctgttttatgaggcttatttagaagtaaactctttcaaaatctgctcatttgtctttattttgtcctcattctcgaaagatactttagccgtataaactattctccattgcccattattttctctgaacacattgagggcgtttcactgtgttcttgctttgctcattgtttytgtggctcagctagctgtcagtctgaatgttccttcgtaggatgtgcgcttgtttcttctagatccctttgagcactgtagacgcaggtcctctttatagtacaattttggcttgtgtattgaggttcgcataaacagtatgggcttaggttcccaaccatggcagcccagtgggtaccacattaacaggggtgaagtttttactttttctccatctttatgaaaattgagacaggagttaggtagattgtttttccattctcaggggtctggctttatgcagatggtctcaggtttgaactctaggccacaggacactgggtgtggtcccagggagtctggtggcttcaatgctagctttcctccctgtgctgtgctcctgcctaggtcctgcccacatggacttccttca

SEQ ID NO: 467385 - DNA, 568 bp, Homo sapiens
cagttatttagcttcttctagtgatgaacactttgagaatctgatgaactaaagttatcagatggtctgatgctcagagcccattacctctaaattataaagatcaataaatacccccaatgcttagcggttgacatttgtataacattttctactcttgaagggccctaggtctttgttcttccactaaatatcagtgtgacctccagcaaatcattgaacttttatttgtctcctatttcttatcaagaaaagtatgtgttaaatccttttggctctagcattctatggtgttatctgcactatcttatttgatccaacatccttctactcctcaccactgttgctatttctatagatcctgctgacaataactattccctatctacctctggttcactctgtataactgagaaatgacagtccagtagcaagtactcacacccacgmagcctcacacagtgttccctggccttcatttaataaatacatttttcattacttggccttattttattaataagcacattttttttttaccttttgtcagcaactctaaagttttgca

SEQ ID NO: 467386 - DNA, 613 bp, Homo sapiens
gttctatatttggggaaaagagacttccacaaattttctaactgctattctactgagtagccactcagatttctatttttggattgtcattatgattattttatttatacatataatcaaattacaagggtttttcctcacacactaccttgcaacagcctttggaggtagccagagcagggatcatattttcaatgtcattataaaagcaaaaaagccaaagctaagagagatcgaacttaaccaagatcatatggctagtaattgatgggtttacacctcattgtttctcctttacaactttaaaaaagagaagtccaggacagcactattgttcatgtattattttctctttggtacaatgtctaggatatgatatcaaatatctagatacaaatgtacttccctaagggtcttccccagcctattagaagaaagaaaagaaataagaagtaaaaacaaacaaaaaaaccaccatagccccgttatcctcttattgatagagtgaaattagtctcttagaaccaattagttgtagagaaggacgtgcatttcamtggttgtgagcaggggagaagggcaaggagggaggaagggaggaagatagccataa

SEQ ID NO: 467387 - DNA, 586 bp, Homo sapiens
accttacaagccagaagagattgggggcctatttctaacattcttaaaataaattccaacaaagaattttatgtctggacaaactaggcttcataagtgaaggagaaataagatctttttcagataagccatttctgagggaatttgttatcatcagatctgccttacaaaagctcctgaaggaacactaaatatggtaaggaaaaaccaccatcagtcatgacaaaaacacattgaggtgcacagaccagtgacactataaaacaaccacataaacaagtctgcaaaataaccagctaacatcatgatgacaaaatcaaatctacacatgacaatattaaccttaaatgtaaatggactaaatgccccaattacagaaaagacacatagtggcaagctggataaagaaccaagactcactggtatgttgtcttcaagagacctatctcacaagcagtgtcgcccatggggtcaaaataaagggatggagaaaagtctaccaaacaaatggaaaactgaaaatagcagcgggttgsaatcctaatgtcagaaaaaacaatatttaagtcaaaaattatcagaaaag

SEQ ID NO: 467388 - DNA, 553 bp, Homo sapiens
gattatgaatgtaaagcaaaataacatcattaagagtgttttattttttgagacagagtctcgcactgtgaaagagtgttttttttttaccaattgtctacataygcaagatgcattatcacatactgaaacataaagatgaaacatttccatttccatctattacatgggtgtttgcaaagatctccatgtttatcaacatgcaggaaaaaaatcccaaacattacatttgtttttcgctttctactcagtcgttttgtgaaccatgtagacagccaaaatcaccagaaagcactctctgtctctctccgtctctctctgtgtgtgtctctctctcacacacacacactctccacctgagctggagtaccctggctgagcccaggccagtgacctcctagctgcccttcctaaaaaatctctgtctccagcttgtggatggagttggggagagctgcacacgagccacacaggatagttaaggatgaacagcattggcagcctacaccccaacactcctattttacttgggatgaaaggggaagtgccacta

SEQ ID NO: 467389 - DNA, 588 bp, Homo sapiens
cattcaaaccatagcacaggaatcaccaaaaacaatgttgagtagttctatgaggtcactgaaagtaagcagtgcacttcaatctggagtagcctttgttgtctgtgtctgaatagtcacaaacacccaccaggtgaacagctccaagttccagattgggaaactggactgctcacgtggatgtttccccttttcctattactttttttgaattttttaaaattttacttgaagttctgggatacatgtacagaatgtgcaggtttgttacatagatatacatgtgccatggtggtttgctacacccatcaacccatcatctagattttaagcctggcgtgcattaggtatttgtcctaatgttctccctttccttgcctcccaccccacaacaggccctggtgtgtgatgttcccctccctgtatccatgtgttttcattattcgactcccacttatgagtgagaacatgcrgtgtttggttttctgttcctgtgttagtttgctgagaatgatggtttcagcttcatccatgtccctgcaaaggacatgaactcattcttttttatggctgcatggtattccatga

SEQ ID NO: 467390 - DNA, 586 bp, Homo sapiens
gccactgtcctccaggccccagaatggtagagcccttgacagtttgcaccacatgcctggaaaaacctctagcactcaacgccagcccatgagaacagccatggaggctatacactgtaaagccacaggggcagaactgcctaaggccttgggagcccactccctgcatcagtgtggcctagatgtgagatatggagtcaaaggagattattttggatctttaagatttaatgactgccctgctgggttttggacttgcatgaggccygtaaccacttgcatttggctgatttctcccttttggaatgggattatttacccaatgcctacgcctcattgcatcttggaagtaactatgtcgtttttgattttgcaggttcataggcagaagaggctagccttatctcagatgagactttggacttttgagttcatgctggaatgaattaagcatttgtgggggacctctggcaagatggctgaataggaacagctcctgtctgcagctcccagcaagaccaatgcagaatgtgggtgatttctgcatttccaactgaggtacaaggctcatcccattgggactggt

SEQ ID NO: 467391 - DNA, 636 bp, Homo sapiens
aaaatacacctgtgtcattcaagaaagtaaattttaacaaacactttaaatatgcttccctgcagtctcgatacccacattaatctttttgtaaaagaagctgkctcatatgctttatgcagtttcctaaagtggatgaatgctaaaggataaataaagctagaaattacaaaaggtaatattacaaatctaggaacagaaaaaagcttaaagaaatttacaaggaaggactggtttaaataagttaataacttggaatacttctataatgtaaaataccttcctttatatcatccaaatttccagatgtgtcatgataaataattatactacagcagtatgattgttattataagtacaccatttattcaaccaaatcatcaggcaaatctttcataaagtaattaagtgctgtttttgattatttctctttgaaaggtaaggaatggtgaaaacatatgaacacatttgaagagagcaaaagaatacctcttcagaagagaacagtgtttccgattgttatatttagatataataagaaacagaagcaatagagcaaattagactccagcccacgctactggtggaacaaacaagtcatgagggagctgggatgctagcagaaaaagcaggcta

SEQ ID NO: 467392 - DNA, 508 bp, Homo sapiens
tatttaatttcatatttgatcagatatatcttcaggttaatttcctgcaatttgtatcaatgggtcaaaagatacctataattaggaagatagtgtcagactccctttatatatattgtgcctattctcatgctgctgataaagacatagccgagaatgggtgatttataaaggaaagaggtttaatagactcacagttccacacggctggggcctcaaaatcatggaggaagacaatkcaagagcaaagggatgtcttacatggtggcaggccaaagggcttgtgcaggggaactcccatttttaaaaccatcagatcttgtgagacttattcactaccacaaaaacagtatggaggaaacttctcccatgattcagttatctccacctggcctgcccttgacgtgtggggattattacaattcaaggtgagatatgggtggggacacaaccaaaccatatcattgccatttagtacttttaccacaaatgcatggtaatactagtt

SEQ ID NO: 467393 - DNA, 510 bp, Homo sapiens
taattcatgactgcccatgggattcatgctgagaagatatacaatttccatttaatttccatttastgaaaattaaattaaatttagtgagggctcatcactaccctcataaaatggttcagagagtaagcgaagaatagagtgtgagcttacagcaagtggagaccatctcttctcctccaatgtcccacagctccacagcccacctgtccaggttctatcaaggaattttagctcctgcccagtaaaggaaacagttgagtgaggagagaacctgcagatgatagacaatatctgaaaactgttcatttgacaagggattactataaagcatataaaattaactgaactgcaattaataatctgaataataatgggcaaataacatgaatgaacatctgtcaaaggaagacgtggaaaggatcaatagatagatagatgataagtatatatgcacacatatattgctagacagcactaatattcaggaacatgcaaattcacaatgag

SEQ ID NO: 467394 - DNA, 603 bp, Homo sapiens
gtctcaaaacaaaacaaaaatttacaaacttttgtacaacaaaataaatcacgatcaaatttaaaaggcaacatgtggggagaatataattacaatactaagaaaaattggcatycagattctttaaagaacttctataaatcaatgtaaaatatttttactatcacgatactactggtaacctgcaagcagcaaccaaccagaagacagcaagactaatatgaatgaacacataaaaaagaggctgctctcgtacataccagctgaatattagccctctaaacaacctttaacaaaatcaacaaaatattatgtgaacacagaataatgtaaaccccctctcagcacaaaagaaaaaaagtcagatttgaaatgattgttttccttcaagcaaggaattagcattagttaatagaaaactgatgctaacttctttaataataacattttaggttggacaatgtgaaatggccatttttaaagcaaaagatggttaaaaactggcaatttcaaatgattcaacctctatattcttaagtatggtactgtaaattgccagtatatatacaatattccaacctgtagagctaaacacagaacctg

SEQ ID NO: 467395 - DNA, 603 bp, Homo sapiens
gtctcaaaacaaaacaaaaatttacaaacttttgtacaacaaaataaatcacgatcaaatttaaaaggcaacatgtggggagaatataattacaatactaagaaaaattggcattcagattctttaaagaacttctataaatcaatrtaaaatatttttactatcacgatactactggtaacctgcaagcagcaaccaaccagaagacagcaagactaatatgaatgaacacataaaaaagaggctgctctcgtacataccagctgaatattagccctctaaacaacctttaacaaaatcaacaaaatattatgtgaacacagaataatgtaaaccccctctcagcacaaaagaaaaaaagtcagatttgaaatgattgttttccttcaagcaaggaattagcattagttaatagaaaactgatgctaacttctttaataataacattttaggttggacaatgtgaaatggccatttttaaagcaaaagatggttaaaaactggcaatttcaaatgattcaacctctatattcttaagtatggtactgtaaattgccagtatatatacaatattccaacctgtagagctaaacacagaacctg

SEQ ID NO: 467396 - DNA, 429 bp, Homo sapiens
cctcattcaaacccggccggcctgagtggtgtyagctcagtcccggccgccgccgcgtgaggaaatggcctaggagccggagccgcaggtaaagggggcgcgccccccgcccgcgccagccggggcgcccgcccggtcctgcggaggctcccgcgccgcccccgaggcgcccggctctcgttgtcttgtccccccccaggatgacctgagttccccgtgtctgctttctagccgctcctctagggcgccccctccccagctggctcctgcgcttccgcccacgggaaggtgcgggcgatcccgggctgcatccgctcttggccgtcacactcacgctgcacgatttagaagggcttggggtgcggggttccctgagtctccgccgggagcgggggtccgggggtctgcgggggtgggcggtggggtgct

SEQ ID NO: 467397 - DNA, 429 bp, Homo sapiens
cctcattcaaacccggccggcctgagtggtgttagctcagtcccggccgccgccgcgtgaggaaatggcctaggagccggagccgcaggtaaagggggcgcgccccccgcccgcgccagccggggcgcccgcccggtcctgcggaggctcccgcgccgcccccgaggcgcccggctctcgttgtcttgtcccccsccaggatgacctgagttccccgtgtctgctttctagccgctcctctagggcgccccctccccagctggctcctgcgcttccgcccacgggaaggtgcgggcgatcccgggctgcatccgctcttggccgtcacactcacgctgcacgatttagaagggcttggggtgcggggttccctgagtctccgccgggagcgggggtccgggggtctgcgggggtgggcggtggggtgct

SEQ ID NO: 467398 - DNA, 429 bp, Homo sapiens
cctcattcaaacccggccggcctgagtggtgttagctcagtcccggccgccgccgcgtgaggaaatggcctaggagccggagccgcaggtaaagggggcgcgccccccgcccgcgccagccggggcgcccgcccggtcctgcggaggctcccgcgccgcccccgaggcgcccggctctcgttgtcttgtccccccccaggatgacctsagttccccgtgtctgctttctagccgctcctctagggcgccccctccccagctggctcctgcgcttccgcccacgggaaggtgcgggcgatcccgggctgcatccgctcttggccgtcacactcacgctgcacgatttagaagggcttggggtgcggggttccctgagtctccgccgggagcgggggtccgggggtctgcgggggtgggcggtggggtgct

SEQ ID NO: 467399 - DNA, 533 bp, Homo sapiens
acttcttgttattgtcttgtcacccttagtagcaggcacatacttaggaaagtcagatttcctgtgtatgagacatactagagtggaccaarggaagaaaatcctatgcagagcaacaagcgagtagcagtggacagggagcagtggggcccttagggaaaaaaaacagagctaatggccctggcagggttcctcacacccagagctctaccaccatgtgaggctaacactacaagcccacacccatcatcacattgtatggggcagtttcttgaccctgtgtgagagcagagaagacacctataatggcaaaaacaaggcactcatgaagggattttagtgtcaggaaatgagatggggtcaaggggatttgtatatagaaactgcagctgaatttgaaataaagtaaaccaccaaatgcttagtttgtgctgtattcaattgtaaagaactaaacatcgcttgtgagtaattcaaaccagaaagtgaagtccagaatgtcatattggtgttggacgatacatatatatatt

SEQ ID NO: 467400 - DNA, 533 bp, Homo sapiens
acttcttgttattgtcttgtcacccttagtagcaggcacatacttaggaaagtcagatttcctgtgtatgagacatactagagtggaccaaaggaagaaaatcctatgcagagcaacaagcgagtagcagtggacagggagcagyggggcccttagggaaaaaaaacagagctaatggccctggcagggttcctcacacccagagctctaccaccatgtgaggctaacactacaagcccacacccatcatcacattgtatggggcagtttcttgaccctgtgtgagagcagagaagacacctataatggcaaaaacaaggcactcatgaagggattttagtgtcaggaaatgagatggggtcaaggggatttgtatatagaaactgcagctgaatttgaaataaagtaaaccaccaaatgcttagtttgtgctgtattcaattgtaaagaactaaacatcgcttgtgagtaattcaaaccagaaagtgaagtccagaatgtcatattggtgttggacgatacatatatatatt

SEQ ID NO: 467401 - DNA, 533 bp, Homo sapiens
acttcttgttattgtcttgtcacccttagtagcaggcacatacttaggaaagtcagatttcctgtgtatgagacatactagagtggaccaaaggaagaaaatcctatgcagagcaacaagcgagtagcagtggacagggagcagtggggcccttagggaaaamaaacagagctaatggccctggcagggttcctcacacccagagctctaccaccatgtgaggctaacactacaagcccacacccatcatcacattgtatggggcagtttcttgaccctgtgtgagagcagagaagacacctataatggcaaaaacaaggcactcatgaagggattttagtgtcaggaaatgagatggggtcaaggggatttgtatatagaaactgcagctgaatttgaaataaagtaaaccaccaaatgcttagtttgtgctgtattcaattgtaaagaactaaacatcgcttgtgagtaattcaaaccagaaagtgaagtccagaatgtcatattggtgttggacgatacatatatatatt

SEQ ID NO: 467402 - DNA, 579 bp, Homo sapiens
aaaaggataagcatatgagcaaagaagcaaaacctggggagtagcagggaggggaccaggagcggtgactcaaccgggcagggaaaacaccacgtacaacagagggtgagaattctgtgctcagcaaagaggagaactcactcagcatttccctcaattttccctcaagaactttcctgtgccaggaaagttcacaatggagaatctccagctccaggtgggaccccaaaagaggcagggggactttaggccataggtcttgtgcacaaggtttttccccagttcctacccctttcctttcctctctgtccagcaaacctgcttgtttctgtcacctgccttcctgtccttggggtaagaatggatgccttgacactcagcagagggatgctctttcagaggaggaattagtttgtgtcatctgactcctgagcaggaaaatcatgcctgggaagaggttccaagacagaggtccgccgtggttcctgccccttatatgtgcggggctcctggcacatgcacrcttctcctcaaactctgtttacaccccagcaacaatgctgggtgttgtcagcccct

SEQ ID NO: 467403 - DNA, 570 bp, Homo sapiens
tctggaagtgtggtggtgggggttgatttccctgctctgcattacttgagttacagccagtcctgggaccaacctccacacagctgggattgtggctttaacccacccatgtgggcttggtgtactgaagataaagctccagtgctggagaggcacagtggctactggcccccagaggagggcacactcaagagatgactctgttctccagatggtgctgtgttgctgcagcttaagcctctgggggtgggaagtcttcaccttgtactcctagtccaggacatgcagctgtgtcaattcttggcaatactccaaactggcctgagggcttgcaaagactgtgagattctcctgttgtaaagactttgtgtttgtgatggcagtggggctggtggggatcttctgcctaccttcaccctgcaatgagaagtccctcctgtctctgggccaattcaatccagatggggcagaaggggctgcacaggctgagtgcttccatrctgtggcaactttcagtcaccacagatgtgtctccactcctttgctgcactccaggactatccctttgat

SEQ ID NO: 467404 - DNA, 532 bp, Homo sapiens
tgtttgagctccttacatattctggttattaatcccttttcagatgggtagtttgcaaatattttctcccattctgtggactgtctcttcactttgctaatcgtttcctctgctatgaagcagttttttaacttgatgtgatcccatttgcccatttttgctttggtagcctgtgcttgtcaggtatagcccaagtaatttttgctcagaccaatgtcctggagattcttcccaatgttctcttgtagtatagttgtttcattgaggtcttagatttaagtctttaattcatgttgatttgatttttgtatatggtgagaggtaggggtctaggtgcattcttctgtatgtgtatatccagttttcccagaaccatttgttgaagagatgtcttttgttcaatgtaygttcttggcacatttatgaaaaatgagttcactgtaagtgtgtgtggatttgtttctgggttctctattctattccagtggtctgtgtgtctgtttttatgccagtgccatggtgttttggttat

SEQ ID NO: 467405 - DNA, 559 bp, Homo sapiens
tctccttgttttatgccaaggtcaaagaaatcatgacacaggaaaggatcaaaatgccaaagaaaacaaatattcttcttaaatgaggaaatgcagcataggtttagaaaaagagcaaaagtcctttggaaactttaatatttttaaattttataatctcactgtcgtcacttaattttttagtcgacagaggcattttacctctttatttagacctcatctgtaatcttggaccatatctaacataggaagttcatgctctatttcgcactttctagatacatcgattttgaacttgactaaggaaaaatgaaagaaaactagctacagtagaaaaagaacgggttttagagataggtatgggctcaagtccaggtacttactagctatgtgagtytgggcaaatgatttgcatcaaagaatcgtcacaaagattgactataataataaatgtaaagtgcctagaatactagcaactgcttcgctcagaaagaatttttctcctcaatacagagtagaagcttccatctgagactttctgcaaatccattaaaataca

SEQ ID NO: 467406 - DNA, 541 bp, Homo sapiens
agaacaaagtaagcaaaggataaagtagaagaaaaagttagaaagaaaactgaggccttgcagaaaaacttttttttaattttttttttttttttgagacagggtctcactccctggcccaggctgcaatgcagtggtgtgatcttggctcactgcaacctccgcctcccgagttcaagggatcttcctgcctcagcctctcgagtagctgggactacagacatgcaccaccacgcccaactaatttttgtattgttagtagagacagggtttcactatattggcctggctggtcttgaactcctgacctcaagagatccgcctgccttggcctcccagtgtgctgggattacaggcatsagccaatgcacccagcctttgtagaaaatcttaagtgcattggctttaatacagcttgaaatatgaagcagttgccagcttttaactagcagaatgacataaaatgatttgctattttaagggatcactttagctgccctatagattatagactcatgaggtgatggggagcaaagttaga

SEQ ID NO: 467407 - DNA, 544 bp, Homo sapiens
agttctctgccactgatccagttattttgagaaattagacctccatgattttaatcatgaaaaactgaaagatgactattgcaaattaatggccatgcaaggcatcagtggtggaaggaatgcttccccattagtcctgttcagtggcttttccgtgccttttttcctttttaaataattgttttccatttttagtgaatatttctacctggagatatgtaatttcctttctctatggtggctgtttttttttttctccagtggtgccttttttcatctggtgatgtcacaatacyatacgagctgtcccctgacatagttgaattcctgagaatgctagataaattctgaagtgactgttcttgtcactgttcgtgttttatgaatgtttctaaaatgtttctgcaacatctaaacaataaataagttaacttatagctccattgattattatttacaggcaattgaacataaacccttttcaggaagaaagattctggaataaattaggaataattggattaaaaaaaatcttggtcaggcc

SEQ ID NO: 467408 - DNA, 544 bp, Homo sapiens
agttctctgccactgatccagttattttgagaaattagacctccatgattttaatcatgaaaaactgaaagatgactattgcaaattaatggccatgcaaggcatcagtggtggaaggaatgcttccccattagtcctgttcagtggcttttccgtgccttttttcctttttaaataattgttttccatttttagtgaatatttctacctggagatatgtaatttcctttctctatggtggctgtttttttttttctccagtggtgccttttttcatctggtgatgtcacaataccatacgagctgtcccctgacatagttgaattcctgagaatgctagataaattctgaagtgactgttcttgtcactgttcgtgttttatgaatgtttctaaaatgtttctgcaacatctaaacaataaataagttaacttatagctccattgwttattatttacaggcaattgaacataaacccttttcaggaagaaagattctggaataaattaggaataattggattaaaaaaaatcttggtcaggcc

SEQ ID NO: 467409 - DNA, 539 bp, Homo sapiens
agaaaaaaaaaagcttgagctgacagatatcccatttaccttgtgtgattatgacacattgtatgcctgtatcaaaatatctcatgtatcccataaatctatacacctactatgtatccataaaattaaaataaaatataacacacatgtattatcttacaatttcagtccaagcatctaaaggagagggtcactatgaatccaaattgttttaagcatatgaataggtgtcaacaaacatgaattgaacacttaatatttgcaatgtcccacatcatacattgtagaaaactaaaataaataaaccatagtccatgcwgtcaaagagctgacactctagcagaagagaaacagggacatagttacaaatcactataataatgtagaatgcaataaacatcgctgaaaaaaattatagatgacacaaacaaatggaaacacatcccatgcttgtggataagtcaaatcagtattgtgaaaatgaccatactgccaaaagcaatctacaaattcaatgcaattcccatcaaaataccact

SEQ ID NO: 467410 - DNA, 540 bp, Homo sapiens
aagtggggagagcaagaatgaactgaaacctgaaaggatgagctgaagctcatgaatatgaactaaaacttggatctatcttttgctacattcaggcctcaatttcaacattgtgggtgacttgcagaggaagctaacactctttgtcrtagatttaggccacatacctggcataggattaggaggagctaaataaggtgtttcatcagcagttgaagtagctgtaggcttggctgccgtcccatgccactaatgtgagccaacagagcagagacaatgtgtgtgaactggagcagagacaatgtgtgtgaactgcagcagaacctgactgaacacaaaacatctgaacacaaatgcaactgatgctttacttatgcctcccaaatctcatgcaaatttttcttgtcaccaaccctaaacagaactatatgggaaagggaattcttgtaaatgtagttccagcttagctaggttaacaaagtataaagccaccactaaccactcttatcaatgtggcccaaccatacttcttttaaccat

SEQ ID NO: 467411 - DNA, 633 bp, Homo sapiens
tcccatcagaggtccaagtgtcagctgtgtggggcccacccaggtccagaggggtgtacatgagtttggagcacctcttgtatggtcagaacctcagctgcacagcaccacctcttctgccctatcttttctcttctgtcctccaagccctaggggtagtggttgccttctagagttacccaaaactctaattgttgttctattagctttgagttcaaaagcctattaaacaatttcctgtattaaacttcttgcatttgaaatatccattttacaccctggaccctgagctgtgcatgtatcttagctttcctaaagccgaggtagctgaaacataccaagattgttatcttcaggttagrttgtcactgtggaagtgcaggagtgaaagactactgataaatgtttttgtttttttaaagtattctttccaaggccagagcagagacaaaaatgttgagctttaagaccttgaattttggtttctcaaatacagaggtcttgggacacaaattttttctcataaacaataagtattttctgcctccctctctgactatataaatattcttgagttaggagtttttcctgctgatgggttcgtggtcttgctaacttcgaagaatgaagctg

SEQ ID NO: 467412 - DNA, 546 bp, Homo sapiens
attgtttattcatacaataaacatacaaggcyatgtagtaagctatggagaggaaaaaagatgaataacatgagttagttctacagaaggtgtagagcctaggtgagaaagatgggtaaatatgtaacaatatggtaaagtgcacaggtagagctacacagaacgccttagggggatgtatcaagacaggcatctaatgcaaagggggaggtcagtggagacttcctggaggaggtgatgtttgagctgagtgttaaggacaagtagcaattagctcagtgaagagaggctgtggactgggagaggacattccagaaacattaggcacatgtttttggaatggaatgtgataggcaccaagcctacacataccaagaaaatatagtcctttaactgtcttcttttagcaaagaaaacggtaattggcaatactcactaaaaagataattaaataatattttaaatggtaaggcatggaatgaaaatacagcaagatatatggaaccataagcagttctatgttgccctatggctagtcttactggg

SEQ ID NO: 467413 - DNA, 546 bp, Homo sapiens
attgtttattcatacaataaacatacaaggccatgtagtaagctatggagaggaaaaaagatgaataacatgagttagttctacagaaggtgtagagcctaggtgagaaagatgggtaaatatgtaacaatatggtaaagtgcacaggtagagctacacagaacgccttagggggatgtatcaagacaggcatctaatgcaaagggggaggtcagtggagacttcctggaggaggtgatgtttgagctgagtgttaaggacaagtagcaattagctcagtgaagagaggctgtggactgggagaggacattccagaaacattaggcacatgtttttggaatggaatgtgataggcaccaagcctacacataccaagaaaatatagtcctttaactgtcttcttttagcaaagaaaacggtaattggcaatactcactaaaaagataattaaataatattttaaatggtaaggcatggaatgaaaatacagcaagrtatatggaaccataagcagttctatgttgccctatggctagtcttactggg

SEQ ID NO: 467414 - DNA, 570 bp, Homo sapiens
ttaataacctcattaaatatgaccaataactagttagaggtttcaatggaggagataaatctatttacaataacaacaaaaaatacttatgcataaacttaaccaaatttgcaaaacttatagaaagcttttatacatttgttaaagatatraagtagatataaacaaactgaaagctatgccatcaaaaaagatgagaaggaaggatggatagatatagtaagtacagcaaaatcttgacacttggtcaatatgggtgaacagtatagaaaaatttattatgttatcctttttgtgtttttgaattttgaacattttacaataaactaatttaaaatagttaatctcagtattgcaaataaaagtatttaggttctagctctgtgatattaaagcccacctagatatttaaataagttaattaaaatgatttgattaaatttctatggtcagacttacttaaggtaaatctctttgaaatctcttattaaaaaattaattgtacatgaatattttggacactttaaagtgataaatatttttctctactctccacaactctgcctatgg

SEQ ID NO: 467415 - DNA, 574 bp, Homo sapiens
gggctccgtctgcctgctactggaagatactggctctctgggccaagcaaagctgcctttagtaaattaatgagattttcccactaattcagcatctttcttaggaatccatactagtgatcaattccaagtactgtgggattttcatttgcatcttgttctccctttaggggcagaaaagatacacataactttgccaacccttccttcctttcccattagcaaactgcctgaattcagttcttcccaaattcatatctttagctcagatccttgtcctaagcacaagatccatttctccagcttccttgtccacatctccacttggatatttcaagtggagttcaacctcaacctgcctaaaatggaattcattatattttctcccaaacttgctgtctcacaccctcctgtgttcatttyctctgcaaatgacatcatcttttactcagtggatcaaaccagaaatttaggagtcaaccttgatttttctcttcctccttaccctccatattgctatttgtcacccaaatttgtcagttctaccacgttaacattgccttgaatctaacca

SEQ ID NO: 467416 - DNA, 611 bp, Homo sapiens
gacagaaaaacgtgaaaagacgagactggcctagccttccagcctacatcwttctcctgtgctggatgtttcctgtcctcaaacatcggactccaagttcttcagttttgagactcgaattggctctccttgctcctcaagcttgcagacagcctgttgttggaccatgtgattgtgtaagttaatacttaataaatatatatatatacactattagttctgtccctctagggaaccctgactaatacatacacctataaaatgaggctgcagcagtagatggagccaggctttacaaggcattgaggactatgcaaacaatttgggtctttatgctaagagccatgcttaagagaggaggtggaaaagatgaaaagaaaaaatatgatcagatttgcattgtgaaaatatcactgtggatgatgcatggaaaaaagactgaaaggaggtaaaaattgatgttttcgtagttaaaatggtgagaagtctactgcagagggttaggtgagagatgatgttagcttgaatcagggaagtggtaatagaaaaggagagaaggtaatgttgtcagagatattttggacataaaatcaataggctttagtattgca

SEQ ID NO: 467417 - DNA, 611 bp, Homo sapiens
gacagaaaaacgtgaaaagacgagactggcctagccttccagcctacatctttctcctgtgctggatgtttcctgtcctcaaacatcggactccaagttcttcagttttgagactcgaattggctctccttgctcctcaagcttgcagacagcctgttgttggaccatgtgattgtgtaagttaatacttaataaatatatatatatacactattagttctgtccctctagggaaccctgactaatacatacacctataaaatgaggctgcagcagtagatggagccaggctttacaaggcattgaggactatgcaaacaatttgggtctttatgctaagagccatgcttaagagaggaggtggaaaagatgaaaagaaaaaatatgatcagatttgcattgtgaaaatatcactgtggatgatgcatggaaaaaagaytgaaaggaggtaaaaattgatgttttcgtagttaaaatggtgagaagtctactgcagagggttaggtgagagatgatgttagcttgaatcagggaagtggtaatagaaaaggagagaaggtaatgttgtcagagatattttggacataaaatcaataggctttagtattgca

SEQ ID NO: 467418 - DNA, 577 bp, Homo sapiens
tcataaaagataacttttcatattaaatgttaataaatattttgttcattattgtatgtgtgtgtgcacatatattgcagtataacatataatgcacagctttatgaatttatttacatgcatacacctacacacatgtaactgccaccatgatctagaaatagaatatctgcatagttggaaaatataggataaacttatttttaaacagtatattgattatatttttttaatactgtgcctattatgttttcatgtatacaataaatacaattcagagtgtccaaaaaacctggaagcataaagaaaacagtgygtttattgtatttttaaaaatattcacaattggggccactgctttaaatttagaagtgttttacttggaaaaatatattgaggttgaagaaaaagatattgaacatattatttgaaaatgtaactagcacatatttatcctgttccccagccttatggataccctgtataacatttccagtaccccaaaatgtttcccatacccctttttagtcattataccatttctatcaggtataaccactattctgacttacatcat

SEQ ID NO: 467419 - DNA, 607 bp, Homo sapiens
gcactgtgctcagttttgtctattttcttatcctacttcctacattcccttgctgttccctcccagaagtacttccttcataaatcacttatacctaaatgcttgactcatagtctgcttctgggagaacaagatccaagaagcatcaccttgattcttttagaggtgatggccacaccacctttgatttgatctatgcttccaattgcatttattggacatgaccttgacttgtttggcccccagtacttgtattaaattgaatcttttattgaagttagagagcacttttattttycaaccaagttctagatttttctgagctttctatattatcttccaatttttgttttcaaaacaaattttctgttttcctctgagtttgttctttttaaaaaattattaaaaaattattctttctcaaatgcagctagtaggagccagctgatgcgttcaacaagatcattagccatatttcatatttcccagtttattataggtgatacttttaacaaatgtttgaccattacataagacatgtctctgcttttttcaatatcctttaataaggtttaatctaaatttttggtcttttataacagttact

SEQ ID NO: 467420 - DNA, 450 bp, Homo sapiens
agtaagggaagagaataagagtctctgcatggtaatccagagaattctcctggactttgtccaagaccgtaaaggcaatacctctacaaaggtgcaaaaaccacagcatgattgggcttggggtgtcctctagaacagacacagattagatcacaacacccaattcctttcaaatactggaaaagcattcccaagaatgagtacaaataagctcagactgtgaaaggtgaaaacttcaatgcccagacagcaaagaacatatactagcatcaacaccatccaggaaaatatgacctcatcastgaactaaataagacactagagaccaatttgggaaaatcagagatttgtcatctttcagatggataatttaaaacaactgtattgaggaaactcaaagaaattcaagataatacagaaaagaaattcagaattctgtcagataaactt

SEQ ID NO: 467421 - DNA, 613 bp, Homo sapiens
ttgacattaccattatgtttaacagtgaaaagttgaaataatctaaatttaaaacaattgagattggttcagtaattaaaggtaatttgcttgtttattaaacagtccttaaaatgaatttttttaaatagtatgacccaatttctatggcagaattgtgggtagcttttcttttcttccctttgtctaattttccaaatttttacccctgaacataaatgatcttggtaacctgattatgtatttttgattacagcaagtttaaattaaaaattgtagctttcaaaaaaaatccaaaatttcatcataaatatcataaacatcaagtggacacatttaatgaatggtgttctcaatctaaattgatagataacgatgacagattgatagatagaagcatatttaggccattacrtattttttcttagagatatatctactgcaactgatatttaacacacatatagaagagggtttttaaaagttatgtttctaagacatgtcttgtggctgatgtcactgttgatgttggcttcagaatatgcctacaaaatacagtaaatttgtttccaggcaaatatcctgtgtggaaggattgcttcaggatgaatgt

SEQ ID NO: 467422 - DNA, 563 bp, Homo sapiens
agaggacaaacgcttcctcctgatactagtgtagtcgaggaaaggatctcacaagaaagaaatgaccttggaacttaaacttgatgaagaatcaaaagttaaagaaacgagagagagagtgggagttaagggaggagagataattccagacataaataacatgcacaaagccccagaggtcaggtagagcatatcaaatgccacagataacctcagaatcctcactttcatcagacattttaactttctgcaccaacaacttgtaaccacaaagggggaagaaatgactgattgagcttgatstcctcagtttgtctttgagaagatgttaattcagtggggacaggccctgaaggcaaaatcagatgaaaatagaattgccagataaaatacagaatgcccagttaaaattgaattttagataaatagtgataattgtatagtataaatatgtctcagatatggcatgggatatacttatgctaaaaagtatttgctttttatctggaattctaatttaactgggcatattgtatttttatttgctaaatctggcagcccaa

SEQ ID NO: 467423 - DNA, 552 bp, Homo sapiens
ataattaatataataataatagttggtggtggtggtgatagtatttttattatccctgtgacaaaagcatagtcagcatctgtcaccttgcaatgtataaggcctgatgtaagtatgtctggtggggtcctctatctaaacatgcaatttgattaaaaatgcagttataaacctaatgagtccatgtcaagcatagtggtttatcaaagaggatttagaattatgtgtagagaaaaaggacatacatatttgttttttgtccaatcattgcacataaagacttttgctagtatccgggcactgtctctttgtgttcaagtacaggagtcatttctccatattctttatttgtcaaacatgccattcttaatatcaaatttcatatttcacattagaagaaactgtagcattactcataatgcatggctctttggarcctgtttgtgttggaacaatatagattctcttacatctgcagttccctaatataatttacaacaaattaccagctataacattactccgatgcagcatcattctttaacccacttg

SEQ ID NO: 467424 - DNA, 513 bp, Homo sapiens
gcataaaggaattcatcaccttgaagagaaggactcagttctggcaggattcatcacctgctgactaaagagccattgggtcctgaatgatcagcaccaatacccaggcagtactcaccatggaccttggcgaggctctgagatatgctcgcttcaggtgtaacccagcacattaccagctgtagttgctatggggaaagcctccttctgcttgagaacagaagaggaaagatgaatttgtcctgcagcttagatgccagctcagccacagttgggaagagcacaaagtgggctcttaggatccccgattccaggccttagctcttgaatggcatttctrgacctatcctgggcaagaagagagcccactttcctgaaggttgagtcccaggccaggcagcattcaccacaagctgactgaagagccgttgagccttgcatgagcattgatggtagccagacagttttatgcagggcctggggcagtggtggccacaaagaaatgctcctatg

SEQ ID NO: 467425 - DNA, 523 bp, Homo sapiens
tatcttttcatgcaaaagtaaacacttctataattaatgtcattattgatacttttgtcataaataaatttgtttccaaccagctttattgtccttcattttctatcttatagatgtttgaacaatgttttcaattctttatttagcactttggagatttgacgtttaccaatcttgtttttatttctgaaactgattcactttattgccaaatgcattatatttatcaacctcaagaagtaaataactgctgattattccratggagaatttagcagtcaaagaatattcctctgataatcatttctcactttcctcccttttcaaattgaaattatcttggatttgttgacccattttttaaatttcacaattatgaatatcaatatgcatcatgtctttttgagttatgattatttattttgttttgaaaagtatttatgactataacaattgttctacaattacatgtctgtgtgatcccattgcttgccataaacctttctaccccttgtttcattcc

SEQ ID NO: 467426 - DNA, 578 bp, Homo sapiens
tctctatcacattcctttaagcacagattaatttaaacaaacagcctaatcacgccatatcagaaacgtacacacaggaaacaaaggccaaaaactaagtctcaatgaaaaatagccatcttgtaaggaaataagcacatcattcttatgccagaagacatggtttcaaatatatttctgcagaagccagtctcttcatgtcgaggctcagtaggagcatcaccaggctgtgctacttcacactccttagcagggaacatcatcttagacaattgtccctgaagcatagcttgatcctttccagacttaatagagtggactgcttgtttaatggtaaaatgtgtgcattctgaagaagggacatcaacctcctcaatttaattagagaaccgttataaagaagtgaaccatgttatgctttagcccagtaggctaytaaccctgaaaaactgggaaggagcagatgatacatctataatatcttctcacagtaagcctgcctcttggtttttgtgactgaagattctgagatggtcaatatttgcaggatggtctgacaaatgcggctgtaatagcaa

SEQ ID NO: 467427 - DNA, 530 bp, Homo sapiens
attcctttcctaccatattgagaagcagcctgcctgaaaattaagccaacaggaaaatggaactgagagagaaasaaagccctctgggcatcatttgaaaccctgaacctacctatacctgaagctacatctatctttggatggtagtcaatattccagtaatttccccatattttgcataaggtcatttgagccagagtttaggcactttgcaaccaataaccaatagattgctaactaataaaattgtgatgttattttgtaagttactgcaagctactatgtagtatctcttcttacatataggcaactatcaggtcatatgaactcagaccagatgaaatggtcagaatcactgaaaggatatctcaactttcttctcaacaacatttctgaatgtctgaaaagaaaattaatgttcaatttaattttattgccctatcaaagtaattctggttttctacatagacattcagttaaagttcacgcatattatttccatatcatgaaattttagaattagaaaaaga

SEQ ID NO: 467428 - DNA, 571 bp, Homo sapiens
ttatctcctcatagaaagtagaatctttataattttctgagagattttctcatctcattaaaatcttcttagagagaagcattggaaggcatacattggaaggagataaggtaatagttctctgtgaatataaaagataatktcgtatatttttctctcttttctcactccttgatattacagggtcagtgctggcatacatttgctgcaagatatgaaggtattgtcaattcagtttggttcaactaacatagtcaaatatcttttatgcatcaaacttgatcttagttctggcaagaaaaaaaaaaaaaaatctcagtccttatcctaaaggagcctatttccaaagagtagaaaggacaaatagaaaatttcaaaataatatggtgtttactgtgaaagtaaaatgtccaaaatatggttgttatcagagatcaaatgaaggagagctaaagcaagtcctcatggaagaatggatggagatcaatgaaagattttccaaataaaattgcatgtaaggtggacaagaaagatttagccatgttaacggtgtatggagtaagatggggtg

SEQ ID NO: 467429 - DNA, 571 bp, Homo sapiens
ttatctcctcatagaaagtagaatctttataattttctgagagattttctcatctcattaaaatcttcttagagagaagcattggaaggcatacattggaaggagataaggtaatagttctctgtgaatataaaagataatgtcgtatatttttctctcttttctcactccttgatattacagggtcagtgctggcatacatttgctgcaagatatgaaggtattgtcaattcagtttggttcaactaacatagtcaaatatcttttatgcatcaaacttgatcttagttctggcaagaaaaaaaaaaaaaaatctcagtccttatcctaaaggagcctatttccaaagagtagaaaggacaaatagaaaatttcaaaataatatggtgtttactgtgaaagtaaaatgtccaaaatatggttgttatcagagatcaaatgaaggagagctaaagcaagkcctcatggaagaatggatggagatcaatgaaagattttccaaataaaattgcatgtaaggtggacaagaaagatttagccatgttaacggtgtatggagtaagatggggtg

SEQ ID NO: 467430 - DNA, 571 bp, Homo sapiens
ttatctcctcatagaaagtagaatctttataattttctgagagattttctcatctcattaaaatcttcttagagagaagcattggaaggcatacattggaaggagataaggtaatagttctctgtgaatataaaagataatgtcgtatatttttctctcttttctcactccttgatattacagggtcagtgctggcatacatttgctgcaagatatgaaggtattgtcaattcagtttggttcaactaacatagtcaaatatcttttatgcatcaaacttgatcttagttctggcaagaaaaaaaaaaaaaaatctcagtccttatcctaaaggagcctatttccaaagagtagaaaggacaaatagaaaatttcaaaataatatggtgtttactgtgaaagtaaaatgtccaaaatatggttgttatcagagatcaaatgaaggagagctaaagcaagtcctcatggaagaatggatggagatcaatgaragattttccaaataaaattgcatgtaaggtggacaagaaagatttagccatgttaacggtgtatggagtaagatggggtg

SEQ ID NO: 467431 - DNA, 508 bp, Homo sapiens
gaactagtttgttctagcaatgatgtagtcaaagggacagattctagagactggcaggatttgttaactaattggatagtttgatgagtttgtatggtgtcaattagctaagctggaattatgtttttcagaattccctttacttccttgttccaggttaacatgggcattgtaaaatattttgtgtgagatttggaagacaggtgtgaaacagtagttacacatttaatgcagggaatgtcattgagggcrctgggcacggctgtagcgcatacacactgttgttgatatactggcttacctaattggcttgggcaactgctggtgccacagcttctctagttcctgctggtttttcttcagcttttcctgagccagacccagcaccacatgaagaaggaagagtcatacaccaactttgtaatcagtctccacaattccttggagtccaattctaacatacatctatattttctgtcatttcttgtggctctatttttctgattaa

SEQ ID NO: 467432 - DNA, 513 bp, Homo sapiens
aaaagctacaaagaattggccctaagcttttacctgtgctgcaatgactacattctgtacacatttctatgacattacactgttacaagaaacacttttggcccctcattttcatgatttctgatttgcatgcattaggcagtataaaaatgtgaatttatcagtaaagaaagataaatataaatcataagaggcttttatccaaaataatagaaagcagtatctctaagagatacttgtacacccgtgttcataacaatattattcacaatatccaaaagatagaatcaaccytagtatctgtctataaatgaaaggatacacaaattgtggtacacacagtggaattattcaaccttaaaaaggaagaggattctgaaacatgctacaacatggatgaaccttgaaaacattatgctaggtaaaataagccaaatactgtaatgattctaccttcatataagatatttagggtagccaaaataatagagaaagtgcaatgttggttgccag

SEQ ID NO: 467433 - DNA, 558 bp, Homo sapiens
aaaagcaataactatttccaccagggtacagaattcatttgttagaaatcaaatgctataactaccaatgttttatttgtataatgcccacatttattagaaatttgcaaatgacggttttctctgcttaacattttcctttaatttactaaggtgcccttcttgattaatgtcacttcttgttttgaccattatgcacattgctagataaagcatatgaatatggaaatagyagaggcattttaaaaacatcaaactttttaactttaaggtccttacacattttcattttcaaaataatgataattaaatgcattgttttttaattttgtctgcctctaacacatctcaaggttaaaaacaataaaaaacatattgcttaattagagcacatgtgaagactatccaatgccagtgagaaaagaaaaaacatgttaattactcaatcctctaataccattctagaagagtggcttctggtaattggaagactatttgctgagtgaggtgatgtctgtgggtatgcacgtttgcttgttggagcagtaaccaggctga

SEQ ID NO: 467434 - DNA, 623 bp, Homo sapiens
tgtctggtgagggctgttttttggttcacagatgactgtcgtttcactgtaacatcacatggtggaagagagaggaaatctctttggggcctcctttaaaagggcactaatctcattcatgagggctcttccctcatcatctaattgcctcccaaagatcgcacccccagatacccttacatttggaattgggatttcaacatgtgactttggggacgatacagtctatagtagttgtcatagagccccatggtttgcaccagtgctctgcaatctccagtggcaggggtaggagagcttcccccatcacattctgcccagggtggcaggaggccttcatgggttccaaacaagatgactgaagtctttacccctggccagaggatttcctctagaagcaggcttaaactgctgggaatccagaaaccaagaagcaaacaaagcttagaatagactgttgaggccaaaaagctaaggaagagagtccctgatgtttgcataaccaaaaggaccagaagtagcaaagagcaamgtataattatgtactctgagggtcaaagggtcaaaatctgaagtttgagagccaaagcagctaggaggggtctggggaacattactgtctg

SEQ ID NO: 467435 - DNA, 558 bp, Homo sapiens
ctgcactttcctgatctctaaatgttggagtgctccaggactcagtcattgaatcttttttttctacccacacacattctcttggtaattttctctagctttatggccagtttatccattaggcatggtgggcacagtttctaaggcccatgatacttttaagggcccatgaaaatgtttcagtttctttttaagttagaggaaaaaaatgagtataataatagtgaaatcagcctagattgttatcatctttatacatacatatatttgtgtgtgtgtatgtgtgtgtgtgtgtgtatgtacagttgctccttgacttatgatggggttatatcccaataaacagtaagtcaaaactatgtcaaaaatgcatttaatacccagatcaacccattgtaatgtcaaaaactgtaagtcaaaccattataagttcagatgctccttgacttaaatgtttrctagactgtaaacaccataatgctagcaccagctctattttcttaatcactgccctcagggcatagtacagtacctgatgtgtaatgggtgtttaataaa

SEQ ID NO: 467436 - DNA, 596 bp, Homo sapiens
cattcagttccttctcaagatcttttaaatccacactcctcccttcatagcctttgtcycagcttgtggtcactttggtgagtacagcatccttctaacaggactatctgactttggcttcttctcatgcagcttgacatccacccaccacacccaccaccagagtgatcccaggaatgctatgtcacaagtgagaacaccagtaatcccagctacttaggaggcagaggcaggaggatcacttgggcccaggagatcaacccagcctaggcaacatagtgagaccctatctctaaataaataaataaataatattattcttaaaagaatttgaggttttcatggaggtagagagtaaaatagtaattaccagaagctgggaagtgaagggaggtaggagataaagagaagttggttaatggttataaaaatacaaatacagttagatcaaaggaataagttctaatatttgataatacagtagaaaagttctaattaacaataatttgttggatagttcaaaatagctagaaaaaaaatttgtaatgttcccaacacaaagaagagataaatggctgggtaatggatagcctaat

SEQ ID NO: 467437 - DNA, 601 bp, Homo sapiens
tgacttactgtggcatagggtggtgcttcagttgtctgttcctatgtaacaagccaccccaaaacttcatggcttaagacaacaataattcatgattttttaggattctgtaacctgagcttgacttagctgggagactctcctactttgtgtgttgcctgctgaagcagaaaatccaagatagcttcttyagttgcacagctgttgatttttctattgatttcactggaagagctggacagtggccaggcagctctcaccctccatgtggtatctccacctggcttacttggctttcctcatagtacagctgtcttggggttgtcagacttcttttggcaggtggcttctaagagctgctagttctcctaaggcctgggcttggaaatctcagagtatcactttaaccacatcctattgtcaaagcaggtcataagtccacactagattcaggagaggagacatagatttcacttcttgatgagtggagtgtcatgggtgtatgtggaggtaattcatggcagacatctttggagagtaccacaggaagaaaagttagggaaaacctcatagagaagtgactgaattggccaaggaaaaa

SEQ ID NO: 467438 - DNA, 603 bp, Homo sapiens
gctattagccaaactatggcaaccttagggtatgcaaaaagggcaaagcagcttacttgaagaactttcaatctgtgtcaatttgggcaaaacaataatagtaatgaataatatcctgtagtatagaaaagaatccaggagagcatattaatgtaaataaataataagtaatcaacaaatggaggagaaaagacaggtctgttgtgtaagaaaaatctaattagmaaatataaaaggaatgataaaaattgaaaattcaccatttggcaacagttacagtaatggttgtttcagacaagaataatcagtaatactgaagtcagttagtaagctaatctgatgagaaataggatagttacatgatcccaaagaatctccatataagagacacttaataattacaaagagagaaggtaaatttagagtagactaggcagataacaacttaaccaagtgatcaaagttagtaccactattaattggacaaatcaatgtcatatgtctcctgacataatgcatcgaaagggatatatcatcgctttgtgatattcttgtcaaaaatgtatgatatgaatttaatcataggaaaacatcaaacaaaca

SEQ ID NO: 467439 - DNA, 631 bp, Homo sapiens
gcaattttaccttttcagatagtcttacgtaaagcctaagaattctgaacatagtatttttctaactgttttattccttccaatcatctgtaatgactggttgtttcacatttctaaaatgcaaaatattatatcatcagaggctttctcctggttttataaggacagaaggcttccagaagttgagattgtcagttaaatattacgagctaactttatcaaaactaaaataaygttgtcctatgcaaatctggcttcagtacttttttggtatctgccccactgcaatatgcttccttactgaattataacatgttatctattagggaaaaaagtctgaagagcagaatgccatgaaaaatctcagttaaattatatggcctatggcttgtgttacttggatcaaatattctcaagttaggtagtaacatttagactacaatatcatctgtgtattttttcattcttcattagcactatgccttaaattgcctactttgaagattttgtatatcaaccttaaatagaaatatacaaataaggaaaaatacataatcttctacaaattatttattaaggttttctctatttcattacaaattagaacattcatcactggacaacactagag

SEQ ID NO: 467440 - DNA, 595 bp, Homo sapiens
gagtcttcctaattttgtcagaaacgcccacaaagatttgtttcaggtgggagagttaatgcagcctttgccgattatgttcattttctattgcagcataacaattaccacaaacttagcagctgaaaataccaatttatgagctcacagctctataagtcagaagtccagaatagcatgactggcattcacaaagcagaaataaaggtattagtgagactgagttctcttgtggaggctgtaaggaataatctgctccaaactcattgtttctatatgcagaattcagttccgggaatggcatggtggctcacacctgtaatcccagcactttgggaggtcgaggcgggtggtttgctygagttcaggagtttgagaccatcctgggcaacatggtgaaaccccgtctctaacaaaactacaaaaattacctgggcgtggtggctcacgcttgtagtcccagctacttgggcactaaggcaggaggattgcttgagcccaggaggcggatattgcagcgagccaagatcaccccactgcagtccaacatgggtgacagaattagaccctgtctcaaaaaaaaataaaaataaaa

SEQ ID NO: 467441 - DNA, 540 bp, Homo sapiens
gtgccctgttgctcccacccggttcaaaggatagcctgtaacagctaagtcttcatttcccttgttcattaatcttgagagagagaaatagagaaagaaagaacaagaaggaaggcaggaaggaaggaaagaaggaaagaagggaggaaggaagggagggaggagggaaggagggaaggaaggaaagagagagagagagagagaataaacaaacaaaatataacagggcaggtatgtctttattgcctgcctgagactacaaaaaagccactattttctctagtccttttccaaacatttgtcacccaataccaaaatacaaatactcaagcattttctattatctgtcaccatggcttatcagttttggaaaatatatggcataaattctcatgcatgttcagaaagtccatattctctataataaagaaacgggaagtctgtcctctgtgtgttttattcaactgatytacagtaacaatacttcaaaatccagagctaatattcggaagacttttagtatccttgtcattaagaaac

SEQ ID NO: 467442 - DNA, 610 bp, Homo sapiens
cagtgaagagacaactgacaaaatgggagaaaatatttgcaaactatacatctgacaaggaattaacatctacaatacrtaggaaacttaaacaactcaatgacagaaaaacaaaaacccatttaaaagtgagcaaataaaccttaatagacatttctcaaaagaagacttaacaaatggccacaggtatatgaaaaaatactcaacatcactaatcgtcagaggcaaatcaagatcacaatgagatactaaaaagaggaaagaaaacaagtgttggcaaacaagggatgtggagaaagaacacttacacacttttcgtgggattgtaaactagtacatctgttatgaaaaactatgaacattcctcaaaaaattaaaaatagagctacaatataatctagcagtctcactactgggtttacataaaaaagaaatgagataagtatatcaaagaggtaactgcactcccatgtttattgcagtactatttataattgccaaggtatggactacatcagatgaatggatcaaaaaacttggcatatatacataatggaatgctattcagccataaaatagaatgaatcctgtcatttgtgacaacatggat

SEQ ID NO: 467443 - DNA, 620 bp, Homo sapiens
aattgacctgtcttagagttcacagattctttcttctgcttgatcaagtcwgctgttgacactgtctattgcatttttcatttcattcactgtattcttaaactccagagttctggttttttaaattcctatttcttcattgacctcattgttttcaagtatctttttctattgtttagttgtctatctgtgttctctttttagttaacttagtttccttaattattttgaattctttatcaggaaattgttgagtatccatttattttgggtcagttactagaaaattattgcattctgttggcggtatcatgtttgttttccttgtttctttttgccttgcattaatgtctgcacatttgatggtgcagtcacctcttccagaatttacatgctggttttggtggggaaagagcttcaactatgggtgggtgtgaaggcattgactaggtgaggtgtagtgtttctggcttggtgagcatgcaacagcttacattccccatgcagctctgtcagatgaggtcagcatcactgaaaattgcagcatcctcagtcgccaaggctagtggtgtctgcaatggctgtgagggttgttagcgtcttcagctacaaaggctgct

SEQ ID NO: 467444 - DNA, 583 bp, Homo sapiens
gtggtcaatgcaaatcctttgaatttacatgagatcatgtcctccccttgctcaaaactctccagtggtattttatctcactgagagtaacaccatggttattgcaatgaccaataacacctcacgtgatctgggtctctgccaccctctgattttatcttttacctttcctcgtagttactctactccagccacattggactccttgtcattccatgaacaaggttaaagtttcttgaaaattyaggtttttctgctagctgttccccatgcctacagcactctttttctcccaggtgtttgtctgtttagtcagtacctttttcgagattgttgaaatgccactttctcagtggcagcctccccaccctcatcccagaactcacagaccctcttaacttgctctatgccaccataacgcttacgttacactgtaatgattactatctactagaattacaagtttctggaggacaggaaattctttttcttattttgtccataagtatgtccgatgcacttaatacttactggcttgtagcaggtactcaataaatatttgttgagagcatgaataatataa

SEQ ID NO: 467445 - DNA, 583 bp, Homo sapiens
gtggtcaatgcaaatcctttgaatttacatgagatcatgtcctccccttgctcaaaactctccagtggtattttatctcactgagagtaacaccatggttattgcaatgaccaataacacctcacgtgatctgggtctctgccaccctctgattttatcttttacctttcctcgtagttactctactccagccacattggactccttgtcattccatgaacaaggttaaagtttcttgaaaatttaggtttttctgctagctgttccccatgcctacagcactctttttctcccaggtgtttgtctgtttagtcagtacmtttttcgagattgttgaaatgccactttctcagtggcagcctccccaccctcatcccagaactcacagaccctcttaacttgctctatgccaccataacgcttacgttacactgtaatgattactatctactagaattacaagtttctggaggacaggaaattctttttcttattttgtccataagtatgtccgatgcacttaatacttactggcttgtagcaggtactcaataaatatttgttgagagcatgaataatataa

SEQ ID NO: 467446 - DNA, 583 bp, Homo sapiens
gtggtcaatgcaaatcctttgaatttacatgagatcatgtcctccccttgctcaaaactctccagtggtattttatctcactgagagtaacaccatggttattgcaatgaccaataacacctcacgtgatctgggtctctgccaccctctgattttatcttttacctttcctcgtagttactctactccagccacattggactccttgtcattccatgaacaaggttaaagtttcttgaaaatttaggtttttctgctagctgttccccatgcctacagcactctttttctcccaggtgtttgtctgtttagtcagtacctttttcgagattgttgaaatgccactttctcagtggcagcctccccaccctcatcccagaactcacagaccctcttaacttgctctatgccaccataacrcttacgttacactgtaatgattactatctactagaattacaagtttctggaggacaggaaattctttttcttattttgtccataagtatgtccgatgcacttaatacttactggcttgtagcaggtactcaataaatatttgttgagagcatgaataatataa

SEQ ID NO: 467447 - DNA, 606 bp, Homo sapiens
agaactaaatctgtggatttcttcttggtttactctcctcacagttcgtctcttcttccaaaattcactgggctcccgtttaaaaaccttccctcgaaaactcatcgtattgctataatttgagtcacaaaatatttcaaaatatcaatgtcgttaaactcttctcttctgaagcgtcaccaggctgaacaaatctttcttcttggtaaaaagggaaatgctcatgctacatgaatgtaactcaacagaaaggaaaggaaagctgtcaagttaccacttcctgtgagtaactaactaccagctgttcagatactgcttttgtgcatatatcctccctcttcacctgcaataaagcaacacaaaatgactttggacgtttaagagaattgttcacagctaaataaaccatatgatgtaaaaccacccrtgcaaccaaatcaagattgaattgaacagttaattgacaacagggctccacggctgtcaaaacagccacccaaactttataattctggttagactccaaaagtcaactgtaataatatggctgaggtctgagaattgtgtttaaagcaattgctcttgttaagtgtagactaaataagt

SEQ ID NO: 467448 - DNA, 585 bp, Homo sapiens
tggtgatctgtgcttcgttaggtgctatctctttgttttgtacaaccattcatagggcgttgcttatttaggctgttgtgaaacgagccagttagctgaaagaagcaatggatggggttccaggagccaggattttggttctaggaacaatgaaacaaggctgaatcagggttgaaacacaaaggaaagcaggaatgaatgttggaaatggacaggttgaagaatgcaaagaagcaggagtaaccgggggatgtgaattcaatccaagaaatggagatgtgagatttgaaacttggtctgcctaagaatccaggtgaacacagatcagaggacctgggtgtgagctgcaacactgaacagttagctcatgtgtcagggagctgcagagaagctgcttccaaaatggaaatgggaggggtacctgtaatttaactaagaatggtcttcctttccctagcagctgactgcgaagggagggagaagagttaaaccagaagtgagccaagcttctgagcatgggctggaccatttgctagagaagaagagtagcaacagggacrggaaggagggtcatgatcccagcaa

SEQ ID NO: 467449 - DNA, 561 bp, Homo sapiens
caggatggtattgcttaggtagtctattatggtttttatagttttgggtttcacatttaagtcatatagctccttatatccctttccaccaagtacctagaattcaccatttcactttctgtctttgtgaatttgactactctatgtgccccatacagtatagtcatataatatatgttcttttgtgactggcttaattcacctagcatgatttcttcaaggataatccatgtkgaagcatgtgtcacaattttctgtcttttcaaaactgaataatattcccttaataataataatgtacatccattttgtttatacattcatctattcatatatttttggggtttttttttcccatgttttggctatggtgaataatgctgctaagaacacaagtgtacagatatctattctagttattgctttcaattttggggggtatatgctcaaaagtgtaattgatggattatacactaattttatggttactctttggagaatgtttcctactttttgtcagtagcagctgcaacatttacattcctaacagcaatgcaaatt

SEQ ID NO: 467450 - DNA, 561 bp, Homo sapiens
caggatggtattgcttaggtagtctattatggtttttatagttttgggtttcacatttaagtcatatagctccttatatccctttccaccaagtacctagaattcaccatttcactttctgtctttgtgaatttgactactctatgtgccccatacagtatagtcatataatatatgttcttttgtgactggcttaattcacctagcatgatttcttcaaggataatccatgtggargcatgtgtcacaattttctgtcttttcaaaactgaataatattcccttaataataataatgtacatccattttgtttatacattcatctattcatatatttttggggtttttttttcccatgttttggctatggtgaataatgctgctaagaacacaagtgtacagatatctattctagttattgctttcaattttggggggtatatgctcaaaagtgtaattgatggattatacactaattttatggttactctttggagaatgtttcctactttttgtcagtagcagctgcaacatttacattcctaacagcaatgcaaatt

SEQ ID NO: 467451 - DNA, 561 bp, Homo sapiens
caggatggtattgcttaggtagtctattatggtttttatagttttgggtttcacatttaagtcatatagctccttatatccctttccaccaagtacctagaattcaccatttcactttctgtctttgtgaatttgactactctatgtgccccatacagtatagtcatataatatatgttcttttgtgactggcttaattcacctagcatgatttcttcaaggataatccatgtggaagcatgtgtcacaattttytgtcttttcaaaactgaataatattcccttaataataataatgtacatccattttgtttatacattcatctattcatatatttttggggtttttttttcccatgttttggctatggtgaataatgctgctaagaacacaagtgtacagatatctattctagttattgctttcaattttggggggtatatgctcaaaagtgtaattgatggattatacactaattttatggttactctttggagaatgtttcctactttttgtcagtagcagctgcaacatttacattcctaacagcaatgcaaatt

SEQ ID NO: 467452 - DNA, 603 bp, Homo sapiens
agtttacactcagtattaaccatcacatcgagttattaaatgtatctctaagatgtgtcttaaagcaaaagtgaccaaaatcagagcaataaaccttaatcttattgaaagtatttctgagatatgttacagagcaaaagtgcctgaaatgagaccaatagaccttaatcttttattggtgctgtgaatctttaattaaaaatcaatcttagccctcatttgtaaagctcccagaagtaatttccccttgacaactactgtagttctgagggaaaaaattgagtcttatcttcaattctaacatatctttgcatagcaatctgaaaagtcagatatttaatcgtcatgaatacccacattcacaatgttttctatttattgaacattaaatcaagattgggcatattgccaactattgacttatgaaaacagtatttgtgtgatatttacatgcatcctttttatttgcacatcaaaatactacttgtgacaaatagaatgattgctacttgttattgatcccaaacatctttgtccaatcatagatttwaaaaaaaaaacaccaacttattcataagaggactagaacaatgttttttaaaa

SEQ ID NO: 467453 - DNA, 603 bp, Homo sapiens
tcagtcccaaccacaagaacttccacctctgtcattctcaacaaacaagttggtgtgccattccacttgtcagaagatcagttctcccaagcttggttccctcctctcatttctccaaatgaacttatcttcttattggtagaacctaagtcacatgcctaagctaattgataaaatcacacaggtgcagaataaaataataataataataatttccaaagatctagcctaaaaattttttttwaaaaattacacagcactaaattatccctttagtagatattgactacatattcaaattcagggacctgaaattgactagttttatatagtactatatttttaggacaaaatagctgtctctcttccagtcatgaccctctgaatgaaatgaagatattgtgtgttttttgaattatcttttaaatgcacatgtaatacttgaatacattcttctgtaaaaaatacgtataatactgcggtcatctctgctcatcatcctcaatcttgacctcttctttttcatatctatgaaaataatcattaataatctgatgtgtttccttctgtagttttcattctcaatttatgttgatatctgag

SEQ ID NO: 467454 - DNA, 603 bp, Homo sapiens
tcagtcccaaccacaagaacttccacctctgtcattctcaacaaacaagttggtgtgccattccacttgtcagaagatcagttctcccaagcttggttccctcctctcatttctccaaatgaacttatcttcttattggtagaacctaagtcacatgcctaagctaattgataaaatcacacaggtgcagaataaaataataataataataatttccaaagatctagcctaaaaatttttttttaaaaattacacagcactaaattatccctttagtagatattgactacatattcaaattcagggacctgaaattgactagttttatatagtactatatttttaggasaaaatagctgtctctcttccagtcatgaccctctgaatgaaatgaagatattgtgtgttttttgaattatcttttaaatgcacatgtaatacttgaatacattcttctgtaaaaaatacgtataatactgcggtcatctctgctcatcatcctcaatcttgacctcttctttttcatatctatgaaaataatcattaataatctgatgtgtttccttctgtagttttcattctcaatttatgttgatatctgag

SEQ ID NO: 467455 - DNA, 591 bp, Homo sapiens
ttgtcttcaccccatattgtcactagatcaatgattagaatcctggtttgggtcaggatcatcctggtggtgaatgctacttgtaactttggctctggttgcaagaacaggcatatttctctgctgtagattttactgctgttgcaccctctatatgggaatgcaaaacaggctttcccagaaactttccagacctcataccatcattgtccaacaaatatcatttttaagtcctcrtacttatgaatatttccaactccaaatagatcagtttcatactgatatccaataactatgcccctttcagcaggaagtagccagaataaatatggtacccaaatctcgtagaaatggcataaaacctgacagtggggaattataaccgagtacccccattttccaagcaatagtttagcctttttctcttttatcttctctttctcagatccccacttcctaattagctctttagacatgtagttataacattttaccttcccttcacgagacactccctacaaggcaagcttatctaactgtgtgcttacttaaaagctccagagcagaatgctctcctaccaggagattgcc

SEQ ID NO: 467456 - DNA, 591 bp, Homo sapiens
ttgtcttcaccccatattgtcactagatcaatgattagaatcctggtttgggtcaggatcatcctggtggtgaatgctacttgtaactttggctctggttgcaagaacaggcatatttctctgctgtagattttactgctgttgcaccctctatatgggaatgcaaaacaggctttcccagaaactttccagacctcataccatcattgtccaacaaatatcatttttaagtcctcatacttatgaatatttccaactccaaatagatcagtttcatactgatatccaataactatgcccctttcagcaggaagtagccagaataaatatggtacccaaatctcgtagaaatggcataaaacytgacagtggggaattataaccgagtacccccattttccaagcaatagtttagcctttttctcttttatcttctctttctcagatccccacttcctaattagctctttagacatgtagttataacattttaccttcccttcacgagacactccctacaaggcaagcttatctaactgtgtgcttacttaaaagctccagagcagaatgctctcctaccaggagattgcc

SEQ ID NO: 467457 - DNA, 605 bp, Homo sapiens
ttccatgcctctcccctggcttctggtggtttgctggtcatctttggcatactttggcttgtaggtgcatcacctggatctctgccttcatgttcacatggtgttctacctgtgtgcatatctgtggacaaatttcccctttttataaggataccaggcatattggattagggttcctctctactccagtaggacctcatcttcactaattacatctkcaataaccctttccaaatcaggtcacattctgaggaactagaggttagagtttcaacatacgaaattttctggggggtgggtaagggacacgattcaatccataacaatatgtttatgagtaaatgagttagtgtgttattgtctttctgccacctcagaatctgagaaaacagtttctttttccattccttgggctgtaggtggagaaggaggaggatgatgatggtgattattttttggtcatgccccataatgtgacccactttaaaaaacaacaaacaattgtaaggaggagaactgtcatacacctactgcccagcttaaaaataattagatcatcttctttaaacataactgtcatcccatcatcacacctaagaagttga

SEQ ID NO: 467458 - DNA, 605 bp, Homo sapiens
ttccatgcctctcccctggcttctggtggtttgctggtcatctttggcatactttggcttgtaggtgcatcacctggatctctgccttcatgttcacatggtgttctacctgtgtgcatatctgtggacaaatttcccctttttataaggataccaggcatattggattagggttcctctctactccagtaggacctcatcttcactaattacatcttcaataaccctttccaaatmaggtcacattctgaggaactagaggttagagtttcaacatacgaaattttctggggggtgggtaagggacacgattcaatccataacaatatgtttatgagtaaatgagttagtgtgttattgtctttctgccacctcagaatctgagaaaacagtttctttttccattccttgggctgtaggtggagaaggaggaggatgatgatggtgattattttttggtcatgccccataatgtgacccactttaaaaaacaacaaacaattgtaaggaggagaactgtcatacacctactgcccagcttaaaaataattagatcatcttctttaaacataactgtcatcccatcatcacacctaagaagttga

SEQ ID NO: 467459 - DNA, 545 bp, Homo sapiens
gcagtgctgtgggctcaaggcaggggggcagctcacctagagcacaggggagattgcagaatgctatgcatttgtagggccctgctctctggcactcatgccacagccagactgcaacaggctcacctaaaaggcctggaagttaccttggagaagagcaaaagatatagaacacccagaatttccttaaggaaatatttgaattattggatcagactaagtttgacaaactgagaaactggatcagccccaagaaacaaggaagctccacttgtcttcatacatctcaccctaaagtatacagttgtgaaccttctacatggctcaaaaattgtaccaaaatatgcccagatttccaggataattggtggcccaattcttctaagtactgtcaagtatcaaaacacctgtgtgrtgctgaagcctacatcttagagcttgttacgaaggatctggtgtttgtaggaatagaagattaatggagtttatagagcctcaatgagatgaggaggccattgtgacatcacattatcaaaattattatg

SEQ ID NO: 467460 - DNA, 520 bp, Homo sapiens
ttgttatcttccttacaaataattaatggtatatgttttgtaccaacatttattacattttatttaatgcaatggtattctgatttcaaatgctcagctacagcatgaatattaaagtgttgatactatagtactctaaaatctgattctctgtcaacttaagtgcatttcttactccatttttgttcacagaattttttgttaataaacttttcagtttttagatcagttttaggtttacagaaaaattgagtgaaaagtacmcagttcccatatattctctccctcccctcaacagctttccccactatcaaattctcttaatatccaccattagagtggtacatttgtcattactgatgaacctacattgacacccaaagtatatagtgtacattagcattcactcttggtgctggagtctatgtgttttgacaaatgtctaatggcatgtttataccattgcagcatcatacagaatagtttcgctgccctgaacatccactgtgccctgcctacc

SEQ ID NO: 467461 - DNA, 520 bp, Homo sapiens
ttgttatcttccttacaaataattaatggtatatgttttgtaccaacatttattacattttatttaatgcaatggtattctgatttcaaatgctcagctacagcatgaatattaaagtgttgatactatagtactctaaaatctgattctctgtcaacttaagtgcatttcttactccatttttgttcacagaattttttgttaataaacttttcagtttttagatcagttttaggtttacagaaaaattgagtgaaaagtaccsagttcccatatattctctccctcccctcaacagctttccccactatcaaattctcttaatatccaccattagagtggtacatttgtcattactgatgaacctacattgacacccaaagtatatagtgtacattagcattcactcttggtgctggagtctatgtgttttgacaaatgtctaatggcatgtttataccattgcagcatcatacagaatagtttcgctgccctgaacatccactgtgccctgcctacc

SEQ ID NO: 467462 - DNA, 550 bp, Homo sapiens
ggaagcacattttggccttaaaattccaaataattgaccatgacatatggtaagcacttcagcctctactcctttttctagagttagaataaacagtccaaccaaggaataacctaaagttataggtcaaattcttctgtccatattccaataagactaccaaatcttcactattcctaccttttctctttgaaatattgttcccactctgtgytctgccatccccaactaatccaactaaatagctagagaacaattacaaagcccaaagttgtatttaatgacttaaagaatgaaaaatattccccaaattgctgtgcaaaaatacatgcagatataaaattaaactctctcttaggctttcttgttatttccaaaataatgaatcaaactaaatgtccatcaactaatgaatggataaaaagaaaatgtgatatacatatatatatatatggacacagtggatagtgtccatgtaatgaatggtataaatagtatacacacaatgagtattatccatacaatggctactattcagccttaaaaaaga

SEQ ID NO: 467463 - DNA, 519 bp, Homo sapiens
atcatcatataggtaaatggattttatttgacatctgaaagaacagtgctaggaaaatactcaccgatgaacactttgagaaagatcgaggaacsctttagtcttcattatgcaccaacaaataaaaggtaacacgtagagtggacggagcataattttaaatctccccagaactgggttcaaattttgcttggctttgccatctgtattgttttatccaatcatttccccctctgaacctgtcccaacatgtgcaattgtaagtaataatagtttactcatggcactgctggatggttaaccaaggttaagtctcaaagtgagagtatcaatggaaggtgatcccttcaatgtaaatttcttctttcttccctccttacccttgtgcaattctagtaagcttaaattgtaaatctgcttaacttgcaagctgttaaatcaagggaaacaaactgcagatgggactacattggaggtaaagaatccaatgtttatacaattctgaatcttggtaaatga

SEQ ID NO: 467464 - DNA, 641 bp, Homo sapiens
attctatatcctggtttgaagtattccattacaaagtttttataatttttattccaataaataatatgtcccataaaataatcatataacttacattccaactttatcattgtgtaatattcccatatgtcatccctcgttattttcatatactcacaaacttggttactccatcagcatagtctatcttgccagtacctgtttstctgtgcctggccacttgtctagaccgtatttatccacctctctcccaccccatagaaagattatctacttctcaaagttcagtcttattatattcttctttcccacagccataatcactctacttcctgtgaattttcttacctcattttgagtcccttgtcttactcatcagtctgtcccaactgtgcctataatttcggcttactcatgagacaagaattattttaaatcaattcaattcaataaatgagtaatgaaggtatctgaaattgctttagctttcacatgagcagtgcaatctcatttggtgcacaaaataaaaaatacaagagctaacattacagatatctggggtttggaaaaaaaggtatttggactttgttcttgactgtctgcaagagattgtattcttggatactttgtcaatataccac

SEQ ID NO: 467465 - DNA, 593 bp, Homo sapiens
gttggggaagttaaatgggatactacaaatgaaatacaggtggctaaaagtggcatagaagagccagaggtcggacacgtgagggagaaggagtcagaatatttagtgggtttgagtgtgaaattataagcaggacatcgtgacctcactgggtgcttccatattaaacttcccccttaaggatttcatgtctttcccagcctctgccaccaactgatagtacatacaatgatgcccccctgttgagaatgtccaccctgatataagtttgccccctagaaactccaacttccaacctcttgggctactgattcttctgtgttacaactcctgctcagcagggttatacattttattcagcgatcctgttcccttctacccatacaagctgacctatgtactatggacatttagtgcccagggcacctcaaattcaactagaaagtctagctgttttatcaagtcttgccacaaaaaggagcactttttacctattctgggcctcatcagaatctttggtgtaacgggcacaagtttaggtatttccaattctrtaacacagactcaactcatagaggttaccgagacatgtt

SEQ ID NO: 467466 - DNA, 579 bp, Homo sapiens
aacttgacttaagtgaatagttatattagcagaaatactgcatatctgcttaatctcgacaattatttttttcgcgctgccaaaatttatttggttcctatatgacatgtactagaggcataaggaggaattaggtaagagcttcctcaggggtctcacagccttgtgggagagagagacttgggggataggccctatctctgacctttgtagctggctctttttgataatactctcctttgggcacataggtgccagcttctgacaaccatgcctgttccaagaattgcctgggataacaccttgctttcttgaagtgggtttctcttctccctgtcactgaacccccaccattacctgctctggccttttggctttaaccatctgctgtaatttgacctctctggcttaccagactcagcttcttattcaactcagctatacatcttcccttgatttcagccctgaggcttcaggagaaaggattacttcattagtcctagacccaaaggaccatgatagcctggctgacccctgacctggygagaaggttctagacatatattacaagtagcaata

SEQ ID NO: 467467 - DNA, 636 bp, Homo sapiens
ccgaacacatgggccattaaggtggcacaaattagcattctgagcgttttggcttctggtactcaagtcagacttccagatacattgataaagatggaacaggcaagtttgatgccaaggtggcatcactgtggctgaccaatgattcggaatctcacattggtgtgactagtgattatagttaagtcaatgctttgccaccccccagctttgttagtttttgtaaaatcaaattcaccatgtcaactgtacctccctccaatgcttgtggtaatgctctttcaaatgaggtattcttgttagcaggtaaaaccttatatgatcctttgccaagagattgatattagataaaaccctggttatattttttaagccataagaatataagaggagaaaaatmgcatgaatatttttcctttattttttgcagggtcacaagcatgtagagcaaaccatagtctatttttaatttcaaaatagtgctcatgtttgtgaacattaatgccaaagttttcaataagcttggttgtcaaaagaacactgccttcaatttatagtcactaaatgcatgtggattaaaatatttttagatctcaaaactaaagttcaaattggctcatgttagtaaatagacat

SEQ ID NO: 467468 - DNA, 534 bp, Homo sapiens
caagaagaaagaagatttatgaaataaaaaataattcagaataatctcctccacttcttagarttcagagaactctaagaaaatacagttagaaaaataaatgaaatttggaaaacaaatcataagcagagtgagaagtctgacaaagaaatagaaacaattaaaaaacagaaataggagatagtacatttgaaattacccaatcacaggaacaaaaagaaaaaaaaaaaagaaaaggcatatagaaaatatgggacatcattgagcaaactgaccttcacatcataggaaattaagaaagagatgagaaagaaaaatgcctggaaagcatatttaagaaaataattgcaaaatttcctgaaatttggagaaagatgacaacatcaagatacaggaagctcagaggttgccaatcaaactcaactcaaagaagatttcactaagacatatcataatcaaattatcaaaaattaaagacaaaaaaagaatactgtaaacagtaagatataaacatatcacattaaaggcagctcc

SEQ ID NO: 467469 - DNA, 552 bp, Homo sapiens
gccaactaatctgtagtattttgttatggcagcctaagcagaataatacagcagcattattcatagtagccaaaatgtggaaacaacccaaatgtgygtcatttaatgaatggattaatgaaatatggtatatacatacaatggaatattttttggccataaaaataaatacaaatacagtctagattatggatgaatcttgaaaacattatgctgtgtgaaatccagttataaaagaccatagattgtcttttatatgaaatgtttttacatgaaatgtttaggcaatctataacgaaaaaaaaattagtgtttgtctagggatggaggtggggaagtgaatgaggagtgaatactaacgggcttggggttttgtttaaggggtacaaagtattcaaaatttagatgtggtgagagttgtacaactctgtgactatacaaaaaatcattgaactgtccactttgaggaatgaaatgtatactatgtatattatatatcaataaaagctgtctaataattatatattaagtaggtctatgttattctaacag

SEQ ID NO: 467470 - DNA, 620 bp, Homo sapiens
tatgtccattatagtttttgactctaacaaattacttgtcatttttgcctctaacaaataatgctgctatgaatacttacatgcaaggattttatggttacatgctttcagttctctaagagtggagttaatgaatcacatgggaggtgaatgtttacattttttaaaaactgccaaacttttctaaagtgagtatgtcctagcagtttgtgagggtttcaattgttccacattctagtcattatgattagcyttttaaaattttctggtactgttttgttattaatttctaaggtaattccattgtgatcagagaatatactttgtagcacattcatcatttgtaatctaccaaaatgtgttttattgcccacaatatatagtctatctgaggaaatgttgcatggagtgttttaaaaattcaattgggtcaaataagttaatagagtttttcatatctactatattcttgattattttctatttttctatcttttattgagagttgcattgacattttcagaggtaattgtctgtttctctttgcagttctatcagttttttgcttcatgtgttttgaagatctattactatgtgtgtaaatgtttaggattgctgtg

SEQ ID NO: 467471 - DNA, 488 bp, Homo sapiens
agatgaaagtcaacaagagcaagccagaaaaagagttatcagaacttggccacgccagcatcctgatctgagacttcaagactccagaattgtgagaaaataaatttttgttgtttaagccacccagtcaatggtatttaactatggcagcccaagctgactaatacacttcacctcagcatctgcttcctaggaaactcaacatgaggcagtcactctgtcaccactgactataagactaggatacagtcacatatagtcaccattgcctatatgactagggttattttttggactccaatgagtccaagaaacaaatggattatatataragagattccaatatgcttaagtactttctgagttaaaacttgagctttctatttagaaagcatcttctcaacctgaattactccaacaagataactgcctggtgagcacaaggctattcatcatattcatgacatggagagatggtgctgctggtc

SEQ ID NO: 467472 - DNA, 606 bp, Homo sapiens
ttcaagcttggtcacttactggccacgtgaccttgaacaaattgcttagcgtctctaaaccttgagctttctcatctattatgaggacacccttatcccatctagttcatattcatatatgtgtgtgtgtgtgcgtgtgtaaataaaataatacacaatggcaccgaataaggcattgttatcactactgcaagatgatagaacartagtaggggtaaggaaatataagcgagtagaacatagatttagggaatctcaaagcagaaacaaaccttaccaataagtaagatcttctatgtttttcattttataaaccctgagtcagaggcccagggaagttaagtgactcaccgtgagtgaccaagcaagctgacagagccaagagttatacaatgagaggtaagatgctttgtaactgttcttttctttccttttctctctcataataagaaggcaatgtctgtgatcattatagtcatattacctgagtagctttagcagtaacttcaatccaaggagttacctgggactccaccacttaaatgtagatttttcaaaaagaggaaacttttgtatcatcaggataaaagggagcccagtgcttga

SEQ ID NO: 467473 - DNA, 553 bp, Homo sapiens
tgccccaaaaagccccagccccaccactgccacatcactccctcagggtcctcaaatgactcagaggctggaaggccagatttaagttgagaatcctcagactcttgtgtacaagtgtggacaaccagacaccccagscaacatgtccaagctctgtctaacccctccagatggccactccttggccactttatggcatagtgggaagaggctggaaagaggtctcacaaaccttggatgtgggcttgggccatttggacagggaattcaggggccctaaggaagtgatctagaagaggggacctgggctctgggggcacatcccctaggccccatactctcctcactctgtagagaagggtgtgactacagcagggcccaggacaggggccacccatgcccaaatctaaggagtgctgcatagaactttctaaaatgatttttagtccctcaattcccagttgccactgccttgtcagctcaagatcctcatctactgtgacaagccaccctctccctaccttatttaaaggggggaaaatgaagattttcc

SEQ ID NO: 467474 - DNA, 630 bp, Homo sapiens
gttttttgacagttattcaaggcagcatagaaaatataaaactttcctttttttcccctctgagatgggcagatatttaaagtcccactccctcctcccaatagaataaaaatccaacatgtatgttttttctttgattgttaacatgctcacttaagactaaaagcccacacatcgcgtttgtggccaggtgaacatgttggaagcaaaatacaaagaccccagtctgtctccttacctagccctctgcacctcaacactaacaccactttcctttstaaggaaacagcttaataaagacatcactttgtactcacgatgaaaaaagagcaagaaaggaaacataaagagaaccaagaagcctctgccgtttttgccttgtaatgcagacaaagcaattggaaaaaagcaagtaactaacaagcattcctgagaacacaggaattccagaggtctttcagttgattctcagatgctttattttattttatttatttatttattttgagatagggtcttctgcctagactggagtacagtggtgccatcatggctcactgcagcttcaaactctccagctcaagcaattctcccacctctgcctcccaagtggctgacactacaggcatg

SEQ ID NO: 467475 - DNA, 568 bp, Homo sapiens
ttgttccacactggaaagaaattaattgaaatcattaacttacaggagagaatttacatatcattagtcaatttacaacttacaaagagttgcaaagtagctcaaagacaacaggactagaatatgataaatctggaaggacatgctacagaagatgcatagttttctattgaaagaaattttccacaatattccccctattgattaaaaataatctcaaagaaagattactcttgatcacaaaatacaaattgttctcattagatttagtctgattatttacataggtgcagcaacagtgttaatttgctacatgggccttccyaagtttgctttgctaaaagtttttctaaagaatctcaaattggacctttaaaagccccttgaggcttggcagtcaagctaacaacgcaccacaggattttatctatagtacctatttatttgggtgaatttctttcttctcaaggtccctaaaatatcctaatgttcctgggacggacaggaagtgaccttcattactcacttgtgaggctgggaaccctgtaagctacctgccataacagtt

SEQ ID NO: 467476 - DNA, 568 bp, Homo sapiens
ttgttccacactggaaagaaattaattgaaatcattaacttacaggagagaatttacatatcattagtcaatttacaacttacaaagagttgcaaagtagctcaaagacaacaggactagaatatgataaatctggaaggacatgctacagaagatgcatagttttctattgaaagaaattttccacaatattccccctattgattaaaaataatctcaaagaaagattactcttgatcacaaaatacaaattgttctcattagatttagtctgattatttacataggtgcagcaacagtgttaatttgctacatgggccttcctaagtttgctttgctaaaagtttttctaaagaatctcaaattggacctttaaaagccccttgaggcttggcagtcaagctaacaacgcaccacaggattttatctatagyacctatttatttgggtgaatttctttcttctcaaggtccctaaaatatcctaatgttcctgggacggacaggaagtgaccttcattactcacttgtgaggctgggaaccctgtaagctacctgccataacagtt

SEQ ID NO: 467477 - DNA, 395 bp, Homo sapiens
tcttgctctgttacccaggctggagtgcgatgacrcaatcttggctcctgtaacctgcaacctccgcctcacagtttcaactgattctccagcctcagcctcctgagtagcttgagattacaggcacccgccaacatgcctggctattttttgtatttttgtagagacggggtttcactatgttggccaggctggtctccagctcctgacctcaggtgatctgcttacctcggcctctcaaagtgctgggattacaggcgtgagccaccacgccaggcctcctctagtatattttgagcaacttgtagttaagccaccacaaagtagataatgcaagtgtttattggtgaataaataattgagtagatgaagatacttatatagacagacattct

SEQ ID NO: 467478 - DNA, 395 bp, Homo sapiens
tcttgctctgttacccaggctggagtgcgatgacgcaatcttggctcctgtaacctgcaacctccgcctcacagtttcaactgattctccagcctcagcctcctgagtagcttgagattacaggcaccygccaacatgcctggctattttttgtatttttgtagagacggggtttcactatgttggccaggctggtctccagctcctgacctcaggtgatctgcttacctcggcctctcaaagtgctgggattacaggcgtgagccaccacgccaggcctcctctagtatattttgagcaacttgtagttaagccaccacaaagtagataatgcaagtgtttattggtgaataaataattgagtagatgaagatacttatatagacagacattct

SEQ ID NO: 467479 - DNA, 582 bp, Homo sapiens
attgttcatgctagagtcaaatttactttacataacagaaaatgcacttacatgtcaaatttaaagctgagagaactaattatattctgaacataaaaagagcttaatatctgaataattcacttaacgtaaatgctctgggtatttttcattttttacaaaaataataatcttaaaaatgaaatttttaaatggaaaaaataacaactcttggcctgtgggctctaccattattgttgatgagaaaaaaaatctaaattgaattagtaaacatcttctatggaaaaaaatttacttaatyacatagattctgtctctggatgttaatgtatgaatttgaaatatatggatagttcctttgataaagtagacatctgcttttcatctatcattttattacaaatccacaaattttaaacaaactgtagaaacataatcaaatggaaagttcagatataagtccttttcactttctgctcatcatgctgaagggagtaagaaaatacaggaagacttaacattataaacacctatttaagaactatgtcaattcccgtgtagcccatctccaatttaccattg

SEQ ID NO: 467480 - DNA, 368 bp, Homo sapiens
aattgagcagggagtaaaattcacattagatttcagttttaaacaataaaatattggaacaggaaaatctagctattttctaggaccagctatcaggaaaatatagaaacctaagaccatgtgatcaggtttgtaggcttgcgaattcaaacaatgtccttgatgacycctcagtgatgttgtcataaggtctcaaaatgagataggaaggctttgggaaaggggtcagaatggaattaggtgagatctgggatcatagcctcttacatgctgtgttaccatgcagtgctggtaatgttctgtttcttgatttgggtgctgtttacacaattctgttcagcttatgaaaattcatcaagcacttaaaa

SEQ ID NO: 467481 - DNA, 584 bp, Homo sapiens
acatttttaatgaaagtgggtcagactaggtcagtggttctcaacttgggtgattttgcccccagaagatatttggcaatgtctaaagacagtttcactggggcaagagtgctattgaaaattcttcaatgtctaaagaattttcacacttcacgaccggggcaagggtgctactggcggtaggtggggccctgggatgctgctaaatgtcctataggattgttcccacaacaaaaaaatatacagcccagaatgtcgataatgccacctttgaaaaaccctggactaggtgattgcaasaatccttcctggctttatttatctgtgcagccatcagatctctcccagctcccctctctcgtgctggatatagggctctagataagttcttaatgatgtcctccatagtacggaataattcttggtaaggctggtcttcagcataaccttgatcctgagggcgcattccagcaatcccttataagagtagctatcatttattggaagcttactctgagctctataccaggcattaggcatttctcttacttaacttgaggataagaccatcatcacttttttaa

SEQ ID NO: 467482 - DNA, 566 bp, Homo sapiens
aaatgcttgaaggagccaaagaaagcaagtagcacatctgaactggggatgtcccagtataactacaaataatctytagaactcagaaacatgggcaggaatggtctgggctgcatcttcttctggtcatccctggagccagggtggcctctggtatgttgaggctgagaggtggtagaagcaaaaagagaaaagtgttaatattcattgagacactttgctgaattctttaatatattaacatttttacaaggaaactgaagcttagaaaaaataagttacccaaggtcacacaatatttggcagagcagggatttaaagatctcaagtgccacatattgcagtgaaacctcaaccccaccctgcatcaaagccctaatttccatagcacagtaggaagagagaggaatcatgctcactaagaatcattcacactaatgtgtgacatcaacctacatttaacaagtatccactaagagtaagacaccgtgctttatgatagcttaagaaagatatgtaaggggtgtagtagatgaacattcttattagaaaatatacgaatgcag

SEQ ID NO: 467483 - DNA, 566 bp, Homo sapiens
aaatgcttgaaggagccaaagaaagcaagtagcacatctgaactggggatgtcccagtataactacaaataatctttagaactcagaaacatgggcaggaatggtctgggctgcatcttcttctggtcatccctggagccagggtggcctctggtatgttgaggctgagaggtggtagaagcaaaaagagaaragtgttaatattcattgagacactttgctgaattctttaatatattaacatttttacaaggaaactgaagcttagaaaaaataagttacccaaggtcacacaatatttggcagagcagggatttaaagatctcaagtgccacatattgcagtgaaacctcaaccccaccctgcatcaaagccctaatttccatagcacagtaggaagagagaggaatcatgctcactaagaatcattcacactaatgtgtgacatcaacctacatttaacaagtatccactaagagtaagacaccgtgctttatgatagcttaagaaagatatgtaaggggtgtagtagatgaacattcttattagaaaatatacgaatgcag

SEQ ID NO: 467484 - DNA, 566 bp, Homo sapiens
aaatgcttgaaggagccaaagaaagcaagtagcacatctgaactggggatgtcccagtataactacaaataatctttagaactcagaaacatgggcaggaatggtctgggctgcatcttcttctggtcatccctggagccagggtggcctctggtatgttgaggctgagaggtggtagaagcaaaaagagaaaagtgttaatattcattgagacactttgctgaattctttaatatattaacatttttacaaggaaactgaagcttagaaaaaataagttacccaaggtcacacaatatttggcagagcagggatttaaagatctcaartgccacatattgcagtgaaacctcaaccccaccctgcatcaaagccctaatttccatagcacagtaggaagagagaggaatcatgctcactaagaatcattcacactaatgtgtgacatcaacctacatttaacaagtatccactaagagtaagacaccgtgctttatgatagcttaagaaagatatgtaaggggtgtagtagatgaacattcttattagaaaatatacgaatgcag

SEQ ID NO: 467485 - DNA, 566 bp, Homo sapiens
aaatgcttgaaggagccaaagaaagcaagtagcacatctgaactggggatgtcccagtataactacaaataatctttagaactcagaaacatgggcaggaatggtctgggctgcatcttcttctggtcatccctggagccagggtggcctctggtatgttgaggctgagaggtggtagaagcaaaaagagaaaagtgttaatattcattgagacactttgctgaattctttaatatattaacatttttacaaggaaactgaagcttagaaaaaataagttacccaaggtcacacaatatttggcagagcagggatttaaagatctcaagtgccacatattgcagtgaaacctcaaccccaccctgcatcaaagccctaatttccatagcacagtaggaagagagaggaatcatrctcactaagaatcattcacactaatgtgtgacatcaacctacatttaacaagtatccactaagagtaagacaccgtgctttatgatagcttaagaaagatatgtaaggggtgtagtagatgaacattcttattagaaaatatacgaatgcag

SEQ ID NO: 467486 - DNA, 639 bp, Homo sapiens
gcagaacagcaaatattgctgcctgatccttcctctggaagctttgttccagagggtctcccgcctgtatgaggtgtctgtcagcccctactgggaggtgtctctcattcaggctacacgggggtcagggacccacttgaggaggcagtctgtccattaatggatctcgaacrccatactgggagaaccactgctctcttcagagctgtcaggcagggttgtttaagtctgtagaagctgtctgctgcctttttttcagatatgccctagacagtctagagaggcagtaggccttgttgagttgcagtgggctctgcccagttcgagctaccctgcggctttgtttacactgtgggcataaaactgcctattcaagcctcagcaatggcagacgcccctccccctgccatactccagcatcccagattgatctcagactgctgcactagcagtgagcaaggatctgtgggcatgggacccactgagccaggcgtgggagggaatctcctggtctgctggttgcaaagactgtggtaaaaatgcagtatttgtacaggagtgtactgctcctccaagtacagtcactcatggcttccctcggctaggaaagggaaatcccctgaccccttgcacttccca

SEQ ID NO: 467487 - DNA, 599 bp, Homo sapiens
cctgctgtttagatcccacacccagtgtctacatccaacatccaattttccccaagtgctcttctgccattatcttagtctgaggaacaagaggaagaggctttgatcaacaatatacaacaacagagtaccttaaaaccttcaaggcctcaaccagcatccttacagcaatcacctagagtacacgtcaaatttttttgaaataataattgttgctaacgtttattaaactgattttactattgttgctttaaaagtgtacctaatatgtgtcatgaatataatccttcatgtgacccaaagagttgttgctgttattttttccccattttacagatgaggaaactaaagtacagaaatgtaaaataacttgttcactgtcacacaattagttagtgaaggaaacagatttcaaatataggcagtctgacttcagagactgagttctcaaccactgactctcaacgtgcccagtgcagataccaacaagccaagtgccctgactacctgtgtaagactttcagtatggtgyggtggttaaaagcccattctctggagacaggtaaagccacattttaatttcaggtccactagtactg

SEQ ID NO: 467488 - DNA, 628 bp, Homo sapiens
ttaaaaccataatttgaggatgaagccaataaaactgctcatttgccttcaagaagcaaagccagtgctgcattggatagaacgtgggcccagagtggggtttgctgttcttagcatacaggccaacgaaacttctgctctttcttgtgacccatgrggatgaatcacagaaaaaaataaagcaacagtttagattttgtgtttttcttttttttttttttatgtgaaaagggaaaatgaggagatgatacaatgctctaaagtagaaagcgttggctaaacatcaggcaatctgagctcccaaccatctcatttttggttttttgttttttcatcaagaaaggtctcagttgcccaggctagagtgcaatgtcgtgatcatagctcactgcagtctcaaacctcctgcttcaccctctcaagtagccaggactactagcttggctaagttttttaaagaattttttgtagagatagggtttcactatgttgcccaggctggtctcaaactcctgggctcaagcagtcctcctgcctttgggcctcaaagcactgggattacaggtatgagtcaccatgcccagccctgtaaccatcatgcatttgagtttttgaaagccacttagca

SEQ ID NO: 467489 - DNA, 585 bp, Homo sapiens
gaagtagtctctcctttctacctgttggacatctatatttctaggtggcattaaactaacaaactcttcttcctaacaatagaaagacaagagtttgaactagaagaggagaaggtatttgctgcatacatgaagaactgtcttaaatggaaggcagaggcatggatcctgtgaagtcttttgaaatagaagccataattaccwgtcccattggtatggggtagagctaaagtgcagggaggtgaacagagagcctttcaaatttcttctagccagaaatttctataattatatggttcctttggtgaattctccactccatcttactctttttcagtctaccttttcattggctccgtttgtaatagaaaagcaaaagttattccccagttgtataaggccgagtccaggtcgtacagaataatgaaatgggaaagctcagagaccctaatgttagacaatgaaacaagaaactcacagacctctggacatgccatgaaatgggaaaatgtgcattttacctcctccacagcacatggaattttgaagaccaaggagagataggagaacgggtcatcataggta

SEQ ID NO: 467490 - DNA, 555 bp, Homo sapiens
tggttttgcttggatcattttggttagtacctttattctcctctcaactttccaatgtaaaatcaatttagttgtgcccaagagatcccctagcaagatgtggaaaggaatactattcatgccagttattacaggcactgccagagagaaggagctgtgctgagatcctttaatcctgtttttatattctgaaatttggttttgtttaagtcagaggtagtttcaaggcaaaatgagtcaagggcacttacaagtgatcctggaaatctatcatctctctggctcagcagtctccaccggcagagttctgctctgcaaacaccatatatgtgtgagaatattcatccatctcatttcatcattgagttgcccatgcaaattaaggcagaaagtttgtcattttgatcatgtttgatgactcagccaagttcttttgttaygtatcatggaaaattactttaagattcttcaaatacgtaaacactaaagatgaaaaactataaataatatgagagagcatgcaataaaaaaaatcatatcctacccaaataattt

SEQ ID NO: 467491 - DNA, 579 bp, Homo sapiens
tttgcaatgcattttcatactgaccaatgatgttgcatacttgttcaaagtcaaatctgtttgagtaaatttttttttttttttgagatggagcctcgctctgtagcccaggctggagtgcagtggtgggatctcggctcactgcaaactccgtctcccaggttcaygccattctcctgcgtcagcctcccaagtagctgggactacaggtgcccaccaccatgcccacctaatttttttgtatttttagtagagacggggtttcaccgtgttagccaggatgtcttgatcccctgacctggtgatctgcccatctcggcctcccaaagtgctgggattacaggcatgagccaccatgcccagctgactaaatttttttaaaagctccaactatacgctgtttacaaggaacacacttgaaataaacatacatataggttaaaaataaaaaaatggaaaagatatgctatgtataataaatactacgcaaaagaatactgatatgactgtaatagtatcagacaaagtacatctaaacaacaagtgttatgagagaaaaataagggtattttatgataa

SEQ ID NO: 467492 - DNA, 579 bp, Homo sapiens
tttgcaatgcattttcatactgaccaatgatgttgcatacttgttcaaagtcaaatctgtttgagtaaatttttttttttttttgagatggagcctcgctctgtagcccaggctggagtgcagtggtgggatctcggctcactgcaaactccgtctcccaggttcatgccattctcctgcgtcagcctcccaagtagctgggactacaggtgcccaccaccatgcccacctaatttttttgtatttttagtagagacggggtttcaccgtgttagccaggatgtcttgatcccctgacctggtgatytgcccatctcggcctcccaaagtgctgggattacaggcatgagccaccatgcccagctgactaaatttttttaaaagctccaactatacgctgtttacaaggaacacacttgaaataaacatacatataggttaaaaataaaaaaatggaaaagatatgctatgtataataaatactacgcaaaagaatactgatatgactgtaatagtatcagacaaagtacatctaaacaacaagtgttatgagagaaaaataagggtattttatgataa

SEQ ID NO: 467493 - DNA, 588 bp, Homo sapiens
atcaaacttgaatgggctctgtggactgcaattgaaccctggctgataggaaggggtgaaaagaaagcctcttgcacatcagcaaaggaagttgctctagcagggttgagctggacaagagatacagagaaaaagaaaatgtattggtgatggccaacggagtcccaagcaggtggtttatgagtgaaaatagagaaaaacatttccagtgaaacggatacaaggggagctggcaggatctcatttttccctcgcctcttcccaaagcacttattttgccattttcacgttcactggttatttgtrtctgtccctcccccagactctgagctcctgaagagtagaaactaagcttttctttttgtcacccatgtcagtatctgaacataggactttggacttagtagatgtttagcaggtgctctagcaatacttactgggtgtggtgtgatatggttgtttgttgcatgacgttcccagctcctcctgaagagggatggaagtttccatttataaacaatggagtagacagaaaaaagtctcccttgattctttttacttcagaatatggcctcagaaagtctgtgt

SEQ ID NO: 467494 - DNA, 548 bp, Homo sapiens
ttgtgttctgaacgtatattttagaaaatgctgccttataatatggcttgccctggtctttcccccaactgccaaagactagtgtaaaaagcaagggtgagtgatgccaatgtyattttaatactttttctataaattatgtcataaaatgtgatgactttctcattacaaaaatttgcagaacactcatcaatactttaaaaagaatcaaactcctcagcaccacaaatattttctgaccaccatcaacttttgttcatcatgcttaacctaactttctccctaaatcttttcttaagagtttattattattattgtaactgtcctttacggagtttttaatatgttctagggactgggctaaatgcagttcttaatcctcaaaccctatgaggtggaaacttttactaagaaaactgagactcagacaactcaccaaagtaaatgacaaggccaagattccaggccaggtctccagaactctagggtccatgccatagtcactgggaggcacagcctcatcactatgactctgtagatatatatgt

SEQ ID NO: 467495 - DNA, 538 bp, Homo sapiens
gcccagaacattgcttggcatgtagaaagttctcaatatttgctgagcaaattaaattaatgtgggaaatgcattctcatgctttgacttatgaacagattttagaatgtagcccataactattgtagacagtagctagccaatttactcatttttctgcaaaagcaagcatttcacttatgatatagataccctaaatatgtccctagggaacattttacaagattggtacgtgattaacaacatcaggtacacagaatgaggggtggaaatcatagcgctttttaaaaaaacttttgctcaagtacacgtcacatacaagactgctttctgcakttcttattccatcttattaatactttggatctttctttttaattacctggaaaagcagcacagcacagcagttaagaaaaataataatggagccacccagtctgggtttgaatctcagctacactacttactacaaacctctctgaaccttttcttgatgacattcaagtataaagtctattacaaaaaacttttggcagtg

SEQ ID NO: 467496 - DNA, 588 bp, Homo sapiens
cttaggtaagttttccatagtcaaaaatctaaatttaactcaacgccagtgcctatactctaaaaccactgcaccatattatctccaaataagatgggaaatcatgcttttaaaaccaacctggatacaagccctgccgttggattttgatatttagaaaggagattcatttatgtttcatcattttctcctctctttttcagtagattgttacttgttaggatttacggcttcattctccaaacctcccatcaactcttaaccaaaacttagtatcagaaacctacatattagatacctaaaagaaactgaaaaccatataatttaggtggatgaattgtgttattcatatttcacagatgcattcactaagtctcaaaacatttcagggaacctccttaatttacatagctaacaagtaacagagaagagcctggaacccaggcatcctgcccttccttgttcctgagasccatcagtacaggcaacatttaaagttttcactccaaacaagaaagttcttgttccatagctggtgatccttaaaccatttatatataacttgccttctgtatgaataaaactagc

SEQ ID NO: 467497 - DNA, 561 bp, Homo sapiens
atctaaaacacagattatagcatattcaaggtgggtgggtcataraattataggagtctagagctggaaaagacctagaggtcacctggtccagctccttccttaaagatgaggaaattgaggtccttggaggttaactaacttgcatgtggttacacagccagtcagcagaagactccgtactagaaaaagagagatgtcctcctggattttctactactctgcataggttatgaaaaatcaaaatttgctttctttgctagatcacacacttgtgcacatgcagtagatacatcactgagtaggttttatttaattcagttttagtattcaatgacccacgaaatggggtggtaaggaactcattctcattactgggagtatgtatgtagtgaggccagtgtaaaaactaaattgtaacattttgcaactgaggggaaggtgagatcctgagaggcattaaatgggacaaaattttaaaaaaaattacttcgcaagtgataaagcactatactcatattaggggtaatggttattttaaagtatgcctttttttgggga

SEQ ID NO: 467498 - DNA, 503 bp, Homo sapiens
gtcctcagcacagcaggtccaagctcatggataaatcaggaaaccctctggggtccacatcgaagaccagcccctggggctcagacaacctcaggcctgtccccaggtctccagagaaccctcccattccatcgctgtcttcctagaatgtgctgggctgatgaagtctctcttctgtcctgcctccatcccagmattccttcctcagccctgtctgatgccagcacctgtcttctgggcacaggacagtggcccagaggaatgcatgtctggctggctttgctctccaccaggcctgagtaaccagtggtgggggatggggagctggagggaggcctcttgtctgagctggaacttgcaggccaggctggagcttctgaatccaatccacttggccttttccttctcctttggccaacccaaaatcaaagtgaaggacttggcttaaattccccagagcccctgggacaggctggcatagctgggcgccgtgcatttgccca

SEQ ID NO: 467499 - DNA, 503 bp, Homo sapiens
gtcctcagcacagcaggtccaagctcatggataaatcaggaaaccctctggggtccacatcgaagaccagcccctggggctcagacaacctcaggcctgtccccaggtctccagagaaccctcccattccatcgctgtcttcctagaatgtgctgggctgatgaagtctctcttctgtcctgcctccatcccagaattccttcctcagccctgtctgatgccagcacctgtcttctgggcacaggacagtggcccagaggaatgcatgtctggctggctttgctctccaccaggcctgagtaaccagtggtgggggatggggagctggagggaggcctcttgtctgagctggaayttgcaggccaggctggagcttctgaatccaatccacttggccttttccttctcctttggccaacccaaaatcaaagtgaaggacttggcttaaattccccagagcccctgggacaggctggcatagctgggcgccgtgcatttgccca

SEQ ID NO: 467500 - DNA, 581 bp, Homo sapiens
tttaaacttatcaaattgtttttaaaactaataagaaacatttgatttttatagcatccttatatttattgtttagagcacactagataggtaggtaagtaggtaggtagagagagagatagatatggataatgggataatgtcttacatctttattccggtttgttttttttccacataaattatctcaatcacaaaacaattttgttttcctaaakttaatacagctgattctattttaaagctagaattaaattatcttgaatattttctatttagaaaggcttaaaactacaagctactttggatttaaagtgttctgagatttttgactgcaatgatctcttcatccaagttaaagtattcctcttactattggagtatataattccgtaactagaaggtatttggaggataattataccagctaattatttaattaatttaagaatttattcacttatacatagtattaagtactccgtattaatattggactttcagaaataaaaacagactattccatcccatagtgatcttaactatcagtgaggaggcagcaagtttaaaaaaacacaata

SEQ ID NO: 467501 - DNA, 499 bp, Homo sapiens
ttttgttattcaaatcttttaaaatttttggttattagttttttctatttatctgaggaagatgtcataaatcctgtcagtagtattagattaatcacatttcctttatttataaaaggttttatttttttgtatccacctgtgctgaatatataaaggttggtaattttctctgtttacattaatattgtcctcttatctttaygaaatactaaagattttcctttgatctttaagttgtaaaatatcctatctttttccattataaaatacactttacactgtttttgactttaatatttttgactttaaatttcatataatctgatattcatattgccactattgccactttatcttctttccttccttccttcatttcttccttcattccttccttccttccttctctcttttctcttttctcctttcctttcctttctttctcactctcttgctttcttgttttctctaagtgtttgatctattcttgctcatt

SEQ ID NO: 467502 - DNA, 621 bp, Homo sapiens
tggcaatgttaacttccagcttaatggaatcattgttgtgtctcctggtggcagcattcctccttctggaactgagacctctaggccagcagaacataatgtcatgagaacagaaagcaaaaattttgctagtaggtcactggggatgatggtcactggtgccacttccacttccatccgttggttcctggacctatgaatcctggctatgggagaaaaagtaccatatattggacrctgattcagagcatccacagccttctggagaactctaccacagccctccaaagtattgtcacctagttggtgttgtaattgtgacttcaaaaggcagttccatagttctatcaatccagctgcttcaggttgttgggaaacacggtaagaccagtgaattccatgagcatgagcccactgccacacttctttggctgtaaagtgagtgccttggtcagaggcaatgctgtgtggaatttttctacttggtaagatagagcctaaaatgaaatcacaggagtctttataagtggaagagacaagcagataacaaacaataaatctgtgttatttaaagccaccaaatttgtggtaatttgctactgcagcaatagaaatctaaga

SEQ ID NO: 467503 - DNA, 619 bp, Homo sapiens
cggaaagcatttagcacagtgcatggcacatagtaagtgctcagtaaaatgtagctgttatctatttcacactaccctgccgcaacggctgcctaatattttgaccacccttagctatctcaatgacctgaagttctgtcaagacttcccagtacagctctatattagctatctattgtgtagcaaatgaccccaaacttagcagcataaaacaatgaatacttattatctcacagtttycgtgatcaggagtcttagctgggttctgtaattcagaacccagctaagttcagctgggtcctgtaattcagagtctcacaaggctgcaatgcaggaatcagtcaaggctgtggttttacctgaggcccagctggggaagggtctgcttccaagctcatgtagttgttgacagaattgtttcttgcggctataggaccaaggacctcactttcttgctggctgctggaggtccttgaaggctgttagctggaggctgcccgtggttctcgaggctgcctgagctccttgacatgtgaggttccccaacatggttgcttgcttcgtcaaagccagtaagggagagagaagctctagtaacagcgtttcagtattgtgtaga

SEQ ID NO: 467504 - DNA, 612 bp, Homo sapiens
ttgaggtgacgtgggggatgtgtgagcttagcaggagtgtgtgtgaggtaacatggggaatatgtgaggtgacctgcctgatgtgtgargtgacctgagcacatgtgaggtcacctaaggcgcatctgaggtgacatggaggatgtgcgaggtgaccttgggtgagtgtgaggttacctgtgggatgtgtgaggtgaattgggacttgtgtgaggttacctgggaaatgtttgaggtgacctgcgggatgtgtaaggtgacattggggatgtgtgaggtgactcagggcacatgtgaggtgaccttggggatgtgcaaggtcacactgtgtgagtgtgaggtcatgtgggatatttcaaactttgtaaggaaagcctgcaacaatatatggctctagaagcttcacactccaacactgttaatgcgcacatcctcaaggaactctaaatgtttccaggttagcttaaatgccatggagtgacacctgccccaggtacactcatatatgcatcctgggtctccctatcaacccctatcctcaaattttcagttcatgtttgctccatgatatcaactctgatatgctgaggtttttttttttttatctgtagt

SEQ ID NO: 467505 - DNA, 555 bp, Homo sapiens
tatatatttatgcagaaaaaaacccatatgataatatcccctcaaataaaagcatttcacacataccaagattggctatgactcccatctttcattcagtccctgttttcaaatggtgtggatatagttttttcttctgtgtgtgttgtagaggaatgagatacaagaggtgcagcctagcaaatatgcaaaaagcaacttcaacttagtaagcctgtgggtagaaagtggatccctcyatccttggcattctggccctctcctggcccaaccttcctatattagggtgactggaatcactgctcatcctaaaagtcacagtcagggccatgacacaaaattctctctgttgatatttaagcccaaacagatagaaattcactaccaggtagtcccaaaccacagtggggccagaatatatttggcttgcacaattggatcactagctagcttgcagtactggctcactccagtgaattcattaatttcacctggatccacatgtcatgtgactgggttttttttgagttcccctcattcctcctgtctccaccc

SEQ ID NO: 467506 - DNA, 557 bp, Homo sapiens
ctgtgtctgaaaatgtattagtcaggtttcaaacaaacaacaaacataaatcccctactgggacacgcacacacacacacacacgcgcgcgcgcrcacacacaaacagatttgttataagcttatgcaacttgcggagctggttaagaattttctgtaaggctggaccaaaacgtgtcgaatcttgttgcctctgctcttagtgccaagggtatcctgcaggagctgggaccctttgtcccagagctctgtatgcaaacctcacccaagagttggaaaagctaaagaagggtagagggggaggtagagcagttgtagccccagatggtacctcacatcaatgaggcgagtcagcaaagcaacaataatacaacttgtgtgcagtttaagatggctgctgtttctctcctgccttccaactaataaggctctcccttgtagcataccatagccaacgaaaaatggcttcagcttagccaagctgacacattacaaagccaccagagataactccactagctgaattgattatgtgactgctttttggaccatattgtt

SEQ ID NO: 467507 - DNA, 568 bp, Homo sapiens
caacatatgcacagagacaaaatggtatagcagaaagcagttttaaaatgagtgtctggtccctgcaacagtaaaatcctaacactgggttctcacaagttgtggtgacgtgtagactatcagctacctctgggattggggcctctgtgaataggcaatatactgtttttaagactcaaagtatgaaaatttaagaaagattatagttttggaaaaactattactggatggcttcctggaagaaagaagttgtggggagagagtaacagaaggaataaaaagtctcttggttcacagactgaaatccataatgctataggatctttacaacaatttcagtggtctgttatacygctcagtggatatgttgcttagtgaatattggtctcgttgcaaggataatgtcctatttgagtccaaaatagctcacacatctctcttgtgtttagtaataaattgccaccaaccatcaggtaaaagttcattttacaagattccagatggtgcatttaacaccatttttaaggcttcctgtaactagctaacgcatatagttaatgcagatata

SEQ ID NO: 467508 - DNA, 563 bp, Homo sapiens
taaaaaccacaaacttgggaaagcttggctgtttcctatacttcattgtgtcaatggaattccatattttaccttttgtggatgttaagacctggtgtgttttctcaaacaggaaaggtttcagaaaatgcagcattaggccaattgcagaaccaagagagatgaattgtgcaattttttgtagattagattttcctaacttggccactgtcggcttcatccctgtggggtcaaagctactttgtgcgcagcaaatgaaacttgattttcagggaaacatgtttgccttcagtaaaatgcagccaccgtaacaatctagtccatccagagatgaaggttgtagcattgcttccctcttagatatattgttagcagtgtcaacartgtagaactgtttaaacctgctggacgctgtgcattttggtgactccattccatgtaccacatgtgagaggtagaaagtgtggaaggggcggtgcttctcagagtgtgggcatttgcatggcggtattcacatttgcttatgaaatagccccctctgagttccagaagtggaaacaaga

SEQ ID NO: 467509 - DNA, 622 bp, Homo sapiens
tcccctatttcagagtccagtgattccagctgaagtgtatgagtccacagccatcctcccctcccccgaagtcacatttgtgcattatgtagaaaccacacatgtccccagaggttgaagcaagaggtgaaagatgatctggaagaggcatgcaggaaactaagcaaacagaaatgaaggatgctttcaagggggctgaatagccacacacaggattaacaaggcagtgagggccttcagaaatgagggctacagccaccctgtcgctgcccgtaagagctcagtaaggaraatgagggccaacccagaaaaatgaagaacgtgcctcaaaatcaggtcccaagacatatccccgcatccaatcatactgaatattttttttggcaggaaaacttgtttatttgggggaaatgaatccacagcattaatggataatgcagttgaaggaactcctgggactggtctctgggaggggaaatttgcacaaaagaaaccattctaactgccttcagttatgttctcttgaaaaaagaagcctcagccagctgtttgaacagattaaactggggtgtacttagatatacacagtgtctttctggtggtcacttgctgccttactgga

SEQ ID NO: 467510 - DNA, 622 bp, Homo sapiens
tcccctatttcagagtccagtgattccagctgaagtgtatgagtccacagccatcctcccctcccccgaagtcacatttgtgcattatgtagaaaccacacatgtccccagaggttgaagcaagaggtgaaagatgatctggaagaggcatgcaggaaactaagcaaacagaaatgaaggatgctttcaagggggctgaatagccacacacaggattaacaaggcagtgagggccttcagaaatgagggctacagccaccctgtcgctgcccgtaagagctcagtaaggaaaatgagggccaacccagaaaaatgaagaacgtgcctcaaaatcaggtcccaagacatawccccgcatccaatcatactgaatattttttttggcaggaaaacttgtttatttgggggaaatgaatccacagcattaatggataatgcagttgaaggaactcctgggactggtctctgggaggggaaatttgcacaaaagaaaccattctaactgccttcagttatgttctcttgaaaaaagaagcctcagccagctgtttgaacagattaaactggggtgtacttagatatacacagtgtctttctggtggtcacttgctgccttactgga

SEQ ID NO: 467511 - DNA, 647 bp, Homo sapiens
aagcattcaatattttaacattaagtaagtgtggaggtgactgtccctctgagaccctcttttaaaggccaggaccttcagtgaaaataaaaatgaaaattcttttcaccagtatgaagaacagtgataaaggaatttttatcatggccacagctctgggtaggatgcttagaatttatcgtaatcacatgcctgtatcatataagttgtgatttgaaatcacactacctacatggtagaaattccccaaatagaaattaacttaaaagttggttttggggacatttagcataatcaaatacaaagcctctctggaaagaagtattcctggcccacarggcataagattttcatagataaaagctcactgaggatgaactcacagtttagaactacaaaccacaggagaaaaatatccaatattatcaagagttattagacagaatgaaataggatctttagatgttcaagaactatatattacctgatggacaccaaaaaataagcatgttaaaaaataatataaatctgactaaatcagctcattatgtgtctcagggatagacaaagaaataaaaacacaaaatttttcatcttgaaaaagcaatgagttagtaaatacttttttcatttctgaaattagataa

SEQ ID NO: 467512 - DNA, 640 bp, Homo sapiens
acaaatcatatgattggattatttgacagaagaaagtaacaaattaatatacttgttatctttaaactttgatcattttaggtatgcaagctaaaatgttcagaaataaacagaataaaaatgttataatttccaaactagttgatggggaaaatgtaatgagaaaaaaaacatttggtctgaaagaacacaagaaaggggtgaggggagaaaacagaaaagccaggacaaayagaaagcacataataatccaaatacaattcacacctgtaattgcaacacatagaaaagaccaaatactttagactacagacaaaaattgccagataaaatttttaaatgaaccatatgcttgctgattactgggagcccctctaaaacagaagaacatataaacacagaaaggaaagggtggaaagaagatatactaggaaaataataaccaaaagaaagttggaatgtttctattagtattggataaatgagactagtgactagagctagtgacagtttctacataataatagaagtttcaatccaccagggagatataatattttgaacacgtgtgtgcctaagaattaaatctcaaaatatatgaagcaatatttgacagattacaagaaaaaatagataagtt

SEQ ID NO: 467513 - DNA, 536 bp, Homo sapiens
gtctgtaactattctatagcggagatattgaacaatttagttgatggagaaaatcaacttttatactagtttcagtcataaaagatcatgaagcaagggttgggtaggtgagagagatggtgagggaatctcattagaaaattactgttgcattgaagtcttggtgtaaaatagctaatatatctctttctttctgaaccatggcagggaaaggcaaaagaaacaagattctccttcatgctttgtctgtgatacatgtcgattcatagattcagggtgtgtaactgttcttttcaatatcccaagtatgctatatttctgatgaacatatctgaagtgtgctgtcttagctcctagctatttctacattttctcacttccaacttgtcccatggcaaatggtagcatctgcagacattggctttggcactactgaagcactgctgtctttggatggcttcttttactttccagttagaygaaggaagcccaagagtcttctctttttaatgtgagacatcacagaaacccaatta

SEQ ID NO: 467514 - DNA, 580 bp, Homo sapiens
tatgtgtttgacagggttgagtattttagttcacactacagtttgaatgtgcaaagagaacatcatctttttattttgtcattaacagatctgaccttctttgtgagccttatgcattctctaatcatgtttacattttgttccatccattaatttaattagtccctttagggagagctttcagatttctctatctccagaatctcacgttaagttccactctaagatagaaaaaaagcacttgggttgcagatcttcttgcttcctgggctctactgtctgaagtcgatgactggagtgacttatggttccttctgttggttcagacgatactctgggtgggtgtgctwcctccctgattcagccttctctctgcttcctgtggccctctggagcctgactatgactgagtggtcatctcatcacctctgcagtccttgctacagagccacctcacccctgcttggcatccacttttggaaagctcccccaaaagattctcagcaactcctgggtcttagctgcacctcccagaaaccagatcccagttcacgtggctggctgtgcctcagattggagt

SEQ ID NO: 467515 - DNA, 580 bp, Homo sapiens
tatgtgtttgacagggttgagtattttagttcacactacagtttgaatgtgcaaagagaacatcatctttttattttgtcattaacagatctgaccttctttgtgagccttatgcattctctaatcatgtttacattttgttccatccattaatttaattagtccctttagggagagctttcagatttctctatctccagaatctcacgttaagttccactctaagatagaaaaaaagcacttgggttgcagatcttcttgcttcctgggctctactgtctgaagtcgatgactggagtgacttatggttccttctgttggttcagacgatactctgggtgggtgtgcttcctccctgattcagccttctctctgcttcctgtggccctctggagcctgactatgactgagtggtcatctcatcacctctgcagtccttgctacagagccacctcacccctgcttggcatccacttttggaaagctccccmaaaagattctcagcaactcctgggtcttagctgcacctcccagaaaccagatcccagttcacgtggctggctgtgcctcagattggagt

SEQ ID NO: 467516 - DNA, 566 bp, Homo sapiens
ctgtgatatgctctctccctaaacccttaaatactcttagtctttaagagagtgtgctcctgactgaaattggccagaagcccctctcagatttattctccaaaataaacctgtcttttactgttgagtcatttttcatgtttttcctctttaactgttacacatcctactattgtatattctagtctttggggaaatagcagtgacaaaaacaagcacctatgtttgcctttatggaacttatagtctacatggggacacaggacatacatttgcagttttaacttgaataaaaattgcttggggagaaaaaaattctctatgattctttttctgctatgcatctatctatccatcaatttatctacctagcaartctgtcttactctgtccattagttgagcattcttactgtatctttttaggtccactttgactagggacagataggcaggagacagattcctctacacactctttgtttaaagttctgaatcttctgtaaatgacaatggatcaaatagttcaataaatatttatcttcccaacccatgccattctgctac

SEQ ID NO: 467517 - DNA, 565 bp, Homo sapiens
aaccaacaattgttatgggcttctgtatccaagtgactgtgtaagcattttgtatgcattctctttaatacccacaaccactctgtgagattattattattattctacttttactatgagagaaactgagtcatggagtgtttttttatattttttaagtaatttgttcaaggccacacagtaaatggcgtagcctgacgtggcaggtggsagggtttcagggaacatgggctgaagatgttattctctttgagcctgagtgattggttagaagaaaaaacacagaaagaagggaaccgttatagagacacatttcagatagtgaaaacattatttaataaaacacaggggtgataaatatatgccatgtgaagcaaaatttggcatcttggttttatcatgacaaaacctgccatatggactatagagaaagatgaactagagaactcatcaagggcctcttcagggagggtggactttgacatgttgtgcataagaaaaagttatagagagggaagactgccagttttgattgttataaatattattttggtaatggatttga

SEQ ID NO: 467518 - DNA, 597 bp, Homo sapiens
tttgggacctagtagagaatgaacatttgatcatgaaatatcaatgggttacacaaattgagctacttatcataaactctatgttgcatacaaagataaatgcccttacagaagaactaatgtagaaacatattccaaggaaactcttggagtcaggatctgtagcagctgcacatgtctctgatttcccacttattctagggcatgatctaacagggtcatgcatccatattcattaaagggatctcaactctgaaaatgtggaactttatacaagatgaatggaaaacaccagaccctcccaagttatagtcagctttaaaatacagatcaagaataaaatagcaatattttgtggcataaccatggttctagccctttcaggtcactatttgtggctaaagggtagagtaactagccctttyttcagcataataggaaggagctgggtccaacctttgcaattcattaagatattccttggctgacttccctgaagctttgaaggaagccaacaacttctcagggaggccaaccatcaagtggaccatcagtcttggacaaattaaactttatctctcaaataggtgttgcctg

SEQ ID NO: 467519 - DNA, 568 bp, Homo sapiens
ctccctcactgggtttcaatccaatactattaaaagttcttgagccaggagggccagattcttcccttagttacacacattcaaaattctcaaccagttgatggataaatagatagatagatagatagatagatagatagatagatagataaatacatgcacacatacatgcataacctttccaccttaggtaaaccagagtagtctctctgccaattcacataaagattctaagtacccttgagataacagtgataaaagggtacagatttctaagcttctttatgaaataaatgtgtcaccaaggataactactatcacttcatcctgtaattttattgttgcttttttccatccgaacctgaagcccacttgcataagcacaagtagtaataccacaattctgatcaataaaatgyctgctcctaatggttgctacaacctaggaagcacaaataacatgaactaaacaaagtttcttcaacccatggcctgcaggccttatatggcccaggacagctttgaatggagcccaaaacaaactcataaattttcttaaaacattatg

SEQ ID NO: 467520 - DNA, 659 bp, Homo sapiens
tgttgtctacaagaaatccactttcaatatacagacacatatacactaatagtaaatggatggagaaaactataccatgatagcagtaatcaaagtaaagcagaagtagctatactattatcagcagagcagacttcagaggaaggaaagttatcagggataaaaacgggcattatataatgacaaaggggtcaattctccaagaagccaataatccttaatatctatgtgtttagtagcagagcacaaaattataagaggcaaaaactgtgataaaactggaatgagaaatagattaatccacgatttcactggagacttcaacatccctttgttggaaatggtcagattcaacaggtaaaaaacctataaagatataattgaactcaacagcatcatcaatcaactgtatctaattttcctctttagacaaccttatctaacaacagcagacttaacatttttttcaagttytaatgaaatattcacatgcaatattcaagataaatcacattctgggccataaaacatgtattagcaaatttgaagaaataaaaattatacaatgtctgctcccagaacatagtggaattaaactagaaattcataacagaaggatagatggaaaatccccaaatacttggggatgaaacaacaca

SEQ ID NO: 467521 - DNA, 659 bp, Homo sapiens
tgttgtctacaagaaatccactttcaatatacagacacatatacactaatagtaaatggatggagaaaactataccatgatagcagtaatcaaagtaaagcagaagtagctatactattatcagcagagcagacttcagaggaaggaaagttatcagggataaaaacgggcattatataatgacaaaggggtcaattctccaagaagccaataatccttaatatctatgtgtttagtagcagagcacaaaattataagaggcaaaaactgtgataaaactggaatgagaaatagattaatccacgatttcactggagacttcaacatccctttgttggaaatggtcagattcaacaggtaaaaaacctataaagatataattgaactcaacagcatcatcaatcaactgtatctaattttcctctttagacaaccttatctaacaacagcagacttaacatttttttcaagttttaatgaaatattcacatgcaatattcaagataaatcacattctgggccataaaacatrtattagcaaatttgaagaaataaaaattatacaatgtctgctcccagaacatagtggaattaaactagaaattcataacagaaggatagatggaaaatccccaaatacttggggatgaaacaacaca

SEQ ID NO: 467522 - DNA, 574 bp, Homo sapiens
tcatataagatgtgacttgctcctccttgccttctgccatgattgtgaggtctccccagccatgtggaactgtaagtccattaaacctctttctcttgtaaatagcccagcatcgggtatgtcttttttagcagcatgagaacggacttagcagaacatctttgagtctcatttttctgttgaaaatatttatatcttatcataattttatggtgtggtgttttccagtaagttgcattgctcctttttttttttttttttttttttttgagacaaggcctccttctgtcacctacgctggagtgcagtggcagaatctcagctcactgcaacctccacctcctgggttcaagtgattcttgtgcctcagcttcccaagtagctgagactataattacacaccaccatgcctggctaagttttgaatgttttggtagagatggggtttcatcatgttggccagactggtcttaaattcttracctcatgtgatccaccctcctcagcctcccaaagtactgggattactggtgtgagccactgaacccggccaagttatattgcttcttaagta

SEQ ID NO: 467523 - DNA, 565 bp, Homo sapiens
aagggagaattgagtgggatcaggactagctacatgattggagggctcagtacaatgagaaaatacagggccccttgtacaacggttattaagaatttcaaaatggtgacagtagagcattcaacaaagcacaggacccctctgagcatgaagctctgtgtgactacagaggtcacacacctgtgaagccagcccagattaggattccaaactagataccatcaatctctatgataaaccaggtgcttacyctttcacatatccatgtttctttcattttctctgtcacctcaaaatcccatatctttcatcattttttgtgccccagtctggtttacactcagattttagaagtctgctttattcctaattcaaatgatttaaatagtaaaggaagtacatttaagtgtgtgtgtgtgtgtgtgcgtgtggatgtgtgtttttcttcactctgttgattgccatctgtgcaaccagctcagagtagaatgcttttttggaggggtggggagcttacacaactcaatgttagaaagaaaaaaatcctacttctatccaaaatttt

SEQ ID NO: 467524 - DNA, 559 bp, Homo sapiens
tgaacaaaatcttgtttcccagaaaagggatattttccaggtatcattcccgtcatcccctgcaacaaaaagtcctcaaattctctactcattcctattatttctaatgtatataaacaacagaaagacctattcttggacatacaaagataaacaaagaccagaaatcatttatcttttctgatattttgaagtgaaaatatacaccagctgacttagaaattaataaaaagaacaaactcaaaacytagttataaaacctaatacaaatgtcaagagagtgtaaataatgtaaagaattattagagcataataaaaataagggtagtaagtcaactgagcaaggaaaaggaggaaatcaaagaatgctcaatgttttatttcataccaggacattaataactttacataaacagccttaaaaagatataaaatattaatacaggataagctagcatctcaaatcatcaaaggaaaaatgaattactcaacaactggttaaaactaccatctaaatctgtgggaaaacagaaaatcaaattgacacaatatataaggt

SEQ ID NO: 467525 - DNA, 533 bp, Homo sapiens
ctttgtcttttgttgttgctggatctttctgaccagcaattgagatggggggaagtctctgtgtatcttcctgctctacacttagataattggtgtgtgcactgtcagttaaaaagcatggctttgccgtgactatttgattttagttacaagtgttggcaggagatgctgaaggagacaggaggtatttaggaacggtggccctttgagatacaaaattataaagcagccacagaaatgagtcagcccattaagctgagccataaccacagctagccagagtgctcargcttctttagtcatgaaatgcacacggcccttcaaatgctccatccctctgtaacctcacaacacccagagcatattctttccacaatggctcctaaaggaactttgttgattaactgctaaacacatacaaaagcacacaaatctgaatctcgtgtctatgcaaaggtgagaatgttcttggagttctaaaattgttgagaagagttagttgtatatttccctggacagaaaatagctcatgg

SEQ ID NO: 467526 - DNA, 533 bp, Homo sapiens
ctttgtcttttgttgttgctggatctttctgaccagcaattgagatggggggaagtctctgtgtatcttcctgctctacacttagataattggtgtgtgcactgtcagttaaaaagcatggctttgccgtgactatttgattttagttacaagtgttggcaggagatgctgaaggagacaggaggtatttaggaacggtggccctttgagatacaaaattataaagcagccacagaaatgagtcagcccattaagctgagccataaccacagctagccagagtgctcaggcttctttagtcatgaaatgcacacggcccttcaaatgctccatccctctgtaacctcacaacacccagagcatattcyttccacaatggctcctaaaggaactttgttgattaactgctaaacacatacaaaagcacacaaatctgaatctcgtgtctatgcaaaggtgagaatgttcttggagttctaaaattgttgagaagagttagttgtatatttccctggacagaaaatagctcatgg

SEQ ID NO: 467527 - DNA, 554 bp, Homo sapiens
gttaactgcaagggagactgtgaaattgtgtgggaattccacttttggcatttcttagaaaatctatatgtttttctaagtccaaaatccaaagaaaaattgtcaagaaatcagagaaaataagagaaatgtctgatttccttgcaggaacaaaaatctttcaatcaaaatgaagatgtcgcctgggcacagtggctcacacctgtaatctcagcacattgggaggctaagggaggcagacggcttgagctcaggagtttgagaccagcctgggcaacatggtgaaatcctgtctctacaaaaaattcaaaaattagccaggcatgctggcacacatctgtagtcccagatactcaggaggcagaggaggatcacttgagccccagaagttgaggcttcagtgggccgagatgatgccactgccctcaagcytgagtgacagagtgagatgctgtctcaaacaaacaaacagacagacaaacaaactggagacattactgatttgaaagaatccagtgacatcaagttgaaagcaagaacaggaaatattgact

SEQ ID NO: 467528 - DNA, 494 bp, Homo sapiens
gaagtcatagagctgcataagggctttagatctagatctttctctatgtacattgggagccattgaggggtttgaggcatagaagtaccatggtcagagttatgttttgtgagaaatctctctagtattacattgagtgtagactgtagggaaacaagaatggcagcaaggagatcaattaggcagcctttgcaatagtctaggcaagaaatgatggtgactctaactgaggtggtaacaatattggtggcattaaatagtcagattctgattatgtttgaaaacagaattggattattctgaccagaaaaaaaattaagactgagaaggtgtttggcaagagaactctaagaatagagcttcccagaattgaatartttcagggcagggaatataatgatcagatttgttgtttcagtggccactatgccggcttgatggaggttgtttcaagagaacaagatgagtcaggatgtgacagattagcaggctac

SEQ ID NO: 467529 - DNA, 616 bp, Homo sapiens
ctgtcaggtgggtgttgggatctctttatatttagttttgttgtgctgtggttattgatgttgcggttttcagtttccttccctcgtagttactccccacctgggctagccactctctacccatcacaggcccaagtctgtgagaaggggcttctcttaggtcctcaccaaggccccttcccaaggtcccttcccaaggcccaacctgcccacagtctcaccgaggccagcagggccaggtctgggcccaggtccagtcccaggcaagggtattgtgtgtgcttcctgataggtcaggccgccctgaaccctccaggcacactggccctaaatgtgtctgcttcctgaagggtcaggctgccctgaaccctccctgcrcttcctcttgtgaccagtgttgaagatcaagaggaagaggaagaggccaaaaattcttcacacagagccctggctccgagcccctgtggcctgtcacttacctggtccacagcagaggtggtgtctctagatgagggtaatgggaagcatccttccctcatgccctgctcccttcctccgagccatacccattacactgagccagtcacggcagacatctaggcagaagggaccacag

SEQ ID NO: 467530 - DNA, 482 bp, Homo sapiens
ctgttgcacttactatctacttaaataatttgtttctagctcctgtatcaacatgacagtgtattttgctacactgacagagagaccaccattaaattaaaaatattgcaaaccacacaaaatccacaaaatgaatagaagaaaataaaataaatctattcaaaattcaaccaaccgtaataaaacaaaatacaakaatcaaaacaatctagtgaagacaattactcccacgtcaactatttagcagtaaatgaaacattgtactacaccactacaaattgaattacatattttcaaataagcctttgagattataaaggtctgccttcatacagaaatccaaaaattaaatacaaatcagtgacaaaaaataatacaaaattatcttggaataataattaaatggtgcaaaggaaaaacagagaaaaccaaaatttaacaaaggacgttgaataaaaaatgaaaaaatattcaagagaatg

SEQ ID NO: 467531 - DNA, 585 bp, Homo sapiens
ggaaaaacaaagtgaagaactgacactacccaaattcaagacttattgtaaagctatgacaattaagatagagtggtacgggtaaaagaataaacaaagagatcaaacagagagcacagaaatagacccatataaatatggtcaactgatttttgacaacatcatataggtaatacagtggagaaaagatagtcttttcaataaatggtgctggaacaactggacatccacatgcacaaaaattaatctttaaatagaccttatacccttcacaaaaataaattcaaaatggatcacagatctaaatgcaaaatgcaaaactataaaactcccagaagatgacataggagaaaatctaagtaactttgggcttggtgatgatttttttagatacaacaccaatggcacaatccataaaagaaaaaattggtaagctggattttattaaaataataactttatatctgtgaaagacactatcaagagaatgaaaacacaaaccacagactkggagaaaaatatttgtaaaaggcatatacgataaaggattgctatcaaaaatatacagagaaagatgcagctgta

SEQ ID NO: 467532 - DNA, 543 bp, Homo sapiens
aatgtgattacttcattaatatgtcgaagtatgggtacattttgaacacatttgtgaacttgtaatccctttcttgatgaatagtacctgcggatgagcagaattgatattttctctggagcagtaagttagcactggtagaatctgttctgtaatcccaggtccctgggctccagtgtcaatgcttcctccttagatcctccctgaccctgtaaatttacctcagtctctatttcttaatccaatagctatttcaattgatcttcaattactttgcatgtggccagatattatttatgggttatattctaattcacatttttctgatgtaatttcagagagcctagaaaatataataaactccttctgacaggtacttgagcctcagtatttcaacatgaacaaatgcagcatctrttccctatcatgagcactctaaatggcagttgagtgtttatatcaaaaaaaagtcaggaatcataatcatttagagataaaagagatcccagatctgaaaagtcagctagcttaggagtttcaaga

SEQ ID NO: 467533 - DNA, 543 bp, Homo sapiens
aatgtgattacttcattaatatgtcgaagtatgggtacattttgaacacatttgtgaacttgtaatccctttcttgatgaatagtacctgcggatgagcagaattgatattttctctggagcagtaagttagcactggtagaatctgttctgtaatcccaggtccctgggctccagtgtcaatgcttcctccttagatcctccctgaccctgtaaatttacctcagtctctatttcttaatccaatagctatttcaattgatcttcaattactttgcatgtggccagatattatttatgggttatattctaattcacatttttctgatgtaatttcagagagcctagaaaatataataaactccttctgacaggtacttgagcctcagtatttcaacatgaacaaatgcagcatctattccctatcatgagcactctaaatggcagttgagtgtttatatcaaaaaaaagtcaggaatcataatcakttagagataaaagagatcccagatctgaaaagtcagctagcttaggagtttcaaga

SEQ ID NO: 467534 - DNA, 583 bp, Homo sapiens
gtttggtgctgtggacaggcaacacaggcagaaactggtggctagggaatcagagaagttttcaggagggagcatttgacttgggcttgaactgagcatcatagggcaatatagaaacaagtttatggataattmactgaattggtggcagtttataacttgaatcttccttcagatgattgaagttagtagcccagctatgaaagtctaggttacagatgtctcagccacagcttgcatatatatggatgaggttcatacatatgcagacttgggctcctgccaagatatgagagttttggtcagtctctgtctcaattctaatgtctctgcctacatacttcagtccagagttgtcatgcaaagaacagaaccctggaacaatcacacaaggatttggtactaggcttagccattttctagccatggggacaaaagaaaattactgaacctctctgagtcccagtttatttgtctataaaatagggatagtgatactggggttacaaggaaattgtgagaattaaaatagttcaggagaggttaagttgtcctggggccacctttgtcattgcagtgacca

SEQ ID NO: 467535 - DNA, 583 bp, Homo sapiens
gtttggtgctgtggacaggcaacacaggcagaaactggtggctagggaatcagagaagttttcaggagggagcatttgacttgggcttgaactgagcatcatagggcaatatagaaacaagtttatggataattaactgaattggtggcagtttataacttgaatcttccttcagatgattgaagttagtagcccagctatgaaagtctaggttacagatgtctcagccacagcttgcatatatatggatgaggttcatacatatgcagacttgggctcctgccaagatatgagagttttggtcagtctctgtctcaattctaatgtctctgcctacatacttsagtccagagttgtcatgcaaagaacagaaccctggaacaatcacacaaggatttggtactaggcttagccattttctagccatggggacaaaagaaaattactgaacctctctgagtcccagtttatttgtctataaaatagggatagtgatactggggttacaaggaaattgtgagaattaaaatagttcaggagaggttaagttgtcctggggccacctttgtcattgcagtgacca

SEQ ID NO: 467536 - DNA, 590 bp, Homo sapiens
tttcagactgcagtgaaccatgattgctccacttcactctagcctggatgacagagcaggaccctgtccccctgccacaaaaaaagaaaagaaaagaaaagaaaaaagaaacatagaatagaaaacgtctcctggtttgcatcctggaatagagaaatgagcacaggctttcaaatcaaacagtagtgattcatatcctgcccctggcactcacccagcatctctgaacctgaatattttcatccaggttgacttaaggatgaaatggaaaaagrtttacaaagtacctggggcatagcaaaggattcaataaatgttctctcccttttcttctatattagttatctattgctaaataacaaattaacccagaacttagcagcttaaaacagcaagtgtttttctgatagtttctatgagtcaggagcccaggcaaagcttcgctgggtcttctggctcacagtctcccaaaggctgcaatcaaggagtaatataaggctatggtctcatctgaaggctcaactgagggatgcttcctttccaagctcactcatgtgattattagcaggttcaggttttggctgactctt

SEQ ID NO: 467537 - DNA, 590 bp, Homo sapiens
tttcagactgcagtgaaccatgattgctccacttcactctagcctggatgacagagcaggaccctgtccccctgccacaaaaaaagaaaagaaaagaaaagaaaaaagaaacatagaatagaaaacgtctcctggtttgcatcctggaatagagaaatgagcacaggctttcaaatcaaacagtagtgattcatatcctgcccctggcactcacccagcatctctgaacctgaatattttcatccaggttgacttaaggatgaaatggaaaaaggtttacaaagtacctggggcatagcaaaggattcaataaatgttctctcccttttcttctatattagttatctattgctaaataacaaattaacccagaacttagcagcttaaaacagcaagtgtttttctgatagtktctatgagtcaggagcccaggcaaagcttcgctgggtcttctggctcacagtctcccaaaggctgcaatcaaggagtaatataaggctatggtctcatctgaaggctcaactgagggatgcttcctttccaagctcactcatgtgattattagcaggttcaggttttggctgactctt

SEQ ID NO: 467538 - DNA, 590 bp, Homo sapiens
tttcagactgcagtgaaccatgattgctccacttcactctagcctggatgacagagcaggaccctgtccccctgccacaaaaaaagaaaagaaaagaaaagaaaaaagaaacatagaatagaaaacgtctcctggtttgcatcctggaatagagaaatgagcacaggctttcaaatcaaacagtagtgattcatatcctgcccctggcactcacccagcatctctgaacctgaatattttcatccaggttgacttaaggatgaaatggaaaaaggtttacaaagtacctggggcatagcaaaggattcaataaatgttctctcccttttcttctatattagttatctattgctaaataacaaattaacccagaacttagcagcttaaaacagcaagtgtttttctgatagtttctatgagtcaggagcccaggcaaagcttcgctgggtcttctggctcacagtctcccaaaggcygcaatcaaggagtaatataaggctatggtctcatctgaaggctcaactgagggatgcttcctttccaagctcactcatgtgattattagcaggttcaggttttggctgactctt

SEQ ID NO: 467539 - DNA, 527 bp, Homo sapiens
ggataccctcagttcactgagagatttgaggtcagggacagtcttagaagacaatagaaaacagtgttctgagtgttgcccctagaatgagcattgtgttaatatcatagaaatgggacacatgtgtccccaggtcccatacctggaatgtaaaaatagtatccattaacagcgtcaagtaaaagattataacctattataaaaactagaaacccgggctgggcatggtgactcaagcctgtaaatctcagcacwttgggaggctgaggcgggaagtctgtttgagcccaggagcttgagaccagcctggacaacatagggaggccccgtctctacaaaaaaaaaaaaaaattacctgggcatggtggcatatgcctgtggtcccagctacttgggaggctgaggtgggaggatgacttcagccctggagtcaaggttgcagtgatctgtgatcatgccactgctctccagcctagacaacagagtgagaccctgtctcaaaaacaaacagaaaactagaaaaccaa

SEQ ID NO: 467540 - DNA, 527 bp, Homo sapiens
ggataccctcagttcactgagagatttgaggtcagggacagtcttagaagacaatagaaaacagtgttctgagtgttgcccctagaatgagcattgtgttaatatcatagaaatgggacacatgtgtccccaggtcccatacctggaatgtaaaaatagtatccattaacagcgtcaagtaaaagattataacctattataaaaactagaaacccgggctgggcatggtgactcaagcctgtaaatctcagcacattgggaggctgaggcgggaagtctgtttgagcccaggagcttgagaccagcctggacaacatagggaggccccgtctctacaaaaaaaaaaaaaaattacctgggcatggtggcatatgcctgtggtcccagctacttgggaggctgaggtgggaggatsacttcagccctggagtcaaggttgcagtgatctgtgatcatgccactgctctccagcctagacaacagagtgagaccctgtctcaaaaacaaacagaaaactagaaaaccaa

SEQ ID NO: 467541 - DNA, 579 bp, Homo sapiens
tttggctgatactgaaatttggatgttattcaaaataatattctaaagcggtgctaatagaaatataatgagaaccacatatgcaatttaaaacttcctagtagccacattaaaaagttacagtgagytgggtgcagtggatcatttgaggtcaggagttaagagaccagcctgaccaatatggtgaaaccctgtctctactaaaaatacagaaattagctgggcatggtggtggacaactgtaatcccagctacttgggaggctgagtcagggagaacagcttgaaccaggaggcagaggttgcaacgagccgagatcgcgccattacactccagcctggtcaacaagagtgaaactcctctcgaaacaaaataaaggttatagtgaacaggcgaaattaattttaatgccttccattttgaccgatatatctaaaatattaccatttcaacatgtaatatgtaattatgtgctgtattttatgtttgcaggacatctcagttcagactaactacattgcagatcccaagtgtgtgtcattaaaatagtgatagatttgtgtgtgtacatacctataa

SEQ ID NO: 467542 - DNA, 579 bp, Homo sapiens
tttggctgatactgaaatttggatgttattcaaaataatattctaaagcggtgctaatagaaatataatgagaaccacatatgcaatttaaaacttcctagtagccacattaaaaagttacagtgagttgggtgcagtggatcatttgaggtcaggagttaagagaccagcctgaccaatatggtgaaacccygtctctactaaaaatacagaaattagctgggcatggtggtggacaactgtaatcccagctacttgggaggctgagtcagggagaacagcttgaaccaggaggcagaggttgcaacgagccgagatcgcgccattacactccagcctggtcaacaagagtgaaactcctctcgaaacaaaataaaggttatagtgaacaggcgaaattaattttaatgccttccattttgaccgatatatctaaaatattaccatttcaacatgtaatatgtaattatgtgctgtattttatgtttgcaggacatctcagttcagactaactacattgcagatcccaagtgtgtgtcattaaaatagtgatagatttgtgtgtgtacatacctataa

SEQ ID NO: 467543 - DNA, 562 bp, Homo sapiens
atgtaattatgtgctgtattttatgtttgcaggacatctcagttcagactaactacattgcagatcccaagtgtgtgtcattaaaatagtgatagatttgtgtgtgtacatacctataatattatcatttatagtttcttgattagaattctgcataatcaagtcttactaagacagstttattatattttctcattacttcttggtctaaaggaattctacctctaaagagagaatgagttgaataataaaatgtcatgactccattttgctgtagtatcttagcattaatatttggaattgttattctagaccttagcaaaaatatatgttttgattatgaattttctgaagctttccagttaagtgtaaaacaagtgaaaaatataacttcgtattttgtgtattttgctttttataggtgtctactgcagatatttcatcaaataaggatgatgaagaaaactctgtgctcgatatggttgtgttgttttctagcagtgacaagttcactttgaatcaggtttgaacttgacaatttactgtcttcctcattgaattc

SEQ ID NO: 467544 - DNA, 562 bp, Homo sapiens
atgtaattatgtgctgtattttatgtttgcaggacatctcagttcagactaactacattgcagatcccaagtgtgtgtcattaaaatagtgatagatttgtgtgtgtacatacctataatattatcatttatagtttcttgattagaattctgcataatcaagtcttactaagacagctttattatattttctcattacttcttggtctaaaggaattctacctctaaagagagaatgagttgaataataaaatgtcatgactccattttgctgtagtatcttagcattaatatttggaattgttattctagaccttagcaaaaatatatgttttgattatgaattttctgaagctttccagttaagtgtaaaacaagtgaaaaatataacttcgtattttgtgtattttgctttttataggtgtctactgcagatatttcatcaaataaggatgatgaagaaaactctgtgctcgatatggttgtgttgttttctagcagtgacaarttcactttgaatcaggtttgaacttgacaatttactgtcttcctcattgaattc

SEQ ID NO: 467545 - DNA, 601 bp, Homo sapiens
tttatcttgtttttagattgatatctcaccttggcagaaatgagataaaattttaaaatattcatttggtggctttcacagtattatttgatctctagggtctcctgtgagtttgctacatggtacattgtattactttcatcttatagatgaagaaagatactagtgtggctgagtcrcaagcagaatttggaggagcatggtgctgaatgagttttgatgattgtaggggccacaactggaaaagtagatgtaaaatggtgaggtcgatccctctgacactttcacatgctcagtcacacatcttgaacatataagttggatcctgtgcctagagaggtaggtttctgagccaaggcatattccaaaaattgcatgagaagctggctttcccaggcacagtgagccctcccagctcactacctcctgaatcatacctcctgcccctagccaggtttatctaggacttgagcacaaagaaaaagtgggagcatctttgaacaacaaatatcttgaaaaactagttaagtggtatcatatatttgtgggatgggtgatttcaaaacccagtctaaaaggacaggaccttgctcattgacaa

SEQ ID NO: 467546 - DNA, 601 bp, Homo sapiens
tttatcttgtttttagattgatatctcaccttggcagaaatgagataaaattttaaaatattcatttggtggctttcacagtattatttgatctctagggtctcctgtgagtttgctacatggtacattgtattactttcatcttatagatgaagaaagatactagtgtggctgagtcgcawgcagaatttggaggagcatggtgctgaatgagttttgatgattgtaggggccacaactggaaaagtagatgtaaaatggtgaggtcgatccctctgacactttcacatgctcagtcacacatcttgaacatataagttggatcctgtgcctagagaggtaggtttctgagccaaggcatattccaaaaattgcatgagaagctggctttcccaggcacagtgagccctcccagctcactacctcctgaatcatacctcctgcccctagccaggtttatctaggacttgagcacaaagaaaaagtgggagcatctttgaacaacaaatatcttgaaaaactagttaagtggtatcatatatttgtgggatgggtgatttcaaaacccagtctaaaaggacaggaccttgctcattgacaa

SEQ ID NO: 467547 - DNA, 601 bp, Homo sapiens
tttatcttgtttttagattgatatctcaccttggcagaaatgagataaaattttaaaatattcatttggtggctttcacagtattatttgatctctagggtctcctgtgagtttgctacatggtacattgtattactttcatcttatagatgaagaaagatactagtgtggctgagtcgcaagcagaatttggaggagcatggtgctgaatgagttttgatgattgtagggrccacaactggaaaagtagatgtaaaatggtgaggtcgatccctctgacactttcacatgctcagtcacacatcttgaacatataagttggatcctgtgcctagagaggtaggtttctgagccaaggcatattccaaaaattgcatgagaagctggctttcccaggcacagtgagccctcccagctcactacctcctgaatcatacctcctgcccctagccaggtttatctaggacttgagcacaaagaaaaagtgggagcatctttgaacaacaaatatcttgaaaaactagttaagtggtatcatatatttgtgggatgggtgatttcaaaacccagtctaaaaggacaggaccttgctcattgacaa

SEQ ID NO: 467548 - DNA, 601 bp, Homo sapiens
tttatcttgtttttagattgatatctcaccttggcagaaatgagataaaattttaaaatattcatttggtggctttcacagtattatttgatctctagggtctcctgtgagtttgctacatggtacattgtattactttcatcttatagatgaagaaagatactagtgtggctgagtcgcaagcagaatttggaggagcatggtgctgaatgagttttgatgattgtaggggccacaactggaaaagtagatgtaaaatggtgaggtcgatccctctgacactttcacatgctcagtcacacatcttgaacatataagttggatcctgtgcctagagaggtaggtttctgagccaaggcatattccaaaaattgcatgagaagctggctttcccaggcacagtgagccctcccagctcactamctcctgaatcatacctcctgcccctagccaggtttatctaggacttgagcacaaagaaaaagtgggagcatctttgaacaacaaatatcttgaaaaactagttaagtggtatcatatatttgtgggatgggtgatttcaaaacccagtctaaaaggacaggaccttgctcattgacaa

SEQ ID NO: 467549 - DNA, 575 bp, Homo sapiens
aagtccttaatacttaacaaaacacatataataggctgggtacgtacctatatcatctgatataaaactcctgtgaggtaactagggctgactctggataacaagctatcatcaatataccacagtacttctcacataagctatatttgtgacacagcttgatgtgtggtataatattcatagttatgaataagcatatgtttggataatacaggaggatgcaactcgctcttccttgaatagtaatgatttcacagagaaactaatatttatattgggacacgaggaatgcataggaatttatccagtccaatttaattmttgtacaacgaaagttaaaaagagaaaacgccattgactttggaaagtaggaactccagctatgaaagttggaggtgaagagtattccaacaaaaagagtagtatgaaataatatagtcagttaagggaaagccaagaaattgaagttcataagattgggaaggtaaacaaaatggtggagaagtagagtaaggggcttcgaactcatctaaggtcaggttatcaagggcattattgccaagataaggaataat

SEQ ID NO: 467550 - DNA, 578 bp, Homo sapiens
atcgtccagccaattctattactttggttcttcagactcaaagatcttgatgtttgtggtatgttatgaaattctcaagaacaagactctcatctcccacagggatacattaaaggcagttaatatttattagataaattaatacatttgtgttattcattttgtgactcttttacattctgactcgataaagattgcctttcaaagctcattaaactttccgtatctatttacgctctgactctccttcaccccagggaatctagattcatcctgaaaaatgaccacttgtttcacattagactgcaycatcctgtttcacaacacttcatagatttgtgttatgtcttgtcataatatgtttagggattatgacagcattatttcttctaacattacaggactcgaaggactgcacttcaaaacactttacttcgggctaatgtgcaagacatttcacgagctgccctttgccacactccggggtcatggctttgacaactccatcagcactctactatttagtctgcaatttccttaggattctctacttcacgtcacttcagtgtatctgccta

SEQ ID NO: 467551 - DNA, 558 bp, Homo sapiens
cagttccattttaataagataaaaaaacaaaataaaactcctacagtgtttatgtttgtggatacatatgatttacacaagcatggcttttaaggacaccattaagataaagmaaagacaagcctcaggtggcgaaaaaatatatgccaatcatatctaggaaagggcttgtatttggaataaaaaaagaacttttacaatccaagaggacaataacccaatataaaaatgagcaaaagatgtggatatttcattgaaaaagatatgcaaaagcgtataaaaatatgttcaacgtaagtaaccattgggaaaatggatattgaacaagatgataccacaacacaccaactagagtgattataatcaaaacaactaacaatatcaagtgttggtaagagtgtagaaaaaccactttacattgctggtggcaatgcacaatgatacgtacacattggaaaagtggtagcttggtagtttctttaaaagttaagaatatacttatcatataacccagaaattttagtcctaggtatctacccaagagaaataaaaacatat

SEQ ID NO: 467552 - DNA, 558 bp, Homo sapiens
cagttccattttaataagataaaaaaacaaaataaaactcctacagtgtttatgtttgtggatacatatgatttacacaagcatggcttttaaggacaccattaagataaagaaaagacaagcctcaggtggcgaaaaaatatatgccaatcatatctaggaaagggcttgtatttggaataaaaaaagaacttttacaatccaagaggacaataacccaatataaaaatgagcaaaagatgtggatatttcattgaaaaagatatgcaaaagcgtataaaaatatgttcaacrtaagtaaccattgggaaaatggatattgaacaagatgataccacaacacaccaactagagtgattataatcaaaacaactaacaatatcaagtgttggtaagagtgtagaaaaaccactttacattgctggtggcaatgcacaatgatacgtacacattggaaaagtggtagcttggtagtttctttaaaagttaagaatatacttatcatataacccagaaattttagtcctaggtatctacccaagagaaataaaaacatat

SEQ ID NO: 467553 - DNA, 558 bp, Homo sapiens
cagttccattttaataagataaaaaaacaaaataaaactcctacagtgtttatgtttgtggatacatatgatttacacaagcatggcttttaaggacaccattaagataaagaaaagacaagcctcaggtggcgaaaaaatatatgccaatcatatctaggaaagggcttgtatttggaataaaaaaagaacttttacaatccaagaggacaataacccaatataaaaatgagcaaaagatgtggatatttcattgaaaaagatatgcaaaagcgtataaaaatatgttcaacgtaagtaaccattgggaaaatggatattgaacaagatgataccacaacacaccaactagagtgattataatcaaaacaactaacaatatcaagtgttggtaagagtgtagaaaaaccaytttacattgctggtggcaatgcacaatgatacgtacacattggaaaagtggtagcttggtagtttctttaaaagttaagaatatacttatcatataacccagaaattttagtcctaggtatctacccaagagaaataaaaacatat

SEQ ID NO: 467554 - DNA, 652 bp, Homo sapiens
aagtacttaaaaacacatatgtttagaggtaaaagacaaaatagcataaagagtcttaaagctaaataatcaccatcattaacaattcatttggactcaataaaaataattacaatatatacaaaataacacattgtgatttttaaagaatatctttcacaaaaattgctatgctagaaataaaaacagccagtgaatgactcaaacttgtattacatttaattagttttcttgttgaagcacatctcagagaaaatgtacacagaatttatatgtatctctgaacttgatctatctctctctctatatatatttgttttttccaataaaatatttttacactttctgtatttttggtacaatgcagctcactgatagagagtaccacttataggatttgcagaaaatatgtattcacaggacagcaggcctcttaaagtctcatggttatagtcatattcagtaaggaaaccagttaaagtctaaaataaaataaacaaaacttacttaaaaataggaatatttaacagagtctttatttagaaaatagtgttcattttaamgagcattgctatgcttaagaacacatacaatgatgcagccaaaggtcatgcaataaaatcacaaaatgccccacgtgatgggaaaagca

SEQ ID NO: 467555 - DNA, 582 bp, Homo sapiens
cagatcataatttctaaaatatgtacttatatgtgcatgcatatgcatatatatagttcatatacatatttgtatgtatgtctgtgtatattattttcaggccctgcctattgaatcaagagccaagaattaaacacaccccaatagcttcaagcacacttagtacccagatcttggaactagggctcttcagtcctggctgattctaggactgggcagagttagatacaagaggaacctggaacatcttgttatgcagagagtagcaaagtgaagaaagaaagaaagagaaagaaacaaagaaagaaagaaagaaagaaagaaagaaagaaagaaagaaagaaagaaagaaagaaggaaagaaagaargaaagaaagaaagagaaagagagagaaaggaaggaaggaacgggagaaaggaaggaaggaaggagagaaagaggaaggaaggaaggaaggaaggaattcattggaggaactgagggctcctgtttacagtagaaagccaaatgacaactagtaaatgtgggagggagtgctagaattagaaaaagttaacattctgcaactgttgtagtcaag

SEQ ID NO: 467556 - DNA, 582 bp, Homo sapiens
cagatcataatttctaaaatatgtacttatatgtgcatgcatatgcatatatatagttcatatacatatttgtatgtatgtctgtgtatattattttcaggccctgcctattgaatcaagagccaagaattaaacacaccccaatagcttcaagcacacttagtacccagatcttggaactagggctcttcagtcctggctgattctaggactgggcagagttagatacaagaggaacctggaacatcttgttatgcagagagtagcaaagtgaagaaagaaagaaagagaaagaaacaaagaaagaaagaaagaaagaaagaaagaaagaaagaaagaaagaaagaaagaaagaaggaaagaaagaaggaaagaaagaaagagaaagagaragaaaggaaggaaggaacgggagaaaggaaggaaggaaggagagaaagaggaaggaaggaaggaaggaaggaattcattggaggaactgagggctcctgtttacagtagaaagccaaatgacaactagtaaatgtgggagggagtgctagaattagaaaaagttaacattctgcaactgttgtagtcaag

SEQ ID NO: 467557 - DNA, 582 bp, Homo sapiens
cagatcataatttctaaaatatgtacttatatgtgcatgcatatgcatatatatagttcatatacatatttgtatgtatgtctgtgtatattattttcaggccctgcctattgaatcaagagccaagaattaaacacaccccaatagcttcaagcacacttagtacccagatcttggaactagggctcttcagtcctggctgattctaggactgggcagagttagatacaagaggaacctggaacatcttgttatgcagagagtagcaaagtgaagaaagaaagaaagagaaagaaacaaagaaagaaagaaagaaagaaagaaagaaagaaagaaagaaagaaagaaagaaagaaggaaagaaagaaggaaagaaagaaagagaaagagagagaaagraaggaaggaacgggagaaaggaaggaaggaaggagagaaagaggaaggaaggaaggaaggaaggaattcattggaggaactgagggctcctgtttacagtagaaagccaaatgacaactagtaaatgtgggagggagtgctagaattagaaaaagttaacattctgcaactgttgtagtcaag

SEQ ID NO: 467558 - DNA, 582 bp, Homo sapiens
acttcatccctgcttccatttttttaaaatcaattttagttatctgtcacaagaaacagaaaacaactctggctgatttaaacaagatatacatttatttcaaatgtactaaactagttccagaatgattttgaattttcttttgctagacaagacattattgggacaattggcaaattcagaataaggtctgcagatcagatcatagtgttgtatgtaatctgattttgaaaagtaggctgtgattatgtaagataattattttttagtaaaaacacaatgccattttagggaaaaagcatcatgtctacaatttactattaaacagtttagaaaaactacacagagagaaagggggtgagagaggagagggagaaggagggggagagggaagaaagaggaggacgaggaggaggtcaatgtagaaaaatattaatattagaaatctggccaaagcgatatccaggaattctttgaattagtcttgcaacttttgtataagtttaacttawgtccaaatttaaaaaaatgtttagtgatacaagaagatgaaaagtaagattgcagtgaggcaaaaacttg

SEQ ID NO: 467559 - DNA, 558 bp, Homo sapiens
atgtgatgtataagcatatcaccccaaataaatagcagtcttaccaataaaaataaaaattaaaaacacaattatattcaatttttagatcctgtaagcagacaaaattatattcgatttttagatcctgtgtttagatgagtattatttaaacactcatcttctatattgcaagaaatcacatctctgtgatctatactatgttcctgtgtttcaatatttctggtatgaagcacatctggaacttgtcaaagaaagttaactttacaaggtagttccttgtagcaagacccctggccaatgagttctttctaccacatttccactgtagttcactcaygagtagttaccatgaatattaaacgtgaaggataagttctcttaaagtttacattttccttgaacaaattgagcactttatcataaaattgctctaacaacaagcattccaaaatttcttttttcttgtaaaccttgaatagacagttttagaaatgaatgtgatcacgtgatatgcccacttccctctttcgtgccattttgtggttatgattttat

SEQ ID NO: 467560 - DNA, 527 bp, Homo sapiens
cccttatccttacccgcaaatgtgtctctgagccttctgaaggcattttcaaaagattcaagcaggcccagacactgtgcctggaaattccgagtcagtgtgggatagggcccgggaaattttaatttgggggccatgctccaggtaacattgaagtcctctcttgtttaaaaaccactgcatacataacccaatgataccatgttctgtattatgaaaataaaggaggacccttagcaaatggtctttgtttggggcagcctcccacttttccaatctgtgccataatctcctgttcccaaccacatttctccccacacccccygttgggagtcaccacactatacctggttcttgccttgaagttattgtttcgtaattccggattggctattagatgataacgtaaagactggcccctttaggagtatttacatgccaaaaaggagtctttatacacaggaaactgtgggttccccaaataaaccacttctgtccagtgaagaatatgaagcttagtattcagg

SEQ ID NO: 467561 - DNA, 598 bp, Homo sapiens
agacacaaacagtactcacagagcacattgaaacaacatacaatctcaactagatcctaaagtctagaatacctatggtgaaaaacatattcacaaatatttataaattatttaaaatgaggatgttgttaaatacaacaaaaatacaggaagtctgtgtacagaatcaatactgaatatgttaagactgaataataaatgagtttagtacttacatagaggaagatttattaatcaattaaagaactagagtactgcttattgtctctctattggtttctgttatgttgactgatgcagtatagggtaacaatgagcaatccttagaatttctgtttgtttattawactgatatatttttattattatattttattcatgggcattattggtaggcaggaaagttccaattaaataaagtaaaaaataaaatgattagagtttaacaataattacagacaagacttaaaaagtaatgaatatcaaatacatgtttatctgccagaaaaataaatccattttgtggtgtatctttagcgttgacataatgatatatagtttgtttcctgaagtagatttaatggtgttgattattttg

SEQ ID NO: 467562 - DNA, 555 bp, Homo sapiens
tccagttaatcggcctgcaaagtaaattttattaaccactctgttaagtaagaaacagtgttactgaatttgaagtaagggaaaaaatttgtttttcagatgaatgacaaagacttcctggaggaaatgggctttgaagaaggggaactatccattcaaaagaaactctcaccaggaagaggcataaaagaatgagatggaaaagaacaaagctccawgggagaatactattcgtgtagtttggctacatggggacagacacataaggcatgttgaggaatacaagataggaaaaagattagagacagattgtggcagacatcaagtgccatgacaaaatgaatgtatgttgttagtttttgagcaagaatgttgagcatagtcatctcctgccttaaaattgttatcttgcagtagtattcacggaggattataaaggaagcaagtagataagagagaaaaagaaccagaattaccaatcatgattagaaggaacaaaaaggacagacacaaaagacagggtgttccttaaattgtttgactttaaaaccaaat

SEQ ID NO: 467563 - DNA, 588 bp, Homo sapiens
gatttgtgagactttgttgtacccatcacctaagcagtatatactgaacccaatttgcaatcttttatccctcacttgacacccaccttttctcctgggccctcaaagtccattgtatcattcctatgtttaggcacattcttaagtagggcttaggaattctgggtttatactgcatgggggcaactaatgagtgctcatatgatttctgctggcttgtaaagtggtgattttctcatgagagatgtccctatttcccatgaaatttttgcttctgctttccccaggagtggctctgagaataattggactgtatcctgcaggaggggggttaaaggcagaggtattgccctgttgagaactgagcttggtagaaggcaaatagactcccagaagcataactcatagtggtgtgccatagttactactgagaaattgtagcactttygaagaaaagagaagaaggattagctcgattaagacaccatcttcatatctatgagacagaactagagaggcaaagagtgaacctaaaatataggtgacaggtatattcaacatgtaaaaacacttttcatttaaacttac

SEQ ID NO: 467564 - DNA, 551 bp, Homo sapiens
tctttctacctcagctttagatatgtctttctcactaaggttaatcatttctagcttttgacttaaaatgagagtgtgtctcgtccttttatttgactcctttttatttgaactcttatgggtaattaattggcctaattttaacattattgtgtctcagggaatagggaggcctaagatgarggagagaaattgagaaaaacctgacctgtggaaaacacacacaacatttatcaattaagtctgccgtcttatatgggtgtggtttgcggtgccccaatataattacaatggtaacatcaaaaatccctgattacagttcaccaaaagagatatcacactaataataataaagtttgaaatgttgtgagaattaccacaatgtgacacagacacacaatgtaaacgtgctgttgaaaaaacagtacctgtagactttgctcagtgcaggtttgccacaaaccttcaacttgtgaaaaatgcaatgtctgcaaagcacaataaagcaaagcatcataagcaggtatacctgtattcctctactgtaagtt

SEQ ID NO: 467565 - DNA, 598 bp, Homo sapiens
actgctagtaacaggttatattttgcctagctatttgaagcagttaaaaagagttcctttgaggatttgaggcagtgtggctaacagggaaagaatcctggcctggaagcagatacccaagttcaatttctcggtgttctatttgcctgaagtgacaccttgggtagattatttgacttttcagggccacatgtcctcatctatataatgaggatggttatgaaaaataaattactacttgtaaagtacttagaggcttgtctggaatgttatgtcagccctgtggatgttagctagtagygatcatcactgagttttcctgaaagccttccaacagctgggaggccacagctggccacactctagtgtcccacagagggaccacaggagtctcctcctcttgccttccatgcccccactctgtccaaaactgctagtagtgccacacaaggacatagaaactgagagcaagactgagagaataagactaagagagagagaattctgaaaatagaacaaaatgctattttatcaaaacagagcagagtttggaaggcttctagtgctctatcttctcactaaatatttgtatgacttt

SEQ ID NO: 467566 - DNA, 553 bp, Homo sapiens
aaacgtttcagtgaggaaacctgaaagatgtataggagattttcagaaaagtggcagagactgggtatcccaggaaatggggacagggtgtgagttagcttaaagaaaacgcagagaacattgtgcattatagcaatgtgtgtgtgtgtgtgtgtgtttgtttgtatgtgcacatggtggaagagagcgagactttgctgagagctgacacctgagaagttggctgggacatgagttatatggagaagagtggcaggaacagaactgcatttcagaaagataattctgcctgaagtatcttctttgtatcataaacaaaacagtgaccagaacagtcaatatagagcagtcaaaagcaaatagactgaatgaaacccrtgcttgagaagtgaagtaatgcatagtttctttaataatgtataaatacacattgcacacatacatacacatgcaaacagacatccatgccagaatcagtcattagtaactatgatgacatttattatgcacttaatatgtgccaacaattgtacttaaaatatctttagcctca

SEQ ID NO: 467567 - DNA, 553 bp, Homo sapiens
aaacgtttcagtgaggaaacctgaaagatgtataggagattttcagaaaagtggcagagactgggtatcccaggaaatggggacagggtgtgagttagcttaaagaaaacgcagagaacattgtgcattatagcaatgtgtgtgtgtgtgtgtgtgtttgtttgtatgtgcacatggtggaagagagcgagactttgctgagagctgacacctgagaagttggctgggacatgagttatatggagaagagtggcaggaacagaactgcatttcagaaagataattctgcctgaagtatcttctttgtatcataaacaaaacagtgaccagaacagtcaatatagagcagtcaaaagcaaatagactgaatgaaacccgtgcttgagaagtgaagtaatgcatagtttctttaataatgtataaatacacattgcacacatacatacacatgcaaacagacatccatgccagaatcagtcattartaactatgatgacatttattatgcacttaatatgtgccaacaattgtacttaaaatatctttagcctca

SEQ ID NO: 467568 - DNA, 609 bp, Homo sapiens
  misc_feature (1)...(609): n = A,T,C or G
nnnntgccatactgtagacattctggtttctaggcattctaagataaattctctactccactagaaatctcagaaagaccrgtttcagcactaggttgatatcaaatgctagaacccatattccaaaggctacaggtctcaagaaggcatgaatacagaccatgatgttgttcctgccaaaatctccatcacatatccatcacaagtctttcattttctccagcttgtcctaacaaacatgttaacacactgtttgatacttttggctctttgtaaattctgtcccccttaaatgaacccttccacccttatttcttagttcaactactatgtgttctttaaggcctcactctgatgttgcctacttttttcagctaatgcaccctctatctactggtgtacacacaaccccctaagcttatctctattatcacgatccatcctctgacattataatggtctgatgttttttgtctgattccccaaattaatcatgggttcctttaaaacacgcacagtatcttatatcttttttgctaggacctactggtatttctaggttgaactcaattaaagtttgttgaaggcaagttcaatgaaacaacctca

SEQ ID NO: 467569 - DNA, 609 bp, Homo sapiens
  misc_feature (1)...(609): n = A,T,C or G
nnnntgccatactgtagacattctggtttctaggcattctaagataaattctctactccactagaaatctcagaaagaccggtttcagcactagkttgatatcaaatgctagaacccatattccaaaggctacaggtctcaagaaggcatgaatacagaccatgatgttgttcctgccaaaatctccatcacatatccatcacaagtctttcattttctccagcttgtcctaacaaacatgttaacacactgtttgatacttttggctctttgtaaattctgtcccccttaaatgaacccttccacccttatttcttagttcaactactatgtgttctttaaggcctcactctgatgttgcctacttttttcagctaatgcaccctctatctactggtgtacacacaaccccctaagcttatctctattatcacgatccatcctctgacattataatggtctgatgttttttgtctgattccccaaattaatcatgggttcctttaaaacacgcacagtatcttatatcttttttgctaggacctactggtatttctaggttgaactcaattaaagtttgttgaaggcaagttcaatgaaacaacctca

SEQ ID NO: 467570 - DNA, 606 bp, Homo sapiens
tctatatctcctagacattttgctgatgtggtacaccttttaaatggagctgaacaatttactagatcattataaaaattagtcaggtttagaaatacactactaaaccaacaggcaaataaagcctgtcttattttcagtgtcgtcatctctgaattattttgcttttgacttctcaaaggttcattactttgggaagacagtgctaataataatgcaaaaggtccttttctgtcaatgagtataggacaagaaagcagggaatccagtcrcgactccagttagctgactgggaccaaggtctaggatctagcaatgtggcggtcaatgtgggaggacagtatcaagcacaagttgcatgttctggtatccaagttaggaactagtgttcacagaaggctccattcttggagtgtgtgtatgggagaagacaaagaggagaggctaggcaggattcagttctattatcagaaccaacatgtacatagtagaaggctgaacggaattatttatgagaccacacagcttcccagagcttactgtgggcataatggaattttacataaaaagtaagactctaaggagctaacttagaagttcagcaat

SEQ ID NO: 467571 - DNA, 648 bp, Homo sapiens
gtctcctgtataagcctgcctatacctttattaaaacacttttagaagttctacttttgacttaatttttctcttgtcagttttctttcctattggtgtactccctgagacacagtctgagtaattaaaaaatatattctgtgcccattccttggtatgagaagtgtggcagtgctctttatatattttgtgaatgatttaatgagtgcatttttttttataaagaaggagaccgatccatagtcaaagcattgtcctcttacttaccagtaaagacactgaattctatgatcagccattcaaaaaagtattcaggtcttgtttatctactttttattttttattaatcctgctcattgggctaactaaaacaacagatctcttatttgacctcaattaaagaacacagtttggagagacagtggtctaatggaagtaaatgttcagaatgastattattttattgaatccctttttcttcactggggcttcataattggtgctcccactaatggtatttcttgtttgggttctcaaagaaaaacaaacaacttaaaatagacagacacggtggaaagtttctctagattctcagatgccagtttgccccagagagtgacgctcagatggatgtgacatggagaagca

SEQ ID NO: 467572 - DNA, 648 bp, Homo sapiens
gtctcctgtataagcctgcctatacctttattaaaacacttttagaagttctacttttgacttaatttttctcttgtcagttttctttcctattggtgtactccctgagacacagtctgagtaattaaaaaatatattctgtgcccattccttggtatgagaagtgtggcagtgctctttatatattttgtgaatgatttaatgagtgcatttttttttataaagaaggagaccgatccatagtcaaagcattgtcctcttacttaccagtaaagacactgaattctatgatcagccattcaaaaaagtattcaggtcttgtttatctactttttattttttattaatcctgctcattgggctaactaaaacaacagatctcttatttgacctcaattaaagaacacagtttggagagacagtggtctaatggaagtaaatgttcagaatgactattattttattgaatccctttttcttcactggggcttcataattggtgctcccactaatggtatttcttgtttgggttctcaaagaaaaacaaacaacttaaaatagacagacayggtggaaagtttctctagattctcagatgccagtttgccccagagagtgacgctcagatggatgtgacatggagaagca

SEQ ID NO: 467573 - DNA, 590 bp, Homo sapiens
gagtgaatggggtaaactatgcctaggaagagattctgttctctatctgckcaactcaatgaggggaaacaaaaggtaaacaattttttagacatccagtttcaaaatcattaagatacctgagtgattaattcaataaaccaaaaataatcgctaaggaactgaaaaatttcagtgtgcctagcttgatttaaaaatgttattttcatcttaagtgacttgaaaaatctttctgcagtataatctgcaatgatgtccacattagtaagacgaaaagcaaacactataagaaatagctcctctgtcacctgaaaattctggaacacctaacaacatcatggtgagacttcagatttgttgcttgacattaatagccaagctgggtatctttagcttcataaattagaaaaaaaaataagttatacatgtacacataaatatagtcctctgtgtgaaggcttcagaacacacaggaacgttcagtgctgctactaatgttatttacattccagaacactgacagaaaaggtactaaattaagatttttttaaaaaaaggaaaatatgtttggttgtttataaaagcagtag

SEQ ID NO: 467574 - DNA, 590 bp, Homo sapiens
gagtgaatggggtaaactatgcctaggaagagattctgttctctatctgctcaactcawtgaggggaaacaaaaggtaaacaattttttagacatccagtttcaaaatcattaagatacctgagtgattaattcaataaaccaaaaataatcgctaaggaactgaaaaatttcagtgtgcctagcttgatttaaaaatgttattttcatcttaagtgacttgaaaaatctttctgcagtataatctgcaatgatgtccacattagtaagacgaaaagcaaacactataagaaatagctcctctgtcacctgaaaattctggaacacctaacaacatcatggtgagacttcagatttgttgcttgacattaatagccaagctgggtatctttagcttcataaattagaaaaaaaaataagttatacatgtacacataaatatagtcctctgtgtgaaggcttcagaacacacaggaacgttcagtgctgctactaatgttatttacattccagaacactgacagaaaaggtactaaattaagatttttttaaaaaaaggaaaatatgtttggttgtttataaaagcagtag

SEQ ID NO: 467575 - DNA, 590 bp, Homo sapiens
gagtgaatggggtaaactatgcctaggaagagattctgttctctatctgctcaactcaatgaggggaaacaaaaggtaaacaattttttagacatccagtttcaaaatcattaagatacctgagtgattaattcaataaaccaaaaataatcgctaaggaactgaaaaatttcagtgtgcctagcttgatttaaaaatgttattttcatcttaagtgacttgaaaaatctttctgcagtataatctgcaatgatgtccacattagtaagacgaaaagcaaacactataagaaatagctcctctgtcacctgaaaattctggaacacctaacaacatcatrgtgagacttcagatttgttgcttgacattaatagccaagctgggtatctttagcttcataaattagaaaaaaaaataagttatacatgtacacataaatatagtcctctgtgtgaaggcttcagaacacacaggaacgttcagtgctgctactaatgttatttacattccagaacactgacagaaaaggtactaaattaagatttttttaaaaaaaggaaaatatgtttggttgtttataaaagcagtag

SEQ ID NO: 467576 - DNA, 533 bp, Homo sapiens
gcctttgtacaattattgtacccaaataattaatttcatgaactgagaagatatacagaaaccttgaaggagagggaaaaataggtgctctaamttaagcatgcaatgcaatagcagttatcttcctgggaagactccaaagagtcagcatagaactgcattttaaaagctccctcttccagacaaagctgccagtcatgaacacgtggtgtctgccgacaaagccagccccgtggtctgctgttggagccagctcttttattgccaaaggacatttaaatggaaaacagcacatctaccagaataaatgtgtcctcagggaaggaagtggaattctgggctatgctgccccgacaacaccatgaaccaaaaatctgacttcatggccccattaggggctggtctagggtggaaagagaaatataacgtcacagcagaaagtttgcaactgaagttcatttattaaaagacctaagaccatgttctcttctggatatatagtagaaatgatgctttagttaatatttttagta

SEQ ID NO: 467577 - DNA, 415 bp, Homo sapiens
aacagaaaacaattggtggaaattcatcccagaggcacagtcccactgacttcagtctcaggctctgcccggtccctgtctttctcaatgtctgcttctttagctttcccttgactctgtgaggcatgttcaaatccatttgttttaatttaagttgtccagagttatattctgttgtttgcctccaaagaacctaaccratgtgcttctcttaggttcagcttaattccacaaacatttactaagcctggaatgttgcacttgctctagggaggtcctggtggcccaactcctgtaaactcctggggcctggtggagggacagaaaagaagcaaatctttctgccttttactcacatgtcttacaaagcatggcagagccaatgcccaagtctaccatgagggttcagcacttg

SEQ ID NO: 467578 - DNA, 415 bp, Homo sapiens
aacagaaaacaattggtggaaattcatcccagaggcacagtcccactgacttcagtctcaggctctgcccggtccctgtctttctcaatgtctgcttctttagctttcccttgactctgtgaggcatgttcaaatccatttgttttaatttaagttgtccagagttatattctgttgtttgcctccaaagaacctaaccaatgtgcttctcttaggttcagcttaattccacaaacatttactaagcctggaatgttgyacttgctctagggaggtcctggtggcccaactcctgtaaactcctggggcctggtggagggacagaaaagaagcaaatctttctgccttttactcacatgtcttacaaagcatggcagagccaatgcccaagtctaccatgagggttcagcacttg

SEQ ID NO: 467579 - DNA, 415 bp, Homo sapiens
aacagaaaacaattggtggaaattcatcccagaggcacagtcccactgacttcagtctcaggctctgcccggtccctgtctttctcaatgtctgcttctttagctttcccttgactctgtgaggcatgttcaaatccatttgttttaatttaagttgtccagagttatattctgttgtttgcctccaaagaacctaaccaatgtgcttctcttaggttcagcttaattccacaaacatttactaagcctggaatgttgcacttgctctagggaggtcctggtggcccaactcctgtaaactcctggggcctggtgragggacagaaaagaagcaaatctttctgccttttactcacatgtcttacaaagcatggcagagccaatgcccaagtctaccatgagggttcagcacttg

SEQ ID NO: 467580 - DNA, 415 bp, Homo sapiens
aacagaaaacaattggtggaaattcatcccagaggcacagtcccactgacttcagtctcaggctctgcccggtccctgtctttctcaatgtctgcttctttagctttcccttgactctgtgaggcatgttcaaatccatttgttttaatttaagttgtccagagttatattctgttgtttgcctccaaagaacctaaccaatgtgcttctcttaggttcagcttaattccacaaacatttactaagcctggaatgttgcacttgctctagggaggtcctggtggcccaactcctgtaaactcctggggcctggtggagggacagaaaagaagcaaatctttctgccttttactcayatgtcttacaaagcatggcagagccaatgcccaagtctaccatgagggttcagcacttg

SEQ ID NO: 467581 - DNA, 519 bp, Homo sapiens
ctttccttttccaagagatttaacctttcatgagctatttcctcaagcactgccagctgagcccttaacacgcccttctctataatggtgtgcatttgccagtgacacctgttacacatgcgttctacagatacagtcctggtactaatctgatgagcacttactacatcccaaaggcatgaacatctcataatgaactttcagagacagaacaaagtcaagatgtttaggaatggaagagcactcctggagcagcagaaaacacctgttcctgataggccaggcttcatcacgcctccctgatgaggccacggggstgaagggctcagcgcttagtaggtgtgtggcacatcagctcatgtttctcctcctgccaccacttcaccaaatccaggagacaggcatggagcctcttctcaccgtagatccttgcctcagagataggatgccaagctctagtcctgccttggcactaagggaccttgggccagtcagtcctctaacttggcctgtttccca

SEQ ID NO: 467582 - DNA, 523 bp, Homo sapiens
ttttaacaaaattcctcctcaaataagtgcttattctttacacacaattcagtgaactacttctttcagcctcaataggaaaaaaatcatgaaagcagttccatttcttcttctgcatataatgaatcttttcacatttcttgtagttaatgtcttaaaaaataaaaatgaatgacagcctgaaacatgcttctcatattcatctgtgatgttgtgtggttaatagtccagcctcacatttgcatgggacyagctgtcaaagatggcactgcagggaatccactataattttaaaacatgttgcaaagtcacatatgtccataaatctacattcactagaatgcttatggggacatattatcatcagatttgaaaataatcctttattgctttcattttgaacttcaccctttacttgactcaaattatctttatcaggtaatgaatgaggggcttcatcatgagtgaagaagtttccaggagcaatctcatttgcaaaacttcttaaaattcttgtcagagt

SEQ ID NO: 467583 - DNA, 610 bp, Homo sapiens
aaatccagtgtgtagtatacatttacagcacatctcaatttggactagccacatttctatcttcaatggcctcatgtagctagtggcaaccttactgaacactgcagctctaaacaaacctccaatctaatgcacagacagacagtgatttagctatctgtttgaatgctgttactttctcttcttatctcatcatctcrtctattgtagacttcagttcccttttaacaagtcttactccattctttctagtttaaatatcagtctcttagatcaatggtttggaatcatttttggaatatggtcccttttgaaaacagcaacccagccaacatcttgatttggatccttgcttcagaaagatatagacctattggcattgttatgggtggaaatccccctcaccccccaacacacccaaaaaaagatattttgcagtctgaactcccaggacctaagaatgcaaccttatttggatgtagggtatttacagaggtaataaagttaaaatgaggtcattagggtgagccctaatccaatatgactggtacccttataaaaagggtaatttgaacagagataggtatagaaggaagaaaatttgatgtaa

SEQ ID NO: 467584 - DNA, 618 bp, Homo sapiens
gaggacgggaagtccagggaaccttctgagcacgggatgctgtcctgaagctgcaggaatgcaagggttgttgacactgttttactgaaggggcagaaagaactaggctaacggcacccttggaatcttttctcccgctttacagagtcctgtgtccccacactagccatggttgcctgtcattttcttgaagtgtctacaagataaagatgttcccaaatgagcagaaagaaagaacgcaaagaatgaaagaaaatggcttggtctgggctttatgaggttttgtgttgattatggaactcaagcttttttaattttattacttgcacacaaataagaaggarggattgaaagttgtccaggttgagcataaaatcccatcacctgtgtaggatctgccttctttttccacagaggtgacttctaaacagaaaggaaagaaccttgggagtgactgatgttgaagtctagttgcattcttcacagtttcattctttaacccccataaccctgggaagcagacatttccgtttcacagatgagaaagctgaggctcagagaggttaagtcatttgccaaaaatctcacaacaagtaaaaggtaaatagaagatttata

SEQ ID NO: 467585 - DNA, 555 bp, Homo sapiens
ggtaggcatgtctccttatgtccaagggacaactctggcctagctgtaaatgatataaaacagtttacttggtggctgtaagaaagctgttgtttttaatatatcaactgtactgtgatatttattataattcattaccattgctggtgactcccaccattatgacaccttgattgtttttattatttaagataaagataattttctgtagcaaaccacaatcttttcatcatgtattaactactctactgatttcagagaagttcaggcagggcttsgggagatttttgaactgaatcactatgacttccttggtcagtggtgaatggattaattagatcacagtaaatcaataaaactaagagcctcaagtttaaaacatctgtaaaacagttaaataacttccacatttcttcacactcaaaaatacttcctagtggagggctaattttagccacatcccctaagttctcctcaaatataatactttccttaaatatagataggaaaaactaacataatatgcatgtgtttaatgtctgtgttgagtttgtt

SEQ ID NO: 467586 - DNA, 611 bp, Homo sapiens
ttgattattttttgcaccagaacatgcagatgttcatggtaattaccataaattatcttcatatttattttttaaaaagttttaaacttgagcatgtgaaaagtcaataaatatattacacatatatgtgtatatgcatttatgtacatgtatatatatgtttatatatgtatgtatagactaagataattcttggtctaaggttagtttaggmagacaaggaaagaattatctccatagtcagtaatagattatatgaagctaccacaatatcttcgccagagtgaagagaaagaaatctaattgcaattcctaataacagacatatccttgggcctggggtagtgtcggacaaagcaccttgtaactctctttctctgaatttcccaaggctatctggggtatgtggttcttggatctcacaaaaacaggctctgcagcagcacaaaaccattgcttagcctcgcaaaccaaaggatggaagtgctgcaaaagtcaactggaaagatcagtaggaagagactgagccagaccttctcatgctgatcttctccaccaaacacttgccaatgtctatctgcatccattctgtggagccagcaccaggggaa

SEQ ID NO: 467587 - DNA, 605 bp, Homo sapiens
catctaattgcatcttctgatgatttttcttattataaatgaagtccaaatctaaataaggtatttcttaacaaagcagtaaaaaataaaactgtacttttcaggcactacctgaaagctaaatgagttcaacattttagtagacaaaggaaaagaaagatgaatagaatactacctcacatctcaatactaacattgaaatgtaatggcctaaatgcttcacttaagagatacasaacagcagaatgaataagaattcaccaactaagtacctgctgtcttcaacagactcacctgacacatgaggactcacataaacttaaggtaaaggggtgaaaaaagatattctatgcaaatggacccccaaagtgaacaggagtggttattcttatatcagacaaaacgaactttaaagcagcaacagttaaaaaagacaaagagacattatataatgataaaagattctagtccaataggaaaatatcacaaaatttatatgcacctaacattggaactcccaaatttataaaacaattactattagacctatgaaatgagatagacaacaactcaataatagtgggagattttaatactccactgac

SEQ ID NO: 467588 - DNA, 533 bp, Homo sapiens
ccaccatccttccgaacctcagtgggctcctctgccaagaaacccatccaaacactctcctgctgcaccacctcacactgggttcccacagcctcaagaagcaaagacagatggcacagttttcgctcccttgggatccttacaagtcagatgataaamccaggaaaagattctgtaagttaaaataagtgaaccactgcctggaagccacccactcatacaggtacacactacacatgcactccctgcatctacttcatctcccccagcctccacagttaggcttagtgaaaccccaagggggactcgccgcccagagccagccaacatggcaaaggtccatgtgcttcagctgtggactgtcctcatgacctcacatgggtggggccataggccccaggtactcccaccccaacacacttccccttgatttcaataaatattgatgagtgcctactttgtgcctggcactatgctaggtaactgagacatggcccctgcactcttacaactcagtcaagtggggaaagcag

SEQ ID NO: 467589 - DNA, 531 bp, Homo sapiens
gttaaataataatataaaactcatatttagttatttaattctctttaaccatgagtttttaagaaaaaattctttttkgggaattttttaccctttttgagggtaaattaaaattatcatgtaaactttactatcttaaaatctcacaagagaaaaaatttaccaaattatggatgattacattcctaataaaccatcttttatccggaagtaatgagaaatataaagagtataaatcatagactgaattgttagataaaaatgggcacatgttacacaatttgttttaactaatataatttcaaaattacagacttcataagaactctctacaaagacaattctttatagaagctatcattttaaacgaaaagctcattgaaattattgctatagctaccactcatttttggcagtcaaagataaaggaattttgagatttgctagagctatgaatcttaagtatgaagttccttttagaaaacacactgttgaaacctttttctgaatcatagtctcttgtgcacaaat

SEQ ID NO: 467590 - DNA, 645 bp, Homo sapiens
gatgtataaaaattgtctttttttcttattaaagattttttcaaattaacacattgaatcttttcttttggttgacaaagccaaaagacaactgacacccaaagggaagaaacaaccagggaaaaagccaagtttctaaaaaattaagacatttcttccatttctttcctagttaataactcaggcttcyctataaggagcaaaactgcacatatacaattggccttcactttgtgtgttcatagtcccacaagaactagccaagcctgcagaaagtcttgtcagagcattgtcaggctttagaccctaaggcctggaagggcctgcaaaaagcttagtaaatggagacatttgggcgagcccccagatctgggaagtcaggcttacaaatggtcaaaacagtcaacgtttcctattgcaagtcctaggtagtcattagtggtggaaatcctgagtagtttgatggtgtcatccctattttccagatcagaggtgaggatagaagttgactaaggaaggtatccaaccaccacctgcagcgtcagggagtgctggaatcaggcctcagccttgtctcccacagccacatcaaccagcctgctgcctgtcaaggctcctagacactcgctcaagattccagaaact

SEQ ID NO: 467591 - DNA, 551 bp, Homo sapiens
aattcatattccaggtagacccaacatggtcatcatatgttattaccatttttttggtattactagttatgtgttatacctttgaaggatttttgtatctatgtttatgagtgagatttaggggactacatggcccaatttacctggaacaactccagtttacacttcttttyctgcatcattattgataacatttacactcttaaagtgcctgggtttggatgataaagtatatggtcacgctagtaagaatggcctgtggtattatattctcatattatctttgtccagttttggtatcacagcaatgttttctcattctatatttccgagaacagtttgtataagattggaacagttattttccttgaatgtttggtagaattcactgttgaagccatttgggggtcaaagtttccttactgaatccattattttataggttatagagttattactgttttctattttttagtcaactttgaggttataattttgtagtaatttgtcaattttttctaaattgtgttagcatagggtttttcaaaata

SEQ ID NO: 467592 - DNA, 554 bp, Homo sapiens
gagaaatagtttggaacattttaatatcatttacctatttcccaacttatatgttttcattttgtgtattttcctgctatattttaactccataagagattattatttctgttttatgcagtttgtgtttgcttagttctatyccccccctccatgattatactttctctgctcttctttcatctcaaacattctatgtggaattactttcctaacgccttgagtgtatcttttagaatttcctttagtcagaactaaatggttacgaaatctctcagtttttatttcttgaatataaaattctaggcaggcagttatttcctttggcacattccataaacgattcccctgcctcctggctttattattgctattgaaaagtcagctgtcaatctaattcctgctcctttcaagtcaatatattccttttctgacttctttttaagattgcctatttgtcgtttatgatctacagtatacctataatgtgtcttaatgtagatttattattatttactctttttgggtttcataagtttcttaagtgtgacagt

SEQ ID NO: 467593 - DNA, 554 bp, Homo sapiens
gagaaatagtttggaacattttaatatcatttacctatttcccaacttatatgttttcattttgtgtattttcctgctatattttaactccataagagattattatttctgttttatgcagtttgtgtttgcttagttctattccccccctccatgattatactttctctgctcttctttcatctcaaacattctatgtggaattactttcctaaygccttgagtgtatcttttagaatttcctttagtcagaactaaatggttacgaaatctctcagtttttatttcttgaatataaaattctaggcaggcagttatttcctttggcacattccataaacgattcccctgcctcctggctttattattgctattgaaaagtcagctgtcaatctaattcctgctcctttcaagtcaatatattccttttctgacttctttttaagattgcctatttgtcgtttatgatctacagtatacctataatgtgtcttaatgtagatttattattatttactctttttgggtttcataagtttcttaagtgtgacagt

SEQ ID NO: 467594 - DNA, 554 bp, Homo sapiens
gagaaatagtttggaacattttaatatcatttacctatttcccaacttatatgttttcattttgtgtattttcctgctatattttaactccataagagattattatttctgttttatgcagtttgtgtttgcttagttctattccccccctccatgattatactttctctgctcttctttcatctcaaacattctatgtggaattactttcctaacgccttgagtgtatcttttagaatttcctttagtcagaactaaatggttacgaaatctctcagtttttatttcttgaatataaaattctrggcaggcagttatttcctttggcacattccataaacgattcccctgcctcctggctttattattgctattgaaaagtcagctgtcaatctaattcctgctcctttcaagtcaatatattccttttctgacttctttttaagattgcctatttgtcgtttatgatctacagtatacctataatgtgtcttaatgtagatttattattatttactctttttgggtttcataagtttcttaagtgtgacagt

SEQ ID NO: 467595 - DNA, 546 bp, Homo sapiens
gaggtgttagtcagtgcaagtgaccacaagcactgtaacctactcaagccagctaaaagggaattgagattgattagtctgtcaccagaagtatctcacatgttccaaatgcaggagtgcagctgggcttccagggctgactagaatcagagttgcaggcacagtgggaaatgagggccactgaaaggtcagactccattcaggactggctgaaaacctctacctgggctttgagatgcagcatagttggttttgagccctcttctagtctgattttttgcactgatttccccacctgtcatctgccctatagagaatctagcatgcattcctctgtttttcatctctgcttctctgggcatatttgcttcacttgtcatgttttytgcagataaatactctctgcagaaaaggactaaagtcccaattcagagttcccagggaagaactctgatgggtccagctagttattggaccaattagttattggtcacctggatgtttcataggtgaccagtgaacagggtcacacttctgtgaccaagg

SEQ ID NO: 467596 - DNA, 542 bp, Homo sapiens
gggaattattaatacaattcgagatgagatttgagtgggggcacagagccaaaccgtatcacctatcatatgtcaggctgtatcaagtactttaatagactgtttaatcattgttcaaggtaggtactaatactatcttcattgtcagaggagaaaactgaggcccagatagagtaaatgactagcccaaggttccattactgatgggtggcataactaggattctgattgttggattatatttttctctctcttatctatgattattctacacataaatgtctacagaagtttgaactaggatgatgattggaraaagcttcagagaagtgaaattcatataagatggtcttaaagcacaagttagaaatagaacagtggaaatagtagtgagagaagaagccgggcgttaaaggtggaagaaataatggacaaaggctttatgagcattattttctcttttatctgttgcctcatctctccaatgccccgtgcctatctgtacatcttgttcagctgtatatactattgggttgtgtgtt

SEQ ID NO: 467597 - DNA, 603 bp, Homo sapiens
agttatatcaagttctgaatacgtggggaaaagtctgtttttttgcaaaaaaaatataaaaacacatattgtttttaggtcaatgtgtgaatacccatgttcacattctatgcacttttaggattcccagaatgaaatctgcacagtctccctcataaccaaattcataaataaaccaacttgacagtagattcattccttctyctaactacaccttaaacttatgtcctcttagtaccgtctctgtggagaaggggaatatctggacaaggacagctgtttgtcctctgcaaatgacctttcttgttgaagtcactaattaaggcaaccttccacttggcaggaatagagttgaccatttcttatttgttttgcttacattttactccttacaaaatatgctgaacctatgtttgtatatgatgacaatttgctttctggttggtaactaaatactttaaaatttaaacttacaatcttatctactaattcaagaattactaccatgtaaaataagaacaaatactagatattgtaaaagaatttaaatttcctgatagggttaaaacatcctgtcccagactctacctgcagtttaattat

SEQ ID NO: 467598 - DNA, 553 bp, Homo sapiens
attattttcctatagagttcaagaaaatcaagccagatgtaggtagttgcactaattttcaactctcatagaaagctgacagccaaattataaagtagttctcccttatctgcrggggatacgttttaagatctccagtggatgcctgaaaccttgaatggagctgaatccaactgctttcaatttgaacacgtttctgttcatatcttccacccacaaatttaattccttttccatcttaactacacttatcacacattgtggctgtaacttttgcagtgtgaggtgcaataacaaaactaacatgaaattctttttcttcattcacaatttcatggatagacttgttcttaccatagatcttagcaacctcagcatacgatttctttcctttccttgctaagtagagaacttccacctgttcacttaaaagaagtactttatggcttctcattttatatatatctgaattgctagcatcaatactcttgggttcaggggccatgatgaagtataataaggtcacttgcacataagcactgcgatactgtca

SEQ ID NO: 467599 - DNA, 580 bp, Homo sapiens
aaattcaacttagtgatattatttaatttcctataacactttatggctagtgaagcactttttcatacaccatgtttcaggcctagccaaagaaagaaagaaagaaagaaagatctttcagtgtatttctttctttccatccaaagttgttgaacatttagaagtcaagctctgtgtctggggaggttatagaccatttgaatgtgtattatgagcatatttgaagatgtgcatattttgcatcaaatgaacattcgctgacagttccccactctgtctctctgatctcgagggggcaaatgccctggagaagagagaagtgatggggatgagagtgtgatttctrtgagggcaagaaccctgtgtaaatgaagtaaccatattaaatggaaatcagtggcttgctatttagagatagcagaagatctcccagttgcaggcttcaaaacttccaattgtgatcaaacagttccatttaaatggggtaatcagacaaaacccccaaagcatagaaaagcaaatcaattcaatgttctgtttagatatagacaatgcctggagagcaaaccattacagttaa

SEQ ID NO: 467600 - DNA, 494 bp, Homo sapiens
tgaattttaaaatagtttttactagttctgtgaagaatgtcaatgacagtttaatgggaatagcactgaatccataaatttctttgggcagtataggctttttaatggtaaatgatattgattcttcctgtcmtccaggtattaagcctagaactcattggttgtttttcctgatcctcccaccctccaccctctgaaaggcccgagtgtgtgctgttctcctctgtgtgtccatgtgttctcatcattttgttcccacttacaaatcagaacatgtggtatttggttttatgttcttgtagtttgctaagaataatggcctccagctccatccatgtctttgcaaaggacatgatctcgtttttttatggctgcatagtacttcatggtgtatatatatcacattttatttttccagtctatcattgatggacatttaggttgactccatgtctttgctcttgtgaatagtgctgcaacaaacatatgtgtgc

SEQ ID NO: 467601 - DNA, 528 bp, Homo sapiens
ctaccctacaagtaagttcagcaagtaggccctattgaaattccaagatacctaccagtctcatgtgtatgttctatggtcatgcccatgacggctgttgcatccagtttcccctctgagatcacacacatttcctgcatggtgccagatatggtttaagaattttacctatcttaacccattaaatctacacaatgagaccatgatgtgggtgctgttactatcttcgcttcatagatgaggtacagagagattgctaacttgtccaaggtcacaccgtgagtaaatagcagaagagcatgggttcaaactcargtaatctgactctagagcctgcttgtcccataacttccttcatggggtctggcaagcacaaactcatgcagctttcctcatatgaagcaagagccacaatttaccctaaggagattctttcagccaattataccaactattttaaaatcaccccactcccccacaccccaacacatgcctcaatagcccctgtctcccccttgtactgaaaga

SEQ ID NO: 467602 - DNA, 625 bp, Homo sapiens
ggatctttgtggtttttgtttgtttgtttgtttgtttgtttgtttgtttttaagagatggggccttgttctgtcacccaggctgtgacacttcagcctccagctccaggactcaagcaatccctcctgcttcagcctctcaaacagctgggactgtaggcatgcaccaccatgcccagcatgcaccagtgtgccccttaatgtttttttagagatgggggtctcactgtattgcccaggtttctctcaaactcctggcctcaaatgatcctcccacctcagtctcccargtggctgggattacaggcatgagccaccacacctggctaccttaattattaaaacacttaatgttgggaagataaaaaaagttctggggttctggagatgatagtggtggatgaacaacaatatacatgtccttcataccaccaaactgtacattaaagaatggttaaaatggtaaattttaccattcttataccattatgtatactttaccacaataaacaattttaatggtagttggtgtaaatctcaaactacaaactcaaggaatataatttgctttatttttacataaatgaacataattttgttttaaacttgatctaagtcaattagga

SEQ ID NO: 467603 - DNA, 533 bp, Homo sapiens
aaaagcacacattggcttaggtcagtttgcaacattttcccattctcagtctagggcgcattctccaacttcttatttgtttttatgggctctttcattcccaggatggttgacagtgggaatgtacacccctttcagggaaaaccccatcccccacccrttgtgggtggtcttacctttaggcccccaaagagcactcctatcagtttatgagtccttcatcagttcattttgccaaagctagataatttattcttaaataattccacaaataagacaaaagtactaagctttctctagattggttcagttccagttccagctatagtgaggattcatatcttgacttgcagtttcctgtgagcaattcacataaggccatatatctttctctaaaacagaaaatgaatttcaggcactatatctttgcttaggaaaatatatttttctaaagcgaaggttgttgactggctacacctagagtatattctgatcactgttgtgtttagtttggtcttcatgatgtgtaccaa

SEQ ID NO: 467604 - DNA, 308 bp, Homo sapiens
ttttgacagctttgggccatgaaagtcactgggctgtaaagggagttggtgagacaaggagatctgcactaatgggggcattctcttaaagtttttgttcttccttcatccacaaagctgcagtgtccttactatctgtcctgtgtcracagaaaccacaggacaaagcaggctgcctaaccaggaggctggagtagcagaggggcgagcccagagctgggggactgaagggagctgcatggacagaaaatgagcccttgtgaaacaagaataccacccctgcctctgctatgtgggatttcaaccca

SEQ ID NO: 467605 - DNA, 308 bp, Homo sapiens
ttttgacagctttgggccatgaaagtcactgggctgtaaagggagttggtgagacaaggagatctgcactaatgggggcattctcttaaagtttttgttcttccttcatccacaaagctgcagtgtccttactatctgtcctgtgtcaacagaaaccacaggacaaagcaggctgcctaaccaggaggctggagtagcagaggggcgagcccagagctgggggactgaagggagctgcatggacagaaaatgagcccttgtgaaacaagaataccacccckgcctctgctatgtgggatttcaaccca

SEQ ID NO: 467606 - DNA, 543 bp, Homo sapiens
aggcttttgatggctaatatcagctcaatgatgccatatagagatctcctaactggccactctttctcagccacctataccagagtctcctcattaatttatcctcaaaatactacaatttctggaaaacttctagattcctccctttcctcctttcttgattcccgactctgtgctcccctggtgtcttcccaggagatggcatccattcttattcctgtaaataccacctaaatgctcatgactrtcaaatttacatctccagccaggacctctcctctaaaatccaaatgtgcacatacaacggcaactggatatttctacttgggtctcaggacatatttcaggaaatgtcaaaataaatatgttcaaactgagttttgcccttgtcgcaagaattagaggttgactgagtcacattctattttcaactccacttttctttttctgcccactctatgaggttaccaaggtaaaaattcattgtccatgcactcctacaccagatggtgtctgtgtgacacaattctgagcaatgagata

SEQ ID NO: 467607 - DNA, 481 bp, Homo sapiens
tgtatggtggccatgaggcaatagagatgaagataaaagttgaaacactaagggtggcagagaggaaatagagaaagagcctgggtctttctatatggtatcattgagctgatgttagccatcaaatgcctaactgtagcctccttgttaggtgaaataaatggaactatcagtgtccaagcccctggagtgtggttttctgtcattagcagcccaactcattcctaactgatgtggcctccaagcctgtttcttctttaagtcttcctcatctctgtaaagtactttgcaattatccctgtagactcttctctttcccacactccagtcttgcccctcccctatcaagcacacacactgagtccatcagtaagtcctgtgccgtctccttgaaggacaggcagcaytgtcaatgtctttatctgcactgcagccactctagtctaacttaaatgtagaagcttcttagctatcctaccca

SEQ ID NO: 467608 - DNA, 560 bp, Homo sapiens
ctcctttcaactccttttaaccttgacccccggaacattactctcctctcgttcttcatcaccctacgcatattgtctccttcatcagcctcattatttccctcaaccctagaatgcagcttctgctcagtgcctgctcaccaccccccatccctccaccatcactccttgggtctsgtaaccttacaggccagtgtcctcaggacagtcctagtctacacctgttgtcccgctttctctccccaaagtgtctcatgttgtatgacaaattacagagccactctctctatgagagaggtcctccacctttgcagcttcagcagcacctctagacagcagtgatggtagccaagcagctgggacagcccacttccgtgccccctccattcacagtgcagacaattgacattttcttcatctcatgtaaggagctatgtaaatgcagccccttttccctacttccagccagattgctgccctcaaagccctcctttatagataaactggaactgccactgaatacaaaggactcccaatgcatccgtccattccttacttct

SEQ ID NO: 467609 - DNA, 386 bp, Homo sapiens
gacagtagggttggcaaagccttctctagggttattaagtctactgctgggaaaatgctaattcgccaaaacctttttcaagctcaggcctataggagactccatgccaaatttatatgcccaggtgcatgatttcatatgtgctttgaataatggtatctgtgctcagaaaatcaaacagaattaggaaaagcaattgcctgcggggattttcattttgtactagtgacatgagatcattcatgtgccatgccgttttaacaattcagcattgtaaaatcagaaawctttcctcaaatccactgtagaatgtaaagtgttcattttcttcctattacatgaagtgaaggaaacagtcgttctgaaatgcaggcagtatcaaggta

SEQ ID NO: 467610 - DNA, 614 bp, Homo sapiens
attggcttaccaaaatatagttatcatttcactatttatatctatattaaaacatcatactgcacattctaaatatatacaataaaaagtaaataaaaataaatatgtgtaaaagaaaaaatgataartattgcttaaaaagacatggaaagatatgagcaaagtggaaatttcttttgtttttaactaaattgcaaacaccaaggaggcataatctcattgcattttgaataagaacataattttgtgtaagtaatgagttttgtgagatgtgaacacatttcactaagattttgtttaaatattgagaaatttctttaattaaattctaaaaggcaatttatactgctcctaatcactttaaatcctctaggattttctgtgttaacattaacgactcacctagggtattttatttagaatttttcaaaatgtttatagccaatgaaaggtaagatagtggagtagatgaacagtgtagtactacagctgactttttaacaacacattattgcattgcaaggatccacttacctgcaaatttttttctgcctctgtcacccccaagacagcaagacaaactcctctttttcttcctcctcagcctaaacaac

SEQ ID NO: 467611 - DNA, 614 bp, Homo sapiens
attggcttaccaaaatatagttatcatttcactatttatatctatattaaaacatcatactgcacattctaaatatatacaataaaaagtaaataaaaataaatatgtgtaaaagaaaaaatgataaatattgcttaaaaagacatggaaagatatgagcaaagtggaaatttcttttgtttttaactaaattgcaaacaccaaggaggcataatctcattgcattttgaataagaacataattttgtgtaagtaatgagttttgtgagatgtgaacacatttcactaagattttgtttaaatattgagaaatttctttaattaaattctaaaaggcaatttatactgctcctaatcactttaaatcctctaggattttctgtgttaacattaasgactcacctagggtattttatttagaatttttcaaaatgtttatagccaatgaaaggtaagatagtggagtagatgaacagtgtagtactacagctgactttttaacaacacattattgcattgcaaggatccacttacctgcaaatttttttctgcctctgtcacccccaagacagcaagacaaactcctctttttcttcctcctcagcctaaacaac

SEQ ID NO: 467612 - DNA, 463 bp, Homo sapiens
gagtaactcattctctgtatcatctgtacatgttcatgctgacacagcatgccaaacaatattatctagaatgaatttcaatgtagaacttctcaatattttttttcttttcagtatccccctcacagcaagagcaagcatggctggattccagaaatcacaacatttattcatttaatttgtaaacagaaaattgttgaacctttctgtttcttaagagttaggtgggttttcttcaaaggactaaaatgcttacaatgtctgaagtatttcctggtagttacaaaacctattgaatcttcaagtatctgttgcactaacaggttgaggtagtgcaccacagtcatgatcattttgttmtgaactgtaccatgtttcttattatcaaagcttgtggatattaggaacaaaaagctcttcctatgggtaagcccagtttttttacttggcggaatactaagaa

SEQ ID NO: 467613 - DNA, 597 bp, Homo sapiens
ttgactacctaaaatcttccagaaacaaagccaattaactgaacccaccttataccacaatcaaattcccaatgacatcaaagaagataaagcaaaaagaaaaaaaatcaaaggacagtaacttcaaagattgaaggaacatcagttcacaaagatgagaaagaaccagtgcaaaacctctaacaactcaaaaagccagagtgtcttcttgttcttttttcctccaaaccaccacactagtcccccaggaatggttcttaaccaggctaaaatagatgaaacgacagaaatagaattcaaaatatggataggaataaagattatagaggctcaggagaaagtcaaaacccaatccaaggattctaaggaatacaataaaatgatacagaagctgaaagacatatggctttttttaaaaaaataaaaaaaacttatctgatagagctgaaaaactcacttcaagaatttcagaatatagacacaagtattaacagcagaatcagccaagctgaggaaagaatctcagagcttgaagactgtttctccaaartaattcagtcagacaaaaataaagaaaaaataaagaagaataaaaaa

SEQ ID NO: 467614 - DNA, 529 bp, Homo sapiens
gtaaaatagtgtacactctgcttcaggaagcaatgtatactttgaccaactaaatgcaaatgtcaacacaaatgctgtacagcattccaaggaatcaaataagagccaggaagagggaaaaatctatgttagggtaggaatcatagcaaaatttcttctgagattaaaaatactaaaaatgtacaatccacattttgccattaagcaayacatttcctgataactagagagacgccatctaaaatcatgaatatgagaagattaatgctctaaaatcctattatttcatcaccatataacattgaactccatcaggaagttaattatcagatttcctaactatgaataaaaaataaattaaaaacatcaatttacagttcagtggagggatagtattaattgagagaacattcaaatgtgtaattttcaaatttaataattttaagaatgaaaaccttttgctttttataacgtgtttagttagtttgtttgtttataaggaagagcatctcctgaaactactgtctcc

SEQ ID NO: 467615 - DNA, 605 bp, Homo sapiens
tgacagcaaaataaaaataataccaacttcagcagttatactagaacttgatgtcccaacacagccttcaggtaatttgcatctttctcaaaaagatgaagcaaaaaataggcaggaagaggctttttataaaattaattcctaagccaaatgatgtctcaggttttatttayttatttattttgctttctagaatattattaagtgttaaaatgagttctttgttttgttggtattcaaatgtattcatttattctatatcattgctcttcattgtttcagattttggtagatagatttggtgagattctttaatcaaaatttagaaatttttcttgctataaatgtagttacaataatactaaatatctaatatattacgttaagtcctagttttctgcagatacttagtaatgttttctatttttaaaaaatctcacatcaagactgggtttaaaaatattttatgtaataaaaaggaatttttatataaatcttttaggtattattaaggaatcttttctatagcaatgtttgcagttcctctttcaactttaatttattttaaaattttaaattcatgattattaatgttatttttgatt

SEQ ID NO: 467616 - DNA, 589 bp, Homo sapiens
gtttaagtcaagctaactagcatatccatcatttcacttatttaccattttttatgtgaggccatcatttaactctgtacatttgtgggttcaacttttttatattacacatataagtgagatcatgtggtagttgaacttctgtgcttgccttatttcacttagcataatgtccttcagatttatccktgtcatgaatgacagaattttcccaatattctattgtgtatatatactacattttcttcatccattcatccattgttgaacacttaggttcattctgtatcttggctattgtgtataatgcttctatgaacatgatagtacagatatctctttgacatattgatttcgcttcctttggatatacatccagagtggtattactggatcatatggtagttctatttttagtgtcctgaggaaactttaggctgtttactataatggtgctaatttgcatttctaccaacaatgtataagagttctgcattaggccgttcttgcattgctataaagaaatacctgagattgagtaactcataagaaaagatttttaattggatcatagttctgcaacaggaag

SEQ ID NO: 467617 - DNA, 633 bp, Homo sapiens
accttgctgtaggacggtggtccttggccacaaaccaccagaaaaccttcccacatcactgggacatgatatccttttctggacctcccccattcaggagagtaggcattctgtttgtttatatgaactgaggcaaacctgagcttaaagttctgtctagttcattaaaggaggcagmaacctaatggaggggaaaaaaaaagcatttaaaaaatgtattatccttagcaaactaacacaggaactgaacaccaagtatcacatgctctcacttataagtgagagctaaataatgagaacacacggacacatagaggggaacaacacacaatggagcctttggcagggtggaagatgggaggagggagatgatcagaaaaaataattaatgggtttaatacctgggtggcaaaataatttgcacaataaatccccatgacacaacatgcagtttcaacagggaaattgcaaagaatctctaagcaaacatatccaacaaaaaccaaaacaagccagacaggaagactgggaaaaacaattaaatcttcattgcaaagacatagacatacatccaaaagaaacaatagcaaacaaaaaaaaaacatgatctcctcaaatgcacaaagcaaggaa

SEQ ID NO: 467618 - DNA, 633 bp, Homo sapiens
accttgctgtaggacggtggtccttggccacaaaccaccagaaaaccttcccacatcactgggacatgatatccttttctggacctcccccattcaggagagtaggcattctgtttgtttatatgaactgaggcaaacctgagcttaaagttctgtctagttcattaaaggaggcagcaacctaatggaggggaaaaaaaaagcatttaaaaaatgtattatccttagcaaactaacacaggaactgaacaccaagtatcacatgctctcacttataagtgagagctaaataatgagaacacayggacacatagaggggaacaacacacaatggagcctttggcagggtggaagatgggaggagggagatgatcagaaaaaataattaatgggtttaatacctgggtggcaaaataatttgcacaataaatccccatgacacaacatgcagtttcaacagggaaattgcaaagaatctctaagcaaacatatccaacaaaaaccaaaacaagccagacaggaagactgggaaaaacaattaaatcttcattgcaaagacatagacatacatccaaaagaaacaatagcaaacaaaaaaaaaacatgatctcctcaaatgcacaaagcaaggaa

SEQ ID NO: 467619 - DNA, 633 bp, Homo sapiens
accttgctgtaggacggtggtccttggccacaaaccaccagaaaaccttcccacatcactgggacatgatatccttttctggacctcccccattcaggagagtaggcattctgtttgtttatatgaactgaggcaaacctgagcttaaagttctgtctagttcattaaaggaggcagcaacctaatggaggggaaaaaaaaagcatttaaaaaatgtattatccttagcaaactaacacaggaactgaacaccaagtatcacatgctctcacttataagtgagagctaaataatgagaacacacggacacatagaggggaacaacacacaatggagcctttggcagggtggaagatgggaggagggagakgatcagaaaaaataattaatgggtttaatacctgggtggcaaaataatttgcacaataaatccccatgacacaacatgcagtttcaacagggaaattgcaaagaatctctaagcaaacatatccaacaaaaaccaaaacaagccagacaggaagactgggaaaaacaattaaatcttcattgcaaagacatagacatacatccaaaagaaacaatagcaaacaaaaaaaaaacatgatctcctcaaatgcacaaagcaaggaa

SEQ ID NO: 467620 - DNA, 609 bp, Homo sapiens
ttggaagttgtcattttctggatatgtttactaggtaaagaaacaataaagtatattatctyggtgttgaatgtgttatagcatgaggttaaaagactgcaaaacttaaactcagaatatttatccagttcaattaagaaatcaactctgaaatttaggatatctttaggactgtatcctgcactagaatattgaaaactttctgcagtaaagatatatgctatgttttataaacagttttttgtcaataatttacactagtggaaagaaaagttactttgattcccttactttaaacctttccaaataacaagaggattaaaaaatgagttaacacctactgcctaagtaaaacaatcacaaatctaaaatttctcagtgaatagtcatcatatacacatagaacttacgtttttcacattaggaagttgaaaattcttgtatgaaccctaatgagtataagtattaaagtctaaacaaggaaagaattgctagtcatgctataatggtactcactacaggcttaaccaacaaaagatagtataagtatcattttgaatgctatattgtataaatattatagtgtgaggtacaaatcaaaaatcaatt

SEQ ID NO: 467621 - DNA, 625 bp, Homo sapiens
tggttaaactatgttctgaatgctcccaatcatggctcttagtgtctgtggtatcaggaggctgtccttctatgtctaaactctctttaattaaaattttggttgcatgtttcttaagcttttagtgtccttagggttctttgaaaattagcctttctttttagcttcataaaacatttttaaaggtctaattttccagaggttgaacataaacttgcaatgttgttcttctatttattacacactgcttaagcagactgacacagtgctttaaaattatgatgagatttttatttctctcttacatgaacaattgaacatttgttagacatagtgatgctcctyagtattacccattcacttttttgggaggcacaagaaaggattgcacttcagcatttctttgaagttaagtataaccatgtgacatgcttctgccaataaaatataagcagcagtataatatgtgcttatactatgtaagctgtataacatgtgtcacttgtagctataatgggtattaaggctgttacacatggaggagtctgagtcctagttcagagatggttgcatgaaataagaactagaccgctgttatttattaagtctctgatattttggaatt

SEQ ID NO: 467622 - DNA, 592 bp, Homo sapiens
tgttccattaagtaagtttttatccaatccttcccactcctcatccttctggctctctattgtctatcattccacactctatatctacatgaaaacattatttagctcctaattataagagcatacagtatttgtctyattgtttatgagttttttcacttaaagtaatggcctccagttccatctgtattgctgcagaagacatgactcctttttgtggctgaatagtattccattgtgtatatacatcatattttcttcatccagtcctccattgatagccacttaggttgatttcatatctgttgttatgaataggtgtctttttgatataatgatatcttttcctttgggtggacgcccagtactgggattacaggatcaaatggtagttttatttttagttcttcaaaaaatctccacactgttttctatagtagttgtactaatttacattcccaccagcagtgtatgagcattcccttttctctgtatccttgtcaacatcagctattttttatcttttaatagtagttattctgactggtgtaagatgatacctcattgtggttttaatttcattttttggatg

SEQ ID NO: 467623 - DNA, 607 bp, Homo sapiens
agaagatttctgtggctaatgtgtggggatttctccccatcaagaagcaaggaaataaattctgcagcagataccagctgcatgttttccactccaattccattctaacgctatttacttggtgatagtgtcaggttttacagggggagggctcagttctgtaagactgccccctacttccagtgccaagcacaagctccaggttgttttgcctgtgcttctgaccaaccagccataaattgggaattccatgacaccctcaagtttgatgaatgtgctagggcaggtcccaggactcagggaaacatttagcttattggtttattataaagacaattacaaatggcacagaagaagagatgcatagggtgaggtgtgggggaaggggtatgaggagctttcataacctytctgggaacagcacattccaggaacctccacacattcagctatctggaagctcctcaaactctgtgggtttttttttttttttttttttgaacattttacggggacttcagtggatgggcatgatggacaaccataaaaaacgtgattggacaaaaagagtatgatctaatgttagtagagtgagtgatgaaacctg

SEQ ID NO: 467624 - DNA, 607 bp, Homo sapiens
agaagatttctgtggctaatgtgtggggatttctccccatcaagaagcaaggaaataaattctgcagcagataccagctgcatgttttccactccaattccattctaacgctatttacttggtgatagtgtcaggttttacagggggagggctcagttctgtaagactgccccctacttccagtgccaagcacaagctccaggttgttttgcctgtgcttctgaccaaccagccataaattgggaattccatgacaccctcaagtttgatgaatgtgctagggcaggtcccaggactcagggaaacatttagcttattggtttattataaagacaattacaaatggcacagaagaagagatgcatagggtgaggtgtgggggaaggggtatgaggagctttcataacctctytgggaacagcacattccaggaacctccacacattcagctatctggaagctcctcaaactctgtgggtttttttttttttttttttttgaacattttacggggacttcagtggatgggcatgatggacaaccataaaaaacgtgattggacaaaaagagtatgatctaatgttagtagagtgagtgatgaaacctg

SEQ ID NO: 467625 - DNA, 591 bp, Homo sapiens
tacagtgttactggacttggggtgccatctaatacagatatggctgtagtgaccaaagacttagatcacaacaatcaattcccatgaatacctggaaagcctttcaaaggcttgttccttgtacaaacaagcccagactgtgaagactacaataaataactagttattcagtgcccatataycaacaagcatcaaggccatccaggaaaacatgacctccccaaatgaactaaataagacaacagtgacccatcacagagtgatagagatatgttacctttcagacagagaactcaaaatagctgttttgaagaagctcagtaaaactcgagataacacagagaaggaattcagaatcctaatagacaaatttaacaaagagaatgaaatatttttgaaaataaaacagaaattataaagaaattgaaaaattctattaacatgctgaagaatgcatcagagtttctcaaaagcagaattgatcaagcagaggggagaattagtgagctggaagacaggctatttgaaaatacacagtccaatacatctggcagctccagatataaagtagctccaatacatctggcagca

SEQ ID NO: 467626 - DNA, 568 bp, Homo sapiens
actatgctgtatttttttgttttcctcttctatgtcatttttctacattttctgtaagcatatggattccttttgttattataaattctatgtgttcaaaaggctatgtcatatttatattgatgacatgtcccttagaatattgttggcattcaatttatacttaaagaatgaataaatgaataacaatttagtattctgaaaaattatttctcagataaatacattctatttcttctaattaagcaacattatactaagtattctaaagtaataactttaagagcttggtagtcatcttttgttctttgcttagatattttaaaaatatgyatcatttgtgcttgcactcagctctttctccttgcatttatatgcacaaaattttaaaagcttgtgaaactcttctggtgcttcataagattaaatgtctcagcagtaataattgtttgcttacgaatcagattttgatccagagcattttctgagtatttataatgctctacttcctcttcagttactacagttttcactacattctctttataaaattgagttggggtgtgat

SEQ ID NO: 467627 - DNA, 557 bp, Homo sapiens
ctgcaactggtctaagacattttaaccatgactcttaaaygctgtttggaaaattgccccctgtcctggttctcagacaataaaatcaggaattgtctcaggccaaattgtataacccaagtctatgagtgacagatgaggacttcttcatgtctgagggtgctattttcctgcagtgataaattgcacaggattatctcagagattgatgaaccacacctggcccagatgagctattctctggcatggattcagatgtgactactagcaggatttctaaagcgtcatctgtaccaaactggaatcagagaaatttttatactttaaggagttctagtgcaaactttgttcatttatatgttgtcatctgtagctttgctttctgtagtgaggaattttagcgccaaatgtccactatgtttgtaaaaatattactgatcattttgctacctgccagtattgagttgctatatttgtatcttttagataattaaatgatgtttgaattatccttgtagaatctctgttattttcaacagtttttacccactgttgac

SEQ ID NO: 467628 - DNA, 557 bp, Homo sapiens
ctgcaactggtctaagacattttaaccatgactcttaaacgctgtttggaaaattgccccctgtcctggttctcagacaataaaatcaggaattgtctcaggccaaattgtataacccaagtctatgagtgacagatgaggacttcttcatgtctgagggtgctattttcctgcagtgataaattkcacaggattatctcagagattgatgaaccacacctggcccagatgagctattctctggcatggattcagatgtgactactagcaggatttctaaagcgtcatctgtaccaaactggaatcagagaaatttttatactttaaggagttctagtgcaaactttgttcatttatatgttgtcatctgtagctttgctttctgtagtgaggaattttagcgccaaatgtccactatgtttgtaaaaatattactgatcattttgctacctgccagtattgagttgctatatttgtatcttttagataattaaatgatgtttgaattatccttgtagaatctctgttattttcaacagtttttacccactgttgac

SEQ ID NO: 467629 - DNA, 599 bp, Homo sapiens
attttattgttcagaccccctgagacagactatctagagtcttgccatggtaacctgtctaatgttaagtcatccttttttttctataaagcttatatgatgcctaatttatgttactgaaaattatgactctttcatggttttgctattgcaatacagaacagctgatcaaaaaacgtwttatgacaatgattacaaaatgaaaagtgagcagaagctaaggtttggtgacgttttgctatttcagatgttttaatgcttttgaatattggtattgaaatgtcagatatttatttgaaaaaaattaaaagaaggataatggggaacattcttctgacaaatgactgaaattcctacctcaacactaagcttatttttattttttgagacagggtctcaccctgatgcctaggctggagtggtgtggggcaatcatagctcaccacagccttgaactcttgagctcaagcaacccttctgcctcagtctcccaagtagctgagactacagcacatgccactatgcctgcctaataacctcattttatatctagtgttgatctgagaacataactcttttctcagtaggagtcctctatt

SEQ ID NO: 467630 - DNA, 599 bp, Homo sapiens
attttattgttcagaccccctgagacagactatctagagtcttgccatggtaacctgtctaatgttaagtcatccttttttttctataaagcttatatgatgcctaatttatgttactgaaaattatgactctttcatggttttgctattgcaatacagaacagctgatcaaaaaacgtattatgacaatgattacaaaatgaaaagtgagcagaagctaaggtttggtgacgttttgctatttcagatgttttaatgcttttgaatattggtattgaaatgtcagatatttatttgaaaaaaattaaaagaaggataatggggaacattcttctgacaaatgactgaaattcctacctcaacactaagcttatttttattttttgagacagggtctcaccctgatgcctaggctggagtggtgtggggcaatcatagctyaccacagccttgaactcttgagctcaagcaacccttctgcctcagtctcccaagtagctgagactacagcacatgccactatgcctgcctaataacctcattttatatctagtgttgatctgagaacataactcttttctcagtaggagtcctctatt

SEQ ID NO: 467631 - DNA, 599 bp, Homo sapiens
attttattgttcagaccccctgagacagactatctagagtcttgccatggtaacctgtctaatgttaagtcatccttttttttctataaagcttatatgatgcctaatttatgttactgaaaattatgactctttcatggttttgctattgcaatacagaacagctgatcaaaaaacgtattatgacaatgattacaaaatgaaaagtgagcagaagctaaggtttggtgacgttttgctatttcagatgttttaatgcttttgaatattggtattgaaatgtcagatatttatttgaaaaaaattaaaagaaggataatggggaacattcttctgacaaatgactgaaattcctacctcaacactaagcttatttttattttttgagacagggtctcaccctgatgcctaggctggagtggtgtggggcaatcatagctcaccacagccttgaactcttgagctcaagcaacccttctgcctcagtctcccaagtagctgagactacagcacatgccactatgcctgcctaataacctcattttatatctagtgttgatctgakaacataactcttttctcagtaggagtcctctatt

SEQ ID NO: 467632 - DNA, 599 bp, Homo sapiens
tgatactattctttatgaagttggcacagatgctggttcaaggagaacatttcttgcataatgaccagaagattatgaattcacacatttttctttaatgttccaaaaaggggcagactatgcaatttcttccctggaaagttgtaattagactcaatccctcttcctccctcataaaagatactccaaaaatgtttcattctttwaaaaatatatattatggaaaactttaaacatatacaaaaagaaagagaacagtttaataataatatgctgtgtccctgttcccaagtttcaacaattatggacaatcttgtttcatttataccctcatctgcttcccttgttacttgctagattattttgaagcaaatctcaggtataatttcacctataaatatttcagtgtgcataaaagatgggatccttcacaaaacataaccacaatataattttcacatataaaaatacaaataattatttaatatcttcaaagattcaatcagtatttacattttcccattgtttcgctctgtcactcaacttctttgttgtaatcaggatctaaagaagattcatacattgtaattggtcaacat

SEQ ID NO: 467633 - DNA, 545 bp, Homo sapiens
tactataataatagcttccctgctcccataggagcttctgaaaaacgtaaaccctgcaaaattattccattgttgatttcatagtgccttcttttatgacttggttttctaaatttctacaaccaaacctgaaataaacttataatttgaaaatgtgggaagctctttatattgaataaaaatatcaatcactgtaacagacacttgtcagatgcttcccyggcctccgtttcatacttttcgcacaggttagcagtccgggtgactagatgggattgattcccataacctacccacataagtgggcactgattggcctaaaccaagtagaaggatctcccaaacttagtactatgactgaccaaaacccaagcccaggccagctagatgttgacattactccggccatggcaactgctttggccactcggttaaatctagttcagagtgaggccacaagtcttgtttgacaatcagagaaagagattttcttttctaagaaagactgatgtgcagatgtgacatttggagctgctacatccatt

SEQ ID NO: 467634 - DNA, 545 bp, Homo sapiens
tactataataatagcttccctgctcccataggagcttctgaaaaacgtaaaccctgcaaaattattccattgttgatttcatagtgccttcttttatgacttggttttctaaatttctacaaccaaacctgaaataaacttataatttgaaaatgtgggaagctctttatattgaataaaaatatcaatcactgtaacagacacttgtcagatgcttccctggcctccgtttcatacttttygcacaggttagcagtccgggtgactagatgggattgattcccataacctacccacataagtgggcactgattggcctaaaccaagtagaaggatctcccaaacttagtactatgactgaccaaaacccaagcccaggccagctagatgttgacattactccggccatggcaactgctttggccactcggttaaatctagttcagagtgaggccacaagtcttgtttgacaatcagagaaagagattttcttttctaagaaagactgatgtgcagatgtgacatttggagctgctacatccatt

SEQ ID NO: 467635 - DNA, 522 bp, Homo sapiens
tcagcctgggcaacatagcaagactccagcctgtctcaaaagaaagggatctaatctagaatggtaagggattaaagcagtacagtagaggccaaaatgaaagacattcaagatgaccacaggatcagacccttttaaggcagggacttcaccagcacagaccctacggcagccactatttctgcacaccattgcttccactgaaaagaaaatgacacccaacccatataattcacaatgtcrtagaatgctaaatgcgagttaaatgtgtgaaggcaccaaacaaacttcaaactatcccttttgatgttacaattattatttagaatgtttcaaagaaaaagcagcagctgagaggccataaaacaattttattttcctaaaatactcattccctgaatgggttaatttatcatagaattaataaaagtgaagataaggatatcaactacatttttcctgaaatgtattaaaatattacagagttaatggttaaatataagttatccgttaaaatgtata

SEQ ID NO: 467636 - DNA, 578 bp, Homo sapiens
aagaacagccaaaaccatagcatctcatttcatttcaagattgaatttgggaatttgcaagagaaatgattttgacacagaggaatgctcagtattgttgggaacgcttgtaaaaaccaagaaccttttcaggaattgagcctgatgatttggttgataagaaagtgaagaaaccaggtaaatatcaggtgattattacctggtttggggttttgctgcaaacattttgcagagctctaactgtgatgtgcattagtcacgctactggagcagaaaatcaataaaacgaggttccaaaaataaaatattcttttggaatgttgctctgaactaattagcaatgagtcatttaaaaggacttacctgtcattaggatgaaaaaaaggtatttactaaaatccgtttcccgacaaaacattttttgagattgaaaaggaaagattaaaaactttgattcacaaagtgacttttattttaacaataaataacrcacaagtcacattgtgaaatgagaaacttaatcatttttctgtcacgttatttgtcaaaatatagaagaaaaaatgataactcataaa

SEQ ID NO: 467637 - DNA, 586 bp, Homo sapiens
ttatttgctgaacttggcaacctaattcctatgccaaccacctgtggccaaaaggatgacagactcctgaatcctggagattgagtcagtctcagattgatggggactgggaatgggggaagggtagttgcctaaagaaatcctgagcagattaaaagcttgtgcctactatacttgctgtttcttcctgtactcccaattttgtgtagacttttccagawcatctatctcatgttaaaaactgagataatcaccttcacttccaaatgtgtatttttttgacaaactgccaattattgacaacagattttttctccattcctctcacctctagttattgaatttacaagtttggtgttctttcatttcttgattttcctttggtccattaatccacaacttgaaaacccagacttgtgtctcaccaagtaaattcctacattccagaagctgcaaaatttgactcaatgacagtctagtgctagctcaaaggtgacttggggcagtatctgagcaagcaatatgaacctggaaattcagatgcagcagatttgctgatttgaagagatcattccagtttttataa

SEQ ID NO: 467638 - DNA, 586 bp, Homo sapiens
ttatttgctgaacttggcaacctaattcctatgccaaccacctgtggccaaaaggatgacagactcctgaatcctggagattgagtcagtctcagattgatggggactgggaatgggggaagggtagttgcctaaagaaatcctgagcagattaaaagcttgtgcctactatacttgctgtttcttcctgtactcccaattttgtgtagacttttccagatcatctatctcatgttaaaaactgagataatcaccttcacttccaaatgtgtayttttttgacaaactgccaattattgacaacagattttttctccattcctctcacctctagttattgaatttacaagtttggtgttctttcatttcttgattttcctttggtccattaatccacaacttgaaaacccagacttgtgtctcaccaagtaaattcctacattccagaagctgcaaaatttgactcaatgacagtctagtgctagctcaaaggtgacttggggcagtatctgagcaagcaatatgaacctggaaattcagatgcagcagatttgctgatttgaagagatcattccagtttttataa

SEQ ID NO: 467639 - DNA, 558 bp, Homo sapiens
taagactaagatctggcaaaaccagatcttgaagtatgcgatgaaacctcaaattgacamttgccaaaattctccattaaacaccccatcacagtagggataaatttgccatagtattaaacactgactagaaaacttctgtagtatagcagaggatatgtccagttcatgcattatctatactaaattaagctcagtatggttttgggatgattcaagcacattacatttattgtgcactttatttctgttattattacattgtaatatataatgaagtaattatacaactcaccataatgttgaattagcgggagccctgagcttgttttcctgcaactagaaggtcttatctggaggtgatgggaaacagtggcagataatcctcacaaggagtaagccacctagatttcttgcatgtgcagttcacaataagattcacacttctgtgagaatctaatgccaccgctgatctgacaggaggcagagctcaggtggtaatgtgagcgatagaggacagctggaaacacagatgaagcttcgcttgcttgcccacca

SEQ ID NO: 467640 - DNA, 558 bp, Homo sapiens
taagactaagatctggcaaaaccagatcttgaagtatgcgatgaaacctcaaattgacaattgccaaaattctccattaaacaccccatcacagtagggataaatttgccatagtattaaacactgactagaaaacttctgtagtatagcagaggatatgtccagttcatgcattatctatactaaattaagctcagtatggttttgggatgattcaagcacattacatttattgtgcactktatttctgttattattacattgtaatatataatgaagtaattatacaactcaccataatgttgaattagcgggagccctgagcttgttttcctgcaactagaaggtcttatctggaggtgatgggaaacagtggcagataatcctcacaaggagtaagccacctagatttcttgcatgtgcagttcacaataagattcacacttctgtgagaatctaatgccaccgctgatctgacaggaggcagagctcaggtggtaatgtgagcgatagaggacagctggaaacacagatgaagcttcgcttgcttgcccacca

SEQ ID NO: 467641 - DNA, 639 bp, Homo sapiens
ccagtaaaattttaataggaatggtaaaagtggacatagctacctgttyctcttcttagagagaaagtattcagtctttcaccatcaagtgttatattacctataggctttttgtagatgcaccttatacttttttggaagtttcctttaactcctagttgctgggaattcaaatttaattcctagcttgttcattaaaaaaaatcgtgaatggatattgaattttatcacatgcttccccccacctattgagattatcagatgattttctccttggtttcttgatatagggaatgacattgattcttgaaagttgaaccagtcgtgcattcctggcataatcctcctgttggtctggctgtattgtcgtctgtctgtctatctatctatctatctatctatctatctatctatctatctatcatctatctatctatcatctatctatctatctatctggttgtattttactcactagtgttttgttcaacaatccttttgaatatcttggtgattgttttgaattttcattagctctttttttttattctgttgttgtttttctaagaatactctatcttgtttgttgaggatgcaatatctttccaaatgtactagagtataattagaactatattt

SEQ ID NO: 467642 - DNA, 639 bp, Homo sapiens
ccagtaaaattttaataggaatggtaaaagtggacatagctacctgtttctcttcttagagagaaagtattcagtctttcaccatcaagtgttatattacctataggctttttgtagatgcaccttatacttttttggaagtttcctttaactcctagttgctgggaattcaaatttaattcctagcttgttcattaaaaaaaatcgtgaatggatattgaattttatcacatgcttccccccacctattgagattatcagatgattttctccttggtttcttgatatagggaatgacattgattcttgaaagttgaaccagtcgtgcattcctggcataatcctcctgttggtctggctgtattgtcgtctgtctrtctatctatctatctatctatctatctatctatctatctatctatcatctatctatctatcatctatctatctatctatctggttgtattttactcactagtgttttgttcaacaatccttttgaatatcttggtgattgttttgaattttcattagctctttttttttattctgttgttgtttttctaagaatactctatcttgtttgttgaggatgcaatatctttccaaatgtactagagtataattagaactatattt

SEQ ID NO: 467643 - DNA, 547 bp, Homo sapiens
taggaagaaaagggattaaatgacttctccaaggagagtgagctccaggacctctcttcaaatatgcccactggttcctctcaaatggattccatttacaaggatacaccctaattcagtgccaacctcagtgacagcttcagwgcttagtcttcatatgacttcagtgagggagctttcttaaggtggtcccatacatctacgtaatcattggatagttgggggcagggaagatacaaatgtgtgtgtaaacccagttattaattttggtttcaaattcttaaaggtaattacagactctcataaatacagaacagatgccagatacctactgaacaactacactatttcataccaaaatgagtactacaattaaaaaaaaagaagcccagttaatcagaaaaatagaaataagacatttttcaaggcacctatacatattatagttgagtcttgtctccatttttctgatggagaaaaatgctccagtgagtttttatgaaacttgtgctttaggtggaaacgtgtgttgttgtttttttttgtt

SEQ ID NO: 467644 - DNA, 638 bp, Homo sapiens
cttgcaggagttcaacatagtatttaaatttaagtacagtttgttattaaatgagaagtgttgctaacttagttgcaattttgtatcaggcgggcggtaatagtttgttggtatgacttccatacatgttgccatgtgaaggatgtttggggtgtttcttaaacatacaagaatcaacaagtcccacctacaggagataacaaatcattatgatgtactggaccattattcactggggctaagaagtaaattatccccttttgaataaaagcacagcaaaatcaaaatgacctagtacatatctgagagcagcagaaggccaaggggagccctagagaatcagctgccctttgtcaccatgttgcagggtaggggtatggggcaatgcagcctgcccagagcagatggctttgaggttatacgggagactgaggaatgtacttattcacataaagccttttaaaataagctgagcattcattgctcttgagctaaaacagarcattcttccccaaggtgactgcttgcttgcatttaaatacaaaagaagtttctctccaggcttcctgaggccgatggtgaatgttcaaagatcaacgaagctaacatgaatctaaaatgaattataaggctgacgg

SEQ ID NO: 467645 - DNA, 595 bp, Homo sapiens
ctagtttttatgatgatgggcacattgtaggcaaacagaaaatgcctgataaccagtgaggtgtgaggacaggcatatgattcagagtgtaaaatattttgcagaattaaaacttaggcagtttttcatgagattcataaatcatccatacattgatattttttgtgcctctggcctcattgtttggtttttaggcataggactgtgttttactcaataggtagttgtatcatccatggtaccacagtctgtcaaaaccacaccagacattgataatgtattgtgcatatggggtgacctttaggaaggcttggtaggacctttttcttgctggctcccttcgagccagtgtgagtgatattccatctcctagtctgtgttttggatcactgtkctcacgcctaaagtcagaacagacagacccatgggagggacttaaccaggtttgtctaggccgatggagggctctaatggggtcacttcttactcttttgaaaagtggtggaaactgaaatgaattgtctttcaaatttggtccaatcacactttattgtctgaaaacttctgtcacatcttgtggcagcaatggaaaagg

SEQ ID NO: 467646 - DNA, 561 bp, Homo sapiens
accaacgataaccacaagagtgagaaaacgtgcatccctcccacgggcctctcagaattctaagatttctccagctccgtttgcaagttgcactgggggcygaccaagtttaaagtgaggtttgaacttgaaacacaagagcttcaaaccttcacttgcagagttgatttttctaatttaaaacagataagagatgtcatatttgctgatacaaatatgattctaaagcagaatgtgatttttgtgtgtgttgctgcatttttattgtatttttattatcccaggaggtacctggcttctcagtgcttttttttttttttaatctcactattttctataactgcccttttttttttctggctgtttccaagggcagctaaagtcttatttattctgaaggatttggttgaatcaaaggacaccatgggctttttgggacgttctgtccaaaactgtttcattccctcagaaagtttttacttcctcatgagccaaccctgtttgtgggtctagacccagatgttcaggaattgcaaaggtataattcaagtttctctccag

SEQ ID NO: 467647 - DNA, 538 bp, Homo sapiens
gtacccctaaatttaaaagttttttaaaaacctataaaatatatattcaaagcacacattataccctcacttaactagactttgatatctcacaaacattcaaaaatgttataccgtgtgttggtttttattatttatctatttttccatttggtgacccagaaaccatgcagatgctttggttgggatgacaggcataacacatgcagtctttgagcaaagaatgcttgcagtctcacactcgtggtgtttgttcaataaacagactgatagatagaatagtacctttgaaagagtattatatatgaaccacaagagggacatttaaatagggctagaaataggaagaagggaagagaagcagagtggaaatgaatagagaatatcaactcaactagactttactgcatgtaccactttatccttcaattcttacaygttggacttcctttcctctaaaaaggcattgccctgtccacctcaggatgtctaattttcagcctctctatctagaatcctttcttctctccacccaccc

SEQ ID NO: 467648 - DNA, 590 bp, Homo sapiens
accttaatatcccattgcctgaatactcagataattttttagaataaaatagggcatgcattaagaaaggtagagtaatacttaattccatttcatttgctaatcagcaggctataattttcatgaataaaaatcaacttcttccattcaaaacaagaaaaagtaaasggttggttgttccacaagacacagtaagcagaagttttgttaaagtcactcaggaatatggttttcctgattacaattttagggaaccatcctgaatctgcacacatttaatcagtttgaatcagttttgctttgaaaatacacataaaattacagaatacctagaaaagtattttaaaataatttacaaatactgcaacagatgatataaaagctttaggttttagaatttttagttacatgtcatttagatctatttcaaaaggttgtgctggtgtgaatgtgtcaactgatagtctattgattaaataatttgaataatcaattgcactgtaagagatgggtaatctgtaagatagtaaatcacttttttcagaaataacgtatctaagaacatcatattcagtggtaaatcaatttgg

SEQ ID NO: 467649 - DNA, 545 bp, Homo sapiens
gaaggcagtatcttgtatagcttcttgttaccaaaggaataattgcttatctaagaagaactaaaayaaaaacttgcacctacaaacatataaatgttttgatcacgccaaagagcacttacagtttctgaaaatactgctttccaatgtagtcacatcacaaataaaactcaaacatggctatagccaatataaaaaatgtatagttttagaatacaaaaaatgtatatttttaggtattttgacttccttttttttttttttttttgagacagagtctcactctgtcgcccagactggagtgcagtggcatgaccttggctcactgcaacctccgcctcccaggttcaagtgagtcttctgcctcagcctcccgagtagctgaaactacaggtgcacgccatcacatccagctaatttttgtatttttagtagagacagggttttaccatattggccagactggtcttgaactcctgacctcatgatcacctgccttggcctcccaaagtgctgtgattacaggcatgagccatcgcgcctgg

SEQ ID NO: 467650 - DNA, 545 bp, Homo sapiens
gaaggcagtatcttgtatagcttcttgttaccaaaggaataattgcttatctaagaagaactaaaacaaaaacttgcacctacaaacatataaatgttttgatcacgccaaagagcacttacagtttctgaaaatactgctttccaatgtagtcacrtcacaaataaaactcaaacatggctatagccaatataaaaaatgtatagttttagaatacaaaaaatgtatatttttaggtattttgacttccttttttttttttttttttgagacagagtctcactctgtcgcccagactggagtgcagtggcatgaccttggctcactgcaacctccgcctcccaggttcaagtgagtcttctgcctcagcctcccgagtagctgaaactacaggtgcacgccatcacatccagctaatttttgtatttttagtagagacagggttttaccatattggccagactggtcttgaactcctgacctcatgatcacctgccttggcctcccaaagtgctgtgattacaggcatgagccatcgcgcctgg

SEQ ID NO: 467651 - DNA, 565 bp, Homo sapiens
tgaatttttggttaatttgttaaagtggtttcatctatgcttttgtttttcctccaaacttaagtgtcccttaattagccttaccttaaagggaatttgcattacatttcactcttttagggagaccatgatgatgacatttggaarcatctcaggagacaagaataaaacgccattttttttcccacttcgctaacaactcagtgttctgaaaagtctggaatgtgctatgaaaagtttgtgtgcttagtgaaatgttgtacaattggccaatccactaagtcttgggaaatgtcttaggagcttggcaagaagaagttctcaagagagcctgaatgctgccagtttccaattggccaagacacattacaaggacaactgtctctctgagcaacctggcatttccactccaattggaatctgcaaggggaagatgcgcaggggaagaagattaaacaaaccttttcagatttctggtccaggtgaatttttcatttatctggtgtgcttcactcttcttttgatcactgaccatttccaatattagggaacactggacacattg

SEQ ID NO: 467652 - DNA, 643 bp, Homo sapiens
tgaaaagctttacaaaatgtttgcaccagttcttggcattctgtctttttaaacactgtactgtagtgtgtagaccccatacctgcttcgtaaatgaaggaagcagacaacctgagcaaatcaaaatgaaactctgccagactaaattttatgcatttcatctaagaaaaaaactgccttgatatgtgtttcaatgtgtttgaaaagtataaaagaataaaaccttatataaaagaggcattaatattatataacagttgtatataaatgggtttttcttatatttacaaaggtgaatgctctggtgagggattgcagatgcattaatttgattaaaagacttaaacagaatcacagtttttgtcttgggacagatcttggggctctttttggtacattctactggtacagggtagaaggatggaatggaagtgttggatgacatgtacctggtgcatggaccttcaagggtgcttttcatatacttctcatttcactgtaatatttaaattatcrcatcactatttccattttacagagaaagaaactgaagcatggccaagttaaatgccttgcccaaggttgcagcaacagtttatggcatttcagggatcctagcatcggtcggtttgtctgattccca

SEQ ID NO: 467653 - DNA, 572 bp, Homo sapiens
gtgcatagttcactatcttttgagtaggtaagaagggtatatrtgtatctgtttacatttgcataaagaaacactggaaagctgtactatgctcttacttactgctggacttttgaacatgttaatccttcctctccatgggtttttcctcttttgcctcctgacaactcctattcacccttcaggcctccacaagatgtatatttctccggaaaatgttagtttctgtggcccaataatttgtgggaactctccctatgtgctcatctgtatttaagcataatttatcattatacttaatttgcatttttcattaagcataatttatcattatcaaacaatactataattatcaacttatttgccccttaagtgccttgaataaacaactgcagtttggtccccgctgtattattttcgcctatcaaagtgcaagaagaagagactaaataaattcaattaaagaatggctacaccaatagtgatgcaatataaattaagtgtgatcagaaaaaatgtcacactttagcattcttctgagaggcagcgaaggagtctaagaaggatttgct

SEQ ID NO: 467654 - DNA, 572 bp, Homo sapiens
gtgcatagttcactatcttttgagtaggtaagaagggtatatatgtatctgtttacatttgcataaagaaacactggaaagcygtactatgctcttacttactgctggacttttgaacatgttaatccttcctctccatgggtttttcctcttttgcctcctgacaactcctattcacccttcaggcctccacaagatgtatatttctccggaaaatgttagtttctgtggcccaataatttgtgggaactctccctatgtgctcatctgtatttaagcataatttatcattatacttaatttgcatttttcattaagcataatttatcattatcaaacaatactataattatcaacttatttgccccttaagtgccttgaataaacaactgcagtttggtccccgctgtattattttcgcctatcaaagtgcaagaagaagagactaaataaattcaattaaagaatggctacaccaatagtgatgcaatataaattaagtgtgatcagaaaaaatgtcacactttagcattcttctgagaggcagcgaaggagtctaagaaggatttgct

SEQ ID NO: 467655 - DNA, 589 bp, Homo sapiens
ttgaaggactagtctgtgatttttttttcttctgctttgtcaagtctgttgttaatgcttccaactgtagtttgaaattcttttagtaaattttccaattccagaagttctgtttggttatttcttaatataactatgtggtctttcaagtctttgatcattttgctggcttgtttgtgttggattttaacttrtctcttgtatcttgttgagtttctttgccatccacattttgaattctatatctgtcatttcagacatttcattctggtaaggatcattgctagaaagctagtacaatcctttggaggtgaaaaaacactctggatttttgtattgccagagttcttatactggttccttctcatctgagggagctgacatttctccttatttctttttaatttgctattgttttgatggggagtgttgattttttattgttatttttttcccttgagggtatgactgtgttgtttattgtgtatcattgatttgccttgtttctgggtgctttcagaggaccaaggctctgtaagggctccttggttgcagatatgcagtgtcttcctcaagtttattgttgtag

SEQ ID NO: 467656 - DNA, 423 bp, Homo sapiens
gttcagtcaatgcctagtgattaaattagaggtgaaaggctggccagaaaacaatactggtggctaagatcaagatagggatgggagaacagagagtatcaaagagactgatagcatttaaatttgggccaccacagcagagccgtgagactatgagatagttttaagtgcatctcatgtgtgtccagaaattatctcacctgaacatagaaaaatatgaatggagagcttctgtgggactcgaatagagaagtatatggccagakaaatgaaagcaagtgatagaccttggatctcaagaggatgaacctcaaatagctttgatctgccaggagtgggtataaaaggattgtctcaatggaaaaccatatggcattttcttaaaaggttaaaaatagaactaccatataatccagcaatccc

SEQ ID NO: 467657 - DNA, 572 bp, Homo sapiens
ggtgtacttaggggtgaattgtttactatccctaggaattggctaaccctgggagaggtagcccttcaggatcagcaagaccccatacatcaaagcatcaaaatacggaaaacaaaaagtcatggttaatacaattaagtttgactttttatcttgtttcttctttggactgggaccaaaactatagtcccttcatcaattttcatataagttccaatcacagtgagagttttggtagtttaggcttgaagtgttttggaaagacataaggaattataaacaatgatggacattctctccttttctgtctttctctagctctgttctccctctccagtgcaaccaacaaattctcctccttatckctggcagggcaaatccttacatttaggccctccaaggtcatagcttctactacagctaggagtttcaagtaattttttgagcattggtggatctcttctctgtacaatgaatgctactgtcaacttctaaaaaataaaaatcccctaccttattacatataaacaggtactgataagatgcctggaggagaactaaagataacaaaa

SEQ ID NO: 467658 - DNA, 555 bp, Homo sapiens
tttggtataacagacatctgcttatataacaatttatgtaattagagctgggtaaaaagaatttgtgagccagtaygacagaattttcttgaaagctatagaacaatcatttatatggatgttccaactatttagagagagagtcgtcaaaacatccttcatcaaatctatttgagtgaggtaaataaaataggagtgacagagtcttgattccagaacatgtaaattcttctttgtttgattttctacagcttgcattttgatgttgtagtcccagtagaggtgagaaaactgcaaaaaggaaactacttggaagtagtaccttcagcctcacaatctaagcagttagtggctaattatttacctcagtatctgattttaactgcactcagccactcagatatgtggaacagagctgtccaccagcaaggacacagagggctcctgacaatccccctcctgatctatccccatcagtagacaaagggaaaggaggagaatcaggtcattttcttgagagttcctgtttctgctacaccaaatttgctcatatga

SEQ ID NO: 467659 - DNA, 568 bp, Homo sapiens
ctaattggtaaattgtgtggggagagtacaggttatcaagttcaggatccaagttcagtcacaaagtgtgcgttaggcagaaagcctgacaaacatcctgtactaaaatattataaattggtttttttttcttcctaataaaagtgataggtttagtgctttttaacagcagaaactggtatatctgtggcaaccttgaagccatagcaggatgtaggatgatgaatcacttcaaaaggagtggcttttgctcagatcagcccaccggcaacaggtcttctgaagcctggactagtatygctttttttggagagaaatagtaaatgctcagcagcttggctcttttcctgtgtgggttcccagggtaggacccctgactaacttttttcaccaaaataacaatcttcataatcacagacaaaatgacatgtatcacttgaaagctttaagcatattcagttgtgtttagaatcataaggttgaacaacattgctaggatctttggttaaaataccatcttggcattgccttttcccttacctccacattcaataaatcttctacatta

SEQ ID NO: 467660 - DNA, 568 bp, Homo sapiens
ctaattggtaaattgtgtggggagagtacaggttatcaagttcaggatccaagttcagtcacaaagtgtgcgttaggcagaaagcctgacaaacatcctgtactaaaatattataaattggtttttttttcttcctaataaaagtgataggtttagtgctttttaacagcagaaactggtatatctgtggcaaccttgaagccatagcaggatgtaggatgatgaatcacttcaaaaggagtggcttttgctcagatcagcccaccggcaacaggtcttctgaagcctggactagtatcgctttttttggagagaaatagtaratgctcagcagcttggctcttttcctgtgtgggttcccagggtaggacccctgactaacttttttcaccaaaataacaatcttcataatcacagacaaaatgacatgtatcacttgaaagctttaagcatattcagttgtgtttagaatcataaggttgaacaacattgctaggatctttggttaaaataccatcttggcattgccttttcccttacctccacattcaataaatcttctacatta

SEQ ID NO: 467661 - DNA, 523 bp, Homo sapiens
attagttcgttctcaagctgctgtgaataaattcctgagactgggtaatttataaagaaaaggggtttaattgactcacagttctgcatggctgggaaagcctcaggaaacttacaatcatggcaaagacaccttttcacagggctacaggaaagagaatgactgccagcaggggaaaggccagatgctttaaaaaaccatcagatctcatgagactcactcattatcatgagtacagcatgggggaaaccacccccatgattcaattacctccacatggtcctgcccttggcacatggagattgtggggattacaattcaargtgagatttgagtggggacacagagccaaaccatatcaccaggtttactccaaccaagtagtgttgcactcccccatctgacaggtaggtaggcaggtacttgcagaagatacttcatccagacagttacagcacagctgtgattgattagaactagttctagatataagtcttatcactttttaaagtgcatttatttt

SEQ ID NO: 467662 - DNA, 503 bp, Homo sapiens
tttgaaacactctttttgcaggatctacaagtggatatttggaccactctgtgtccttcgttcgaaacgggtatatcttcacatgacatctagacagaagcattctcagaagcttctctgtgatgactgcattcaactcacggagttgaacactccttttgagagcgcagttttgaaactctctttctgtggcatctgcaaggggayatgtagacctctttgaagatttcgttggaaacggaatcatcttcacataaaaactatacagatgcattctcaggaactttttggtgatgtttgtattcaactcccagagttgaactttcctttggaaagagcagctatgaaacactctttttctagaatctgcaagtggacgtttggagggctttgtggtttgtggtggaaaaggaaatatcttcacctaaatactagatagaagcattctcagaaactgctttgtgatgattgcattcacctcacagagttgaacattcctattg

SEQ ID NO: 467663 - DNA, 549 bp, Homo sapiens
atcttctttgtgatgtttgcattcaaatcccagagttgaactttcctttcaaagttcacgtttgaaacactctttttgcaggatctacaagtggatatttggaccactctgtgtccttcgttcgaaacgggtatatcttcacatgacatctagacagaagcattctcagaagcttctctgtgatgactgcattcaactcacggagttgaacactccttttgagagcgcagttttgaaactctctttctgtggcatctgcaaggggacatgtagacctcyttgaagatttcgttggaaacggaatcatcttcacataaaaactatacagatgcattctcaggaactttttggtgatgtttgtattcaactcccagagttgaactttcctttggaaagagcagctatgaaacactctttttctagaatctgcaagtggacgtttggagggctttgtggtttgtggtggaaaaggaaatatcttcacctaaatactagatagaagcattctcagaaactgctttgtgatgattgcattcacctcacagagtt

SEQ ID NO: 467664 - DNA, 520 bp, Homo sapiens
tttgaaacactctttttgcaggatctacaagtggatatttggaccactctgtgtccttcgttcgaaacgggtatatcttcacatgacatctagacagaagcattctcagaagcttctctgtgatgactgcattcaactcacggagttgaacactccttttgagagcgcagttttgaaactctctttctgtggcatctgcaaggggacatgtagacctctttgaagatttcgttggaaacggaatcatcttcacataaaaactayacagatgcattctcaggaactttttggtgatgtttgtattcaactcccagagttgaactttcctttggaaagagcagctatgaaacactctttttctagaatctgcaagtggacgtttggagggctttgtggtttgtggtggaaaaggaaatatcttcacctaaatactagatagaagcattctcagaaactgctttgtgatgattgcattcacctcacagagttgaacattcctattgatagagcagtttggaaa

SEQ ID NO: 467665 - DNA, 569 bp, Homo sapiens
tttgaaacactctttttgcaggatctacaagtggatatttggaccactctgtgtccttcgttcgaaacgggtatatcttcacatgacatctagacagaagcattctcagaagcttctctgtgatgactgcattcaactcacggagttgaacactccttttgagagcgcagttttgaaactctctttctgtggcatctgcaaggggacatgtagacctctttgaagatttcgttggaaacggaatcatcttcacataaaaactatacagatgcattctcaggaactttttggtgatgtttgtattcaactcccagagttgaactttcctttggaaagagcagctatgaaacactstttttctagaatctgcaagtggacgtttggagggctttgtggtttgtggtggaaaaggaaatatcttcacctaaatactagatagaagcattctcagaaactgctttgtgatgattgcattcacctcacagagttgaacattcctattgatagagcagtttggaaacactcttgttgtggaatgtgcaagtggagatttggagcgctttgaggcc

SEQ ID NO: 467666 - DNA, 503 bp, Homo sapiens
tttgaaacactctttttgcaggatctacaagtggatatttggaccactctgtgtccttcgttcgaaacgggtatatcttcacatgacatctagacagaagcattctcagaagcttctctgtgatgactgcattcaactcacggagttgaacactccttttgagagcgcagttttgaaactctctttctgtggcatctgcaaggggacatgtagacctctttgaagatttcgttggaaacggaatcatcttcacataaaaactatacagatgcattctcaggaactttttggtgatgtttgtattcaactcccagagttgaactttcctttggaaagagcagctatgaaacactctttttctagaatctgcaagtggacgtttggagggctttgtggtttgtggtggaaaaggaaatatcttcacctaaatactagatagaagcattctcagaaactgcwttgtgatgattgcattcacctcacagagttgaacattcctattg

SEQ ID NO: 467667 - DNA, 454 bp, Homo sapiens
acatgacatctagacagaagcattctcagaagcttctctgtgatgactgcattcaactcacggagttgaacactccttttgagagcgcagttttgaaactctctttctgtggcatctgcaaggggacatgtagacctctttgaagatttcgttggaaacggaatcatcttcacataaaaactatacagatgcattctcaggaactttttggtgatgtttgtattcaactcccagagttgaactttcctttggaaagagcagctatgaaacactctttttctagaatctgcaagtggacgtttggagggctttgtggtttgtggtggaaaaggaaatatcttcacctaaatactagatagaagcattctcagaaactgctttgtgatgattgcaytcacctcacagagttgaacattcctattgatagagcagtttggaaacactcttgttgtgg

SEQ ID NO: 467668 - DNA, 481 bp, Homo sapiens
tatttggtcctctctgaggaattcgttggaaaccggataatttcagctgactaatcagaagcagtctcagaatcttctttgtgatgtttgcattcaaatcccagagttgaactttcctttcaaagttcacgtttgaaacactctttttgcaggatctacaagtggatatttggaccactctgtgtccttcgttcraaacgggtatatcttcacatgacatctagacagaagcattctcagaagcttctctgtgatgactgcattcaactcacggagttgaacactccttttgagagcgcagttttgaaactctctttctgtggcatctgcaaggggacatgtagacctctttgaagatttcgttggaaacggaatcatcttcacataaaaactatacagatgcattctcaggaactttttggtgatgtttgtattcaactcccagagttgaactttcctttggaaagagcagctatgaaac

SEQ ID NO: 467669 - DNA, 481 bp, Homo sapiens
tatttggtcctctctgaggaattcgttggaaaccggataatttcagctgactaatcagaagcagtctcagaatcttctttgtgatgtttgcattcaaatcccagagttgaactttcctttcaaagttcacgtttgaaacactctttttgcaggatctacaagtggatatttggaccactctgtgtccttcgttcgaaacgggtatatcttcacatgacatctagacagaagcattctcagaagcttctctgtgatgactgcattcaactcacggagttgaacactccttttgrgagcgcagttttgaaactctctttctgtggcatctgcaaggggacatgtagacctctttgaagatttcgttggaaacggaatcatcttcacataaaaactatacagatgcattctcaggaactttttggtgatgtttgtattcaactcccagagttgaactttcctttggaaagagcagctatgaaac

SEQ ID NO: 467670 - DNA, 535 bp, Homo sapiens
gtttagaaacacactttctgcagaatctgcaagtgcatatttggacctctctgaggaattcgttggaaacgggataatttcagctgactaaacagaagcagtctcagaatcttctttgtgatgtttgcattcaaatcccagagttgaactttcctttcmaagttcacgtttgaaacactctttttgcaggatctacaagtggatatttggaccactctgtgtccttcgttcgaaacgggtatatcttcacatgacatctagacagaagcattctcagaagcttctctgtgatgactgcattcaactcacggagttgaacactccttttgagagcgcagttttgaaactctctttctgtggcatctgcaaggggacatgtagacctctttgaagatttcgttggaaacggaatcatcttcacataaaaactatacagatgcattctcaggaactttttggtgatgtttgtattcaactcccagagttgaactttcctttggaaagagcagctatgaaacactctttttctagaatc

SEQ ID NO: 467671 - DNA, 477 bp, Homo sapiens
ttcagctgactaaacagaagcagtctcagaatcttctttgtgatgtttgcattcaaatcccagagttgaactttcctttcaaagttcacgtttgaaacactctttttgcaggatctacaagtggatatttggaccactctgtgtccttcgttcgaaacgggtatatcttcacaygacatctagacagaagcattctcagaagcttctctgtgatgactgcattcaactcacggagttgaacactccttttgagagcgcagttttgaaactctctttctgtggcatctgcaaggggacatgtagacctctttgaagatttcgttggaaacggaatcatcttcacataaaaactatacagatgcattctcaggaactttttggtgatgtttgtattcaactcccagagttgaactttcctttggaaagagcagctatgaaacactctttttctagaatctgcaagtggacgtttggagg

SEQ ID NO: 467672 - DNA, 535 bp, Homo sapiens
gtttagaaacacactttctgcagaatctgcaagtgcatatttggacctctctgaggaattcgttggaaacgggataatttcagctgactaaacagaagcagtctcagaatcttctttgtgatgtttgcattcaaatcccagagttgaactttcctttcaaagttcacgtttgaaacactctttttgcaggatctacaagtggatatttggaccactctgtgtccttcgttcgaaacgggtatatcttcacatgacatctagacagaagcattctcagaagcttctctgtgatgactgcattcaactcacggagttgaacactccttttgagagcgcagttttgraactctctttctgtggcatctgcaaggggacatgtagacctctttgaagatttcgttggaaacggaatcatcttcacataaaaactatacagatgcattctcaggaactttttggtgatgtttgtattcaactcccagagttgaactttcctttggaaagagcagctatgaaacactctttttctagaatc

SEQ ID NO: 467673 - DNA, 575 bp, Homo sapiens
aaagaaaaaaaagagagagagtctgacttttgttggttgattagatcaaagatgatgatttacatggtttggagttataaagagtatatatttattggataattaaaatctctcccacttattttgagctaataaatccagcccttcaaactcaatgctgtcaaatactggaattaagtaatcaaaggaaaaaaacaataatctgagaaaaaataatttattaaacaaagtaaaaactttgtctttaggaagtttataagtagatttggctgaccattgcwatttgggaactttttgaatgttgagggtagtaatgagacagaaattaatcagttggggctggttttaagaaatggcttcagaccctaagtggtttgccaagtttcccttaaacacctcacattattgaggatacaagtcaaaatcacttatcagcagttcttccaaatagccaggaacatgtattaaagaggccatgaaggaatttctaatgagaaaaaatgttcttactttttgagaaattaactgcttcaataaattgcaacgataaagtaggaaaagttatcacaataatg

SEQ ID NO: 467674 - DNA, 575 bp, Homo sapiens
aaagaaaaaaaagagagagagtctgacttttgttggttgattagatcaaagatgatgatttacatggtttggagttataaagagtatatatttattggataattaaaatctctcccacttattttgagctaataaatccagcccttcaaactcaatgctgtcaaatactggaattaagtaatcaaaggaaaaaaacaataatctgagaaaaaataatttattaaacaaagtaaaaactttgtctttaggaagtttataagtagatttggctgaccattgcaatttgggaactttttgaatgttgagggtagtaatgagacagaaattaatcagttggggctggttttaagaaatggcttcagaccctaagtggtttgccaagtttcccttaaacacctcacattattgaggatacaagtcaaaatcacttatcagcagttcttccaaakagccaggaacatgtattaaagaggccatgaaggaatttctaatgagaaaaaatgttcttactttttgagaaattaactgcttcaataaattgcaacgataaagtaggaaaagttatcacaataatg

SEQ ID NO: 467675 - DNA, 592 bp, Homo sapiens
tggacgaagcttctatcttaggggtcagaaattgtaaggaatacagattaaataatatttttcttgtagagttaacctcacagtgatccttaaacagagctcatttaactctgaacaaaattttcattaccagtttaaatacagtgatgctaacctatttgtgaaccctggtcagggctactaatctcattgtcattgcttgttaagaacttactttattcctattacttagcatgatgacacaagctattttaatccattcacattttaacttagcagagcatacaagcaaagctaacttgaattccagaaaaagatcccaagtaccttattaatgtattttyctcttaattgtacaaaaataaaaaagtcatggaaatcaaaagtaggacctttttaccttcgaggtatttactgtagtttcagcatgtattaggcatcaatacagaaagattcctggacaatacttgatgaagtctaccccctcccattccccatgttcataggagcatgaccagcagactaacgcagcaagcagatgatgctcctgatgaaaagggcagacccagttgagcctgggctacgctgacac

SEQ ID NO: 467676 - DNA, 596 bp, Homo sapiens
ccctcctaaattatgcagggtagttttttttgttatatatatgcccatagaatgattgtaactttgcagacctttagtaagcaaaaattaattttcaagtactatgctaagtattagagacataagaatattaaagatggctcattgtcttcaaaagctttagcaaataaaatattcttagtaatttttctgactatcttttattgttgttcatatccctaagagaacagagatccagaatctgaaactctaaatctcatttgaccaacttgctctaccaagtttcttagcatagaggtgcaggggatgttccaggcaaataactcctacaaggtaataataaaagtgacaaccaacatttgttgagtgtataattaccagaggtgttttacatatgctrattcatttattccacatagcaatcatagatgtattctgccataattacatctatttagcagtgaagaaatgtaagcacagaaaaattaacccagatcacatagctagtaaatttgagccatgttttcaacttaactctttagttctgaaaaacatgtatgcatgtgtatacatatatacatacacacacatacaca

SEQ ID NO: 467677 - DNA, 591 bp, Homo sapiens
taaatcagtgatttttttaggaactataggaacatgtctaacaactaaaggaaagtattagaatgatgtctcaccaaaaaaagaatgtcaataaagagatagaaattataaaatagaaccaaatagatattctgaagctgaaaagtataataattgaaataaaacatttactggaaaagctagtaaacttgaagctagaggarttgagattatccagtctttgtgactttggattaggctatagtttcttagatataaaactaaaccacaaacaaccaaaaaaaatcggtaagttggacttcatcaaaattagaaacttttgtgcatcaaaagacactattaaaaagtgaaagaaaacccacactaagggaggaaatatttgcaagtcatctatctgataagggtttagaatccaaaatatataaagaaattttacaacttgataataaaaagacaaatgccccaactaaaaatggtcaagaggtttgaatagatatttctccaaagaatatatgcaagtggctaataagcacgataatatattcaatataattagtcactagggaaatacaaatcgcaaccacaacaatg

SEQ ID NO: 467678 - DNA, 628 bp, Homo sapiens
aggttctctctgaccatcttcagttcaacttcttgttctacagagactttttttttttttttttgagacagagtttcgctcttgctgcccaggctggagtgcaatgtcatgatctccactcaccgcaaactctgccccccagttcaagtgattctccagcctcagcctcccaagtagctgggattacaggtatgtgccaccacacctggctaattttttgtattttttagtagagaaggggtttctccatgtttgtcagactggtcttgaaccccgacctcaggtgattcacctgcctcagcctcccaaagttctaggattacaggtgtgagccaccatgcccagctgagacctctttttttcagaaaacattttaraaaaaatatttgtctttggctacattgccttaccacctttctgtttcctactgctatctctagtagcccatttagaaattgagaaaaaaaatacatggaagtcattttaacacaaggtacttttttttggcagaaaactgttgtaatctgatattagactatcccatgagcatagcaacagcctgatatgacttgattaacacttcccccataccacctgggacatgctgtgcacatagtgaatgtccaac

SEQ ID NO: 467679 - DNA, 609 bp, Homo sapiens
ggagttgaaaaggaaagacagatacagaaatataaatgtaaagcaatatcaactacactagtcaaaattactagcagtaatataaatacacccttttattttctatctgataaaatgcagaaacactaggaagaaaaaatgaaaatgaaatttaggaagagcattccatgagcatccaacaacacttaagatgtagccttgatgttacaaaattctcattaggccatacaagaaaaattttgaaatgccataattacataattaacaattaaaaggkctgttcataatttctcctagctctctatatttgtggctttataaaatcaatctattgcatttgcaaaggatttttttcccaatttactatctgtagtaactttctcaccttaaaacaatgtcatctatagtttcccttaatatataaatatgtgaatatcacttaaaatgcaggcctcccagatttatttgtctttgttagataattagtcaagctgaaaatcttctgtagaataatcaaaattttatctcctgggagaagttagaagcctagaatctaggtaaaatcctaggtagacgctattgagcctgtgcagcaacaaatataacaca

SEQ ID NO: 467680 - DNA, 590 bp, Homo sapiens
tattataacactgtaatcatgctgtgtaaatgattcatgtcttaagtagatctaaaggacaaattgatcaaaaataataactacaacttttcaagacataaaccatgcaatgagatattaaaagaaacaaagtgaaaagcaggaagacaaagttaaagtgtagagcttytgttagttttctacttgcttgtttgctagtttgtttatgtaatcagtgttgtcatcagttttttataatggcttataagatattatttgcaagcctcatcgtaagctcaaatcaaaatacatacaacagatacacaaaaaataaaaagaaataaatgaaaacataccatcagagaaattgccttaatgaaaagaaaaacaggaaggaaggaaagaagtttgagaagacaaagaaagcaaatataaaatggcaagagtaaatccctacttatcaataataacattgaacgtaaatgaactaaactctccaatcaaaacacatagagtggctgaacagataagaaaaaaaaagactcaatgactttttgcctgctagaagcatactttacatacaaagacacacagagcctgaaaataatggg

SEQ ID NO: 467681 - DNA, 583 bp, Homo sapiens
tgtcttactgaaaaatttctcctctagtttcacccagatacagaagcatagccaccataaaatattttttattcctggtattatattayatgattcattgtcactatgggtatttcagtttcctacagaattaccacggacatttaacctgcacctaacattcagtctgccatgtgctgaaatgaaatgggtgttgatatgaagaccaggttagactcagctataaaattttagcaccttttttgataacctcttcaattacattttctcaaaaggcaacactgaagaaaagcatgttcttatataaaacatatatcatgattctattcctataatatttttcttttaaaaatattttgataccagagattacttacattttaatcattagaatttcacttaatatcccttttatcctaaatattaaaacaagtaaatcattattaaccaaataatgaagacaatagcaattttagttatgttaaataaaaattatacttattagcacatatattttcccttacgtgtatgctgttatagtcatataagtttatcgtgatcaaatgtttttcagtatctatat

SEQ ID NO: 467682 - DNA, 583 bp, Homo sapiens
tgtcttactgaaaaatttctcctctagtttcacccagatacagaagcatagccaccataaaatattttttattcctggtattatattacatgattcattgtcactatgggtatttsagtttcctacagaattaccacggacatttaacctgcacctaacattcagtctgccatgtgctgaaatgaaatgggtgttgatatgaagaccaggttagactcagctataaaattttagcaccttttttgataacctcttcaattacattttctcaaaaggcaacactgaagaaaagcatgttcttatataaaacatatatcatgattctattcctataatatttttcttttaaaaatattttgataccagagattacttacattttaatcattagaatttcacttaatatcccttttatcctaaatattaaaacaagtaaatcattattaaccaaataatgaagacaatagcaattttagttatgttaaataaaaattatacttattagcacatatattttcccttacgtgtatgctgttatagtcatataagtttatcgtgatcaaatgtttttcagtatctatat

SEQ ID NO: 467683 - DNA, 583 bp, Homo sapiens
tgtcttactgaaaaatttctcctctagtttcacccagatacagaagcatagccaccataaaatattttttattcctggtattatattacatgattcattgtcactatgggtatttcagtttcctacagaattaccacggacatttaacctgcacctaacattcagtctgccatgtgctgaaatgaaatgggtgttgatatgaagaccaggttagactcagctataaaattttagcaccttttttgataacctyttcaattacattttctcaaaaggcaacactgaagaaaagcatgttcttatataaaacatatatcatgattctattcctataatatttttcttttaaaaatattttgataccagagattacttacattttaatcattagaatttcacttaatatcccttttatcctaaatattaaaacaagtaaatcattattaaccaaataatgaagacaatagcaattttagttatgttaaataaaaattatacttattagcacatatattttcccttacgtgtatgctgttatagtcatataagtttatcgtgatcaaatgtttttcagtatctatat

SEQ ID NO: 467684 - DNA, 538 bp, Homo sapiens
ttgtaacagcattgtgaaacttattttcctgttcgcccctttgattcaagattttgacrttttattggacaaaaagagttgtaaccaccatctgttttcttcagccagcctttgttcattctatttttcatctctggaagcccagattccttctgcttctttcaaacctactaaactctaccactttctccatctgttagtccccgtgtccatctttactttcctccttatgcaacttgaattccatggttatcgtgatcatccctgtctagcagaaaacttctgtttctttgaccttcttttctacattcctatacatctcctaaaatctcatctctagattaactctgtgcactgttggaagaaatcatatagcatcaagactacttggtatcattaatgaccaaccttaatgggcacttcatactgggtgagagtagtcttaactttgtttctgtgcagcattcttcaactacttgagtcaactgtcttatataaatttccacccacatgcacagccagcctgtcactttctgtt

SEQ ID NO: 467685 - DNA, 531 bp, Homo sapiens
gcaacggaatggaatggaatgcaatggaaccaacccgagtggaatggaatggaatggaaattaatggaatggaatggaatgcaatcaacccgagggaatggaatggaatgcaatgaaatggtttggaatggtgtggaatggaatggaatggaatgcaatggaatggaatcaaagcgagtggaatggaatggaatgaaatggaatggaatggaatcaacacgactggaatggaasggaatggaatgggatgggatggaatggaatggaatgcaatgcaatggaatcaaccagagtagaattgaaaggaatggaatggaatggaatggaatgcaatgtaatccacccgattagaatggaaaggaatggcatggcatggcatggaatggaatggaatggaatggaatggaatggaatagaatggaatggaatgcaagggcatggaatggaatggagtcaactggaatggaatggaatggaatggaatcaacacaaatagaatgaaatggaaaggagtggaatggacaggaaagg

SEQ ID NO: 467686 - DNA, 531 bp, Homo sapiens
gcaacggaatggaatggaatgcaatggaaccaacccgagtggaatggaatggaatggaaattaatggaatggaatggaatgcaatcaacccgagggaatggaatggaatgcaatgaaatggtttggaatggtgtggaatggaatggaatggaatgcaatggaatggaatcaaagcgagtggaatggaatggaatgaaatggaatggaatggaatcaacacgactggaatggaagggaatggaatgggatgggatggaatggaatggaatgcaatgcaatggaatcaaccmgagtagaattgaaaggaatggaatggaatggaatggaatgcaatgtaatccacccgattagaatggaaaggaatggcatggcatggcatggaatggaatggaatggaatggaatggaatggaatagaatggaatggaatgcaagggcatggaatggaatggagtcaactggaatggaatggaatggaatggaatcaacacaaatagaatgaaatggaaaggagtggaatggacaggaaagg

SEQ ID NO: 467687 - DNA, 531 bp, Homo sapiens
gcaacggaatggaatggaatgcaatggaaccaacccgagtggaatggaatggaatggaaattaatggaatggaatggaatgcaatcaacccgagggaatggaatggaatgcaatgaaatggtttggaatggtgtggaatggaatggaatggaatgcaatggaatggaatcaaagcgagtggaatggaatggaatgaaatggaatggaatggaatcaacacgactggaatggaagggaatggaatgggatgggatggaatggaatggaatgcaatgcaatggaatcaaccagagtagaattgaaaggaatggaatggaatggaatggaatgcaatgtaatccacccgattagaatggaaaggaatggcatggmatggcatggaatggaatggaatggaatggaatggaatggaatagaatggaatggaatgcaagggcatggaatggaatggagtcaactggaatggaatggaatggaatggaatcaacacaaatagaatgaaatggaaaggagtggaatggacaggaaagg

SEQ ID NO: 467688 - DNA, 531 bp, Homo sapiens
gcaacggaatggaatggaatgcaatggaaccaacccgagtggaatggaatggaatggaaattaatggaatggaatggaatgcaatcaacccgagggaatggaatggaatgcaatgaaatggtttggaatggtgtggaatggaatggaatggaatgcaatggaatggaatcaaagcgagtggaatggaatggaatgaaatggaatggaatggaatcaacacgactggaatggaagggaatggaatgggatgggatggaatggaatggaatgcaatgcaatggaatcaaccagagtagaattgaaaggaatggaatggaatggaatggaatgcaatgtaatccacccgattagaatggaaaggaatggcatggcatggmatggaatggaatggaatggaatggaatggaatggaatagaatggaatggaatgcaagggcatggaatggaatggagtcaactggaatggaatggaatggaatggaatcaacacaaatagaatgaaatggaaaggagtggaatggacaggaaagg

SEQ ID NO: 467689 - DNA, 615 bp, Homo sapiens
taatatccttttttttattttctttttcaagatcccttttaggacgccatactagttagttgtcacgtctctttattctccgcatatttttgacagttttcttgtttttgatgactgacagttttgaggagtacttctcaggtgcattacagggttttcctttattgatagttgtctgatgttatttctgatggttagactgagactaggggttttgtggaggaacatraccgaggtaaagtgtcatttccatcacattatatcaagggtaaaaactatcaacataatttatgactgctgatgctgaccttggtcaccttttggctgaagtcatgtttgttggttttctctactgcactgtttctctcttttcccctttccatactatattatttggaagaatgtcactatgcaaagtacaatttaaggggagagaagttattttccctctctttgcaggtggaatatttaaatagcttatttagaattttttgcatagaagatttgtctgttctcctccatttaataattaatttaatcatttgtttacatcagtatgttctgatggatatttatttcatattttcgctagcaattcagtactatttcatttgt

SEQ ID NO: 467690 - DNA, 584 bp, Homo sapiens
tgcttaatacagataaatcaccttagaagtgcatgagtgtgtcagcagtattttaacctccatacttttcctgaagctatgaactcaagctgctttactccaccctctccattaaacacattctatccattctctaagtcctcacttaagttacaytggtgttgtgccactcttttctgaaagatcttgtttccttctgaactggtgaagtatgtccaacccaagtcaaggattttcttgacttgccttcgcaactagttcatgagaaaaatacctgccttaaaccacttgaacacagacccctaagccctacagatattcgaattctgatacccccattgcaggtattgctgggactcaatcaagatggtgttccctaccatgtgactcagcaattcctcttctgttctgagcatatacccaaaggaaattaaatcaccaccttgtaaagacatatgccctcccatgtttattgcaggattattcacaataggcaagatgtggaaacttcctcaatgcctatctacatgtataaactgttttaccgatatagatagatagatagatgatagatagatagatag

SEQ ID NO: 467691 - DNA, 645 bp, Homo sapiens
cagttatactcttttaattatttttaaatgtacaattctattattattgattatagttatcctcgatttacttcttagtatgctctggtctggcttctcctcctatcactgcattggcactgttgcacttacaaacatgaatcttaaggacatcttcctgttctcaccttacttcctcttgctgcagcattttaaattgtcccytgctttctccacactcttctatgcgaattcttgcctctctaacaaaccttaaaatgtttgtatttctagggccgggtgccgtggctcacacctataatcccagcactttgggaggccaaggcaggcagatcacaaggtcaggagttcgagaccagcctggccaatatggtgaaaccccatctctactaaaaatacaaaaattagccgggtgtgatggtgggcacctgtagtcccagctacttgagaggctgaggcaggagaatcgcttgaacctgggaggcgaaggttgtagtgagctgagatcacgccactgcactccagcctgggcaacagagcaagactctgtctcaaaaaaagtaattaattaattaattaattaattaaaaagtttgtatttctcaagcattgccctgtcctagccttctttctattttatatttt

SEQ ID NO: 467692 - DNA, 614 bp, Homo sapiens
ggtattggaatgcagtctacatttggttcacctttgggccttattgtggaaatgctaaccctccgtagcaccaycaaagtacagtttgaatgatatagaagaaattgcacttccttcacccccgccaaacacaaataaattgctccattttaaccactaaacctataaacacaagttctcctgctagctctctctaccagtcatttctatttcaattgcaacccctacatttaagcccaattatcccttgtcttatgtttttatgacttgataatagccttctcactgaactccctccctctattctcctatccctccagtctctcctagacattacacaagatcagtttccctaaagtacttctcttccaaagttttccctttgctattaggaaaaaaacatgaaaacatacataacgaacactttcttatctttagagtaaaaaccagttgcctttctatgggtttttattcaatatcaccactcctgtactctcttgccatgaccgcacgtgggtcccaatctccagctaactgggtctaactacgctggtctactttctggtcttcatgaattaacactattttcatcccttaagtcctagcccaagttt

SEQ ID NO: 467693 - DNA, 602 bp, Homo sapiens
tttttaacttgatgtggtcccatttgtccatttttgctttggtttcctgtgcttgtggggtattactcaagaaatctttgcccagaacaatgccctggagattttccccaatgtttttttatattagtttcatagtttgaggtcttagatttaagtctttaatccattttttgatttttatatatggtgagagataagagtctagtttcattcttctgcatatggatatccagttttcccagcaacatttattgaagactgtctcttccctagtgtatgttcttggcacctttgttgaaaawgagtttattgtagatgtgtggatttgtttctggtttctctattctgttccattggtctatgtgtcagtttttatgccagtaccatgctgttttggttactatagctctgtagtataatttgaagtcaggtaatgtcattcctccagttttgttccttttgcttaggatagctttagagattctgggtcttttggggttccatataaattttagaattgttttttctatttctgcgaagaatgtcattggtattttgttagagatggaaaacttcatttttattagagaactgcaaaagca

SEQ ID NO: 467694 - DNA, 602 bp, Homo sapiens
tttttaacttgatgtggtcccatttgtccatttttgctttggtttcctgtgcttgtggggtattactcaagaaatctttgcccagaacaatgccctggagattttccccaatgtttttttatattagtttcatagtttgaggtcttagatttaagtctttaatccattttttgatttttatatatggtgagagataagagtctagtttcattcttctgcatatggatatccagttttcccagcaacatttattgaagactgtctcttccctagtgtatgttcttggcacctttgttgaaaatgagtttattgtagatgtgtggatttgtttctggkttctctattctgttccattggtctatgtgtcagtttttatgccagtaccatgctgttttggttactatagctctgtagtataatttgaagtcaggtaatgtcattcctccagttttgttccttttgcttaggatagctttagagattctgggtcttttggggttccatataaattttagaattgttttttctatttctgcgaagaatgtcattggtattttgttagagatggaaaacttcatttttattagagaactgcaaaagca

SEQ ID NO: 467695 - DNA, 593 bp, Homo sapiens
tcgctgctcacctgacccccactaaacaattttccatggatcagtccccagctgaccaagccccctctgaccaggccctcactgacgaggctccaagccactaaggccccacactgaccaggcccctagtatactgcataggccccaccaaccagtttttcattgtttatgttccagcccatcaggcctcactaagaagaccatcagtgaccaggtccccatgaaccgggcttccaatgactaggtcaccaggtccccactgaggaggcstttactgaggaggccaccactaaccaggtcccaactgactaggtcctgatgaccaggtcatctctgagcatggtccactgaccaggcccctgagcagcgtgctcaaagtctcattacaatgcccccctcagcccacagaccctccctccctgtatgtgtgtccagaggtcaggccctggggttttttttgggacatggcttttcctccaagacagagggagagacagctggcctcaggctccaggtgcccagctccacactcaccccaaaagccctctgggccaatctcaaaggagatagtgaggtggcctggcactgcctgg

SEQ ID NO: 467696 - DNA, 593 bp, Homo sapiens
tcgctgctcacctgacccccactaaacaattttccatggatcagtccccagctgaccaagccccctctgaccaggccctcactgacgaggctccaagccactaaggccccacactgaccaggcccctagtatactgcataggccccaccaaccagtttttcattgtttatgttccagcccatcaggcctcactaagaagaccatcagtgaccaggtccccatgaaccgggcttccaatgactaggtcaccaggtccccactgaggaggcgtttactgaggaggccaccactaaccaggtyccaactgactaggtcctgatgaccaggtcatctctgagcatggtccactgaccaggcccctgagcagcgtgctcaaagtctcattacaatgcccccctcagcccacagaccctccctccctgtatgtgtgtccagaggtcaggccctggggttttttttgggacatggcttttcctccaagacagagggagagacagctggcctcaggctccaggtgcccagctccacactcaccccaaaagccctctgggccaatctcaaaggagatagtgaggtggcctggcactgcctgg

SEQ ID NO: 467697 - DNA, 589 bp, Homo sapiens
tcctgctgtgaaaggagcagtacaaagaaagaatgtacagacattgagagcaggtacatttaatggaatactggaaataagtacattcaatgattggaagtactcacattattcttattcctaattctatttgttcaaaattgaatggaaggcattgacataaatgttattgttggtatccatatttgaataaaaataaatttagaagcataaaaaagattttaaaaatgtaagctttaactcagatgtttctcttttaatgtttttgaatagcatgaagttttcagtataaaatttttatacctgtcagggattcaaagmagtgaattttgagactctgagatatttccaatgagttaagtgctacttggagttctgaactttacctagaggaaagctttacttattaacatgtcagattctgttttaactttagaggcttgctgctagtgttattacactgatgatctgaagccaatcagatgttctaatgagcaagactgtgtgtgtaggtgtatatatagctgtgtgtatgtgtgtgtttgtggtatctttgactattaaaaatgaggaaagtaatgattcattt

SEQ ID NO: 467698 - DNA, 570 bp, Homo sapiens
atgtacagacattgagagcaggtacatttaatggaatactggaaataagtacattcaatgattggaagtactcacattattcttattcctaattctatttgttcaaaattgaatggaaggcattgacataaatgttattgttggtatccatatttgaataaaaataaatttagaagcataaaaaagattttaaaaatgtaagctttaactcagatgtttctcttttaatgtttttgaatagcatgaagttttcagtataaaatttttatacctgtcagggattcaaagaagtgaattttgagactctragatatttccaatgagttaagtgctacttggagttctgaactttacctagaggaaagctttacttattaacatgtcagattctgttttaactttagaggcttgctgctagtgttattacactgatgatctgaagccaatcagatgttctaatgagcaagactgtgtgtgtaggtgtatatatagctgtgtgtatgtgtgtgtttgtggtatctttgactattaaaaatgaggaaagtaatgattcatttataactggtagac

SEQ ID NO: 467699 - DNA, 587 bp, Homo sapiens
taagtgtgagttcctttttatttagtgaagccatattatccttgtttaactgctctaattgtttttcatattgtgcttgttcctaaaacaaaggaaaagaatacacttttaaaacaattataacctaattattatatgtttgttgcctttcattttgagtcagtgattcaaagagcaattgtgaatatgttagtaaaagaggctgaagcttaaaatatttatcagcaagatcaaaactaataactgaattyagaattgtctgatttataaaaatttgaaatcataattatgttagtattaatgtaatctggtcatataaaaagtaatagaatccattcataattttaaaaagtgattaatgaacaatgtagcttaagaccaattcaaaagtatcacataattttgaaatcacaattgtttcttatgccaactgatcttaatcatcaaatgactccacagtgagaatcattactctgaaagattgattttgttataataataatggaaatgtaaatatttaaaagaaaaaacagatgccattttttttctagaactctacaaagcaaattgctacaagagaggcagag

SEQ ID NO: 467700 - DNA, 566 bp, Homo sapiens
aacagcatgaagacaataagagacttcagattcactttccctttgccttgaggccacagaaagcccaaagcatctgaacatcttcctggaggcatttaactaaaagagagctattgaaacttgaagaaaaatgtgaatcaagaagctaaatttaaagatatgttactttctccaaccctcccccaccaattaaccataggatgagtctagtgagataaagcatatcatttatacaaaatacaaaagttatatgtcctttatgtgggcagaaatatgttcaagctttactcaataaaggtawcttgttttactactagaaatggtaattttcacttggtcattactttattttataattatctctatttaaattagtatcagctcactcctgggtatccacctagaggaaaagaagtcatatgaaaaagacacatgtatgcacattcatagcagcacaactcacagttgcaaaaatgtgtaacaaggttaaatgtctatcagccaatgagtggacaaagaaaatgtgttatagatacaccatggaatactactcagccctaaaaatg

SEQ ID NO: 467701 - DNA, 566 bp, Homo sapiens
aacagcatgaagacaataagagacttcagattcactttccctttgccttgaggccacagaaagcccaaagcatctgaacatcttcctggaggcatttaactaaaagagagctattgaaacttgaagaaaaatgtgaatcaagaagctaaatttaaagatatgttactttctccaaccctcccccaccaattaaccataggatgagtctagtgagataaagcatatcatttatacaaaatacaaaagttatatgtcctttatgtgggcagaaatatgttcaagctttactcaataaaggtaacttgttttactactagaaatggtaattttcacttggtcattactttattttataattatctctatttaaattagtatcagctcactcctgggtatccacctagaggaaaagaagtcatatgaaaaagacacatgtatgcacattcatagcagcacaactcacasttgcaaaaatgtgtaacaaggttaaatgtctatcagccaatgagtggacaaagaaaatgtgttatagatacaccatggaatactactcagccctaaaaatg

SEQ ID NO: 467702 - DNA, 515 bp, Homo sapiens
tgtttttccacaaggagattacaaatttgcaaacctcagctgctctcattttatgctgtcaccaagccaaaagctgaagytcataaatcagtgtgtctaagtgttcactagttatatacctttttgtagtttaagctatctttccaacttcctaaatcatcaccttcatttgaccttgtttttttccactatcacttctttattgactacataaagaatataagttcttattttgttattgttcattttagtctaatttcatcaaaatatcataatcctttaatttccttttaatttcaaagattaaatgaaacctacatagaaatgagtgtaagatttgcatttgcgttattttggtattaatttgctatcctccctcatacacatagtgatcacttccatgtacgtgatttcaaacatccaagtgcagtattaaaagcagttgtaaattatggttctgattttcatgatacaattactatataaatttcctcttgctgctgtaaccagttacc

SEQ ID NO: 467703 - DNA, 515 bp, Homo sapiens
tgtttttccacaaggagattacaaatttgcaaacctcagctgctctcattttatgctgtcaccaagccaaaagctgaagctcataaatcagtgtgtctaagtgttcactagttatatacctttttgtagtttaagctatctttccaacttcctaaatcatcaccttcatttgaccttgtttttttccactatcacttctttattgactacataaagaatataagttcttattttgttattgttcattttagtctaatttcatcaaaatatcataatcctttaatttccttttaatttcaaagattaaatgaaacctacatagaaatgagtgtaagatttgcatttgcgttattttggtattaatttgctatcctccctcatacacatagtgatcayttccatgtacgtgatttcaaacatccaagtgcagtattaaaagcagttgtaaattatggttctgattttcatgatacaattactatataaatttcctcttgctgctgtaaccagttacc

SEQ ID NO: 467704 - DNA, 523 bp, Homo sapiens
ctcacgtagaattctagaactctgctgctgggttctgagcgtttctctatcacatgagattctggaacactgctaaaatgtaggaatgtttgtccctcacaaagagtccagagcaccgcttgtgggttctgagtgtttgtccctcacataggattgcagaacacagctgctaggttctgagtgtttgtcccaaacataggattccaaaacactgctcagagggtctgaaagtttcttcctcaccaaggattccagaacactgctgctgggttctgaaagtttgtccctcacataygattccggaacactgctatgagggtctgagtgtttgtccctcaaagggattccagaacactgcttttgagttctgagtgtttgtccgacacaaaggattccagaacactgctgctggcttctgagtgtttgtccctcacataggatttcagaacactgctatgagggtctgcatgtttttcccctcagaaagcattctgtatcactgctacgagtgtctgaattcttg

SEQ ID NO: 467705 - DNA, 603 bp, Homo sapiens
attcatgggattatgctgcaagggaatataaagatgaatattgatagcctgagtgtgaaaattcatcattactctcatcctcattcattaattcatttgttcattaactcataaacacactaattgattcaacagatatttattgaacgtttacactttgcccagtggagcactggactaggtgctagcatagtataataagcaacccagaaatagcctctgccttgctgcatttcatagtctasgacggagaaaggcattaaccaagtataatttaaaattgttttaagtaatgtgaaataaacatatatgagaacttgactcaggttggtatatttgatggttagggaaagcttcaaaaatgggatatttgagatctaagtaagagggaaaagaaagagcataatgggtagagaaaaaataggatccaggaagatacttagtacttctgagaactaaaaacagtcaagtcagtgtagtcagagttcaaagaaggagaaagaacatgatccaagaagaagccagaaaagtaagcagggactacatcttacacgatgatgtaggctgtattttagtttttacttatcttaagagcaatagaaa

SEQ ID NO: 467706 - DNA, 634 bp, Homo sapiens
atatatgatttagggggtcctgttttataccaatgttcagggcacacattcaaaatcaaatttcttccaagttatcccactcttatgastacctcttagcttaccaatgaggactcagctacatatgtacgctgagtaaaactttgttcttgttgctgtgataaatttaattagtttggagaacatactttgtgcccagcatgatgttggattcaacatcattgtattttctgttacagaacttgctatctggttacaaaggccggtaagtttaacacatgagagggcccaaattaaaaaagcacatgcacagtatttaaaaatcataaaatcaaaagcagtgcacgcttctggattgaatcctggaacagaaaagaagatgtgagtggaagctctgggggaattaggatgaagtctggattttagttaatagtactgtactaacattggtttcttagtgttgacaaatatatcatgattatggatgtcaacatgggaaactaggtgaggaatatacaggacctctaaaatttttgcaacttttctgcaaacctgaaattagtcccagataaaaaacttacttaaataaattatattgtgttatcccttaacttgcctaaagtattcacctcac

SEQ ID NO: 467707 - DNA, 504 bp, Homo sapiens
gtctatatagagaaagcaaaagaaatgaggaaatttaggaaaagatatggtatctgcatcatatatgtcaaagggtcaagggagacaatttaaatgaaattggcacataggtgaattttgtcctttgcaccttgtcaattggcttcgtcaacgtgtctctccttctgtaatccctattatcattcctgtccctattcttcttcccaaccccgtcttcttatgttctattcttgttctatgttgacttctattaattccctcttaagaattaatagccgattaacaggaatgttaaaagtgaactgttaatattgtttatctgctaggttttaaagaaagaggtggatctaaaggggatctttaaactgtatctttaaactgtgtcatagtagaaataacttattattattttcctctcttctcyttgatatacttgatatacattttatgtcttaagacactatttagatctatggcttatgtctcattagtggctgtaccatc

SEQ ID NO: 467708 - DNA, 504 bp, Homo sapiens
gtctatatagagaaagcaaaagaaatgaggaaatttaggaaaagatatggtatctgcatcatatatgtcaaagggtcaagggagacaatttaaatgaaattggcacataggtgaattttgtcctttgcaccttgtcaattggcttcgtcaacgtgtctctccttctgtaatccctattatcattcctgtccctattcttcttcccaaccccgtcttcttatgttctattcttgttctatgttgacttctattaattccctcttaagaattaatagccgattaacaggaatgttaaaagtgaactgttaatattgtttatctgctaggttttaaagaaagaggtggatctaaaggggatctttaaactgtatctttaaactgtgtcatagtagaaataacttattattattttcctctcttctctttgatatacttgatatacawtttatgtcttaagacactatttagatctatggcttatgtctcattagtggctgtaccatc

SEQ ID NO: 467709 - DNA, 592 bp, Homo sapiens
taatttttttttttttttgagacagagtctcagtctttcactcaggctggagtgcagtggtgcaatctcagctcactgtaagctccgcctcctgggtttacaccattctcctgccttagcctcccgagtagctgggactacaggtgactgccaccatgcccagctaattcttctgtattttagtagagtcagggtttcactgtgttagccaagatagtctctgactcctgaccttgtgatctgcccacctcagctgcccaaagtgcagggactacaggcatgagccaccacgcccgsccaactttagtattttctatgagtcaataaatggtgtactgtgatagagaataccttcagtaagctacttagaaagcacaaacaaaggaaaacttccctctggaggtgacttttacactatacaatgaataggaaccagccagatgaagaacaaatattctaagtaaagagaactgtaaagcaaagacttttggatagtctcggactgaaaaaaaaaaatcctgcatgactgacacatagtaataaaggatggtcacggcatgagataagtataaagataagaatttaaagtgca

SEQ ID NO: 467710 - DNA, 521 bp, Homo sapiens
tgcaaggtttctcatattttttctttaccacttcaaaagtctcaccctcttttcccttgctcttatttataaggaagctacattttgcatgccaagcccaaattcttgtccacrttctttataccctttcctttagaacattttctataaatttgtcttttttctgattacacatgtagcacccctctctacctgcccctgcctttggcttgtgattttccatgttaataagcagcaaaagcgcactgaagtcactaccttcttgcttttcatattttatctctcttttctttgagttccggactccttaagtgtattttcctattgttttcatatccttatttactcattcatttctcaagatcttgtttgtgtctccacgatttgactagttagagtcagacccagatttaaaactaggcctaaaaaacatgtgcaactctctgagtctgtgtaccttcattagtaaagtgggtataatagaatcgacatcagagatactgtgataattaaagtgcctt

SEQ ID NO: 467711 - DNA, 521 bp, Homo sapiens
tgcaaggtttctcatattttttctttaccacttcaaaagtctcaccctcttttcccttgctcttatttataaggaagctacattttgcatgccaagcccaaattcttgtccacgttctttataccctttcctttagaacattttctataaatttgtcttttttctgattacacatgtagcacccctctctacctgcccctgcctttggcttgtgattttccatgttaataagcagcaaaagcscactgaagtcactaccttcttgcttttcatattttatctctcttttctttgagttccggactccttaagtgtattttcctattgttttcatatccttatttactcattcatttctcaagatcttgtttgtgtctccacgatttgactagttagagtcagacccagatttaaaactaggcctaaaaaacatgtgcaactctctgagtctgtgtaccttcattagtaaagtgggtataatagaatcgacatcagagatactgtgataattaaagtgcctt

SEQ ID NO: 467712 - DNA, 579 bp, Homo sapiens
ccttataggaccattgtgaaaagactgagataatatatgtgaaattctgccataaagaaagtgattacgtattttcattcaagagcacaggctttggagtcagaaagagctggctttgaaycctgaatccacccttgtttatatatcatccttgaaagtgacttatcatcgctgagtctcagcttcctcattcataaagtaggaagaaatatatataatgtgtatcaaatagcttgtatactgcctgacacagaataggcattcagaatggtagctgtgctttccttcttatttctcttcctttcttccctgctccttcattctcctctgctgacctctttggtagatctggttgtgtcaaggtagaaggagagaaaggagtccttctgaaatttgatggttggaaccatcaggccttacatggtgtgactccatgaagtggtaaatactcagtgaatatgcatgtgaatttcagatgtagtttggaagaataattctgctacttgtgttttcctaaaattgttgcaggccactttgagaacattttagctgacaacagtgtgaacgaccagaccaaaa

SEQ ID NO: 467713 - DNA, 579 bp, Homo sapiens
ccttataggaccattgtgaaaagactgagataatatatgtgaaattctgccataaagaaagtgattacgtattttcattcaagagcacaggctttggagtcagaaagagctggctttgaatcctgaatccacccttgtttatatatcatccttgaaagtgacttatcatcgctgagtctcagcttcctcattcataaagtaggaagaaatatatataatgtgtatcaaatagcttgtatactgcctgacacagaataggcattcagaatggtagctgtgctttccttcttatttctcttcctttcttccctgctccttcattctcctctgctgacctctttggtagatctggttgtgtcaaggtagaaggagagaaargagtccttctgaaatttgatggttggaaccatcaggccttacatggtgtgactccatgaagtggtaaatactcagtgaatatgcatgtgaatttcagatgtagtttggaagaataattctgctacttgtgttttcctaaaattgttgcaggccactttgagaacattttagctgacaacagtgtgaacgaccagaccaaaa

SEQ ID NO: 467714 - DNA, 525 bp, Homo sapiens
gccttgttttctgttatgaaagatgtttcargttcgtcttgtacatttcatgtctcagacctgaaatcaaacatttctccatggatacctagttccctgtagtgagaaatggtctttagagactccagtctgggtgttagaggtgctcactgagatggggttgctcattgcttctataccttttggtggacagaactgggaactatttttttaagagtaaaatacattgagattccatattggtatatccaaatctaagatgtacaacttttactcaacttctttaattttatatgtctcttttttgtatgctaaaaatctcaatttttaacaatattaacatatccaattatttgattattttactatgtatgtacataatagtttacaaataacacaatatttttattaaaagtatgcttaagtacgcttattgaatactacgggttttgttttgttttgtttttgcaattctttgacattaggatctacttcaccagggatatatacagtcaaactactatg

SEQ ID NO: 467715 - DNA, 525 bp, Homo sapiens
gccttgttttctgttatgaaagatgtttcaggttcrtcttgtacatttcatgtctcagacctgaaatcaaacatttctccatggatacctagttccctgtagtgagaaatggtctttagagactccagtctgggtgttagaggtgctcactgagatggggttgctcattgcttctataccttttggtggacagaactgggaactatttttttaagagtaaaatacattgagattccatattggtatatccaaatctaagatgtacaacttttactcaacttctttaattttatatgtctcttttttgtatgctaaaaatctcaatttttaacaatattaacatatccaattatttgattattttactatgtatgtacataatagtttacaaataacacaatatttttattaaaagtatgcttaagtacgcttattgaatactacgggttttgttttgttttgtttttgcaattctttgacattaggatctacttcaccagggatatatacagtcaaactactatg

SEQ ID NO: 467716 - DNA, 601 bp, Homo sapiens
ttccatgcctctcccctggcttctggtggtttgctggtcatctttggcatactttggcttgtaggtgcatcacctggatctctgccttcatgttcacatggtgttctacctgtgtgcrtatctgtggccaaatttcccctttttataaggataccaggcatattggattagggttcctctctactccagtaggacctcatcttcactaattacatctgcaataaccctttccaaataaggtcacattctgaggaactagaggttagagtttcaacatacgaaattttctggggggtgggtaagggacacgattcaatccataacaatatgtttatgagtaaatgagttagtgtgttattgtctttctgccacctcagaatctgagaaaacagtttctttttccattccttgggctgtaggtggagaaggaggaggatgatgatggtgattattttttggtcatgccccataatgtgacccactttaaaaaacaacaaacaattgtaaggaggagaactgtcatacacctactgcccagcttaaaaataattagatcatcttctttaaacataactgtcatcccatcatcacacctaagaag

SEQ ID NO: 467717 - DNA, 601 bp, Homo sapiens
ttccatgcctctcccctggcttctggtggtttgctggtcatctttggcatactttggcttgtaggtgcatcacctggatctctgccttcatgttcacatggtgttctacctgtgtgcgtatctgtggmcaaatttcccctttttataaggataccaggcatattggattagggttcctctctactccagtaggacctcatcttcactaattacatctgcaataaccctttccaaataaggtcacattctgaggaactagaggttagagtttcaacatacgaaattttctggggggtgggtaagggacacgattcaatccataacaatatgtttatgagtaaatgagttagtgtgttattgtctttctgccacctcagaatctgagaaaacagtttctttttccattccttgggctgtaggtggagaaggaggaggatgatgatggtgattattttttggtcatgccccataatgtgacccactttaaaaaacaacaaacaattgtaaggaggagaactgtcatacacctactgcccagcttaaaaataattagatcatcttctttaaacataactgtcatcccatcatcacacctaagaag

SEQ ID NO: 467718 - DNA, 549 bp, Homo sapiens
ctctctctgaggtaggaggatcacctgaggccaggcatttgagaccagcctaggcaacataacgagaccctgtctctacaaaaaaatttaaaaattaaccagatgcactgtcatgtgtaggcagtcctagctacatgggaggctgaagtgggagaatcacttaaacccaggagtttgaggctgcagtgagccrtgactgcaccactatactccagcctgggtgacagagagactttgtcacaaaacaaatctacctcaaaaggttgttgaaaggactaaataaattaatatttttgaggcacttaaaacagtacttggcacagattatgtcgtgtgtgtgtgtgtgtgtgtgtgtgtgtgtgtgtgtgtgtgtaatacatatcttctatcatgttagaagtttctgtctactcttccctggtgaattctagcaaataaactgattccttttgataaatatagaatgtttaactttttaaatttaatgaaaaatggttaccatatttcctaatgctgaacaacaattcaatctacgcttttattttctat

SEQ ID NO: 467719 - DNA, 614 bp, Homo sapiens
gagaacaggtagagataagtgggaaagagagggcgccaagaccctcaartctgtaaagggtgaatgcagactgcagcacaggactgccacctggtctctggtctcagcctccaggaagaactgtggctatgtcaccatcctcagctcatcttgctcccttgatccctgcctctgcttgctcggctcctggcctccttggaggaaaatgcctgtgtcaatgggagcatgatggagggttccaggttgaggtgggatgggggataaagacatgtttgcatgaacatgtcctaaaggaacatgtacataaggaaatggactcccatctggagagtgagctgggggaggtgggcactgcaaggagtaggaaaataggccggatgcctagaagttgctccataatccatagttcctttcgagtgtcctgctttgtctgttctggcttttgcccccacccggaaacctggagaaacctcaactggaacgtcaagtaagcagattccagctctctgggcccagggtgagaaaaggaagttgtatgaaaagaggagaaaggaaaaaaacagtctcatattgtgcaacaggtgaagtcccacattgccccttcgaggattcca

SEQ ID NO: 467720 - DNA, 614 bp, Homo sapiens
gagaacaggtagagataagtgggaaagagagggcgccaagaccctcaagtctgtaaagggtgaatgcagactgcagyacaggactgccacctggtctctggtctcagcctccaggaagaactgtggctatgtcaccatcctcagctcatcttgctcccttgatccctgcctctgcttgctcggctcctggcctccttggaggaaaatgcctgtgtcaatgggagcatgatggagggttccaggttgaggtgggatgggggataaagacatgtttgcatgaacatgtcctaaaggaacatgtacataaggaaatggactcccatctggagagtgagctgggggaggtgggcactgcaaggagtaggaaaataggccggatgcctagaagttgctccataatccatagttcctttcgagtgtcctgctttgtctgttctggcttttgcccccacccggaaacctggagaaacctcaactggaacgtcaagtaagcagattccagctctctgggcccagggtgagaaaaggaagttgtatgaaaagaggagaaaggaaaaaaacagtctcatattgtgcaacaggtgaagtcccacattgccccttcgaggattcca

SEQ ID NO: 467721 - DNA, 614 bp, Homo sapiens
gagaacaggtagagataagtgggaaagagagggcgccaagaccctcaagtctgtaaagggtgaatgcagactgcagcacaggactgccasctggtctctggtctcagcctccaggaagaactgtggctatgtcaccatcctcagctcatcttgctcccttgatccctgcctctgcttgctcggctcctggcctccttggaggaaaatgcctgtgtcaatgggagcatgatggagggttccaggttgaggtgggatgggggataaagacatgtttgcatgaacatgtcctaaaggaacatgtacataaggaaatggactcccatctggagagtgagctgggggaggtgggcactgcaaggagtaggaaaataggccggatgcctagaagttgctccataatccatagttcctttcgagtgtcctgctttgtctgttctggcttttgcccccacccggaaacctggagaaacctcaactggaacgtcaagtaagcagattccagctctctgggcccagggtgagaaaaggaagttgtatgaaaagaggagaaaggaaaaaaacagtctcatattgtgcaacaggtgaagtcccacattgccccttcgaggattcca

SEQ ID NO: 467722 - DNA, 503 bp, Homo sapiens
ccctaggactggtctagacaagtgccttggatagctcccaaaatgcccatatgcagtctgcgaggttttcagtgtccccgggataataggattatgctgatcagaactaattactgcacaccattaagcaggctttcttttcatttcagttttgttctctcctctctttttttcccatcttttcttttcaatctctggcctaaaatgaaattgccaggaactgcagctgtccttgattcagtggcggacaacactctctgctcttggagctcccagaggctataccttaaaatcagcttctgaacttttcaagaatagtcttactaggccccacctttaaatattccctttttttttttttttttgagacagagtctcacyctgtcgcccaggctggagtgcagtggcacaatctcggctcactgcaacctctgccgcccagattcaaagcgattctccttcctcagcctcccgagtagtagctgagactacaggcacccacc

SEQ ID NO: 467723 - DNA, 563 bp, Homo sapiens
tcttagaacttctactatatatcccattaaaattgttatataagttatagtaacagaacaaataaacatgtaagttggctttccttgaacaataagcactacaaagagaaaaaagtcttctctgttactgtttgtattgtcaaaagctcccaggtaatctcaagtatctgtgttaggaatatgggtcttcatacaaggtagctgtgctctccctggggcagctgaagtagtttgagcttatgtcattgaaatgattatcttcagtagggcaaagcwtcaaggggcttcttcaatttatcttcactgcacccagattatatagtcaagattcaaagcctaaataattacaaactctagaaaacacatgcaaatgggtgagaatgattgagtgtaagaaacaaacaatatgacaaagtagggaccgtgggaaaggaacgaagtcatatcccaccctaaggaggtggccgctactgcacttccatctgttgctatgagaaaatggggacccagtggaggagggtgtacaatgattaagagaagctggaaacttgaatatattttgt

SEQ ID NO: 467724 - DNA, 563 bp, Homo sapiens
tcttagaacttctactatatatcccattaaaattgttatataagttatagtaacagaacaaataaacatgtaagttggctttccttgaacaataagcactacaaagagaaaaaagtcttctctgttactgtttgtattgtcaaaagctcccaggtaatctcaagtatctgtgttaggaatatgggtcttcatacaaggtagctgtgctctccctggggcagctgaagtagtttgagcttatgtcattgaaatgattatcttcagtagggcaaagcttcaaggggcttcttcaatttatcttcactgcacccagattatatagtcaagattcaaagcctaaataattacaaamtctagaaaacacatgcaaatgggtgagaatgattgagtgtaagaaacaaacaatatgacaaagtagggaccgtgggaaaggaacgaagtcatatcccaccctaaggaggtggccgctactgcacttccatctgttgctatgagaaaatggggacccagtggaggagggtgtacaatgattaagagaagctggaaacttgaatatattttgt

SEQ ID NO: 467725 - DNA, 563 bp, Homo sapiens
tcttagaacttctactatatatcccattaaaattgttatataagttatagtaacagaacaaataaacatgtaagttggctttccttgaacaataagcactacaaagagaaaaaagtcttctctgttactgtttgtattgtcaaaagctcccaggtaatctcaagtatctgtgttaggaatatgggtcttcatacaaggtagctgtgctctccctggggcagctgaagtagtttgagcttatgtcattgaaatgattatcttcagtagggcaaagcttcaaggggcttcttcaatttatcttcactgcacccagattatatagtcaagattcaaagcctaaataattacaaactctagaaaacacatgcaaatgggtgagaatgattgagtgtaagaaacaaacaatatgacaaagtagggaccrtgggaaaggaacgaagtcatatcccaccctaaggaggtggccgctactgcacttccatctgttgctatgagaaaatggggacccagtggaggagggtgtacaatgattaagagaagctggaaacttgaatatattttgt

SEQ ID NO: 467726 - DNA, 553 bp, Homo sapiens
ttatattttatgtattcattcatttcttatacaaatacttatggaactcctgatacatgcaaggtattgtacatgatttcatttgggacaacacaagtttaaacaaatttacttgtcttgagtaatgaacytttctgacatggagtaaaataaaataacaagattcatttgcctttactcattaaatatttattaagtgccttatgtacactaggcactgtgttaaggctacaaccccacataagatgaaatacctgcactctctgtttggagacacagcaagacaatcaacattgaaggtggagttcactgtcttaccacagacttgtgcatagggcaatatgagagtaaagaaaagggcatccaaatccctgtgagtcaaggatatcttcttgaaggaagtagcacttaggtgaatttagaagaatggagtttgaattagactcatgaaggagcggagataggatctaagcaatagaagccactcaagtaaagatacagaatttgacaacttattaccatgttgaaaacactttgagtagggaatttcata

SEQ ID NO: 467727 - DNA, 605 bp, Homo sapiens
taactctagtaattagtgctagtagtcagaagtcagaatttccatgatctttttctagatctatccctgctgagtttctcttttaccgtgagttggattcagcccacatgcttctcccttctaacattagtctatttttatgataaattaagtgatactaaaatagttggttcaatatgtcccaactcatctgtatgtgcttactggggaatatggctccaaaggatcataggtggtaaagtagatccaagaaaattggttaagctaatgttcagccctaaatcttacacactggcactgaggggctcagctacaatctcctttctacattctcaaggagaatgttttttagttaatcatgttatcgagttcaggcaaactgaygtcttctaattaactttttctctttgttatctatatattatcatcatttaataactgtagcttcccttcctcctcccatcccacccacattgaataacaatcatcatctgattttgatgttattgccatttatgtgtagaaatctactcttatattcaggggtctacctatttaaattagcaaagctctaaataatcctaattggagcaaagccagacaac

SEQ ID NO: 467728 - DNA, 515 bp, Homo sapiens
tgcccggccagtagtatgtattcttgtatttgacattcaagaataataggaaaatatgtacagaaagtgaaaaggaaagagaatatttggatatctgtggtgtrtacagaaagtataatgaggcaagaataccatacgaagaaatggaagattctcaaggagagggtaaggcttatgtctcaagataacatgacaagattgtatcagacatttgatacatatcagacatttgatatgtatctgatacattctaaaacaattttaatattttagtaccaaaaaaaaaaaaacccctccaaatctatgcatacttggaaggcacaaagcacgagctcaaacaagaacaatcttttggttctctgatgtaggggaaattccagaaggagccactgagccttatgagtgcattttcccaaaggattataaaagcacacagtgctgggccagtgcacattccttctgatgttctcgtttaccttttccctgctttttttctcatttctcttgttattcct

SEQ ID NO: 467729 - DNA, 595 bp, Homo sapiens
aattctagttttccaatataaggtttaacttacagttttttatgtagccaaaggtaaacggttttctgaatcttgcctaggtgtttcatttatctctaaaattctaaaaagcataaatcattcaaatcttcaaaccaaggcagaaataattttatgtcgctmtagtataaaaacattaataagatagcacattgacttttaaagggaaaagtaaatataacttagcatgtaaactcatttcggctaccatttgctccaaattccctagaacagtggtttttaccactgtactccaaccccgtttttaagcaatggaactctttcttcaaacaaaagcttatgcagaacatctctgtgaaacgctgctgagtgagaactgctttcattgaagctggaagccatcataccttactgccttgaaacccctaggactcagctaagtatttgcctaaccctgaccagggaatgccttggttctgtcaattgctgacatctgagaacacagaataatccatcatttttaatttcaagatattggtacattttataggtatcaaagcaatggcttttcttttgcaacagttaatgtatttat

SEQ ID NO: 467730 - DNA, 576 bp, Homo sapiens
ctcacttatatggaatccaaaaactttgccttcattaagtaaaaggtacagtagtggttttctgaggagaggggaaggaggagatggaaggattggttatggaaacaaagttgcagttagttgggacaaatacattcttgtgttctataccacagctgggtgactctggttaacaaaataggacatttttcaaaaaagctggaagggagcaatttgaatgttatcacaacagagaaataatacctgtatgagagaacagatagagcaagtaccctgatttgrtcattactaaaaatatacatttaccaaaatgtcccagaggaaaaacagtcccagcagactctctaattatatactttattatgcacagaaatttaagaaatgtgaatacacaatgctaatgatcacatggaaatggccctgaatgtctaaggaaccctgagaaatagaaactaagttggaggactcacaatccctgatatgccgctgtgctccagcctgggtaagagaatgagactctgtctcaaaaaaaattgttaggaaatttgagggaatcgtagaagtgacaaattgttg

SEQ ID NO: 467731 - DNA, 452 bp, Homo sapiens
gaggctgagacatgagaattgcttgaacccaggaggcaaaggttgcagtaagtcaagattgtgccactgcactaggctgacagagtgagaatctgtctcagaaaaaaaaaaaaaaaaaaggactagattattatattaacatgagacaaaatagacttttttaggagaatcactgtaacatgagatgaagaatatttaataatgataaaaaattaatctattaggcagatataacaatgaaaaacatgtatgcatctaaaaacagagccctaaaatttatgaggtaaaaattgacagaattgaagggagaactttacagtttagaaatatgctgtaatgggcaaaagaaaataagcataaaataagaataggaaaattattataatataattatttcaccaggacgaaaastattactcaagcatttacaaataggttttattctaagttat

SEQ ID NO: 467732 - DNA, 529 bp, Homo sapiens
tgcatgggctgagtggtcacttgtgtcttcatttaactagccctttcaaagtgtcaagagcaatggatttatttttaagtaaaaaatgattgcaaagaaatgtagayaaaggcaaaagtatacgtttggaagaaagaacctgacttccttgtctgtctctaatgaccttggataaaacatttaagccatcagggaaataattcagcctattacccatctctaaattccaagcttaggctcatttagaaacaaacaaataaaggaataattttttcccaaaaagattatattttaaaataataatagtaatactaatatgaataatagcttctttgtgttgagcatttatgggagtctaggccctccttaataacaattttacttttcttattgaagtttcaccattctgtgaggggactactcttatagatgaaaaactgaggcctagagagattaaataactttcctaaaatctcaataatttttttttaaaaaaagaagatcctcacttcatattccatgttattct

SEQ ID NO: 467733 - DNA, 531 bp, Homo sapiens
tctgctccgaactccctagcrctgtatttccatctttgatatagcattttattactctctatcttatattgcaaatgtcttacattataaatgtaaattttgatcactaatttttgtcattgtatatcattattcctgttgtctttagctgagtggcaaactttcccaacaataatttattattaatattaatcttgatgattaagctgcatagtacttctctaaggcctctcacgagatttctatcagatgtccactgaaggctgttcaagagagctcgagcttactcacatagctgtcagttggctgagaactcagctaagcctggtgtccacagtactacaattggcttttcctttggggtgaccgatttgtcttggcttgcccagaacatctcaaatttagcactcaaaatcacatgtcctggcaaccctcacagtttgggacacagtttgctgtttagtcacccactgcagcttaggcttcccacagcttagagtttaagttccttagaacagtacccgcagtgag

SEQ ID NO: 467734 - DNA, 587 bp, Homo sapiens
cataagaatataaaatgatgatttgttcagcagcaggggcttgagtgggggaaggagaatggtgaataactgtttaagggtacagggttccttttagtggtgttgaaaattttatataattagattacggtaatggttgtgcaattctgattatgctaaataataccattatactttaaatgagtgaatatgatggtgtgtgaaatgtatttcaaaaatytttttaaaaacccaagtgacaaaagcaacaaaaacaaaatatatcaaaatttgacacagtcatagtaattcataattggaaatatagaggaaaatcaaagaaacaaacctaaaatataataaaggtatggaagaataaagtaggtaatagtaacaacaaaataggctattttttaaaattgctaagttcctgcaaaaacatgcaatactagaattagctcaaggagaaataaaagtcttgaataaatacatctgtaattcttaaaataggaatcacatatgtcacctccccatacccattaaacatacacacatacacacacacaaacagaacaactacaacataaacaaaactcaggcaacaggcc

SEQ ID NO: 467735 - DNA, 587 bp, Homo sapiens
cataagaatataaaatgatgatttgttcagcagcaggggcttgagtgggggaaggagaatggtgaataactgtttaagggtacagggttccttttagtggtgttgaaaattttatataattagattacggtaatggttgtgcaattctgattatgctaaataataccattatactttaaatgagtgaatatgatggtgtgtgaaatgtatttcaaaaatttttttaaaaacccaagtgacaaaagcaacaaaaacaaaatatatcaaaatttgacacagtcatagtaattcataattggaaatatagaggaaaatcaaagaaacaaacctaaaatataataaaggtatggaagaataaagtaggtaatagtaacaacaaaataggctattttttaaaattgctaagttcctgcaaaaacatgcaatactagaattagctcaaggagaaataaaagtcttgaataaatacatctrtaattcttaaaataggaatcacatatgtcacctccccatacccattaaacatacacacatacacacacacaaacagaacaactacaacataaacaaaactcaggcaacaggcc

SEQ ID NO: 467736 - DNA, 496 bp, Homo sapiens
tgcttatttatctaattagttttttacctcttattttttctaatatgtgtatttgagttcctatatttctttatcatatccatatccacaaattttgaaagttagtgtcttaataattattccattcaaaatactttctaatttgattttttctctgacccttaaataatttagaagtaaatttctaaattttgaaacatgtagaatctagttatctttttgttatctatatctagcttaattgctagagattatgatttaagaacccacactatatgatttcaattcattgaaataagacttgctttatggccaattatgcttaacatttgtaaatgtgccatgtattcatatatctatatatatttatatattctgtgattgttttcttcttacagttttatatawgaccattaaggttaagtttgttaattggattgtataaatctcttttaagcttactgtcttttttgcccattttgttctatcaaatttc

SEQ ID NO: 467737 - DNA, 496 bp, Homo sapiens
tgcttatttatctaattagttttttacctcttattttttctaatatgtgtatttgagttcctatatttctttatcatatccatatccacaaattttgaaagttagtgtcttaataattattccattcaaaatactttctaatttgattttttctctgacccttaaataatttagaagtaaatttctaaattttgaaacatgtagaatctagttatctttttgttatctatatctagcttaattgctagagattatgatttaagaacccacactatatgatttcaattcattgaaataagacttgctttatggccaattatgcttaacatttgtaaatgtgccatgtattcatatatctatatatatttatatattctgtgattgttttcttcttacagttttatataagwccattaaggttaagtttgttaattggattgtataaatctcttttaagcttactgtcttttttgcccattttgttctatcaaatttc

SEQ ID NO: 467738 - DNA, 551 bp, Homo sapiens
aggaaacagtactttgactagatgaagacctaggatgaaactccatttcacaaatcatatacctaatctgttccagcttacacaggcactcctggcctcgctaacaagacrcaactcagatgctcaccatcaactgtacacatgtttctgtgtctgtctccttcagagtgagatcactgcctccaacaacctgctcagcacccccaggctggagggccacaccatctcccttatctccgcatctgaccttatactccacatgtccttctgaactctgaccaggatgagttttcagagcacttcccctgggagctctggtgtgtccataagccacacgggccactgatcacctgccactcaaatcagggagcagcgatcagaataggcagcattggcttgcactgaaatgaacacactgtctcagatcactacattgtaaaagtctcaaaagtagagaccatgtttcagtcatttcggtttcctaattcttgttacaaaataggtatggatctttttctggtgaccttctgactgtagaaacaatgagctca

SEQ ID NO: 467739 - DNA, 551 bp, Homo sapiens
aggaaacagtactttgactagatgaagacctaggatgaaactccatttcacaaatcatatacctaatctgttccagcttacacaggcactcctggcctcgctaacaagacgcaactcagatgctyaccatcaactgtacacatgtttctgtgtctgtctccttcagagtgagatcactgcctccaacaacctgctcagcacccccaggctggagggccacaccatctcccttatctccgcatctgaccttatactccacatgtccttctgaactctgaccaggatgagttttcagagcacttcccctgggagctctggtgtgtccataagccacacgggccactgatcacctgccactcaaatcagggagcagcgatcagaataggcagcattggcttgcactgaaatgaacacactgtctcagatcactacattgtaaaagtctcaaaagtagagaccatgtttcagtcatttcggtttcctaattcttgttacaaaataggtatggatctttttctggtgaccttctgactgtagaaacaatgagctca

SEQ ID NO: 467740 - DNA, 551 bp, Homo sapiens
aggaaacagtactttgactagatgaagacctaggatgaaactccatttcacaaatcatatacctaatctgttccagcttacacaggcactcctggcctcgctaacaagacgcaactcagatgctcaccatcaactgtacacatgtttctgtgtctgtctccttcagagtgagatcactgcctccaacaacctgctcagcacccccaggcwggagggccacaccatctcccttatctccgcatctgaccttatactccacatgtccttctgaactctgaccaggatgagttttcagagcacttcccctgggagctctggtgtgtccataagccacacgggccactgatcacctgccactcaaatcagggagcagcgatcagaataggcagcattggcttgcactgaaatgaacacactgtctcagatcactacattgtaaaagtctcaaaagtagagaccatgtttcagtcatttcggtttcctaattcttgttacaaaataggtatggatctttttctggtgaccttctgactgtagaaacaatgagctca

SEQ ID NO: 467741 - DNA, 551 bp, Homo sapiens
aggaaacagtactttgactagatgaagacctaggatgaaactccatttcacaaatcatatacctaatctgttccagcttacacaggcactcctggcctcgctaacaagacgcaactcagatgctcaccatcaactgtacacatgtttctgtgtctgtctccttcagagtgagatcactgcctccaacaacctgctcagcacccccaggctggagggccacaccatctcccttatctccgcatctgaccttatactccacatgtccttctgaactctgaccaggatgagttttcagagcacttcccctgggagctctggtgtgtccataagccacacrggccactgatcacctgccactcaaatcagggagcagcgatcagaataggcagcattggcttgcactgaaatgaacacactgtctcagatcactacattgtaaaagtctcaaaagtagagaccatgtttcagtcatttcggtttcctaattcttgttacaaaataggtatggatctttttctggtgaccttctgactgtagaaacaatgagctca

SEQ ID NO: 467742 - DNA, 635 bp, Homo sapiens
gtgatgaatgcggagaattttattactgatgaaagtggctcccagcaggatggggagctggaagggggatggagtgggaaggtgatcttcccatggagtccagcagtcccctgctgtacacttctcctaagtcccaccatcaagccattcctctgaagtcaagctgtttctttccaatgtctggctacttcttctcttctctccttctttgccatctgccagttgggccaggggatttaatgggtacaggatgaggggtgagacaggtcatggtgattttggaaaaggcaacatttgagcargaaaataggaatgcatgctctcactttggaccgcggttctaggcttgagggtggggcttcgccagggaccctgcccttttctgccgagaatttccctgcttcctgcccctaccaataccatcctgtccttatccacacactaacatattttatgtacttacaatgatatagattctgtatcattttatattttgaatgtgtcaaaatgcagaagcaggtaacaaaaaactaaaagtgtcaataaaagttcttactctctcacaaaataagaaatgtagaggtcttattttggttcatcagctgaaaaatgctatgactgaccaggcttccttc

SEQ ID NO: 467743 - DNA, 602 bp, Homo sapiens
acatcttctgccctctgatattggtgctgtcagttgtccagcctttagactgagacttatgctgttggctcctctggttatcaaattttcaggtttggactggaactatatctatcacaggctatcctcagtctccagtttgcaggtggcagatctgggacttcttaacctccaaaatggcatgagccaacccttcacaataagtctctatatttctctacatatctgtatctatttatccatatgtgtgtgtgtgtttatgcatgtgtatgtgtacagccatcccttcatgtctgtgggttctatattcacagattcaaycggctggatagaaaatatttgagaaaaaatgggtagttgcatatgtactgaacatttacagatttttctttggtcattatttcctaaagaatacagtacaacaattactttcacagcatttacattatattaggtattatgagtaatctatagatgacttaaagtatacaggaggatgagcataacttgtatgcaaacactatgccattttatataagtgacttgagcattcacaggtttcagtacctgcaaggggtcctaaaaccaatctatcatggata

SEQ ID NO: 467744 - DNA, 577 bp, Homo sapiens
ctatgacaaatacaatagaaggtaaagaattcattatccataaggagcttataatcatatttgggaaaaaaatgatatggcagaaagaatacagrgtataagaactgtcaaattacagaacatagtaattaaggcaaatacaaattcagagacagggtgggttactggagtttagagatctaccctgaaccaggaaaaacctgaggaaatggctcattgccaactaatattaagcctatttaaggatttcctttagaagaggttgtcattatggacatttgtgttctaagaccaataatgagtattcaaaacacaattcaaaacaatcaacataaaacacaaagttaataaaacctattctttagcctcatgttgtagcaggacaagccacagacaaaacccctcagacaccgagttaaagaaagaagggctttattcggccgggagctttggcaagactcacgtctccaaaaaccgagctccaggagtgagcaattcctgtcccttttaagggcttgcaactctaagggggtccacgtgagagggtcgtgatcgattgagcaagcagggggtacgt

SEQ ID NO: 467745 - DNA, 638 bp, Homo sapiens
ccctaaaattaaaatacagtcctatttccttccaatcacttcttatctttcttaattgatgctaatggaaatgttgttcttttgctgttctacttttgacccatttgtcagatacacgtgtaagtaaaagatcttattgattatatatttcgatatactgcaatatcaaatacatatttaaacaactttaacctgctgcttgttatcttaagacactttgcttttgatcatcatttgctttggaaacaatattgtatataagattgatttgccattaatattaaaaataaacaatagcttttgtagtgaattttcataattgtatgytgtcttgacacgcattttcaatataggtttaccttttctatcccagaagcagtgattagttgctcttgacagggtttccagttcttcacctcctcccagattttcagtgtggttggtacagacatttgtctcacacaaccacctcctagtgaccacctccctatgttgcagctagatacaagctacttgaatttgtcgcacttatccccacctcatacatggactgcccagatatgctacagtaaccatttctcagccacagtgtgactccacagaactcacaggagcttgttttaaactcatgaattaga

SEQ ID NO: 467746 - DNA, 597 bp, Homo sapiens
cctcacgaccaatggcagaaggcaaaagaggagcaaaggcacatcttgtatggtggcaggcaagagagaagtgagagccaagtgaaaggagtttccgcttataaaaccgtcagatctcatgagacttattcactaccacgagaacagaatggaagaaaccacgcccatgattcaattatctcccactgggttcctcccacaacacgtgggaattagctgcaattcaagatgagatttggctgyggagacggccagaccatatcatggggatccaacctttctgcagtcagtgggttttggatctgagaactgacttaggtctagaaactgggcaagagatcctgttttccattgggatggctgacctcagcgttctgttcatctattcttaatctcatttgattttacactttaagtgaatattattagctacaatctatcttgcccctaggaataatatgacccattagccactttcattgatatgtataggtcaggcctccttgggtgtcatttcaatattgctgcctgttacagtaattatatccaccttgcttctgatggttgagagttaccacctggcctctgctattccag

SEQ ID NO: 467747 - DNA, 517 bp, Homo sapiens
cctgtcccccagggcaactgctgttctgatttttcatcttagattagattggctgttcccgaagttcatataaatggaataatacagcatgcattcttttctgttcagcgtctttcactgagcataatgtctgtgagattcctccatgcggtttcccgcatccattattctttttttaatactgatgagtagtattctatcgtagaaataaattataatttgttcatccattctccaaatgatggacatttatttgagttgtttctgttttgactatcatgagtamaactataatgaacatttatgtacagcctttacatggacctaggttttcatttctatttgatacatcctacatgcaaaattgctgagtcaccacattagtttttgtctggatggctacagtaatctagctgccatttctgccatctgatatcggcccacaagtctgggcatcacaccatcttccttttcccaaagcaaaactctatccatatcaaagatcgacttaagaagt

SEQ ID NO: 467748 - DNA, 517 bp, Homo sapiens
cctgtcccccagggcaactgctgttctgatttttcatcttagattagattggctgttcccgaagttcatataaatggaataatacagcatgcattcttttctgttcagcgtctttcactgagcataatgtctgtgagattcctccatgcggtttcccgcatccattattctttttttaatactgatgagtagtattctatcgtagaaataaattataatttgttcatccattctccaaatgatggacatttatttgagttgtttctgttttgactatcatgagtaaaactataatgaacatttatgtacagcctttacatggacctaggttttcatttctatttgatacatcctacatgcaaaattgmtgagtcaccacattagtttttgtctggatggctacagtaatctagctgccatttctgccatctgatatcggcccacaagtctgggcatcacaccatcttccttttcccaaagcaaaactctatccatatcaaagatcgacttaagaagt

SEQ ID NO: 467749 - DNA, 583 bp, Homo sapiens
aaaaacagatggagttttttaacattgataaatctttcttttgtatccagccccaagcaagcacacattactttcattttaagagcaagttctctttctcagattgcttggtatattcaaaacaaaacagaaagcctttggagtttggcctcctcccatctgcctatatgtttgctacccccagggcagaagagacagagggactaagttcagaggttcatatacctatgtagtgcagactgatgtgaatgctgcatctgctgatcttccctctcaccatcaaagtagaagattttcttgtgcatttcaggacaagtgtgtcccagtgctcattctaaagggtttccaactctgggttcttagtgttggtgcatttgcatttgaagggtaccmaaaccagaaagtttgctattagacttcattcccaccactatcatttcagggttttgacaatgcttccacttcaggaagctggacttggcagaaatcagccaaacctaaactcaagtgttcatataaacaccagctgaagatcacaactcatttgttaatttagttggaatctattgagcacctactatgt

SEQ ID NO: 467750 - DNA, 587 bp, Homo sapiens
gtccttttgccacaagctctttttaatttgaaattattagtaagttcccagtttgaggaaaatagtacttcacataggaaagcctgactccagttaaattaaaataaatgagtcaaaacactgaaaagtcatagacactcagagttagctgtattaacacgaaaatgaaagttctaaacccccattataccaataaatatattagcaagtttgaaaaaggaaattattcaacatacctagtaaatatgtaactaaaaatattctaagtttaycttatttttacattatcacatttttgaaagaacagagattttatatccttaatgacatattaattgtatataaatcaaataatccttttcttcatcagtgaaattccatttactctgcttaatagcagaaaaaaatctttttgacctaagtagtagcattatcgttttatgatcctacatcataattgtcatgcctttatttaatctttgaagatagcataaacattgaagtctgacacctgactataaacccttgctgttacttactatatgtatggtctgcaaaatgatgccttccagagttgagcaaggatt

SEQ ID NO: 467751 - DNA, 587 bp, Homo sapiens
gtccttttgccacaagctctttttaatttgaaattattagtaagttcccagtttgaggaaaatagtacttcacataggaaagcctgactccagttaaattaaaataaatgagtcaaaacactgaaaagtcatagacactcagagttagctgtattaacacgaaaatgaaagttctaaacccccattataccaataaatatattagcaagtttgaaaaaggaaattattcaacatacctagtaaatatgtaactaaaaatattctaagtttacctyatttttacattatcacatttttgaaagaacagagattttatatccttaatgacatattaattgtatataaatcaaataatccttttcttcatcagtgaaattccatttactctgcttaatagcagaaaaaaatctttttgacctaagtagtagcattatcgttttatgatcctacatcataattgtcatgcctttatttaatctttgaagatagcataaacattgaagtctgacacctgactataaacccttgctgttacttactatatgtatggtctgcaaaatgatgccttccagagttgagcaaggatt

SEQ ID NO: 467752 - DNA, 564 bp, Homo sapiens
gcattggactactacctgggtgtttatgaaaataaagagttctagccagtccagttttttataccaagtcctgactttcactgtcccaacagctccatgttaaaggtccagtattttcctgattagcacacttaagttattgactggctaaatgatgattactcagacattcaatataatatgctataaacattagactcagaataaggaaaagacctgtatatatgacttttcaattgtgcctgatgtgcaaactaccactaaaccaagttggaaagaataaagccaattaattyacagggatttaaggaggtatctccttgaaaaatcatttaataaaaaggtataagggtacttataataacttacttaaagtgcttaataaattaaaaaggaaattaaaaaatttcttgaaacaaatgaaaatcgaaacacaacataccaaaacctatgagatacagcaaaaacagtactaagaggaaattttatagcaatgagcacctacatccaaaaacaagaaaaacttcaaataagcaacataaatatgcatcttatgggactaga

SEQ ID NO: 467753 - DNA, 555 bp, Homo sapiens
taggttaaggaccaacagagaaatccctaggagtggatggccagaaaggactctggagaaagagggatgattggtatagagtttttaaatgtttgctctgtgatcttcatatagtcagtaaaatctatattttgtgtgactggtaactttcctataggaattcatgaagaggccgagctttgctttcagaatgacataatgcagaactgagcagaagagmtactgagaatataagtcttgggaatttgcagaagtcttggggacagctttggatttctgcaaactagaactgaaggcttaaatcaacttcacttaactatccatgggatcaatgtgatccaggtgatgtctggggtaatatatgacaataagcatgaagatctagaaaatattatttaaaaaatactcttatggctttagaacaggggtctctggtaccccacagaggtaccggtctgtggtctcttaagaaccaggatgcacagcagaaggtgagctataagcaagtgagtgaagcttcatctctgctccccatcactcatagtacagcctgag

SEQ ID NO: 467754 - DNA, 541 bp, Homo sapiens
ctcatgtttcttaaccttttgaaatttatacaatgaattattatgtaacaatttttgaggtcattccactaagatgtcctagtggactcacacttaccagagccaattataccatgttgccatataagtgtacttcctgggctgctaaagactagacatatcttttctggcctcccagaatgaatttcaagtagcattagaacctttttttttgtcctgaatctttttgtttggttgtttttctttttttttttttccttttatatttttgtgttctttctggttcatggctaaatctgttggtctatcaatgtctgtctatcagagctagggctgtattcctttccaaaggtgagaccagggattagtagttttcagatcaccagactggttgtgactgtgtaagtaataraaaaacttgtacataaattggtcgtttgggcattgtgtctttctacaacggggtccagagattaaagattatcagactactgggctggactcatctgagtagtcagaaaagcatctcatatataggaat

SEQ ID NO: 467755 - DNA, 616 bp, Homo sapiens
aacctagtggcaaatacactgagaagatcagttgattgtacctcttcttttttgttttggttttgaacgcacaataaaaaataagactttgaagcaacaaagcccagcagagcttgtttggctttcctcatgacaagaatgtgctggaagtatacctgccctgagacaggagacagacattgactagtaaagaacctcaaataattgccctagaatggtatcattttatgactttttgtcaaaatcagactttcttttatttattaactcaattcaggaatattttaaatgtcctgacagccttgctaatgcaaataaatcactaagaaatgytcatttgcaattgtttttgctgaccaaggagggtcatgaatctctttcacatgctaacagtctgtgtttttgttttccctaaaaagattgtcatctgaacatatggatagtaaatcaaagtgttagaaaatattacagatgatcaatatgttcatgtcattacttttgtgagaattttacatttgttgtagaatataaatttccctagacttacaatgattttgtagattttctagctaatggagaactcattgtttattgaaattgaaacaaagaaatgtta

SEQ ID NO: 467756 - DNA, 303 bp, Homo sapiens
catgggaaaatgactctattcttctgtgccttagttatctcacacagcaagagagaaataactgttctacctttgcgaggcttaatgcaatcaaaggaaggaaaacattggatgtgtaaggtatcgttatggaaactcacttttgttcttccactggtcttgacarccttcattaatcttctcacccttgtttacccaaaaaaaaagtgactcacagttacataacaattacccaaaaaatagtgactcaccttacataacaattagtgataaagttaattagaatccagatttcttaactct

SEQ ID NO: 467757 - DNA, 591 bp, Homo sapiens
aattatttgtatggctttgtgtatatttatatatatacgtaggaccaagatacatttccttgtggctccagccttgattacgtgccctaaatgcatagctaagttccttacttattccctgggtcagagtccctgttgtaaattatttattacttacatagtccttaactcattcattgcacaaatatttttgattatgtattacatgccaatcatgaaaaagaaaaaatacaacccattaacaaatacgttatatccattttacagataggaaaacataaatttcctgccaccccacatctagtaaacagcagatctagcatttaattccaggtcttcctgtttaagaaatttggaccctgccttattcttgccactcttctccttgacccttatattgttttccaagcaaccaattatctaattttctgacagcaaatgagtgtccaagtcatttctgacactgaccatctggagttggtgcaaactccacaagtctcarttccacgagatgtcagctgcaaaaggagtccccaggatacctgcctcggaccagtcaattacaagtttcagggttcccatgacctgtcc

SEQ ID NO: 467758 - DNA, 591 bp, Homo sapiens
aattatttgtatggctttgtgtatatttatatatatacgtaggaccaagatacatttccttgtggctccagccttgattacgtgccctaaatgcatagctaagttccttacttattccctgggtcagagtccctgttgtaaattatttattacttacatagtccttaactcattcattgcacaaatatttttgattatgtattacatgccaatcatgaaaaagaaaaaatacaacccattaacaaatacgttatatccattttacagataggaaaacataaatttcctgccaccccacatctagtaaacagcagatctagcatttaattccaggtcttcctgtttaagaaatttggaccctgccttattcttgccactcttctccttgacccttatattgttttccaagcaaccaattatctaattttctgacagcaaatgagtgtccaagtcatttctgacactgaccatctggagttggtgcaaactccacaagtctcaattccacgagatgycagctgcaaaaggagtccccaggatacctgcctcggaccagtcaattacaagtttcagggttcccatgacctgtcc

SEQ ID NO: 467759 - DNA, 562 bp, Homo sapiens
tctgctgcttttactccattcttcccaattttcttgacagccactgtttcctctttattatgtaaagtagcttctttgctcctctgaaggaaatctagtgcccagcccagtaccctgtcatggaggccgattcttctcgatttggatgagtgggcttatccaacagctttctcttcacagaagaatcctctgaccagctgctgtgaacaaaaagataaacatttctccatatcattactcataaaatgggtttattaatacttcatagggttgctgagaggataaaaggaaataatgaatgtagaggatttagcacagcgtcgtttatcgtcatcatcactgaatgcaattagattgtgcagtttttatctttgctctctctggacctctgtggttacctccattacaacrcttatggctcagttatcggaggatgctcctggctttgagctccccatgggcaagcgctttgtctcattcatcctatctccagcacctgctaccatatccagtgcagagtgatgcatgataaatgtatgaatcatttggcctggagagcttc

SEQ ID NO: 467760 - DNA, 552 bp, Homo sapiens
acaatgtaaaactatccacagtttaaaaaggaaagtatgattcaacaattctgtgttatttccagttacattatcatttgaggaaaaaggcaacaggcagacattttcaaatgtgaacaagaaaagccttcgaggaatattgcactcacatttttcttgggaaaaaattacctgcccaatgataaattcagccaagaaatacattaaaataactacgaaatggagataccatggtagaagttgcagtatgcattgaatctatttaaatataacagacaaaayaatagaaaaattatagctatagaatggtatataaatgctgaataaagcaacaaaatcagagggaaggtagaagaaaaaattagggaggggaaaaaagttctaatcatgtatttcacagcaaagaatcaactaatgctgtaaaaatgaaatatgtagtttaaattgattacaacattttaatgatttttaatttgtaaacattgttgagcatttaaaaaattcatataataaacatttatgcaaagttcagaattctacttcaaattattt

SEQ ID NO: 467761 - DNA, 595 bp, Homo sapiens
gcccgcctcgggctcccaaagtgctgggattacaggcgtgagccatcacatccagcctttcattyatatgtatttctttagttcttttcctagcaaacagatattgaatgcggtttcttctcactcattaaatatttacaaattttgtccatatgttaggtcacaaaggaaaccttaaataaatccaaaatataaaaaacaatacagaacacattttttattgtaatgcaaaaaagtgacattatttacaagagtgggtgctaataagattcgactgaatggaaatgaaatcaatttttctttatatcctccaagtgaaaaagctggactcagatgaaaaatgcatactttcattatcaaacaaaaaataattaaatgaaattaatattgaattcagatgttgaattaacatctaaacaaaagaaacaaagatgaaagtaccaattaataaagtagaaaaatagaataaatatacaaaataagaactaattccttgaaaataaactttataaatagaaaagctactaatttaacctgtcaagaacgaaggaaggaaatgtaaatacacaaaactcaggatgaagaaggataaaca

SEQ ID NO: 467762 - DNA, 621 bp, Homo sapiens
ggtgagactgcagcgagtcatgatcatgccactgcaccccagtctgggtgacagagtgagacactgtatctaaaaaaaaaacaaaagtaaaaataaaaagaagtggggatattaattttctttttaataattagataaaaatcagtaaggatatagaagatcttaaaataattatcaaccaccctaacctaactgaactttataaaacaatttacccaacaactgcagaattcacattctttcttgtgcacacagaccatttgccaagatggaccttatcctggaatgtaaaacaagtcccaatatattmtaaaagcttgaaattttccagagtatgttctctaaaaaccaaaattaaatcagatattaataacaattgaagatttttgaaaagcctcaaatatttggaaattaacaaacttttagtaactaggcaaagaagaaatagtaagaaaaattaataaatatttgaatctacataataataaaaatatatcaaaatttgttggatagagctaatgagtactattaaacaaaaattacaggaagctattgctctggactaaactcctccactaggccccaacaaagtagagtaaaaaatcacaacgaagccagtga

SEQ ID NO: 467763 - DNA, 581 bp, Homo sapiens
aaacatagtgactgtgaatagctactgaagcttctgattaagtaacatatcataattatggctggtcgccatttggatgttttccaattgtcatcaggaaatgaggtgtatcctcaggaagataattaaaagaaaattgttatatattttttaggacagtaataaagactcacagataatgaatattgaagacaaattggtgctttgcaattaagtttgttttccaaatcaagtttgygtgttacagaaggaggttcactttggagagtgaaatttctaagatgaaacatatctctggtgattcatggcagataggaaaaacaagaccattcttagttttgagatttccaaagagtaatatcacatggggacagttttattaaaaatacagcagttttggatttttcagtcctcagatgaagattggtgttctttataaagttctgctccaacttacagaaaagttgtgaagataatgttttgtttcatttgactattccttggtcagaacttactatgttttatagtagtattgtctattggtgaccttgaatttgatttcacaattttcacactgccac

SEQ ID NO: 467764 - DNA, 581 bp, Homo sapiens
aaacatagtgactgtgaatagctactgaagcttctgattaagtaacatatcataattatggctggtcgccatttggatgttttccaattgtcatcaggaaatgaggtgtatcctcaggaagataattaaaagaaaattgttatatattttttaggacagtaataaagactcacagataatgaatattgaagacaaattggtgctttgcaattaagtttgttttccaaatcaagtttgtgtgttacagaaggaggttcactttggagagtgaaatttctaagatgaaacatatctctggwgattcatggcagataggaaaaacaagaccattcttagttttgagatttccaaagagtaatatcacatggggacagttttattaaaaatacagcagttttggatttttcagtcctcagatgaagattggtgttctttataaagttctgctccaacttacagaaaagttgtgaagataatgttttgtttcatttgactattccttggtcagaacttactatgttttatagtagtattgtctattggtgaccttgaatttgatttcacaattttcacactgccac

SEQ ID NO: 467765 - DNA, 607 bp, Homo sapiens
aatcattgacttgtatacatgaaattacggatgatttttataatatgtagactattcctcaataaagctgttttaaacaataaaaataaatttaaaaaaaataccaaaaaakaaaaagccaggtgtgatggcatgtgcctgtggttccagctactcaggaggctgaggtgggaggattacttgagtccaggaggttgaggctgcagtgagccatgatcatgtcactacactctagcctgtatgacagagagagaccctgtctaaaaaacaaaaacaaaaacaaaaaagaagttactgaatgtcctgtgacttgaaatgttgactaggttaaagcaatgtttcccctagtgtgctcctgcaaacaccagttttatatgatttttaaagtattatctgaaaaaggattgcatggccaaataaattgaaaaaactttgggtaagcagataataatacattgtattgttcaagagatctcagtttttgatgtgctatatattgtgcattttcaagaaaaaagcagagcatatagaatgtgcagaattaattgatcatgaggctttgttgtgtgtttgtgatgtctttggaagttttcccaccgaacatatg

SEQ ID NO: 467766 - DNA, 607 bp, Homo sapiens
aatcattgacttgtatacatgaaattacggatgatttttataatatgtagactattcctcaataaagctgttttaaacaataaaaataaatttaaaaaaaataccaaaaaagaaaaagccaggtgtgatggcatgtgcctgtggttccagctactcaggaggctgaggtgggaggattacttgagtccaggaggttgaggctgcagtgagccatgatcatgtcactacactctagcctgtatgacagagagagaccctgtctaaaaaacaaaaacaaaaacaaaaaagaagttactgaatgtcctgtgacttgaaatgttgactaggttaaagcaatgtttcccctagtgtgctcctgcaaacaccagttttatatgatttttaaagtattatctgaaaaaggattgcatggccaaataaattgaaaaaactttgggtaagcagataataatacattgtattgttcaagagatctcagtttttgatgtgctayatattgtgcattttcaagaaaaaagcagagcatatagaatgtgcagaattaattgatcatgaggctttgttgtgtgtttgtgatgtctttggaagttttcccaccgaacatatg

SEQ ID NO: 467767 - DNA, 520 bp, Homo sapiens
aagtcatagtttacaaaccctttcttattttgagatttaaaagcattctttcatgctttcttctttaattcaatgtattcatttatttatattaaaatttttctccatttggatttttctttgtatacagtgcgaagtatgaattcaacttaattttttccaggctgtcctttgtctcacatcaccagtttttaaatagttcatttttcccactgatttgcattgccaccctttcatatattaaaattgtgcgtattttagatttctagactttttgttctttcatttctctgacatgtactaacaatayactaacaatagctaatgctgtataacatacaatagctgcaacatctatttctccgaatttttgttcttcttcaaagatctttctagctcttagagaaaaaattttcctatatgttgcatgtaactacatacaactaattttgcctggttttcaagagaaataaataatctttctggtatttttgaggtcctgtcttaatgtataaattaa

SEQ ID NO: 467768 - DNA, 601 bp, Homo sapiens
agcctatgaaaacaggcacaagcacagagactggaaacacatttgactttggcttcctgagctctacaacagctattcctrtgtgttaccaaaattcactcaatgtatcgaaagagtgaggtttacaatatttatcccaatgttgttgtcatctgtttatataagtaaatgagatcattactggatgtgaagaccttaattaatatgctaatctcattcctccaccaaaaccattttttaaggtggccatcttcatgtcttccccagtcactgtcacctcccctagaactgccttgccattctcatctgaaagcacagacccagttcccaaatcactgatatgacataaccagaactcctgttaaagacaactgagtgtcttcaaggggcagctattagattgtcaggaattatcagctgtagttagaagatatagccctaagggggtttgagaaatcccttcccatcaccaaattgggggtttaatgtgtctgggaacatttttaaacttttttgtattgtaatatatttgttcatttttaatttatttgcagtacaagcagttcacatccccatctcaagccataaatcaaaaagatta

SEQ ID NO: 467769 - DNA, 616 bp, Homo sapiens
ctcatgctgtgtcaactctgagccaaagcagtcagtcaactcaaagggagtaaacatcagtcaaacagatgatttggcagcctaactatttaacaactgatgatgactggaattttcacttttccatcagtcacatagacttgtctcaggaagagaaataactgaagtttagagtagttttcttttgmtttttcataaaagtcattcatcccaaaacatttgctgaatgcctgctgtgttctaggtactctatttagtgcttggaatatagagatgaaagactgaagtagtgttagaaatgaaaaatcattgttaaattctttctcttctaatacgattatctatgctgctaagcaattttctcagtgatcatcagccatcagccatcaaaacccgggaccttccccacagctcctcttttaaccctaatatttaaccaaaaattgctctgctgcggcaaaacctcaatacgtatacactgccttggttccaaagagtaattggaatgggcttactactttctagtggatttatagaaaaagccatctgataaaaatatatttactatgatgcccattataacatctgaggttaagaatactttgtattctacaaa

SEQ ID NO: 467770 - DNA, 616 bp, Homo sapiens
ctcatgctgtgtcaactctgagccaaagcagtcagtcaactcaaagggagtaaacatcagtcaaacagatgatttggcagcctaactatttaacaactgatgatgactggaattttcacttttccatcagtcacatagacttgtctcaggaagagaaataactgaagtttagagtagttttcttttgatttttcataaaagtcattcatcccaaaacatttgctgaatgcctgctgtgttctaggtactctatttagtgcttggaatatagagatgaaagactgaagtagtgttagaaatgaaaaatcattgttaaattctttctcttctaataygattatctatgctgctaagcaattttctcagtgatcatcagccatcagccatcaaaacccgggaccttccccacagctcctcttttaaccctaatatttaaccaaaaattgctctgctgcggcaaaacctcaatacgtatacactgccttggttccaaagagtaattggaatgggcttactactttctagtggatttatagaaaaagccatctgataaaaatatatttactatgatgcccattataacatctgaggttaagaatactttgtattctacaaa

SEQ ID NO: 467771 - DNA, 616 bp, Homo sapiens
ctcatgctgtgtcaactctgagccaaagcagtcagtcaactcaaagggagtaaacatcagtcaaacagatgatttggcagcctaactatttaacaactgatgatgactggaattttcacttttccatcagtcacatagacttgtctcaggaagagaaataactgaagtttagagtagttttcttttgatttttcataaaagtcattcatcccaaaacatttgctgaatgcctgctgtgttctaggtactctatttagtgcttggaatatagagatgaaagactgaagtagtgttagaaatgaaaaatcattgttaaattctttctcttctaatacgattatctatgctgctaagcaattttctcagtgatcatcagccatcagccatcaaaacccgggaccttccccacagctcctcttttaaccctaatatttaaccaaaaattgctctgctgcggcaaaacctcaatacgtatacaytgccttggttccaaagagtaattggaatgggcttactactttctagtggatttatagaaaaagccatctgataaaaatatatttactatgatgcccattataacatctgaggttaagaatactttgtattctacaaa

SEQ ID NO: 467772 - DNA, 624 bp, Homo sapiens
ttgttttttgtccttgttatggtttctattttcctgcttctttacatgtctagtaatttttttaggtgccagacttgtggatttttacttcattaggtgtgaaatgtcattataatctcataaatattcttgagctatgatctggcatgtggttaggctcactgaaagcagtctgatccttctcaaacttgcttttaaactttggtaaataggacaagagcagcgtttttctagggctaattttgccccactgctgaatactctccctgctgccccaggaattctgtggcatttttactctgcctggtgggaatacaaatttattctcagccttgtgtgagccctgtagacttttctgtctgtttctttcagggaattatttctttggactcagttttctcacatgcrcatgctgatctgtactcatctgaagactcaaagaggaccttctgcaatttccacagttctctccccgcacagctgcctctgccttgtgaatcatgaccaccttaacccccttggacttgagctctatctcctcaactcaaggtgactgtcaggtttcctgggttctctctttctgtactgctgcctagaaactctatcaggcagtaagttggggtg

SEQ ID NO: 467773 - DNA, 629 bp, Homo sapiens
tgacacaaaccagtggaaaaatattctatgctcaaaccccattaaaaaatgggcaaaagacatggacagacacttctaacaagaagacatacaacatatgtcatcttcatacgtcagcaaacatgaaaaaatgctccacataactaatcatcagagaaacacaagtcaaaaccaaaatargatacaatctcataccagtaagaatggccgttattaaaaagtcaaaaaacaaccgatgctggcgaggctgtgaagaaaagggaatgcttatacactgttgatgggaatgttaattagctcagccactgtggaaagcagtttagagatttctcaaagaactcaaagcagaactaccattcagcccagcaaccccatgactgcattactggagatatatatatatatatatatatatatgtatgtatatattgttctaccaaaaagacacatgcatgcacatatttattgcagcactcttcagaatagcaaagacgtggaatcaacctaggtgcctttaatggtagattggatacagaaaatgtgctacatatacaccatgggatactaaacagccacaaaaaagaatgaaattatgttctttccagcaacgtggatgcagctggggctat

SEQ ID NO: 467774 - DNA, 629 bp, Homo sapiens
tgacacaaaccagtggaaaaatattctatgctcaaaccccattaaaaaatgggcaaaagacatggacagacacttctaacaagaagacatacaacatatgtcatcttcatacgtcagcaaacatgaaaaaatgctccacataactaatcatcagagaaacacaagtcaaaaccaaaataagatacaatctcataccagtaagaatggccgttattaaaaagtcaaaaaacaaccgatgctggcgaggctgtgaagaaaagggaatgcttatacactgttgatgggaatgttaattagctcagccactgtggaaagcagtttagagatttctcaaagaactcaaagcagaactaccattcagcccagcaaccccatgactgcattactggagatatatatatatatatatatatatatgtatgtatatattgttctaccaaaaagacacatgcatgcacatrtttattgcagcactcttcagaatagcaaagacgtggaatcaacctaggtgcctttaatggtagattggatacagaaaatgtgctacatatacaccatgggatactaaacagccacaaaaaagaatgaaattatgttctttccagcaacgtggatgcagctggggctat

SEQ ID NO: 467775 - DNA, 593 bp, Homo sapiens
actgcattactggagatatatatatatatatatatatatatgtatgtatatattgttctaccaaaaagacacatgcatgcacatatttattgcagcactcttcagaatagcaaagacgtggaatcaacctaggtgcctttaatggtagattggatacagaaaatgtgctacatatacaccatgggatactaaacagccacaaaaaagaatgaaatyatgttctttccagcaacgtggatgcagctggggctattatcctaagcgaattaatgcaggaacaaaacaccaaatactgcatgttcttgcctataagtgggacctaaacactgagtactcatggacacaaaaatggcaacaatagaaactgaagactgttggagtggggagagaggtatggggacaagggttgaaaaactgttgggtactatgcttagtatctgggagatgggatcatttgtatcccaaacctcggcatcacacaatatacctatgtaacaaacctgctcattacccccaaatctaacataaaatttgaaattataaaaaaattaaataaaaataaagtataaacctcccgaggtaaataggatatg

SEQ ID NO: 467776 - DNA, 516 bp, Homo sapiens
tcaaagtttttcctctaagaactagaacaagacaagaatgcccactttcactcttattcaacatagtactgcaattcctagccagagcaatcaagcaagaaaaagaaataaaaggcatccaaattacaaaggagaaagtcaaactgaacctgtttgcagatgacatgatcttatatgcaaaaaaattttaaattaaaataaaaaataaaacctaaagaccctaccaaaaactcataaaattgatcaacgaattcaataaacgaattcaaacgaattcaaacaaatatcagtagtactctatacacaaacaataaactagctraaaaaaatccagaaggcaattcgatttataatagctacaaaatataaaatacttagaaagaaatttaactgaggagttgaagacctctataagaaaaactacgaaatactgatgaacaaaattgaagagcatccaaacaaatggaaaaatgtcttatgctaatggaagaagagtgttaaaatgattaccccaaa

SEQ ID NO: 467777 - DNA, 523 bp, Homo sapiens
ccaggatcagacagtgctgtcctgaggctggccgtctgataaggggctccagaaagggcagtggtggagccctgggaggctttctgctctcctgatcgcaggtttttggtgagaggacctattggccactagggtgtctgtgtgtgtgtgtgtgtgtgtgtgtgtgtgtgtgatgtgtgtttacttggattgacttctttcagcatgaagcccactgttttgctgaatgtatctcactgtttcctgaaactcagtacattcagctggcttaagggtcctggggcctcgctgygtcatatttgcacaagcctagtgtctgtgcagactgtacactggagttcagttgtaagacccttttgatcccttattctgttcctgtaatagaaaagccatttcactcaatggaatagaaacccagatccgatggagagatgttctaatctgccatacactggggcagtggccagtgatttggactttgtggcatagatggaaatttccaggttgtctaggtggtagacag

SEQ ID NO: 467778 - DNA, 523 bp, Homo sapiens
ccaggatcagacagtgctgtcctgaggctggccgtctgataaggggctccagaaagggcagtggtggagccctgggaggctttctgctctcctgatcgcaggtttttggtgagaggacctattggccactagggtgtctgtgtgtgtgtgtgtgtgtgtgtgtgtgtgtgtgatgtgtgtttacttggattgacttctttcagcatgaagcccactgttttgctgaatgtatctcactgtttcctgaaactcagtacattcagctggcttaagggtcctggggcctcgctgcgtcatatttgcacaagcctagtgtctgtgcagactgtacactggagttcagttgtaagacccttttgatcccttattctgttcctgtaatagaaaagccatttcactcaatggaatagaaacccagatccratggagagatgttctaatctgccatacactggggcagtggccagtgatttggactttgtggcatagatggaaatttccaggttgtctaggtggtagacag

SEQ ID NO: 467779 - DNA, 601 bp, Homo sapiens
aacacctgctagactgagctgacacagccctcctgcctgctgcccagaagagcccttaaaattctgcagtctgcacccgccccttgtgtctgcgcggcacagtgagaactgacatttcttcctagataaatatctggaaagaagtcgggaaacaattaaaactagaagctaataaatgatgaagaagcccatgagccaagtcctggcccgcttcccagtcttcattcatgcatcaaaaaaaccccagcggtccgaggcttcgagagggcagctgggtggtggggctgtccggcataatataaatgggaattagatagaatcgaaggtgcttgttgcattcccaamggcaaacaccatctcccaatgctgccccccagcccacgtctccccagccaagccctcttctcagggaacacatgacagatgatcttgtaaccaggcaaccaggggaggaaaggttccaaagttcctccacacgagtgaggacagcagtgttctgatcatagtggtgactggggcgcagcaccgtgataccttctgtggacctgaaaaaaacaggggctgggggtgcaccggccactcctccaacatgaggacctca

SEQ ID NO: 467780 - DNA, 200 bp, Homo sapiens
aatagcttgatttagccatcccattatatatgtgtgtgtgtgtaaacaccatgtttgacaccacaaatatatayaattttttacttgtcaattttaaaaacaactatacacttaaaaaccatcctaaattccgtacttgccctcaacctccacgtcccatttagtctagaatcttgcttatgctacttataaaatatatt

SEQ ID NO: 467781 - DNA, 200 bp, Homo sapiens
aatagcttgatttagccatcccattatatatgtgtgtgtgtgtaaacaccatgtttgacaccacaaatatatataattttttacwtgtcaattttaaaaacaactatacacttaaaaaccatcctaaattccgtacttgccctcaacctccacgtcccatttagtctagaatcttgcttatgctacttataaaatatatt

SEQ ID NO: 467782 - DNA, 377 bp, Homo sapiens
tgtaattattattttcattgcttttgatattgtatgatgaaatactttgacattggaaagattactataattcagtgaattaatattctccaactgtttagaatcatgcatggattcagatttatttaagatagagcagtggattttaatgtgtataactaggaaatacttcagaaatgccaaatgcattgaagattatgataagaccatttatagaagagaaatgctgaaagataatkaacatgaaagatgccaaatgaagtgtttcgcactcattagatattcaaatattaagtcagacagagcaaggaaggggaaacaagatgttcctggactgcagatggcggtattgtaggcggaagtttggcaatacctaa

SEQ ID NO: 467783 - DNA, 655 bp, Homo sapiens
ttttcccctgcatgacaatgatgcctgctcgataaatataaagcagatttattatttttttaaatccatttcctaascaacacacttgggctgtcattgatttttttgtttatgtctctctttttcttttttctttttttttgagatggagtcttgctctgtcacacaggctggagtgcagtggtgtgatctctgctcactgcgaactccacctccctggttcacgccatttcctgcctcagcctcctcagcagctgggactacaggtgtccaccaccatgcccggctaattttttgtatttttagtagagacagggtttcactgtgttagcgaggatggtctcgatctcctgaccttgtgatctgcccgcctcagcctcccaaagtgctgagattacaggcgtgagccaccacgcccagcctgtttatgtctctaaataagctctttctccttctttctttctctgctctgctgttaactataagagagttcaaaaattctagcactgtggaaacatttttccaggaacttaatataatgactgtctcttcagaagtgaatgctgaggttgataactgcagcattaggttaccagtcaaaaaggtgagcactcgttaggaggggtaggagagatgagctagttttaggcatttt

SEQ ID NO: 467784 - DNA, 655 bp, Homo sapiens
ttttcccctgcatgacaatgatgcctgctcgataaatataaagcagatttattatttttttaaatccatttcctaagcaacacacttgggctgtcattgatttttttgtttatgtctctctttttcttttttctttttttttgagatggagtcttgctctgtcacacaggctggagtgcagtggtgtgatctctgctcactgcgaactccacctccctggttcacgccatttcctgcctcagcctcctcagcagctgggactacaggtgtccaccaccatgcccggctaattttttgtatttttagtagagacagggtttcactgtgttagcgaggatggtctcgatctcctgaccttgtgatctgcccgcctcagcctcccaaagtgctgagattacaggcgtgagccaccacgcccagcctgtttatgtctctaaataagctctttctccttctttctttctctgctctgctgttaactataagagagttcaaaaattctagcactgtggaaacatttttccaggaacttaatataatgactgtctcttcagaagtgaatgctgaggttgataactgcagcattaggttaccrgtcaaaaaggtgagcactcgttaggaggggtaggagagatgagctagttttaggcatttt

SEQ ID NO: 467785 - DNA, 542 bp, Homo sapiens
gattttctagaaccattttggtttcaaatattgtagtccattgtctccataaacaacaaccatattttctaatttgggattcagaaaatctggtgaccacactcaagctttttttccatctactttcagtagaagacttttctctacaagaaatctacccggttctcttttggctaagtatctaaaaaggcactatatttattgttaagtatttgacatattaagaattataattggtggaatattatttagccttaagaaagaaggaaatcctgccctttgcaacaactttgatgaacatggaggacagtatgctgagtgattgccaggggcgggggaaggggaaaatgaagagacgctggccaaaggctacaaagtttcagttttgtaagatgaataagttctggaaatctaaaggacawcactgtgactgtagttaatactgtattgtatacctgaaatttgctgagagggtagatagatcgtaagtgttctttctcaccacacacagacacacagacacacatacacacacacaaaga

SEQ ID NO: 467786 - DNA, 632 bp, Homo sapiens
atatgattcaaagtagaaaaaatagtaatgcagcaaagtattagtaacaatttgatgtaaatgaactgtgccattaataatttttctatatttttcatatttgtccattttttgtttcattttctaaatagttaaattgtgcaaaattttctctacagtataaatgtctaccaacaactcagagagaaaatgtcctacagtggcatgtaacttcaaatgatccagacctttacataagtgctaaaaagtgttaatggtgtcatttctgggaaggaggtgccctagaagagggaaacagactggattctcaggcctttaaggttgtcttcttgagacagtctcagtgtcctaactatcagmaccgtgtatggagccgagacccaatttgcatatttcaacaagcttaattttctcaacagttatggctttcactttcccccatcttcttccagccatctctatttatacacccaagaaactttcagattttccttagtttcctctcataacacaaacgtgcctgagatgttatcaggcacatttatcattcacatgtctcttgaaggcgttcagaagaaatgaatggtatcctttctcctggaactgcatcccaccctggaaaccaaatgctg

SEQ ID NO: 467787 - DNA, 453 bp, Homo sapiens
taaaaccaagaaagataaaaggattggtccaaatctcctaaagtggcattacctagcattttatggcaccattcaggattgttccataataatgaaagaatctctctagggtttgtatctcttgaaaactcaatgtacagaattctttctgagttaaatattaaatttttcactggtgatttatgctacttacatgataggatcatgtatgcstacacttactacactttgttaaacagcataacataaaaatctaattccacagaaacatttgaacataaaggtatacctctctatcacagtccttatttatttctggttcttgagacattttctgcagatgcaaaaatagaaggttaatttgcttgttgtatttccgtgtatgtctcctcttttggaatgcatgttaaaataattttattcttaagtaatcaagtatggacatgaaaaatt

SEQ ID NO: 467788 - DNA, 453 bp, Homo sapiens
taaaaccaagaaagataaaaggattggtccaaatctcctaaagtggcattacctagcattttatggcaccattcaggattgttccataataatgaaagaatctctctagggtttgtatctcttgaaaactcaatgtacagaattctttctgagttaaatattaaatttttcactggtgatttatgctacttacatgataggatcatgtatgcgtacacttactacactttgttaaacagcataacataaaaatctaattcmacagaaacatttgaacataaaggtatacctctctatcacagtccttatttatttctggttcttgagacattttctgcagatgcaaaaatagaaggttaatttgcttgttgtatttccgtgtatgtctcctcttttggaatgcatgttaaaataattttattcttaagtaatcaagtatggacatgaaaaatt

SEQ ID NO: 467789 - DNA, 612 bp, Homo sapiens
tgtttttgttttatattgttttacagtgtggcctcacaccacttttgcttggcgtacatgaacaaaaacaggaagtggtgaaatttttaatcaagaaaaaagctaatttaaatgcacttgatagatatggaaggtatggttatttcttttaatctgtgtgttgttctagattgatagcagtcactcaagtcataaataataaattaataagatyaaattatacttattgggacatagtgatcagtatcaacacaaatcagttaagtagaaaagcaattatttggactgggcaacataaagaactgttttagtaggattcatcttctcttattatattgactgatgttatttgttgtatgatgtttttggttacatgatcttatgttagctaaagggatttcatattaattttatgaagtttgaactttaactttcagtttactttatgactcagtattgaactttttaaccctttctagtaggttttaacctctgtatcttatatgcttttccactaaatatgctgtattaaacataaataggagttgaaaatccttttgtcttttcaatgactctgctttaagttgctttctttgaagaatattaatgtta

SEQ ID NO: 467790 - DNA, 612 bp, Homo sapiens
tgtttttgttttatattgttttacagtgtggcctcacaccacttttgcttggcgtacatgaacaaaaacaggaagtggtgaaatttttaatcaagaaaaaagctaatttaaatgcacttgatagatatggaaggtatggttatttcttttaatctgtgtgttgttctagattgatagcagtcactcaagtcataaataataaattaataagatcaaattatacttattgggacatagtgatcagtatcaacacaaatcagttaagtagaaaagcaattatttggactgggcaacataaagaactgttttagtaggattcatcttctcttattatattgactgatgttatttgttgtatgatgtttttggttacatgatcttatgttagctaaagggatttcatattaattttatgaagtttgaactttaactttcagtttactttatgactcagtattgaacttyttaaccctttctagtaggttttaacctctgtatcttatatgcttttccactaaatatgctgtattaaacataaataggagttgaaaatccttttgtcttttcaatgactctgctttaagttgctttctttgaagaatattaatgtta

SEQ ID NO: 467791 - DNA, 612 bp, Homo sapiens
tgtttttgttttatattgttttacagtgtggcctcacaccacttttgcttggcgtacatgaacaaaaacaggaagtggtgaaatttttaatcaagaaaaaagctaatttaaatgcacttgatagatatggaaggtatggttatttcttttaatctgtgtgttgttctagattgatagcagtcactcaagtcataaataataaattaataagatcaaattatacttattgggacatagtgatcagtatcaacacaaatcagttaagtagaaaagcaattatttggactgggcaacataaagaactgttttagtaggattcatcttctcttattatattgactgatgttatttgttgtatgatgtttttggttacatgatcttatgttagctaaagggatttcatattaattttatgaagtttgaactttaactttcagtttactttatgactcagtattgaactttttaaccctttctagtaggttttaacctctgtatcttatatgyttttccactaaatatgctgtattaaacataaataggagttgaaaatccttttgtcttttcaatgactctgctttaagttgctttctttgaagaatattaatgtta

SEQ ID NO: 467792 - DNA, 525 bp, Homo sapiens
gtgacctccactccagagagcttacacattaayatgtatcatgaataatgtgagaacctgttcagtcagacctttccctagtcatagaagaagagactgggctaagagataatagcagctaacatttactgggcatgtcctgcttgccatgtgcccccctaaacacatgtgttttttgatacatgcattccccatcacaaataagtaagttgggccttgaaaaggaacttgtttaaatagttaattcagatcagaaatgggattcaaacagtttttttcatactccagaatgtgtattgctaaccattatgtgtttttgcagttcaaaggcagcaaagattttgtgaaaaaaaaaaaaatccttctgttttaaatatggataatgcataaaccacaataacgactaatggcttattttatgtgctctgggcaatattggcaacctccggagtagtatcttgatgacagtagttgctgagagagtgaattataggtattaggagtggaaaggtggagtggctaaat

SEQ ID NO: 467793 - DNA, 525 bp, Homo sapiens
gtgacctccactccagagagcttacacattaacatgtatcatgaataatgtgagaacctgttcagtcagacctttccctagtcatagaagaagagactgggctaagagataatagcagctaacatttactgggcatgtcctgcttgccatgtgcccccctaaacacatgtgttttytgatacatgcattccccatcacaaataagtaagttgggccttgaaaaggaacttgtttaaatagttaattcagatcagaaatgggattcaaacagtttttttcatactccagaatgtgtattgctaaccattatgtgtttttgcagttcaaaggcagcaaagattttgtgaaaaaaaaaaaaatccttctgttttaaatatggataatgcataaaccacaataacgactaatggcttattttatgtgctctgggcaatattggcaacctccggagtagtatcttgatgacagtagttgctgagagagtgaattataggtattaggagtggaaaggtggagtggctaaat

SEQ ID NO: 467794 - DNA, 525 bp, Homo sapiens
gtgacctccactccagagagcttacacattaacatgtatcatgaataatgtgagaacctgttcagtcagacctttccctagtcatagaagaagagactgggctaagagataatagcagctaacatttactgggcatgtcctgcttgccatgtgcccccctaaacacatgtgttttttgatacatgcattccccatcacaaataagtaagttgggccttgaaaaggaacttgtytaaatagttaattcagatcagaaatgggattcaaacagtttttttcatactccagaatgtgtattgctaaccattatgtgtttttgcagttcaaaggcagcaaagattttgtgaaaaaaaaaaaaatccttctgttttaaatatggataatgcataaaccacaataacgactaatggcttattttatgtgctctgggcaatattggcaacctccggagtagtatcttgatgacagtagttgctgagagagtgaattataggtattaggagtggaaaggtggagtggctaaat

SEQ ID NO: 467795 - DNA, 423 bp, Homo sapiens
ctttttcacccctttacctgcaagaatccttacatgttaggtgtgtctcttgaagacagcagatgtttggtttgtgatttttaaaaatttattatgccattctgtattcacattcagtgttaatattgagatgtggggtactgttccagtmatcatgtttgttgctacctaagactttgttttcttcattgtgttcttattttaaaggacctgtgaattttatgctttcaaggtgtcctattctggtgcatatcaaccttttgtttcaagatttagaaatccttttagcatttctagtctggtagtgacaaatctcctcaacctttttttgtttgagaaatactttattcctccttcattcatgaaacttagttttgctggataaaaaattcttggctgaccattattcggtttaaggaggct

SEQ ID NO: 467796 - DNA, 618 bp, Homo sapiens
gtgatggagaacttgaatccttcttagttgttgaaagacaaatgctttttcaaggatatcccatctgtctctagtgtgagcagtcagctctgatttcttaggcatgcttcctaaacgtcatgacatataatgacaggcaatctgttgctcagatgaaaaacaatttcttcacagacactccttttgggaaaacaaatatttgtttaggctgactatattgtggactgatttctttgtttgtccctgcatctgtctgcaaaatacacaaatgacctgggattgctggtgctgggaaatgaatgtggaataccaaacaattctgtagtggttttagggtataatgacatcattagaggacacccagaatatcaattctcttgacttgtttgtcttctgagtcggggttacccatttgtttattccrtaaatatttattgtacatctattatgtgccaggtactattctaagaagtggagatatgtaacatgcaacagaaacaaaaatccttgctctacactatgggcttctatctccgctttaccccagtgacccagtaaaaaaaagtaaatagagagctgtacgtactgccacaggtaatttgaccatttagcaacatt

SEQ ID NO: 467797 - DNA, 618 bp, Homo sapiens
gtgatggagaacttgaatccttcttagttgttgaaagacaaatgctttttcaaggatatcccatctgtctctagtgtgagcagtcagctctgatttcttaggcatgcttcctaaacgtcatgacatataatgacaggcaatctgttgctcagatgaaaaacaatttcttcacagacactccttttgggaaaacaaatatttgtttaggctgactatattgtggactgatttctttgtttgtccctgcatctgtctgcaaaatacacaaatgacctgggattgctggtgctgggaaatgaatgtggaataccaaacaattctgtagtggttttagggtataatgacatcattagaggacacccagaatatcaattctcttgacttgtttgtcttctgagtcggggttacccatttgtttattccataaatatttattgtacatctattatrtgccaggtactattctaagaagtggagatatgtaacatgcaacagaaacaaaaatccttgctctacactatgggcttctatctccgctttaccccagtgacccagtaaaaaaaagtaaatagagagctgtacgtactgccacaggtaatttgaccatttagcaacatt

SEQ ID NO: 467798 - DNA, 502 bp, Homo sapiens
agggaaagtgtggaattagagtctccacacagaatacccacagggaaactgcctattgaagctgtgggaatggtgctgctgtcctcccagatcccagaatggtagagtcacgggcaacttgcccccctcagcctggaaaagctgcaggcaccagaccccaactcataaatgcagccatgtgtgctgaacccagcaaagccatgggggcagggctatctgaggtctcaggagcccgcccctcacaccaggatrcagaacatggagccaagaaagattgttttgtagctttaaggtttaatttctgccctgttgggtttcaaacttgcatgggaactatcgcccctttcttttggctgatatctttcttttggaatgagaacgtttacccaatacccgtaccaccattgtaccttagaagtaaataacttgtttttagttttacaggcttataggtggaaggaacttgccttgagtctgtcaatgaaaagagtcaaactgtaaa

SEQ ID NO: 467799 - DNA, 502 bp, Homo sapiens
agggaaagtgtggaattagagtctccacacagaatacccacagggaaactgcctattgaagctgtgggaatggtgctgctgtcctcccagatcccagaatggtagagtcacgggcaacttgcccccctcagcctggaaaagctgcaggcaccagaccccaactcataaatgcagccatgtgtgctgaacccagcaaagccatgggggcagggctatctgaggtctcaggagcccgcccctcacaccaggatacagaacatggagccaagaaagattgttttgtagctttaaggtttaatttctgccctgttgggtttcaaacttgcatgggaactatcgcccctttcttttggctgatatctttcttttggaatgagaacgtttacccaataccygtaccaccattgtaccttagaagtaaataacttgtttttagttttacaggcttataggtggaaggaacttgccttgagtctgtcaatgaaaagagtcaaactgtaaa

SEQ ID NO: 467800 - DNA, 625 bp, Homo sapiens
tcttccaggtcactggctttccttttgttctctgaatctcattctccatccacgcaattgcaaaactgattctggaaacttatatttgtttatgtacatctatatcttttctaaaccactttaatgaggttagcattaagaaaaactttcagacactctgatctttagtcttaaaattttgccttttttttttctgttgtgaaatgtttagttgtcccctctgttggaattctcatgactttcttttgtgctttctgaggcagtagcckggatataactgtgaatagtatcagcagtgtataggtgacaaggcagtcacagatgtggatgtgtggtcttattacagtgtatgacccttctctcctgttcccaatttataacctatccacagctcaaagtgagaccattcctaaagggtaaaactactatgggacactaataagtccaaatatgtgtcttttaattgctaggggaaccagtcagatcaggtaaaaggatacatataattaatatgcaaatagaggggagaatgaaataatataaaatacacaattaatataacagaaaatattttctggtaagaaaatagacaaaatagaacaggcagcacaaatacaaaacaaat

SEQ ID NO: 467801 - DNA, 573 bp, Homo sapiens
cttgatgagtagcaacacgatatggagcaccatcaagattgcgggcagggcattctgtgagttcacaggtggtggtgcaggcagggaaggcaaattcatatgcagaatacctgttcgtcccagtgaggacaagtctgcctgcttcataatgtgaaaggtcaatgtattcagctacctacaggtggctggcaggtcccacaagcaatggtgccatcttaggggctcaatgttagtatctgttttggcagattagacactcagcagtaacaacagccaaatcagacaacaaagggatgccatgttgtagacttcatacatatcagacaacaaagggatgccatgytgtagacttcatacatagccttcattgctgccaccatggccactatgtccatgggcccattgagcaagcactggggtggctgatgaaagaggctaactgacatcctctgagtccttcattttgtccttctaattagcaggcccctccttagtaagatgcccttttgtggtattcacatgagacatacctatcttcatagtctgtgccaactccaagcaatccagctacat

SEQ ID NO: 467802 - DNA, 573 bp, Homo sapiens
cttgatgagtagcaacacgatatggagcaccatcaagattgcgggcagggcattctgtgagttcacaggtggtggtgcaggcagggaaggcaaattcatatgcagaatacctgttcgtcccagtgaggacaagtctgcctgcttcataatgtgaaaggtcaatgtattcagctacctacaggtggctggcaggtcccacaagcaatggtgccatcttaggggctcaatgttagtatctgttttggcagattagacactcagcagtaacaacagccaaatcagacaacaaagggatgccatgttgtagacttcatacatatcagacaacaaagggatgccatgctgtagayttcatacatagccttcattgctgccaccatggccactatgtccatgggcccattgagcaagcactggggtggctgatgaaagaggctaactgacatcctctgagtccttcattttgtccttctaattagcaggcccctccttagtaagatgcccttttgtggtattcacatgagacatacctatcttcatagtctgtgccaactccaagcaatccagctacat

SEQ ID NO: 467803 - DNA, 573 bp, Homo sapiens
cttgatgagtagcaacacgatatggagcaccatcaagattgcgggcagggcattctgtgagttcacaggtggtggtgcaggcagggaaggcaaattcatatgcagaatacctgttcgtcccagtgaggacaagtctgcctgcttcataatgtgaaaggtcaatgtattcagctacctacaggtggctggcaggtcccacaagcaatggtgccatcttaggggctcaatgttagtatctgttttggcagattagacactcagcagtaacaacagccaaatcagacaacaaagggatgccatgttgtagacttcatacatatcagacaacaaagggatgccatgctgtagacttcatacayagccttcattgctgccaccatggccactatgtccatgggcccattgagcaagcactggggtggctgatgaaagaggctaactgacatcctctgagtccttcattttgtccttctaattagcaggcccctccttagtaagatgcccttttgtggtattcacatgagacatacctatcttcatagtctgtgccaactccaagcaatccagctacat

SEQ ID NO: 467804 - DNA, 472 bp, Homo sapiens
accttacaaaaatatctaggatttttttttctttgagacagggtctctgttgcccaggctgaagtgcagtagtgtgatcgcggctcactgcagtctaaaactccctgactaacacaactatatatccagataaattcatattctggaatttcttctcaattttcactgcaggtaaaatttggaagccattataataaatatttttatgaggtttcctcagaaatgtggcatttaaaaattatttgtaattrgaagtgtaagttctcaaattatacctttaaatggggtttgcacaagtatgacttcaatagtgttcaagtagtcaagagggtgatgcaatattattgtgtagaatttttagactaaaatattcccaaaaccacaatccttttcttttcaatacatgtgaatcaatactggatataagctttgaaagtttttgaactgtatatttccattatcagccacctaa

SEQ ID NO: 467805 - DNA, 573 bp, Homo sapiens
atgtgttcttgttcttcttataaagccaccaaactcatgatctcatctaactcaaattacctcccaattytccccaccttcacatgccaacacattgagggttagggcttttctgggggtgggaaagagacacaattcagcccaggcacttcttatttcttctttgcccattacttcttttatctttaaaaaatatttcacaacagatgtgaaaatcttgtttgactagaggtgcaaacgtgtgtgtccgatgatgcccaatttaagtatatttagacagaaagatataagattctgtgagtgaaaaatgccatgcattaatagtgattgtctagggaaagtgtttctcattttcagtgaaagttggttttgcaatacaaatagtgttgtgtgtcccattatatgttatacattaaattagtagaaatacatgcacgaaatgtattaaaaacatgcacaaaatgcacatgaatggtagcagttatgagcacactccaaagccaaacagtctgggtttgaacactcattctgctacatactagctggatgactttggccaagtaaattgatttg

SEQ ID NO: 467806 - DNA, 455 bp, Homo sapiens
ttctgccttcaggccaacttctctgtttttacaggttcatgtgattacactaggcccactcaaataatccgagatagtgtccctattgtaaagtctaaaaacttaattgcatctgcaagtcttttttccatgcaaggtaacattcacaggttctggacattaagtggacatctttgggaggctattctgcctactctaaagatagtcatcagagcaagttgataagtaayttcctttcaaacttaaaaacttaggtataaaaatattttcataatgcaatattgttcagatatatattcttaagtattccgagtcatgagaaaaaaaaccctaagtaaagctaacaatgttacttttggattgaatttttactcactgaactcaaaaaattacccaataactattttatatcagttatttcagtctaatgaagaatgtagactatatcattagcc

SEQ ID NO: 467807 - DNA, 587 bp, Homo sapiens
tggagaataatagtacctatgccacaggcgagactgctctgatgattaaatgaaacaactcatataatgagagtaataatattatcttcctcttgaggctttgagggaattaaatagctggaaacatgtaaaacagagagagcagtttcggacacaccgtgcacataacacttacacccagtaaatggcagccctcattgtcattgttattgcctggtatcatatagttagttaaggagtttcaacaagattcagtgccaggaacacagagcgagtcattctgagaagtgctgtggcactgatcaccagtgcccaaactctcccaataggagtttcagggaaatgacaaagaggaactagcccttgaatggaccctgatccaatgagcccaatgtcccaggcaaacagtagagaggcagtagagggcagaggcatcccagacaaggaggcaaggaagagtatgcrgcacttgcagggaggaagggctcgttcatactgttagagggcagggaatgcagacagcttagaaatccccgtagggacagacctgcaccccagtatcagccacaccaaggagtgggcctttt

SEQ ID NO: 467808 - DNA, 639 bp, Homo sapiens
aagaacctgaggtacacatcactaagtaaaagcagccggttcaaaaaggctatctactgtatgattccaagggtatggcattctagaaaagacaaaattatagagacggttaaaaatatcagtggttgtcggagtttcggtgggggggcacggttggtgagaagggaagactggagcaaaaggcatttttaaggtggtgaaagcattccatataaaatgaatggtgcatacgtgatattatacacttgtcaataytcacagaactgtgcaacacaaagagtgaaccttaatctaacctatagactttagataatatgtgttagtattagttcatcagtcatagcaaatataccatactaatggaagaggtcaataagaggagaaagtacatgctggggaaggaaaacaaggaaactgtactttctgcttaatttttctataaacataaaacttctataaaataaaggccattttaacaaatgtaagcactgtatagtcaacaagaaaaagatcattatattgatagagattttgctgacaatatttcaactgaaagtttcctcacagtttgatccaagttagtgaggccatctccaagccttctcaaccacttgtcattcactgattaacaaatattat

SEQ ID NO: 467809 - DNA, 621 bp, Homo sapiens
ctatctaaactttacagagtgtacgattattttatagccatttttccctttggaaatgcacttctagaaaagcaatgaagaaataatacttgatttataaaattcaaccatacaaaagaaatcttttcagaaacacatcctgttgcwtaatttaaaaatactttggaagttgccttggaacatgaaaatcatcataaatgaaatagtcctcattatgctgttgactaagtcacagatactataattggaaaaactgaaaggacaagagaattttctcaggacagcaaataagtcatattttcatcatatattttgcttatcacatttgcttatcacatatctctatataatcagtcccatgggacatttaaattggttggtccagttgaaatgggattgttggaaattaatgcatttctagatattatatttcataatttaaaaaatttggaaatgaaatacaactcaagttcaatttcttagaagaaaattggactgtgacttgaatctgcaggatagagaactcagatgtattactgatttacaaccactgaatttatggttatttgtttatttattttctgtgctgcttcaggccttgattggaagttaacaaagttt

SEQ ID NO: 467810 - DNA, 621 bp, Homo sapiens
ctatctaaactttacagagtgtacgattattttatagccatttttccctttggaaatgcacttctagaaaagcaatgaagaaataatacttgatttataaaattcaaccatacaaaagaaatcttttcagaaacacatcctgttgcataatttaaaaatactttggaagttgccttggaacatgaaaatcatcataaatgaaatagtcctcattatgctgttgactaagtcacagatactataattggaaaaactgaaaggacaagagaattttctcaggacagcaaataagtcatattttcatcatatattttgcttatcacatttgcttatcacatatctctatataatcagtcccatgggacatttaaattggttggtccagttgaaatgggattgttggaaattaatgcatttctagatattatatttcataatttaaaaaatttggaaatgaaatamaactcaagttcaatttcttagaagaaaattggactgtgacttgaatctgcaggatagagaactcagatgtattactgatttacaaccactgaatttatggttatttgtttatttattttctgtgctgcttcaggccttgattggaagttaacaaagttt

SEQ ID NO: 467811 - DNA, 580 bp, Homo sapiens
ctcaaaccataactttttaatgtagccttcaaaactttttgcaaagtcatgtgttctatgaaatgaaaaattaattattttcacaaatgtcacccacagaaaagcagtcacagagcagatgaacattaattaggtttttaatatatttcttgcaacatattttttattcattaatcagttaaaaatagctttttaatgctactcaaaccttcacacagtcaaattgtggtggggatttatttttttagattgaatcagaaacagacatctattataaatatataaaaaaatgatttccaactccaacaaatcagattttcatttcacaagttggtataggttttctctacagaatttgaattttttcaggttgtaagttgtaataatatgaggcaacttscttctcattctctggagacattgatgctaattggactaatgatatccagcatctaatcacaaataagtttgggactaaatgtgtatcattgcagccactgagggggaaagagaagataggagcaaacaacagctcctgtctgaacaaaaccttactttctggattgttgaactgtaagca

SEQ ID NO: 467812 - DNA, 525 bp, Homo sapiens
aaggagagtggttaaagaaaggggaaaattatgtttgctgaatagaagggtaggagaaggtgggaggagaaaaggagagattttatgaggtcaaagaacaggtattgcagcggtcactgagtaattcagaatctaattgcttttcaacagtttggaccttacagaaatatgtgagaaaatataggaamaatctttttgtacagccttccctgagttcaattaattcagtcagaatgtagatcatttacttaaataccgaagtttgacaaattaaaggccaaggtgtttgaatcctggaaatacattcaattccccccaaaacatctcttaataaaaagtgagtaaacaaattgaatgcccttttcaatcatttcctattagattagtaaataaggaataagtaatgccatcacttgtgaaggttatcacctccagtatggtaattaccaaaatgaaaactggagtaaacatagaaaggaaaatagacctaggaaaatatgaaagtagaacctggtatacatccaa

SEQ ID NO: 467813 - DNA, 508 bp, Homo sapiens
gagacctgctagaacataagattaaacagtatcctgaatctcataacataatgccccaatgtccaggtttcaatcaacaattgctctttataccaaggatcataaaatctcaacttacakgaaaaaagatgatcaacaaattcaaacatcaagaggaaaaagacgttagaattaactgacaagggtttttaactttttatttgttatttttctgggtacatagatgtatatatttatggggtacatgagatgatttgacacaggcatgcaatgtgtaataatcacatggagaatggggtgtccatcccctcaagcatgtatctttggtgttacaaacatccagttacactattttacttattgacaatgatttttaaatagtcatcataaaaatgcttcagtaagcaatgcttcaataaactcttacaacaaatgcaaaaatagagaagactcaatgaagaagatggaaagactccagtggaaatttcagaactgaaacataccatag

SEQ ID NO: 467814 - DNA, 510 bp, Homo sapiens
tgataggttcaaagtatagggctggagaaagatctaccacgcaaatagaaagaaaaaaaaagcagatctcgctatgcttatatcagataaaacagactttaaaccaacatcagtaaaaaggaaaaagaagggcattacataatgataaaaggtacaattcagcaagaagacttaactaccttaaatacatatatgtatatatatatatrtgtgtatattatatatatacacacacacacacacacacatatatatatgcacccaatgttggaatactcagattcataaaacaagtacttctagacataagaagtatttaaaaagacttagacagccggacaataatagttagggactgacgccactgacagcattagcattagtgtcaacaccccactgacagcattagacagatcatataggcagaaaactaacaaagaaattctggactgaaacttgacatttgaccacttggacctaatagacatctacagaatactccatgcatca

SEQ ID NO: 467815 - DNA, 587 bp, Homo sapiens
ttccctgagaatattaccacagactaagagcacacatcattagacactaactgtaacagcacagccccattgaacatatgtgctgtctgcaygggaggtctgagggctaaagctagagcatgcagcaaaaaatgtacgaaaagcagtatacttctgaaatactttactgaatattaacatccattaaaaactttctttgtactgaacacatctcataacgtttttccatctctcccctccctcactctgtattatctgtattttaaacaattgagatagctaaatagttctcgagtaactcacaaaaattacgcctaaacacaattctttaatacgatgtactctgagtatttataagtagtaaggcttcccacaagaacctggaaattagaaagataagaatgcctcgtaagtgtaaaactttaaatgcctaatggaccacagtagagagcaaagtcacctttaaagatgaatgaaagaaaggcctgacagacttggctgctatttgattaattatattaccatgctttattaaatgtgtcaatcaaaaggggaattggccaatcaaatgcaaatggaaaaacaag

SEQ ID NO: 467816 - DNA, 463 bp, Homo sapiens
tagacatgtgacaaaacaaaaagggtatgatctaatactaatagactgagtggagaaacccatcaaaatctgtctatccatatttttcttgtcctctctctgcagcattgttcctccagggtacagggcasgacttcttaaattagagtcttatgacctacaaatcagactaggtaggtcagagaatttctttatggccagctccaagaaaaaaaaggtaggggaagatgtctgctttggggagaaaaaggagcaaatgaaagaaggataggagaaggtcagatagagagagaaagagaaagagagagattgtattttctgagaccttctgaaaccttaagggtcccaacattttaacaagaactaaaggagttatggagttatgagccaggaactgtagacaagtatcagagcaataaagagaagtacacataaaacaatgtctgtctgtgatattatgtag

SEQ ID NO: 467817 - DNA, 566 bp, Homo sapiens
ttggaatgctttgtaacataacaattgttaactaatgcagtaagcayagatcaacttactgcaaagaaatatttcccatatctaggggctggagaacagggaggaaactagcacttattgactattcaccattcatgcctttccacgttttaaatatatgctattatatttaacacaacaatagcaacataaaggagatactctttccccatttcataaataaagagacaggcaccaagttctgctgattatctaaatgcaataaaatataatgccaaataaaatgaaaaaaacacaagcgaggagacatttaatctttagaagatgatatgaggaatgttgcaattacctgtctgaatttcatcattggtggaatgtccaaaggtacaaaacagcagacaaaataatgagaacacattctctgggaaacacagacaagttaaaggaagaatgttttgtctcagccttgttttggccctgcgctcagcctcacttttaactcattttacaacgagtttgataaattcaggaccagtacttaagccaagatcaatactgtgacttcc

SEQ ID NO: 467818 - DNA, 566 bp, Homo sapiens
ttggaatgctttgtaacataacaattgttaactaatgcagtaagcacagatcaacttactgcaaagaaatatttcccatatctaggggctggagaacagggaggaaactagcasttattgactattcaccattcatgcctttccacgttttaaatatatgctattatatttaacacaacaatagcaacataaaggagatactctttccccatttcataaataaagagacaggcaccaagttctgctgattatctaaatgcaataaaatataatgccaaataaaatgaaaaaaacacaagcgaggagacatttaatctttagaagatgatatgaggaatgttgcaattacctgtctgaatttcatcattggtggaatgtccaaaggtacaaaacagcagacaaaataatgagaacacattctctgggaaacacagacaagttaaaggaagaatgttttgtctcagccttgttttggccctgcgctcagcctcacttttaactcattttacaacgagtttgataaattcaggaccagtacttaagccaagatcaatactgtgacttcc

SEQ ID NO: 467819 - DNA, 566 bp, Homo sapiens
ttggaatgctttgtaacataacaattgttaactaatgcagtaagcacagatcaacttactgcaaagaaatatttcccatatctaggggctggagaacagggaggaaactagcacttattgactattcaccattcatgcctttccacgttttaaatatatgctattatatttaacacaacaatagcaacataaaggagatactctttccccatttcataaataaagagacaggcaccaagttctgctgattatctaaatgcaataaaatataatgccaaataaaatgaaaaaaacacaagcgaggagacatttaatctttagaagatgatatgaggaatgttgcaattacctgtctgaatttcatcattggtggaatgtccaaaggtacaaaacagcagacaaaataatgagaacacattctctgggaaacacagacaagttaaaggaagaatgttttgtctcagccttgttttggccctgcgctcagcytcacttttaactcattttacaacgagtttgataaattcaggaccagtacttaagccaagatcaatactgtgacttcc

SEQ ID NO: 467820 - DNA, 563 bp, Homo sapiens
agcagttggatagttggtctggatctcaaataagagagtaggaattactgcctccrgaaactctgttataatcctagtaagctggaattagagctgtaaattccacaaaggaatttacaggcattggtctaattcctgcttgcatactcagactcattttccatgaacatatagtagggcttttgaaaacagaaatattgagtggttactaggtgaagtactatttcctggagctttattttattgtatttagcagtttggttgatgtgattatgagatctaaatattagtctgaggaatcagtcgttactgaatctgttgagaaaaaagaaaaaacatacatcaatagatcaaatcaactacctagagggaaataataaaataatgcatacattaaaacttcataattaagcttcttgtcatatttatagtttcccccaatgactgtagtacttatcaagtaggttaaattaacaaatctataaagttttataccaataactttatctcattttattttagagacagggtctcactctgtcacccaggaagtaatacagtgg

SEQ ID NO: 467821 - DNA, 563 bp, Homo sapiens
agcagttggatagttggtctggatctcaaataagagagtaggaattactgcctccagaaactctgttataatcctagtaagctggaattagagctgtaaattccacaaaggaatttacaggcattggtctaattcctgcttgcatactcagactcattttccatgaacatatagtaggrcttttgaaaacagaaatattgagtggttactaggtgaagtactatttcctggagctttattttattgtatttagcagtttggttgatgtgattatgagatctaaatattagtctgaggaatcagtcgttactgaatctgttgagaaaaaagaaaaaacatacatcaatagatcaaatcaactacctagagggaaataataaaataatgcatacattaaaacttcataattaagcttcttgtcatatttatagtttcccccaatgactgtagtacttatcaagtaggttaaattaacaaatctataaagttttataccaataactttatctcattttattttagagacagggtctcactctgtcacccaggaagtaatacagtgg

SEQ ID NO: 467822 - DNA, 540 bp, Homo sapiens
atgctttccatataatccaactgaaatgtaacagctgttttctggagataatttttccattttgtgagataataaaaatatatcaaaaacatatcgttcataatttgcttagtgtgtgccaaagaccatgcctaagcctttaagtacattgtctcattcaaccctaaaaataattcttagaggtaagtatcattttcctacagaggctaagtagattttcccaagccacctcactggttagtagtgtattcagtatttaaactcaagtttttaacactctgtacccctagrataaaaggtcaaaatgatgaaaatgagaatccttgtaggaatgaactattttatgtgtctactttgagacagacacagcctttatagacttaaactgtggtctgatttccaaagtaggcaagattatttatacttggattatctataacatttttcttgtatttagcacttatatatttattttaatagcaggtcaaattcatgactttaaagttaacactactgaagggtaggctaagtaaaacaaaa

SEQ ID NO: 467823 - DNA, 483 bp, Homo sapiens
acatagatcattggattctactctataaatagtttgacatattgcttttaaatttttaaaaagttaatacatccatatgccataaaatttaaaagatagcacacattcttctgcatcttayatttaaaaacattttcaatcggcaaataagtacatatatttatggggtacaatgggatgttatgatatgtgcatacattgtggaataattaaatcaggtcaattaacatactcatcccctcacatacttaacatttctttgtggtgagaacatttaaaatctacttttagcagtggtggtgatcagagggtgaggatgtggtagatggggaaagaaagatgttggccaaagggtacagaaggaataagttttagtgatctattgcacactatggtgactatagttaatgtgtatttcaaaactgtaccttgcattattcacttaacggttaatcttggaaatggttctatgtcagtagagag

SEQ ID NO: 467824 - DNA, 582 bp, Homo sapiens
aatataacatgctagattcaataacaatctcctgaaaagtattggtcacttatttccctttttctcaaaaacaacattattttccagggtcagggctctcagctgaaattatatctctcctgtgcytccaaactaaaaaaggggactgtgatggttcatcttaggtgtcaacttgattggattaacgtatacccagacaaaaggtaaaaaattatttctggctgcgtctgtgaggaggatgtttcttgaggaaattggcaggtgagttgatggactgcataggaaagatctgcctacaatgtaggtgggcatcattcaattggctgggggcgagggggccaagatagaacaaaaaggcagaggaaaggtgaatgcatgcttgctttctcctggagcagagacactcttcttctccagcccttcaacatcagaactccaggttctctggcctttggactccaagacttgtaccagctgcttcccaggttctcacaccttcagatagcctttcataggacttctcagccttcataatcatgtgagccaattccattaataaagctcctctcctctctctctctc

SEQ ID NO: 467825 - DNA, 572 bp, Homo sapiens
ggaagcaaagtaaatgcactaacctgtggcaaaaaaataaagcaagggaaaggaaggcaatgaatctgagagcaaagaaacagctgacctgcaacccttcatatggtgttttcccatgtatcttcacttgatgacaaaatactggcgaatctacttgataatatcttaatgatgtcaattcactatttctccattcacaaagatgtgtttatatattacaagagtcagaaaatgttggtgagtctcactgaattctttttttcttccatgtgtatgctgttctttgtgaaaaagccactgcattgtttcaaatatctctgagaagttttcatggagctgctccaaacagcttaagacttgttcagartcagtcactctccaaaatttcctaaccagggccactgatgttgctctttatgctgaaagataactatcatcaaggacaggaaacccatcagcctgctataaactttgttacagagttctctgagaccaaaccaaaattactacctaggaccttgaacctgagcctaagtcagtttgacagcaaaatactttaagaggttgaaagt

SEQ ID NO: 467826 - DNA, 608 bp, Homo sapiens
ttagcatacatatatagcatacataatatatacatatatgtatactactagtatatatactaataattaagtatatatactagtagtatacatatacagtatacatatatagtatatacctgtatactatatgtatatagtatatgcatatactgtatatagtatatatagtatatatatactatatatagtatatagtatagtgtatatakagtatatagtatatatactgtatgtatatagtatatgcatactatatacatatactatctatactattagtatacatatatagtatatattgtatatatgtatattatatatacatatatagtatatacgtatatatatataatatatagtatataatatataatataatatatgtgtatgttatatatacacatattacataaatatatgtatatactatatactatatgtgtactgtatatgtatatataatatacatatatacaatactctatatgtataccaatagcatatatactaatagtgtatacatatatacactattacatatatacagtatacctatacactaaatatacactattatatacagtgtgtacatatacactattata

SEQ ID NO: 467827 - DNA, 539 bp, Homo sapiens
tgggttcacgccattctcctgcctcagcctcccaagtagctgggactccaggcacccgccaccacgctcagctaattttttgtatttttagtagacacggggtttcaccatattagccaggatggtctccatctcctgaccttgtgatctgcctgcctcggcctcccaaagtgctgggattacaggcgtgagccaccacgccmggccaatgatgttctcctgctacagcctaatagcttagaatttatatgtgattggtcccaaataactgagtagggtacaggccagagcccaagccataaaaactcaggagaccctcggcccttatggaatggacattcgcaaaggcagggtcctgagagcgacaggcaggcagcccatgcagagtggacagtcacctactgaggcacattttggaatcctggacatgggacacacaacactatcacttgaatgttttcaaagcccaaaacaatggcctcaaatggatcaccagaggctggaggtgagcccaggaagctccagatggtttttgttgg

SEQ ID NO: 467828 - DNA, 685 bp, Homo sapiens
cacctttttggtcaggcaatactagggaaagaaatgagtgctgccgaggattcaagcatcaagtgctaacacggggccaggaaggcaacacaaactccctgttcgtccaggagctctccattcccagtgagctgatgggatacagggagctggctttagccctctgcacaagagaactggccagagctgggtgggaaatcaggactttgccagatgggtcctctttctcctagaattgggacttttaccctttttgggtcataaaccttctggcagtttggcgaagcccatagaccttttttcagaatatatatgtgtttcttttttaatgctttaaaatgacaagataaaatgatgggtctaataattgctctaattctgaaataatgatgagtatacatgatatttcaaaatatgtaacaatrcaatgttatgaaaatacctgtgaattctattggtgacaaagtcacaggtactgtgaccactctggttattgcctttattcataattgaagaaaacactaactttcagttatagcagaggtcagcaaacttttctgtaaagggccagatagtaaatattttaggctttgtgagccatatggtctctgtcagcaactattcaactctgctgatatagcttgaaagcagccacagataatatgtaaatgaatgagcatggctg

SEQ ID NO: 467829 - DNA, 550 bp, Homo sapiens
ctgggatgcaaacacaggtgtctttctgactccaaagtgatgttattagctttttaacatataattagaaagatatttggtctttgctcctggttcctggtacaaggctcttaaaacccttggaatttcctgaataataagggtgatagaatcatctttgttctaatgagctgattcttagtgggaccctagaaggcttgtcaccagaaagaccaagccttggttagaagcttggagcttccaacccccgcccctcctccccacccacccaacagggagggcaaaaggggtgaagattggatcagtcactaatggccaatgatttaatcaatygtacctacataatgatgcctccttaaaaattaaatgatggggttgggaagcttctgagttggtgaacacatccacatgctgggagaggggcacactccaacttcatgaagacaaaagctcccatacttggagcccttccagacctcaccctatgtacctcttcatctggctgttcatttgtatcctttatcatgaactggtaaatgtaagtagagtc

SEQ ID NO: 467830 - DNA, 622 bp, Homo sapiens
ccctctcacgttttgtcaacgcgaagggagctgcatattttgtagtttttatttaatgaaccaattacttcattgccaaaataaaggatgttttattcctaagaccctgaatgaggatctataaaccctattaaaattagttattagattttagctattataaaaattcttttaatttagtttggtttatattgtgtctaagtttgagctcctatggaaactactgtaacacagtttgtgttctgtctgaattcacagtaaacctagcaatgcatattactgtcagtgtgatctactgcaaaaactgggtacctaagatgacttcgtacattttatayacataaatatgtaaatatttcttgagtgacatttgcatgaaaataattgaaataattgaaggcaaagttcatgcagaaggaatatttaagagaggtttgaaagaaacaagatgggcttttctacatgactcctaggtaccttcagaatttgcaacaaagtaggcaaagagagtaaattattttgtgcaatattagaatgcttgcttgtaatacacacacacacgcacacacccccaaatgtctgctggagagaaattgatgattgcatattattcatgtcaaaa

SEQ ID NO: 467831 - DNA, 595 bp, Homo sapiens
aaggcatccagaaaatactgtgcatcactaggattctaattatgattgccattaaccctttacctgactttgggcaagtcattgtactttggaggactttaattatcatctataaaataagttaaatcatttaatgtttctcaaaatgtggaccataaatcaataacactaataatatgtaggcttcccaacagcagagatttagctgttttgtttaatgacaaatctcctggaacctatgagagtgtctggcacatgaaaagtgctcagatattggttgtattaataaacaagctaagtgaaataatatgtgtactagatttcagaccataagatcaaacacaaagtaactgctctgccatggactgtagtcaccattagtagcttctggcatcctcatctatttagagtgaccattcactgtgttgtctaaaccacaccattcttggagtaaaaagatcactattaataattacagcaggacaacaggcattaccaaggcctggcccaactataccggaccacaaarccagtttgtatctgtttgtactccaggttaatttctaccatgcccccacacacctttgtaaaaacc

SEQ ID NO: 467832 - DNA, 502 bp, Homo sapiens
caagaatgcagactgggggcaatgttagcatgcctctcctatttggaaacacaaaacaatgtgtagaaatacacatggtgaactttttccaagatgcaatgcaagaacttaacgggaaaactgaaagaaaccacagaccttttgaaagaagcagcaggttgcagcctacaccgtgagccaggggaaaaaaggtaagtccccagagtataagaagggggagaactgcctctgggaaatacacttccaccagagaacccagcaatccacaccatggagggaaggccttaacacttcccagcactgaagctgatttagggagtggtggggaatatataaaaaggagcagcagtggggagtgctttgcatgcaatccctgtctccagcatgaatggagaaaagccattcctgattcaaccttgcwggaatcttgtggaagcctgccagctaattcaggcagcggttgttggttgcaagaagctcccaactaagatttgtaatatag

SEQ ID NO: 467833 - DNA, 647 bp, Homo sapiens
attttctatttcctttataaatttattctacttcacaacatttagcaccaactgacgtaaatatatatgatgaraaaagaagagatccttagtctaggaaaatcagggaaatttccatattgaatattttcatcattaacattgacgatattattttaaagaagtgtgccttcacaacaagtagcattatacttgagactctaccaaatgttacaaaccttaaaaaagaagagacaatagatacagacacatttaggatagttatacaggtatcaaccatgctaattcaataggctaatagataaagaaaagtgaggctgacttttaggtatgttttgtttgttcatgaactactgtcacttgcccatgctcttcatcacttctatgctatagatattctctctatgctatattagctctattctaatcatggctattctatgaagattataaccaaagagttgtattcaacttctaatatattaatttgtttctcattacttttgtcataattctcttatacatattaaattggtctgttatcatatttaaaatgtctaatattaagagtgttcaatctaagtaaatggtgctgatgattatggtggaattttgacaagttgatttctgctacctaaatttattca

SEQ ID NO: 467834 - DNA, 647 bp, Homo sapiens
attttctatttcctttataaatttattctacttcacaacatttagcaccaactgacgtaaatatatatgatgaaaaaagaagagatccttagtctaggaaaatcagggaaatttccatattgaatattttmatcattaacattgacgatattattttaaagaagtgtgccttcacaacaagtagcattatacttgagactctaccaaatgttacaaaccttaaaaaagaagagacaatagatacagacacatttaggatagttatacaggtatcaaccatgctaattcaataggctaatagataaagaaaagtgaggctgacttttaggtatgttttgtttgttcatgaactactgtcacttgcccatgctcttcatcacttctatgctatagatattctctctatgctatattagctctattctaatcatggctattctatgaagattataaccaaagagttgtattcaacttctaatatattaatttgtttctcattacttttgtcataattctcttatacatattaaattggtctgttatcatatttaaaatgtctaatattaagagtgttcaatctaagtaaatggtgctgatgattatggtggaattttgacaagttgatttctgctacctaaatttattca

SEQ ID NO: 467835 - DNA, 534 bp, Homo sapiens
tcacatattcctcagtaacacctatctcattaagttcttgagaagagaaaatcaggcaaaatatattattgacatgtattatggccaatgttggagaactacaattttctaaaaaaatttctttccaacccagaatatctcttcacaaatgtagaagagataaaaaaattattgaataagcatgaaactgtgtggtgtctatcacaagcattcttctaaaagattgcaaagacaagtggaaatctckctattttgcatagccaagcagattcaacccattacatatatgctttcaagataaatcactactagttctcaggtaagagaaattgatggcacaatttgttgcacatagctcaacctaaatgcatttggtaattagggtgaggatctgtgtttgccaattgactttatacaaagaaaaatacatttcttaaatctttatgaccagaaatcattttgagagaggtgtctgctgaagttaggctcctacctttctacagaaaatgagagatagaggcactgtctgcctga

SEQ ID NO: 467836 - DNA, 534 bp, Homo sapiens
tcacatattcctcagtaacacctatctcattaagttcttgagaagagaaaatcaggcaaaatatattattgacatgtattatggccaatgttggagaactacaattttctaaaaaaatttctttccaacccagaatatctcttcacaaatgtagaagagataaaaaaattattgaataagcatgaaactgtgtggtgtctatcacaagcattcttctaaaagattgcaaagacaagtggaaatctctcyattttgcatagccaagcagattcaacccattacatatatgctttcaagataaatcactactagttctcaggtaagagaaattgatggcacaatttgttgcacatagctcaacctaaatgcatttggtaattagggtgaggatctgtgtttgccaattgactttatacaaagaaaaatacatttcttaaatctttatgaccagaaatcattttgagagaggtgtctgctgaagttaggctcctacctttctacagaaaatgagagatagaggcactgtctgcctga

SEQ ID NO: 467837 - DNA, 534 bp, Homo sapiens
tcacatattcctcagtaacacctatctcattaagttcttgagaagagaaaatcaggcaaaatatattattgacatgtattatggccaatgttggagaactacaattttctaaaaaaatttctttccaacccagaatatctcttcacaaatgtagaagagataaaaaaattattgaataagcatgaaactgtgtggtgtctatcacaagcattcttctaaaagattgcaaagacaagtggaaatctctctattttgcatagccaagcagattcaacccattacatatatgctttcaagataaatcactactagttctcaggtaagagaaattgatggcacaatttgttgcacatagctcaacctaaatgcatttggtaattagggtgaggatctgtgtttgccaattgactttatacaaagaaaaatacatttcttaaatctttatgaccagaaatcattttgagagaggtgtctgctgaagttaggctcctacmtttctacagaaaatgagagatagaggcactgtctgcctga

SEQ ID NO: 467838 - DNA, 578 bp, Homo sapiens
gcatgtctgtcatgtgggcctgtcaagtccataaagatggggaaaggactaaatatgagaactaaataagagaaagacagaaggaactattttttttttttttttgagatggagtctcgctgtgtcgccaggctggagtgcactggcatgatctcagctcactgcaacctccgtctcctgggttcaagctattctcctgccttagcctcccaagtaactgagactacaggtgcgtgccaccaagtccagctaatttttgtatttttagtagagatggggtttcaccatgttggccaggatggtctcgatcccttgacctcgtgttctgcccccctgaaccccccaaagtgctgggataacaggtgtgagccactgcacctggccgacagatggaactattaagaaggaagatacagtatataaaaacaggaaargaatcagtagaaactcgaggataagtttacaatttagatatacccacattgaaataaaagcaggaatgtgtatactaaagtcaaatataaatgacctttgattagcaactatttaggattattcatctacagttttttaaaagt

SEQ ID NO: 467839 - DNA, 682 bp, Homo sapiens
tatggtttaatttctgagcttaggggtgttacaacaaaaacggcatctttgtaaggtcagctctaaacttaaactacccagaaagataaagaaatgcactttctgatttttttcctagacaaggagactccataaaccttgataactattttagttttccatctacttcttagttagcaaattgtcctcaaattgaacctaaattcttcttgctgcaatagaaacccatgtccctttttttcttatttcaaacagctgctaaacactacttatccagtagcawttagcctgaactaattttcaaagtctcctgagaggcactcattttccagagatttgggtggggattctaggcggggtagaagggccaggagctggtgggaacgtggcttgaaaaacaccatttgtctttacaagcagaatgcggagataaagaaaactattacctgattgtaagaaatacacaaaaatgtgtccttgctttacactctggtatttcttaaacatttactgaattagaatgtctttagagcttactcttcttctttgttgtttaattaaaaatttaaattgctgtagcattttaaagctgggaattattttggtccattttttgccgtcacctcagtttatagatgaagacaatcaggaaaagacagaagttaaatggtgaagagcaaag

SEQ ID NO: 467840 - DNA, 473 bp, Homo sapiens
agagtagaatggtggttactaggaacttgaggcaggaggtaggggtgagaaatgagaaggggatgtttgtcaaaatgtacaaagtttcagttaggatgaatagttctggagatctattatacagcatggtgactaaaattaataatgtattgtatacttgaaaatgactcagcatagatcttaaatgttcttgtcacaaaatagaaataactgtgctaaatcttatggatatgttaattagcatgattgtggtaatcatttcctaatgtatatgtatakcagaagatcatgttgtacactgtaaatatatacagtttttacaaatggccaacaagtatatgagaagatgctctgcattattaatcatcagggaaatgcaaatagaaaccacaatggcatataacctcacacatgttagaatggctattaacaaaaagacaaaagataacatgtattggcaaggatatgctgtg

SEQ ID NO: 467841 - DNA, 614 bp, Homo sapiens
ttcttagtctaagtaaactgctctggaacttctccttactttcttttgaccccaccacgagcgttaaaattgaatttcttatagggcacatttttttaagagaaattttaatctcttcaagaaagttcaggrtaacgaatgaaaaacataaaattgctgagctgcagaaaccaagcagtagtctgggttttatacaggtcaagcaacccactctcacagagactcactacatgcagggtctctgtgccatgcagagagagctgtaaaggcagtaccagttagaactataatttcccatctcttccatcaattattagtgttggagaactaggaaatggggcaagtgagttgggctgccttccacctggagcctagaaagaggcttcgatccaaagagacagaagcactaaaaccacaggccttctatgttggcaaatagtgaatgcatctagtgctcttaaaataggagagggataagagggaaaaaattatataggcctatggaagaaaaattggtccacatgttaaaagacatggatgaaaagcaggcactgaaagtcatcctctgcaggaacctaaagaaaagttaagtgttagagaatatttgccagctt

SEQ ID NO: 467842 - DNA, 586 bp, Homo sapiens
tagtttgttcaagtacttagtactgtcacttttaaaacttggggatttagaggtctctactcttttacttatgtaatatttttcctggagatctttgtattgctttgttgtagcattagagatagctttcttgcttagaaagttaactctactggccgcttgcagtggctcatgcctgtaatcccagcgctttgggaggccaaggcaggtagatcatttgaggtcaggagttcgagaccagcctggccaacatgatgaagccctgtttctactaaaaaatacaaaaacttagacgggtgtgatggcaggcgcctgtagttccacctacttaggaggctgaggcacgagaattgcttgaarctgggaggtgggggttgcagtgagcataggggtgagactactccgtctcaaaaaaaaaaagttaactctgtgagagatgattataggaaaaatgtttatcttattaactgtagaaatgatcagagtaattttctttttatatttttgttttatgcttttacaagtcagtcattaagtctactctaaaatgtctattaaatagattttgacttttatattctgcatc

SEQ ID NO: 467843 - DNA, 486 bp, Homo sapiens
tgctcttcaaactccagaggcacatttaaacctcgtcaggtggtttcgataaagtatcctttttatttgagctaaggagacaggratgccactatctttgcctgggagagaaggaaagaaacacccaaggcactccaacaattctccaaagaaaacaggtcccccctattttccccctcatcactagccctcttctactactaattccctcccaggttagatttcatggtacatactttcagtaacctccttgccaataccataaattctcttgtctatcttttcctcacatccatctggaaaaacctcaatcctggatgaactcaacagcccacactctccatgcctgcaccaaggcagctgagccactggcagctgaagtaagaaacacaaaagggcaggctgaaagaactataattttaaggtcagtcactctgggccctccacactgccaacaatgctgttatagttatttggccagctggc

SEQ ID NO: 467844 - DNA, 546 bp, Homo sapiens
agctgcctgcagggagttttgttgttgtctccagttaatactactaattcattttcacatgggtactctgtgagttaaacactttacatttatatgttttttttttttgtaaagattccaacatgcctaattaagaataaacccaagggaaaaaaaataaaaccaatgatttcctttcagaggcttccagggccctttgtggtgtggtagggggaagggaagggagtctctattgctagtcacaggctactaaggtgcctaccataaaagccttcatgagggaatgttatgccctacctggataaatagcagatttcaaaaacctaagggcttgggctcaatctggcctgttttgtgtttttgtgtttttgtttttttgttttaattgggaaatgtccttataaatctgggcatctgggttttctggaaaaattggaagacctggaaacagcgggcccagattcctgcaatagcttcagttacttgcygcaaggagcagctgttcctcttcactttcccagcaggcttcactcatttccattacct

SEQ ID NO: 467845 - DNA, 552 bp, Homo sapiens
cttcagccttgggaacactcagtgtactcaacaggtactcagaaatayacgctgaatgaaggaaggaacaaatgaatgaactagagcttctgaatgataggattccaaccaaccaacagagattggtcatgagtgttagatgactctactaaccctgtgttgtcataaagcagtagtcccaacgagcggtaattttattccccgcttgccccaacttggggctgtttggcagtatctgcaggcagttttagttatcatacccagcatctgtgggtaaaggctatggatactgctaagcattctacaacgcacaggacagtccccacgacaaagaattatctagctccaaatgtcaatagtgctgagactgaaaacttaatgatctccaggtattttcgttctctgcatataacccacctgtcttcagaggccctttatggggtcctggctggggagtctctggatccttagagggtcaacaacctgggagagcccaggtccaagattttagaattgtgtggttctaaatgatcttagcagccctcatgctat

SEQ ID NO: 467846 - DNA, 574 bp, Homo sapiens
aaaatcagcatttcctaaatgtgttctgtaaaacatttatcagccaaaatgtttcatgttaaaactacctgatttaagttgctgagaaggtctgatgataaaaaacatgttgtttaacccagaatttcccaaactaatttcacaatggaatcatattttttccatgtaatatgtgttaatatcctgggaactgtttttctgcagaagagattttggaaaacactatttgtgcccctaaggaccctagtaagtccatcattctagaaacaaactactaagcctggctttctacaagarcttcattttatgcatcttttgtcttcaggcctctttagcagatgtttaggtaccttgtcaagtaccttgtcaataacacatgccagggtccagatttactgatgggtgtcctattccctaccctagctccacaaagagaattatgctttgttaacttagcctcttcctctatggagatttgtgcccttaaccaccctgttccaggctttttaaatgcaaatcatggagttggatgaaaagtgctacaactggaaagatggcaggaataaaagagtaa

SEQ ID NO: 467847 - DNA, 574 bp, Homo sapiens
aaaatcagcatttcctaaatgtgttctgtaaaacatttatcagccaaaatgtttcatgttaaaactacctgatttaagttgctgagaaggtctgatgataaaaaacatgttgtttaacccagaatttcccaaactaatttcacaatggaatcatattttttccatgtaatatgtgttaatatcctgggaactgtttttctgcagaagagattttggaaaacactatttgtgcccctaaggaccctagtaagtccatcattctagaaacaaactactaagcctggctttctacaagaacttcattttatgcatcttttgtcttcaggcctctttagcagatgtttaggtaccttgtcaagtaccttgtcaataacacatgccagggtccagatttactgatrggtgtcctattccctaccctagctccacaaagagaattatgctttgttaacttagcctcttcctctatggagatttgtgcccttaaccaccctgttccaggctttttaaatgcaaatcatggagttggatgaaaagtgctacaactggaaagatggcaggaataaaagagtaa

SEQ ID NO: 467848 - DNA, 574 bp, Homo sapiens
aaaatcagcatttcctaaatgtgttctgtaaaacatttatcagccaaaatgtttcatgttaaaactacctgatttaagttgctgagaaggtctgatgataaaaaacatgttgtttaacccagaatttcccaaactaatttcacaatggaatcatattttttccatgtaatatgtgttaatatcctgggaactgtttttctgcagaagagattttggaaaacactatttgtgcccctaaggaccctagtaagtccatcattctagaaacaaactactaagcctggctttctacaagaacttcattttatgcatcttttgtcttcaggcctctttagcagatgtttaggtaccttgtcaagtaccttgtcaataacacatgccagggtccagatttactgatgggtgtcctattccctaccctagctccacaaagagaattatgctttgttaacttagcytcttcctctatggagatttgtgcccttaaccaccctgttccaggctttttaaatgcaaatcatggagttggatgaaaagtgctacaactggaaagatggcaggaataaaagagtaa

SEQ ID NO: 467849 - DNA, 541 bp, Homo sapiens
tttgaatgacttctattgcccattagaagtttcatgcaatttctatcaaactaccaacatcatctttcacatgactagaaaaacgattccaaaattcatatggaaccaaaaagaaggctgaataaccaaagcaatcctaagcaaaaaggaccaagtcggaggcatcacattaccccacttcaaactatatcataaaactacactaaccaaacaccatggcactgttacaaaaacagcatggtactggcacataaacaggttggaagtgaatgcattgtataaagaattatacacactrcctttgcctcatggttaggggctgagcacagccagaatagaggttataggctggaagtcatgctctggacaaagacacatttattcattttctaaaacgtgtaaaagatcaatggaacaaaagctcacaactggcctagcggaagaaaggcaacaatggaacaaaagagagaacccagtaataaagccataatctacaggcctctgatctttgagaaagtcaacaaaaataagccatggggaa

SEQ ID NO: 467850 - DNA, 579 bp, Homo sapiens
ttacttattattaagtactgactctgtacacagtaagcatgtaagtctacttgtataatgatctcagtctttttttcttaacaattgcacctctcttcttcctcaacttcatacctggagtttttacccaaatgacacttcttagccacaaagtcaagggcatgtgctcatgttttcatcatggaccatggctaatggaaacacagttaacaggtcttaatgtgcagcctccacagtccacttgatttgttcctggttgaataggcagaaaaaaacagagcaaaagtggtaatggaggtactaaattctaacctcacaggttttttaaatgattaaaaagccatactctctgccaaaggtttgtaaagggtcatcactatatttaaataaaggcacagtgcaggtgtaacacagctgtctactgaggaagacagttcttagtgagaaattgcctcaaaccttcatgaatggtggtattgctcctgkcactaccaagagggagagtaatattttcccgattagattttggtccatacttcaaattctcttttctctgccaggtgccaacctagatgaata

SEQ ID NO: 467851 - DNA, 609 bp, Homo sapiens
tttctcccgtgctggaggcttccagtcctcaaacatctgactccaagttgttcaggtttgggactcggactggctctccttgctcctcagcttgcagatgacctattgtgggattttgtgatcgtgtaagttaatacttaataaactcccctatatacatatattatggggatatatacatatatacataaacacatatatgtatatcctattagttctgtccctctagataatcctgactaatacagttgggtcccaaaataaagaaaaataaaattaattaagtttggactaaaaatgacatttggcatagtctataggaagagaattaaaaatctagacagaaagagatcagcaagataaggcaattctaggaatcacagggaacttaagaacatgttatcacatggttctaactccatcccttaccaaaccaagtgggacttctcttaaacagaaaagctggcacgtctgagctttgctgcccccgaatatctttgtttctgyagcagaagcactaacaactggtgtcatgaccaaatagaaaaaaaaaaaagtccctaatacaggttttaataccaagccttgacagggacctcaattctaaaa

SEQ ID NO: 467852 - DNA, 535 bp, Homo sapiens
  misc_feature (1)...(535): n = A,T,C or G
nnnnnnnnnnnnnccagtttccccattattaacatttcgcattggtatgatgcatttgtcaaaatagatgaatcaattctgctacattattattaactaaagtacacactttattcaggttctgtttttgcctaatgtcttttttcagttctaggatcccattcaagatactacattacatttagcagtcatgyctccttaggctcttcttggttgtgacagcttctcaaactttccttgtttttgatgaccttgacagttttgaggagtactgcttaggtgttttgtagactctctcaatcgggatttgtctgatgtttttctcatggtgagactgaagaatgtggtttttgggaggaaggccacagaggtaaagtgacattctcatgacatcatatcaagggtgtatgctatcagtatgacttctcagtgttgatattaaccttgatcacctggcttgaggtcatgtttgtcaggtttttccattgttaagttactttttctttctcccttttcatactctactttttgaaag

SEQ ID NO: 467853 - DNA, 542 bp, Homo sapiens
ctcaactcttgtcttccgtgcacttgcaggcccaacaccacatggaaaccaccaaggcttggggcttgtaccctctgaagcaaaggcctgagctgtgccttggccccttttagtcatggctgcaggtggagcatctgggagctgggatgcagggcaccaagtcctgagggtgcacagagaatctgggccctgggcctggcccacagaaccgtttttccwtcctaggcttctggatctgtgataggaagggctgccacgaagatctctgacatgccttggagacattttccccattgtcttggttataaacatttggcttctcattacttatgcaaatttttgcagctggcttaaatttctccccaaggaatgggtttttcttttctaccacatagtcaggtggcaaattttccaaacttttatactctgcttcccctttaaacataagttctgatttcaaaccatctttttgtgagttcatataactgaatgctttcacaaaaaccaggtcacctggcattgctgcttagatatttcttctg

SEQ ID NO: 467854 - DNA, 631 bp, Homo sapiens
catcttacctgcaataacacccatagactcaaagatatggagaaaaatctaccaagcaaataaaaaagagaaaaaaaagcagaggttgcaatcctaatttctgacaaaacagactttaagccarcaaagacaaaaacgacaaaaagggcactatgtaatagtaaagggtttaagtaaacaagaagatctaactatcctaaacacatatgcacccaatgtaggcccactcagattccaaaaacaagtttttagagaccttcaaagagatgtagagtcccacacaacaatagtgggagactttaacaccccactgacagtgctagatagatcactgaggcagaaaattaacaaaaacatttagggcctagaatcaacaatgaccatatgtatctgatttacatctacagaactctccatccaaaaacaatagaatatacattcttctcatctgcacacactctaacatcatcacacaatcggacataaaacagttcttagcaaattcaaaaaaccaaagttaaaccatccactgttggaccacagctcaatagaaatagcatttgttatgaagaaaattgctcaaaatcatacatttacatggaaattaaacaacttgcttttgaaaggctta

SEQ ID NO: 467855 - DNA, 631 bp, Homo sapiens
catcttacctgcaataacacccatagactcaaagatatggagaaaaatctaccaagcaaataaaaaagagaaaaaaaagcagaggttgcaatcctaatttctgacaaaacagactttaagccaacaaagacaaaaacgacaaaaarggcactatgtaatagtaaagggtttaagtaaacaagaagatctaactatcctaaacacatatgcacccaatgtaggcccactcagattccaaaaacaagtttttagagaccttcaaagagatgtagagtcccacacaacaatagtgggagactttaacaccccactgacagtgctagatagatcactgaggcagaaaattaacaaaaacatttagggcctagaatcaacaatgaccatatgtatctgatttacatctacagaactctccatccaaaaacaatagaatatacattcttctcatctgcacacactctaacatcatcacacaatcggacataaaacagttcttagcaaattcaaaaaaccaaagttaaaccatccactgttggaccacagctcaatagaaatagcatttgttatgaagaaaattgctcaaaatcatacatttacatggaaattaaacaacttgcttttgaaaggctta

SEQ ID NO: 467856 - DNA, 715 bp, Homo sapiens
gaataacctaaaattttgtacatggatgcgcttatccatatgaccatgaaaatgtcagtagttttatcaggtttccaaacagatctattacccaaagattacatctagttctaatattatatgagtctaaatttaaatttataaaccaacctcaaagtacaataatacaattacctctaaccagactctttctacccaataattcaaaaggccattaaaacaatccctgattctgccttcttccatcgaatctttaccttgccattttgttagcccaaagaggcaaaagcagaagtaatgctacactttgcactgttgttttagcctttgaagaatattgtagtcagattggtgctgcagagagatttaaggagagaaatagaccaagaaatttcaacatgagaatctgagtaacaatttatcttatgttggtcagtttgattaaaagtgtctaactttgtatccataatttcctacttgtcctcagacaattcgtagaattcaacagaatattcttattgacgttcagcatttaagaaacaaattttcagtttatgatgatattgagactcaaactagtattctacttggaaaattgctagtttctgtttgctaaaagaaaaatttygttctctaattctgaattgaatatttttcatcattgtcttaaactggaagttttattaacaaatgcataaatatatgctttacaaaa

SEQ ID NO: 467857 - DNA, 592 bp, Homo sapiens
tggggtagttatattggatccaaagatgggaagtcatgttttgagaacagaagggctgccccagcagcactgggtgtctcatatttaaatagttattatataaatgaaaaacgcatgcatattttattttgaggtctctattttwtagcaagttttcctgtaccctaaaaaagatggtcttttgttgttaagaaccttggcttctgatattcttgattcatttctttttctctttttctctttaggtctgtaagggcggatgttcttctcttcctcttctttgtcagtgaccacttttattacattctatatgtatcactagataagttccttggatatattagttggaagagataaagaaatttagaaaatcttgttttccttttaacaaagcatatcttataaagttgttgtcttgcttagtactgacatattatacgtttgatgtgagcatatccttgcatttcttctgtattataatgccttggaatgcagttgcttcatgctgggtagatgaagtggggggtcatgggattggggaaatatttataagacaacaataaagacaattaagacattcttggcagaaaaa

SEQ ID NO: 467858 - DNA, 504 bp, Homo sapiens
cactttctgaggagaaattcaagatggctgtggaaatttgcataagtaacraggagtcaaatgttaatcaccaagacaaaggggaaaatgtctccaggtcatgtctgagacccttggcagcccctaccaccacagacctggaagcctaggagggaaaaatgtttcctggcgtggatccagggttccccatctgtgtgccacctcaggacttggtgccctgcatccaagactctccagccatggctaaaaggggccaacgtacagctcaggccatggcttcagagggtgcaagtccaagccttggcagcttccatgtggtattgagtctgcaggtgcacagaagtcaagaattgagatttggggacctccacctagatttcagaggatgtatggaaatgtctgaatgtccaggcagaagtttgctgcaggggcagggccctcatggagaacctctgctagggcagtgcagaagggaagtgtgaggtacgagcccccacacagagt

SEQ ID NO: 467859 - DNA, 615 bp, Homo sapiens
gtattatcaagtttaggctttgaaaaatacatattattggatatagagaggtaactcattgtcattttaacttgagttttagaatttgagtttagaatgagaggcatggatcatcagtaacacagaaatagttccactaatggcttggaaatcattcccctattcrtgagagatttggagcctgtgctttgtccagcagaaaaggggaaagtgttttaaatcatggggtgaaatttagagcaaaaaggactatcagagatcaagactgaagttggtccttggaggtatgggcagacgtattccttgtgattcctgaattctcataggtaacagcagcagcatttactgtctcattaggtattcccaattttgccactctctttgtttaacaaattggaacacagtatggcaagttgacagagttgagaagaattctcagtgatgtgctcaaggcacctgtgcatatttatgtggtctgctcatggtcctcagcaagaaagtcaacaggccctttctaaatgagagatctggaagactttcagcaatctgtttgagataaaacatctaacagcatctatgacataaagtggaaataagaagaaaaaaaacaagtaa

SEQ ID NO: 467860 - DNA, 598 bp, Homo sapiens
atcaagaaagaaaggaaaccaagaaaggaatttacatgaaagcaagttaggcaatgccaaacttccttcacaggcttaaaaggaaaagtgatctgtgcagatagtgatttcagaagcgtcctttgaagtgcttctgtttattctgcaggattttctcacttgcctcttgaaataacaacgatagtgaaccttctttccctgaagcaaaaaaaaaaaaaaaaaaaaaaaaaaaaggacaaacaacagaccttctcaaatcaaatatcactgtgtctgtggtttggctaaaggataccaaaagttgttcccyagtgagacatgcaaggagggtagcaaggcctacccttttacgcagaaagatcagcgttaacgagaatcagttgtaaatgtgaataaattaggaaaacagccaggatattgtggtagatagttgccaagatggccttccagaagatgctgtttctaatattgagtagttgactgtaattcctctccccttcaacctgggctgtcctgagtgcttccttgaccaataaaatgttagagaagtctgaacttccaagactaggtcgtatgaaatcttgcagcttcctttagt

SEQ ID NO: 467861 - DNA, 567 bp, Homo sapiens
attgtgcaattattactgttacttcacactgtgtccaggtggattagcataggtcctatgctacctgtatagaagttattttgtagaatgtctgctttccaatttcagttcaccttgtggccacttactaccagtagccaaaataaaaatgagacaagctagcttactggggctgtcacagaaacttacctctctgtacaatcgaaagcccctggcttatttctcaaacaggtatgcaatgaggcttatcagctgtggatgcgttcccagatctgacttttgatgtagatcttgaccattctgctgtacaagtttattgaacattggggtagcaccagggagaagtaagggtggaaagactcatttagctatttcggagaataaaatgccaataaatcaccatggtatagcctagtatttgcttagaaccccctgagatttcctgggtaaatagccaagagagggcagaaaagtaaacttgttttttyctctgcctcaaagtgcttagaaaggagcctggaggcattgggaggacataggtagcctttttcttctctgttagcattc

SEQ ID NO: 467862 - DNA, 628 bp, Homo sapiens
tttgtgatattacttcgtttattcattcatccattcatgcattcattcatcgttcagtaataatttgttgagcacctaacatgggtctgttcctctgccaggaccctgggactccaaagattaagattaaaagatgtgcctcctgtccttgggcattttatattctataggggaaattgagcagtaaaagatgttcttaatacaatgtggtaagtacaatgttagtgcctggccagggtgctgagctggcgtgtgcggatatgccttagtcagtttgagttactgtaacagaataccatagacaggatggcttgaacaagagacatttatttctcacagttctggaggctgaagtctgcgatgagcatgtcagcatgattgagttcttggttagggccctcctcctggttcacagatggctgtctgctctctgaatcaacacacagcagagagaaagagctctgttcctcgcactgccttatcagggatctaattccatcaccggggctccaccatcatgaccttrtctgattctaattacctcccacaggctccatttccaaataccatcacactgggaattaaggttttaacatgaattttggggagacagaaacattcagtctgt

SEQ ID NO: 467863 - DNA, 628 bp, Homo sapiens
aagtccatacgtaaatcaataccactcacacaaaaaagaaaagaacaaaaacttattgcatttagttgtgacctatgggcagatggcagtaaagtttatatttccagaatttacctgatttccattttcttttcataagcttgaaaacatgacatcacagatgacttcttattattctttagattcactgtctaatcagtaattatactctgataattttatayttaaaatattttttataattcaatctttttattcgaagatgtaatactgcatgttatagaagagtctccagatatttgtctgatttcttatacatccaattcattctgccttcatgaaattcagaagaatttttaataagttattccatctgcaaaccatttactgtctgttccatgaacctcaagataatcctagcttctgatacagtaatcaagtttcttaataataaatattatatataatttttgttagttttattgagatttaattcatataccatgaaattcattcttttaaaatgtaaaattccaatagtagactcacagaattttacaaccatcactattctctaattttaaaatatctttatcacctctaaaagaaattcacatatattaatagc

SEQ ID NO: 467864 - DNA, 628 bp, Homo sapiens
aagtccatacgtaaatcaataccactcacacaaaaaagaaaagaacaaaaacttattgcatttagttgtgacctatgggcagatggcagtaaagtttatatttccagaatttacctgatttccattttcttttcataagcttgaaaacatgacatcacagatgacttcttattattctttagattcactgtctaatcagtaattatactctgataattttatacttaaaatattttttataattcaatctttttattcgaagatgtaatactgcatgttatagaagagtctccaratatttgtctgatttcttatacatccaattcattctgccttcatgaaattcagaagaatttttaataagttattccatctgcaaaccatttactgtctgttccatgaacctcaagataatcctagcttctgatacagtaatcaagtttcttaataataaatattatatataatttttgttagttttattgagatttaattcatataccatgaaattcattcttttaaaatgtaaaattccaatagtagactcacagaattttacaaccatcactattctctaattttaaaatatctttatcacctctaaaagaaattcacatatattaatagc

SEQ ID NO: 467865 - DNA, 575 bp, Homo sapiens
gtgttaggacttgtactgctgcatactccaatccccccaacatctcccttgcgcagaaacatctagactattttttaagagmaaatgttttagtacagatacaactaatgataaactatatagctctctggactgataaacagaaaaatgagaccacactccttcagcatttaccttctgttataggatatgcataactattcactagcattaaccatgacatcattgctttactgatatatcaaaatattgagaagaaaataggctttattgtacaatataaaaggacatacattagtaaaagttataaataggaagaaaagactaaaagtttatttcactgatctatttagagacctagattaattgcattcatatttctagctgtctaacaaatcgctgtgaatatataaaataaaacatatctatgtaaagtcaccttctccctttctctttctctctccgcaatggtacgagccttcttcatgtgttttagacatggttgtggcataaagatttttaagacatgtaaattattaaattaatattaaaacatagaataaattagtttgttc

SEQ ID NO: 467866 - DNA, 575 bp, Homo sapiens
gtgttaggacttgtactgctgcatactccaatccccccaacatctcccttgcgcagaaacatctagactattttttaagagaaaatgttttagtacagatacaactaatgataaactatatagctctctggactgataaacagaaaaatgagaccacactccttcagcatttaccttctgttataggatatgcataactattcactagcattaaccatgacatcattgctttactgatatatcaaaatattgagaagaaaataggctttattgtacaatataaaaggacatayattagtaaaagttataaataggaagaaaagactaaaagtttatttcactgatctatttagagacctagattaattgcattcatatttctagctgtctaacaaatcgctgtgaatatataaaataaaacatatctatgtaaagtcaccttctccctttctctttctctctccgcaatggtacgagccttcttcatgtgttttagacatggttgtggcataaagatttttaagacatgtaaattattaaattaatattaaaacatagaataaattagtttgttc

SEQ ID NO: 467867 - DNA, 585 bp, Homo sapiens
tgggaaatgtttgtcaaagaaaaggttttttgtttttcattttccattatatttaatttctttaaatttctctgataatttattattgttttatttttccataagtgaagaaaattatcaaggtgtgcaagagactcatattatagacggccgagtgtctaggctatttgcatcatagttcagactacataaaaaccaataataaacaaaaaccaataatatctgaatctcaatatttcgagtgattatatttctgccttgtagtgacactttcatcagggtcaagtttggtgttttactgctggcatatattctcagattaagccatctgaaagaataaattgtgtcttatctgggattattggagtttgyagaaatatcttctatctcctccctcatttcaaaacatttatactttttcccccaacagtcataccaactatagtctagctgctgtttgatcatttaaaatcacgtgttacataaatccttttagcaactgactgcgtgttttcaaaagcgtcttctctaagtcttaaggaacatcactggatatttccaaagaggatattagaaaattgcttt

SEQ ID NO: 467868 - DNA, 585 bp, Homo sapiens
tgggaaatgtttgtcaaagaaaaggttttttgtttttcattttccattatatttaatttctttaaatttctctgataatttattattgttttatttttccataagtgaagaaaattatcaaggtgtgcaagagactcatattatagacggccgagtgtctaggctatttgcatcatagttcagactacataaaaaccaataataaacaaaaaccaataatatctgaatctcaatatttcgagtgattatatttctgccttgtagtgacactttcatcagggtcaagtttggtgttttactgctggcatatattctcagattaagccatctgaaagaataaattgtgtcttatctgggattattggagtttgtagaaatatcttctatctcctccctcatttcaaaacatttatactttttcccccaacagtcataccaactatagtctagctgctgtttgatcatttaaaatcacgtgttacataaatccttttagcaactgactgcgtsttttcaaaagcgtcttctctaagtcttaaggaacatcactggatatttccaaagaggatattagaaaattgcttt

SEQ ID NO: 467869 - DNA, 575 bp, Homo sapiens
attaaaaggggaaaaatcaaacatataaagacaagtttctagtatgccatccaatgtttcattaaataattcactgcatttattcatattcaataagattatctacatagagaaataaaattggaatccattaattatccacaaayttcatatgatttaaaagcacttttaggttacatacacacgtggatttaagattagttatccagattaccattttggaatatagagtttacatattctgtctctcttttttgttgaaatcaaaaattacccacacaccacaaaactctaaagcaaaattatttatggtctaaaactgaccagtattactcaattttaatgtaaattcttctttgttttgtattagtcttccttttagaaaactagtttatttctgtacagccatgaggtaataagtaacaaaatccttaaggatgatagtgattatattatttacaattaatcttcctcctaagagtcacaacgttaaaaggaaaggggaaaggacactttctaatgtgaacactatgcatattccagaaggaatacttatcatgctaggtcaacagggg

SEQ ID NO: 467870 - DNA, 589 bp, Homo sapiens
cttcagtaagtttattgagatgtacctttgtgatgatgatctgtggggaaatgaaagaaagaagtaggactgagaagaaaaatcattgaaaacctggaagttgcaacaaacatttcaaataatcccacaaggacctgtaaaggtggcatacacttttaaaactgttgtataaagaagcaaagtgtatcagcctttatattttcgatgttgactaatattgattgcaagttattccaagaaggagcatgaccttggacacggctgatagaaatttctatagaatgacttggctaagagccctgagatgccaatgcttctagcacctaaaggaacaaatgctttagtcttgaaggaggaatctggacagtgcaccgtgtcatctactgcagtcataaggctraaattgctatcaactgaaaatattcttggatgttataatacttgttcctgtcataaccacttataaatttgcttgaatgatggttccaaattctcattaagttttgatatagaaagctgcaaactggagctaagcatacacaagttgagctacaaaactatggatacaatatatgaattcatgtcttaa

SEQ ID NO: 467871 - DNA, 575 bp, Homo sapiens
gtctgcagcttttccaggagcacagtgcaagctgtcggtggatctaccattctggggcctgaagtatggtggcccagtaggcagcgtcccactggggactgtgtgtgggggctccaaccccacattttcctttcacactgccccagcagaggttctccatgrgggctccacccctgaagcagacttctccctggacatccaggcatttccatacatcctcggaaatctagttggaggttcccaaacctcaattcttgacttctatgcacctgcaggtccaacaccatatggaagctgccaaggcttgaagcaatggcctaagctggatctcgaccccttttagccacagctgaaactggaatggctgggatgcaggacaccaagtcccaaggctgcacagagcaacaggtccctgggccaggcccaggtaaccattttcccctcctaggcctccaggcttgtgatgggaggggctgctgtgaagttctctgacatgtcctggagacattttccccatcgtcttggtgattaacattcagctcctcattacttgtgcaaatttctgcagcctgctt

SEQ ID NO: 467872 - DNA, 575 bp, Homo sapiens
gtctgcagcttttccaggagcacagtgcaagctgtcggtggatctaccattctggggcctgaagtatggtggcccagtaggcagcgtcccactggggactgtgtgtgggggctccaaccccacattttcctttcacactgccccagcagaggttctccatgagggctccacccctgaagcagacttctccctggacatccaggcatttccatacatcctcggaaatctrgttggaggttcccaaacctcaattcttgacttctatgcacctgcaggtccaacaccatatggaagctgccaaggcttgaagcaatggcctaagctggatctcgaccccttttagccacagctgaaactggaatggctgggatgcaggacaccaagtcccaaggctgcacagagcaacaggtccctgggccaggcccaggtaaccattttcccctcctaggcctccaggcttgtgatgggaggggctgctgtgaagttctctgacatgtcctggagacattttccccatcgtcttggtgattaacattcagctcctcattacttgtgcaaatttctgcagcctgctt

SEQ ID NO: 467873 - DNA, 575 bp, Homo sapiens
gtctgcagcttttccaggagcacagtgcaagctgtcggtggatctaccattctggggcctgaagtatggtggcccagtaggcagcgtcccactggggactgtgtgtgggggctccaaccccacattttcctttcacactgccccagcagaggttctccatgagggctccacccctgaagcagacttctccctggacatccaggcatttccatacatcctcggaaatctagttggaggttcccaaacctcaattcttgacttctatgcacctgcaggtccaacaccatatggaagctgccaaggcttgaagcaatggcctaagctggatctcgaccccttttagccacagctgaaactggaatggctgggatgcaggrcaccaagtcccaaggctgcacagagcaacaggtccctgggccaggcccaggtaaccattttcccctcctaggcctccaggcttgtgatgggaggggctgctgtgaagttctctgacatgtcctggagacattttccccatcgtcttggtgattaacattcagctcctcattacttgtgcaaatttctgcagcctgctt

SEQ ID NO: 467874 - DNA, 588 bp, Homo sapiens
gtttagattttaaaacatcttaattttatatccagttggttactgagattcaatgaccttttccagggagtcatgcttcaagattccatagattctaattttgttttgtttgccatcagtagtcctacagggatattctcacaggagcattctgttgaaaagattctgtagaatttgaccagtgggagactactcaaacttgcacatgtccttttgacatgacctcatttttacttgggcacttttttactttccagcaaaagatgtcttaagcttaccttttttctttcccagcttcagacatagaatcaaacatttctccaaggaactcccagtcttttgagcagaacgatatgtgtaccagatagtactagattacattgcatataagccctaccagtgaacagagataaaaatctgtatttatatctctgtatcatagcatgagaacgtgccaatatatcacagtcaaatgtaatattataggtttttcagacatyttaaataatatgtttatagacgtattttcttattgtgaaaactgtgtgtgatggttgattttgcgagtcaatgtgagtgaatttagga

SEQ ID NO: 467875 - DNA, 569 bp, Homo sapiens
ttttaatataaatgggttgaactttcactctacacatagaagtccacaatattctaaatgttttagaaattaataagaaacttaaatttctttataactcctgtatccaaatctctaaatagctgcatgcaagttgttgctacatcttgttgtctgtacattctgacccatttttgcaactccttcatcctcataggatataaaggctaatcgtttcctgaacagaatactagctagtgtgatccagactttgctgaaaagttgagggtagtggtagtgatggtagtaggggtggagcttcttcacactgcaacacagcaaattaaatatactcttagattcacctggccttaaaactctctcmgccatctgatctaccctcagcctcttctaccttttcatcaactccaccgacttattttcctctcatgttttcttttttttttcttgctcattctttgtctagtggttttccatcatagttaaccatttgaaacatccggtgagtcttacaaaaatgccagtgttagggtcctaccaaagcaataaaatcagaagttctggagtac

SEQ ID NO: 467876 - DNA, 527 bp, Homo sapiens
tagctctgtgtccccatccaaaactcctattgaattataatcttcagtgttgggggaggggccttatgggaggtgattggatcatgygggcagtttcccatttgctgttctcaagagatctggctgtttgaaggtatgtagcacttcctcctttgttctctctctcctgctggccaggtgaaaatgtgtctgccttccctttgccttctgccatgtttgtaagtttcctgaggccgcctcagttatgcttcctttgcagtctgtagaataatgagtcaattaaacctcttttctttataaattgcccagtctcaggtatgactttagagcagtgtgagaatggactaatacagatagaaagcatgtactgttgtctgggtgtggtggctcactcctgtaatcccagcactttgggaggctgaggcaggcggatcatgaggtcaggagatcaagatcatcctggccaacatggtgaaaacctgtctctactaaaagataaaaaattagctggtcgtggtgggacgagc

SEQ ID NO: 467877 - DNA, 527 bp, Homo sapiens
tagctctgtgtccccatccaaaactcctattgaattataatcttcagtgttgggggaggggccttatgggaggtgattggatcatgtgggcagtttcccatttgctgttctcawgagatctggctgtttgaaggtatgtagcacttcctcctttgttctctctctcctgctggccaggtgaaaatgtgtctgccttccctttgccttctgccatgtttgtaagtttcctgaggccgcctcagttatgcttcctttgcagtctgtagaataatgagtcaattaaacctcttttctttataaattgcccagtctcaggtatgactttagagcagtgtgagaatggactaatacagatagaaagcatgtactgttgtctgggtgtggtggctcactcctgtaatcccagcactttgggaggctgaggcaggcggatcatgaggtcaggagatcaagatcatcctggccaacatggtgaaaacctgtctctactaaaagataaaaaattagctggtcgtggtgggacgagc

SEQ ID NO: 467878 - DNA, 559 bp, Homo sapiens
ccgttattcaacatagtgctggaagtcctagttagagcaatcagacaagagaacgaaataaaaaatatccaaattggaaaggaagaagttaaattatcctggttcacagatgatatgatcttatatttggaaatacctaaagacttcacaagaaaactgttaaaacttataaacaaattcagtaatgttccaggataaaarattaatatacaaaaattggtaccatttctatatgtcaaaagtaaacaatctgaaaaaaaaaaacaatttagcaatcccatttacattaggtacaaataaaataatataactaggaattaactaaaaaagtgaaagatctcttaaatgaaaactataaaaaattgatacaagaatttgaagagaatgccaaaaatggaaagatattccatgttcatggattgaaagaatcagtattgttaaaatgtccatactacccaaaacaatctacagattcaatgcaatctttataaaaataccaatgatattcttcacagaaatagaaaaaacagtcctaatattcatatggaaccacaaaaga

SEQ ID NO: 467879 - DNA, 558 bp, Homo sapiens
tgacaagcccatagctaacactttactgaatgggggaaaattgaagacctttcctctagatttggagaaaaagacaaggatgcccacttaccactttaccactcttattcaaaacagtactggaaaccctggccagagcaattaggtaagaaaaggaaatttaaaagtatccaaattggaatggaataagtcaaattagccttgttcacagaagacaagattytatacttagaaaaacctaaagacggcctggcgcagtggctcacacctgtaatcccagcattttgggaggctgaggcaggaagatcacgaggtcaggagattgagaccatcctggctaacatggtgaaaccacatctctactaaaaatacaaaaaattagccaggcttggtggcatgtgcctgtagtcccagatacttgggaggctgaggcaggaaaatcactgaacctaggaggcagaagttgcagtgagctgagatcgtgccattgcactccagcgtggcaacagaacaaggctccatctcaaaaaaaaaaaaaaaaaaaaaaaaaaaaaaacc

SEQ ID NO: 467880 - DNA, 558 bp, Homo sapiens
tgacaagcccatagctaacactttactgaatgggggaaaattgaagacctttcctctagatttggagaaaaagacaaggatgcccacttaccactttaccactcttattcaaaacagtactggaaaccctggccagagcaattaggtaagaaaaggaaatttaaaagtatccaaattggaatggaataagtcaaattagccttgttcacagaagacaagattctatacttagaaaaacctaaagacggcctggckcagtggctcacacctgtaatcccagcattttgggaggctgaggcaggaagatcacgaggtcaggagattgagaccatcctggctaacatggtgaaaccacatctctactaaaaatacaaaaaattagccaggcttggtggcatgtgcctgtagtcccagatacttgggaggctgaggcaggaaaatcactgaacctaggaggcagaagttgcagtgagctgagatcgtgccattgcactccagcgtggcaacagaacaaggctccatctcaaaaaaaaaaaaaaaaaaaaaaaaaaaaaaacc

SEQ ID NO: 467881 - DNA, 558 bp, Homo sapiens
tgacaagcccatagctaacactttactgaatgggggaaaattgaagacctttcctctagatttggagaaaaagacaaggatgcccacttaccactttaccactcttattcaaaacagtactggaaaccctggccagagcaattaggtaagaaaaggaaatttaaaagtatccaaattggaatggaataagtcaaattagccttgttcacagaagacaagattctatacttagaaaaacctaaagacggcctggcgcagtggctcacacctgtaatcccagcattttgggaggctgaggcaggaagatcacgaggtcaggagattgagaccatcctggctaacatggtgaaaccacatctctactaaaaatacaaaaaattagccaggcttggtggcaygtgcctgtagtcccagatacttgggaggctgaggcaggaaaatcactgaacctaggaggcagaagttgcagtgagctgagatcgtgccattgcactccagcgtggcaacagaacaaggctccatctcaaaaaaaaaaaaaaaaaaaaaaaaaaaaaaacc

SEQ ID NO: 467882 - DNA, 558 bp, Homo sapiens
tgacaagcccatagctaacactttactgaatgggggaaaattgaagacctttcctctagatttggagaaaaagacaaggatgcccacttaccactttaccactcttattcaaaacagtactggaaaccctggccagagcaattaggtaagaaaaggaaatttaaaagtatccaaattggaatggaataagtcaaattagccttgttcacagaagacaagattctatacttagaaaaacctaaagacggcctggcgcagtggctcacacctgtaatcccagcattttgggaggctgaggcaggaagatcacgaggtcaggagattgagaccatcctggctaacatggtgaaaccacatctctactaaaaatacaaaaaattagccaggcttggtggcatgtgcctgtagtcccagatacttgggaggctgaggcaggaraatcactgaacctaggaggcagaagttgcagtgagctgagatcgtgccattgcactccagcgtggcaacagaacaaggctccatctcaaaaaaaaaaaaaaaaaaaaaaaaaaaaaaacc

SEQ ID NO: 467883 - DNA, 544 bp, Homo sapiens
gtgaaaacagttttagaattggstaatgggtagaggctaaaatactttggaggaatacgccagaaatagcctgtattgcagtgaacagaacatttagagagattctggtgaatgctcagaagaagagagccatagggtctgaatcttcttagacattacttaagtggttgtgatgagaatgactgatttctatcaacatagaaatatgggcagtactgaccattctgttgggatctaagacagaaatgagtaacaagttttgaaaactgtggtaagtaacattcttattatacagcagtgaagagctttgatgaattgtttccatgcctgagggctttatagaaggcagaattaaagaatgacacagtaaaatatctggtagaagaaatgtttttaagtagcaatgtgttcaggttgctctgtggttacttgtaaggacatacagtgagatgaaagagcaaaggaatgacttaaagtcatactatgcgattaaaagagaaatgggggaaaaattagaaaattcacagcctgattatcataaaga

SEQ ID NO: 467884 - DNA, 544 bp, Homo sapiens
gtgaaaacagttttagaattgggtaatgggtagaggctaaaatactttggaggaatacgccagaaatagcctgtattgcagtgaacagaacatttagagagattctggtgaatgctcagaagaagagagccatagggtctgaatcttcttagacattacttaagtrgttgtgatgagaatgactgatttctatcaacatagaaatatgggcagtactgaccattctgttgggatctaagacagaaatgagtaacaagttttgaaaactgtggtaagtaacattcttattatacagcagtgaagagctttgatgaattgtttccatgcctgagggctttatagaaggcagaattaaagaatgacacagtaaaatatctggtagaagaaatgtttttaagtagcaatgtgttcaggttgctctgtggttacttgtaaggacatacagtgagatgaaagagcaaaggaatgacttaaagtcatactatgcgattaaaagagaaatgggggaaaaattagaaaattcacagcctgattatcataaaga

SEQ ID NO: 467885 - DNA, 559 bp, Homo sapiens
aaccctttgaaaaatttcaagatgaattattcaatggaataagagtatttaggtccaatgatccagtgaaaatcactgttatatccatttctatctcatataaataataattataagccctaacattttatagcagagtagggtgactatagttaacaactgtgtattgtatatttcaaagtagctagaagaaaggacttgaaatgttaccaacatatagaaatgataaatactcaaggtgatgaatatttcaaataccctgacttgatcattacacattctatgcatgcagcaaatactcatatgtacccccataaatatgtaaaatattttgtatcaataaaaaagctatttgatattatagtattattcaatgatgcttaagagagaagacaagagtttcaggcagacttgaatatagccaatattttaaagaaaattatgagctgtgattactgtatataaattggctataaacgagttgatgaaaaggaacttccattaatgatggtgttgataggctacaygtattggaatgaataaaaggacttgcacctga

SEQ ID NO: 467886 - DNA, 622 bp, Homo sapiens
agtcatattacataactaataatctatattttaaaatttggatattttcatgtttttgatagttctaatatattgccttcataaaaaactttctgcccttttctgggagggcaaagagataaaataaattttgctcaccatttccctgtttgatcaggtactttaacttatttaactaaataagaatcattaacatcagaaatcaaatttctaaagagtaggaacatataaaatttttaataagttttttcaaaaagctcttactgtgttcctcataatttttaaagatgatagggtaaaattatgaagaatatgtcttgctagaaactagtctttattacaaacgcacgcacacacacacacacacaaacaaaaaaaaatccaagattgatgagtaaactcaatggaaatatagctatccagataactgcaatcaaaataagcaaataactattttcagagtttcatgaatattatcattcatctaggatttgacactttcagatgctagttctctsgcaagctttaactatcactttctagtgattcagaaaattagattttctttcataattcagttattgagaaaaacaaaaaatgctgcatattagagttaaattat

SEQ ID NO: 467887 - DNA, 629 bp, Homo sapiens
acaattaacactctttctctgggtagggtcagagggcctgctttgtgggctcaggtttctctgaagacagtcgctgaaggtacatgagaaatggaaatttaattggcataactaggaggatctccttgaaggctgagaagattttcctcggccggttgtttccasacaaacaatgttggccagggagtgattccactttcatgtctcttccctccacagaggggaagcgccagccactgcctgtatgcctttagggacaggccctactcttctctgccaagatcaaggagtccagtggccactcagggggtattgtctctttgccagcgctagtggtctgcatgtgtcaactagatcttcaccaaggtttatagatgccttgctcaaaaacttgccttgatgttaaaacagatggactgagtactttctcctgcaagaagcctgtatggatgtctcaatacctcttctcttcctccctctcttcctccctcccactattccctccttccctccattacctcctccccttcttcccctcccttcctatctcctttcttctctgcttccctccctctcttcctccctcacttcatttccttcttcccttcttctgcctccttacctccccg

SEQ ID NO: 467888 - DNA, 629 bp, Homo sapiens
gtggaaggaggtcagtgaagtctctcttgagaagggacattggtggagagaatcaaatgaggtaagagggcaaaccatgcgtatgtctagagggagagcaagcacaaaatataagaagaagaaacagtgagagctgactttaaggaggcaagaagagaagcaggcaaaccaggtaggaggcaactgtaaaaatgtgggtgaaagatggtgagtgactgagggcagcgtgatagcagtgaagtgaggagtrgcgtgcatgatcctggatatactgtgaaggtagcaacaatacggtctgtggaagaactgaatgtggagtagaaccaaaaaaagatgattagggataccttccatcaactggaagaatgatgctgctatttattgacaacggtaagactagagaaggcgcaagtttgaggggaaagatgagttcagttttggtaagattaagtgtgagaggcctactagatggtcaaatggaaatgttgagtgtcagttggatatgcaagtcaagtcagggaagacaggactggagatggatatttgaaaactgccagtgtatagatgatatttaaatcatgagatgggatgagatcatctaggctccagggagtccatgcagatagaca

SEQ ID NO: 467889 - DNA, 629 bp, Homo sapiens
gtggaaggaggtcagtgaagtctctcttgagaagggacattggtggagagaatcaaatgaggtaagagggcaaaccatgcgtatgtctagagggagagcaagcacaaaatataagaagaagaaacagtgagagctgactttaaggaggcaagaagagaagcaggcaaaccaggtaggaggcaactgtaaaaatgtgggtgaaagatggtgagtgactgagggcagcgtgatagcagtgaagtgaggagtagcgtgcrtgatcctggatatactgtgaaggtagcaacaatacggtctgtggaagaactgaatgtggagtagaaccaaaaaaagatgattagggataccttccatcaactggaagaatgatgctgctatttattgacaacggtaagactagagaaggcgcaagtttgaggggaaagatgagttcagttttggtaagattaagtgtgagaggcctactagatggtcaaatggaaatgttgagtgtcagttggatatgcaagtcaagtcagggaagacaggactggagatggatatttgaaaactgccagtgtatagatgatatttaaatcatgagatgggatgagatcatctaggctccagggagtccatgcagatagaca

SEQ ID NO: 467890 - DNA, 598 bp, Homo sapiens
ggaatcatgacttgttttcttttctaactagagcggttcacccagtgctaatgacacagtacgaaattaacatttgttgcagaagtgatggaagctgaagcacttggggttacaatacttcagtgaatgttaccctgctgggattccaacttacatgtgtcacacttcaaagcttgtgtcactttggtatagattatatcattctgctacttttctggcaatggacgagtattctaatcttttcatttaataaaggaatatgatacaaaactcaacttgctccataaagaagttaaacaaattaactgagttgttacaaatkgtactgtggttatgcatacaacagtcagaataaaacctgggtctgacctgtaaaaaaatgtgtaaaaaaagaccagtgggaatttttgtgtttgaatttactgaattcattgaaaataaataatggtattattatgacttcaaatatgtgactgatgaaaattatcagatttaaccttctcagagtggaatgttcacctgagccgtactgcttcgacagagtcaaaatgaagtgtcagctagcatatagatagtaattggcctcagcattagagaa

SEQ ID NO: 467891 - DNA, 553 bp, Homo sapiens
gacaggacggcaagaatgagtgtcagcaggggaaatgccagatgcttataaaaccatcagatctcatgagaaatcactactaggaaaacagcatgggggaatctgcccccatgattcaattatcatccatctcgtccctcccagaacatgtggggactatgggaattacaatttaaaatgagatttgggtggggayatagttaaactatatcagaagattataatttgatagtgtataatttgttgaatttaactgattttttgatttctgtattttaacccaagattgctgagttgttcatattttattctttttgtttgggttttctggtttgaaatacattattgggtaatttgtaagaatctattggtagtatatattctttgtatatctgaaaatttcatgtaatagtcttgtctgaatggctaggaaattctatgttgaaaattatttgttttatagtaatcttactgtaataagttttattttcaatcatatttttattcctttgtatgtatattttctctttagttgggatttagagatttttct

SEQ ID NO: 467892 - DNA, 543 bp, Homo sapiens
tataaatagtccatttattaaattctcctcaaatacctactttgagagtgccatctgtttgtttggcttttttttttttgctagaattcagactaaaacataccccaagaatgggagcgcagaatcaaagaatattktagccgcaaaggaacatagaagatgatctgttcaatccttcagattttactgatgataaaactgaggtggaaacatgttaaggaatttgtccaaagtcaccagctactatgtgacagatcagggactagaatacagatctttgcatctctcagtgcatttgccacaacagaatcctccacaacaatttggagacacagaaggtattcactgaaggtgaacatccagttcagttagccccaaggggttggctaaatagagacatcttctacatacaacaacttctggtcagggtgtcagcagtagctccagaaaaggactcagtgaagaggctggtgatatttaaaatccagaaatccatataattttttctgagcagtttcttaagatcttggctaaacttggctc

SEQ ID NO: 467893 - DNA, 543 bp, Homo sapiens
tataaatagtccatttattaaattctcctcaaatacctactttgagagtgccatctgtttgtttggcttttttttttttgctagaattcagactaaaacataccccaagaatgggagcgcagaatcaaagaatattttagccgcaaaggaacatagaagatgatctgttcaatccttcagattttactgatgataaaactgaggtggaaacatgytaaggaatttgtccaaagtcaccagctactatgtgacagatcagggactagaatacagatctttgcatctctcagtgcatttgccacaacagaatcctccacaacaatttggagacacagaaggtattcactgaaggtgaacatccagttcagttagccccaaggggttggctaaatagagacatcttctacatacaacaacttctggtcagggtgtcagcagtagctccagaaaaggactcagtgaagaggctggtgatatttaaaatccagaaatccatataattttttctgagcagtttcttaagatcttggctaaacttggctc

SEQ ID NO: 467894 - DNA, 435 bp, Homo sapiens
ataagtcttggtttgagatataaatttgaaaatcatacagatgatacataaaatcataaaaaatgaatgtgacccttaaggacgagatgacaggtggagatgagagatactcagatgactgtatgcagagacactactgaaagatagggatatgataagtatccagaaaagagactgactgagaaaaagtcaccagagaaaaaggagaaaaaccaaaagagtgatgtcagaggctgtgtgaagaatgcattttaagatggaatgattaatattcaaatattgctgaggagtcaaatattgttgaggagtaaaygaaaatgaagactgagaactcaccagtgaatatagcaatgaggaggtcattaatggcgttgacagagcagcctgattggtgatgggtcaatagagaatggaggaaatgaaatggagaaagta

SEQ ID NO: 467895 - DNA, 494 bp, Homo sapiens
caatcaggtgatttactccaagragcacaaatcagagagacaggaaagccaattcttataacactgcaaagatcctacagtttttaaaagagaaaagagccctttccctggaggaagtgcagagtaattcatacaagttcttgttttaggggtgatgcccactcaatttactttgacatataatctgcctgagcagctcagcttaatctcctgcatggcagagcagagggcttccctccagccctttaaggcctctgtgtgaaaatctcaaagctttgctgttgccatccaggacatagcagctctgaatgccaccacagggaatataagacagattggctgaacatccaaaagaatacatatgctatttagtcaatgtagagtgctttagcaccctacgctaaagcacaccaatactcagaatcaatatccagaacactggcagccactgtcttcaccaagcagtaggttgaaggagggtttatagttgtcag

SEQ ID NO: 467896 - DNA, 494 bp, Homo sapiens
caatcaggtgatttactccaaggagcacaaatcagagagacaggaaagccaattcttataacactgcaaagatcctacagtttttaaaagagaaaagagycctttccctggaggaagtgcagagtaattcatacaagttcttgttttaggggtgatgcccactcaatttactttgacatataatctgcctgagcagctcagcttaatctcctgcatggcagagcagagggcttccctccagccctttaaggcctctgtgtgaaaatctcaaagctttgctgttgccatccaggacatagcagctctgaatgccaccacagggaatataagacagattggctgaacatccaaaagaatacatatgctatttagtcaatgtagagtgctttagcaccctacgctaaagcacaccaatactcagaatcaatatccagaacactggcagccactgtcttcaccaagcagtaggttgaaggagggtttatagttgtcag

SEQ ID NO: 467897 - DNA, 494 bp, Homo sapiens
caatcaggtgatttactccaaggagcacaaatcagagagacaggaaagccaattcttataacactgcaaagatcctacagtttttaaaagagaaaagagccctttccctggaggaagtgcagagtaattcatacaagttcttgttttaggggtgatgcccactcaatttactttgacatataatctgcctgagcagctcagcttaatctcctgcatggcagagcagagggcttccctccagccctttaaggcctctgtgtgaaaatctcaaagctttgctgttgccatccaggacatagcagctctgaatgccaccacagggaatataagacagattggctgaacatccaaaagaatacatatgctatttagtcaatgtagastgctttagcaccctacgctaaagcacaccaatactcagaatcaatatccagaacactggcagccactgtcttcaccaagcagtaggttgaaggagggtttatagttgtcag

SEQ ID NO: 467898 - DNA, 494 bp, Homo sapiens
caatcaggtgatttactccaaggagcacaaatcagagagacaggaaagccaattcttataacactgcaaagatcctacagtttttaaaagagaaaagagccctttccctggaggaagtgcagagtaattcatacaagttcttgttttaggggtgatgcccactcaatttactttgacatataatctgcctgagcagctcagcttaatctcctgcatggcagagcagagggcttccctccagccctttaaggcctctgtgtgaaaatctcaaagctttgctgttgccatccaggacatagcagctctgaatgccaccacagggaatataagacagattggctgaacatccaaaagaatacatatgctatttagtcaatgtagagtgctttagcaccctacgctaaagcacaccaatactcagaatcaatatccagaacactggcagccactgtcttcaccaagyagtaggttgaaggagggtttatagttgtcag

SEQ ID NO: 467899 - DNA, 552 bp, Homo sapiens
cacaatattaagctaattagtaacccctactaagtattcaagtgaaagaaagagatgcacgtctctcactttaaataaaaaaccagaaatgatgaagcttaatgagaaaggcatgtcgaaagctgaaacgggctgaaaagtaggcctcttgtgccaaacaactaggcaagttgtgaatgcagaggaaaagttgttggaggaaattaaaagtgctactccagtgaacacaccaatgacaagaaagcaaaacagccttattgccaatatggagaaagtttragtggcctagataaaagattaaaccagccacaacattcccttaagccaaaggctaatgcagagtagagccctaactctcttcaattctaaaggctgagaaaggagaggacgctgcagaagaaaagtccgaagctggcaggggttagttcatgaggtttaaagaaagaagtcatctccataatgtaagtgcaaagtgaagcagcaaatgctgatgtcaaagctgcagcaagtcacccagaggatctagccaagatcattggtgacaggggctac

SEQ ID NO: 467900 - DNA, 456 bp, Homo sapiens
agactctgcccctttccccacggctttaattttcaaccaagcytcttcgttcctacgtgttcctctccccaggacctggagagcgtactgcttagcagctaggcgtgatgactttgcaccttgagagcactttactaaaaccaggccttttccaggttgagggggaagggcggcattccgggttcaagcaggtgagacccaggtaaccggggagcggctcctggaggcttcttggacccagaagcgccgactctcacacaccttgcccgcagttccttctccgggcacgggtggagcgcagccaggccgccctggctgaggcgggcacgccttcccgggcagcccgggatgccccggacccgcggacccgagggtgggggccctgcggcgctcgggggctgcggcggggagctcggagcgcggagctgcccccgccggtccacttcaagaacaagt

SEQ ID NO: 467901 - DNA, 609 bp, Homo sapiens
tgaatttaaagataatgtgctgcttcttccatggagaaatatctttcctgatatgtcattgttcacgggccccataccatccatcggccatcaccaggcttagctgttccagcascttcacattgcacttagccggaagccctggctgtgtgatgatgatgttgacctggcatgtgatctctgcctgcctctcagacttcatttgagccgttctcctccctgtatgcccaaaccatgcagcccctcctcatcctggttatcaaatcacccaatgccttgaggccttaggactctgcacctcatgacctccagcgtggaattccaatctcttcccttcacacggttgggctagcttcaacaccaccccatccaacagagcttccttgaccatctgacttaaaatgcgtccactggtggattattctttaacataacaccaggttctcttcctttctagatgtaagacaattttaaatacgtacgattgttttctcattcgtcatctgccttctgagacagtgggtgggatgtggtgtggcaggcagagaccatgtgaacagacaccttgggtcatgactttacatccagttcctggcacgtgtctggcaa

SEQ ID NO: 467902 - DNA, 587 bp, Homo sapiens
aagttgcctggtagcaagtgacaaaacttgctcaagtggacttactagccaagggaatgcctgccttaggaaactgaaaattccaaatgtgaggtggctttaaggagactggactccacactgcagcagcacacctgcaggaactctgcctttgcaggaagctgctgtatcctcagactgttcctgccacccaagcagtttccatctccccacttagagctcctgtaatagacacctcatgccagagtgaacagaatgggagagaaatgaaaactcttttcctttttaaaatgcccagaacccctcctgaactgctcactamtcagatggcaatccatccctaaaccacctatggtggtcagacatcaagacatatgggagatatgctgattggcttaaactggtggttctcaatctttttggtccctggctccttttattctgttcagaactattggagattctgcaaagtcatttgtttatgtaggttatacctatagatgtgcaccatattataaacaaaaactgagaaaattaaaaaatatatatttatacatttattttaaaaagcaattgtaaagccatta

SEQ ID NO: 467903 - DNA, 643 bp, Homo sapiens
gtcaaataacagtttcttaagtaggtgagtgtggatatgggtgtgtagttttctacagcttcttaagtaggtgagtgtggatatgggtgtgtagttttctacagtttcttaagcaggtgagtgtggatatgggtgtgtaggtatttgaagaaggaaggtaaatttctaaactctctttatttcaattatgcagtaatcattttgtcctaccattattatttaaaaatattattttaatgagagtatactagtccttgctcttaatatgataacttatttaatcatttccctattattgggcatttagaaatttttcaaaattttcctatcatagtgttttgatgaacaatgatatacaaactgtttgtatttccattcataaaaatktataaaagattcacaaaagcaaaataacttacattaacattttaatggctctgtttatatagtgtcaaattggtttcaggataactaaaccaatatacactaaaaacaacaataaatatctattttttagcactggtgccactattgagtgtgcgtaattttaaacatctttgccaaagttaaataagggtgtctcatactgttgtaattaagcatttttattagcagtaagttgaatattttgctcacatatatt

SEQ ID NO: 467904 - DNA, 643 bp, Homo sapiens
gtcaaataacagtttcttaagtaggtgagtgtggatatgggtgtgtagttttctacagcttcttaagtaggtgagtgtggatatgggtgtgtagttttctacagtttcttaagcaggtgagtgtggatatgggtgtgtaggtatttgaagaaggaaggtaaatttctaaactctctttatttcaattatgcagtaatcattttgtcctaccattattatttaaaaatattattttaatgagagtatactagtccttgctcttaatatgataacttatttaatcatttccctattattgggcatttagaaatttttcaaaattttcctatcatagtgttttgatgaacaatgatatacaaactgtttgtatttccattcataaaaatttataaaagattcacaaaagcaaaataacttacattaacattttaatggctctgtttatatagtgtcaaattggtttcwggataactaaaccaatatacactaaaaacaacaataaatatctattttttagcactggtgccactattgagtgtgcgtaattttaaacatctttgccaaagttaaataagggtgtctcatactgttgtaattaagcatttttattagcagtaagttgaatattttgctcacatatatt

SEQ ID NO: 467905 - DNA, 572 bp, Homo sapiens
aaggcctcaaatattataaatatctatatctatatccacatatacctaattatttatctattagaactatcaccaaattatttaaggccctatctaatttattttattccttaacacctaacatatattaagctacttggacaaattatgactttcaacaagcctgtggtttcatataatggtttaaaagtgtgatgataatacccatggtaaacagctttttatgttttgaacattttraagtgtctgtacttaaaaaaatatagtaaatgattataaaattaaacaaatattttactcttaaacattaataactttatagagacaaaatactttatttttctctgagaccaatggtttctttatttgtattttcaaaaattgcactgtatcatttggacaaaatcacatattttatgtgttaatataatctcaggccagagaaatattgtattttatttatttctacatatgcatagttcctatcattacaaacagaccttgagtccacttgctctaatgcatataacaccattaagtaatacaaaaaattagaaatgtaaaagcagtga

SEQ ID NO: 467906 - DNA, 538 bp, Homo sapiens
gggttctatgtgtattaacaaaatatattaaaaaactacttcatctgaaatgagttaaataaagtactcagaatgtcttaagagttcaaaaatttctgcatttctgatttccaagattaaactcaacaactcccaggtgttaaaagtcaaattcatctgtaactagaggatatttttaggataactgtgacttccaacaaagtataaagaaattataagtcatctatttcaagtcatctattatatttaaattataagtcatctattatatttaaagaaatataattaattttcagtgctcactttcaattaagttgtktgtgtgtgtgtgtgtgtgtgtgtgtgtgtgtgtatactaatggatataaaggcaaaataaagtctgtggtttgttttacaataatttgggataaaaaattaagtatagatgaagcaaatgtggtaaacccataagaaatcacaacatgtaatagcaaaagtcccaaaataggcttttagtgtttaaagattaggatggaaggaagtttcacccaggatt

SEQ ID NO: 467907 - DNA, 555 bp, Homo sapiens
tctgataaacaaattcagttaagttgcagaatacaaaatcaacatacaaaattcagtaacatttctatatcccaacagtgaacaatctggaaaagaaacaaaaaatgtaatcccatttatgacagccatgcataaaattaaacacttaggaactaacttaaccaaagaagtgaaagatctctacaataaaaaccacaaaacattgatgaaagaagttgaagaatgctccaaaaaatggaaagatattccatgttcagggattagaagaattgatattgttaaaatgcccatactacccaaagcaaacctacagattcaatgcrattcgtgtcaaaataccaatgacattcttcacagaaataaaaaaaaatcctaaagtgtatatggattcacagaagacccagaatagccaaagctatcctaagcaaaaagaacaaaactgaggaatcacattatctgactaaaaattatactacagaggtatagtaaccaaaacagcatggtactgccataaaaagacacagagaccaatggaatggaatagagaacctagaa

SEQ ID NO: 467908 - DNA, 575 bp, Homo sapiens
gttcagatgcctcttgaacaccattaattcttagatttggtcttttaatgtaatttttaaatatcttgcaggcagtctttgctccttttcattctttcttcttttttcttctatgactgtgtattttctaatagcaggtctttgagttcattcattgtttcttttgcttagttcattttgctatttagagcctctaaagagttcttcagttcagcatatgcatttctcagttctcagctgtgtgttttttttttaattttaatctctttgttcaatttttctgatacatttttgaattgcttttctgtgttatcttaaagatcactaagtttctttaaaattgctattttgaactcttgttcagagagctgacaaatcaccttcttgttagggtcagtcactggattttttctttgtccttttggggagtttgtggttccttgtttgttwttgtttcttgtgagtttttatttatgtctttgcattttaggattagttattaatccccaaattctctgactggcttgttttggttttcatttagtatatttgcttagtaaacctttaccactatg

SEQ ID NO: 467909 - DNA, 628 bp, Homo sapiens
agtaggtgtatgtatttatgggatacagaagatgttttgatacaggcatgcaatgtgaaataagcacatcatggagaatgggttatccatcccctcaagcatttatccgttgagttgcaaacactctttaagttattttagagttaacttactattgagtatagtcaccctgttgtgctatcaaacagtaggtcttattcattttttctaacgttttttttaatactcattaaccttcccaccagataaccttttaaagtagaggcttgtcttcaaagcttgaaacacgtggctcaaaatgttgtggtatgtgttactagagaaacaagtgtgatgccagaattagggttatagctgacacaaaacaagttgtatctgtttctcaaaattgcgatgtaagtaggcatgccacttgtatcttcagaaaagaataagttgttaacaactaaacacattaactcagttttgagataaattaataagcttgcctttgggtttgaatctggacatattatttatgaatattaatttttcctgaaccattttagagaaatrtgaaaacatcacacctctctgtcctttaatacttcagtgtgtatttcctaggaacaaatacattctctttcat

SEQ ID NO: 467910 - DNA, 578 bp, Homo sapiens
cttctacttttatgttttgcttggcatcctaaatctgtttcagctctgggtaaggttaaatccttctcctgtgatctggattttcagkttccccagtggggatgtgtgttcagaggcaaacttttccctgctcacactttgggaactcacagttttttggctgtctcatagagtttgcaacagtaaaactgcttctttcaaagggtctgtgaattctttcagttttcctggtatgttcccatggtagttcttgcagcaaaagttcacagtgtgagtctccacacactgttctgtccattccaagcaggagctgcatgttagttctgtctgctatccaccattttccaattttgtgatatagttatgattttttattggtttgttgttttgtctttctatttaggacaagaatagtgtacacactgcagttagtgttataatatttagtgtttttctgtgtacttactattacgagtttgttttgtatcttcatattacttattattacttaataagtgattacttactgctcattaatgtccttttctttttgattgaagtattccctttagcatttc

SEQ ID NO: 467911 - DNA, 578 bp, Homo sapiens
cttctacttttatgttttgcttggcatcctaaatctgtttcagctctgggtaaggttaaatccttctcctgtgatctggattttcaggttccccagtggggatgtgtgttcagaggcaaacttttccctgctcacactttgggaactcacagttttttggctgtctcatagagtttgcaacagtaaaactgcttctttcaaagggtctgtgaattctttcagttttcctggtatgttcccatggtagttcttgcagcaaaagytcacagtgtgagtctccacacactgttctgtccattccaagcaggagctgcatgttagttctgtctgctatccaccattttccaattttgtgatatagttatgattttttattggtttgttgttttgtctttctatttaggacaagaatagtgtacacactgcagttagtgttataatatttagtgtttttctgtgtacttactattacgagtttgttttgtatcttcatattacttattattacttaataagtgattacttactgctcattaatgtccttttctttttgattgaagtattccctttagcatttc

SEQ ID NO: 467912 - DNA, 620 bp, Homo sapiens
ggggactcgggggaaagtgtgggaggggagtaggggataaaagactacacattgggtacggcgtacaccgcttgggtgatgggcaccaaaatctcagaaatcaccactaagaacttatctgtgtaaccaaacaccacctgttccccaaaaacctattgaaataataataataataaataataataaaatgaataaacaaaaacactgagctggcactcaaaccacaaaacacagtctttcccactctttcctcccctgtccaaaggcagaggagcctcactccacagcccacaagaagtactgctggattatcacwggtattcatttaaggcagaaaggctattaagtcagctggtggtgactgctgcctggcctgggactcactctttggggcagtgggcttccctgtggcccaggaaaggtctagaaatgctgttgaagagtcaactcttggaatcaagggcccccaagagcttgcttggtgctttacctccctgtggctgagccagtacctgaaaccagctagtctcagaggctcacccaaggcccttgatgtagtatctgggtatcactgctggttattcagagccaaagggcttttcagctagcaggtgatgaac

SEQ ID NO: 467913 - DNA, 594 bp, Homo sapiens
tggcatttgtgtagtagagatgttcaatgattgaaacaattttagggccttgaatatcatgatagccttactactttaaaaaacaagaatttgacattgccagactaatattcctgtatggaattcactaaaagaacattctcctttagaatgaaaaatgactctgcaaagtagtcttttaatatggttagttcttctgtgtcttactagggtaagaatttcagtcatcaaaaggaaagaaattttctaaataatgattattcaacacagaaaagccagatattttatctggcaaacagttttttttttttcccctgcaatttcatctgtaaaaaacaggtaaagttttattattagatataaattattattattattatttttcattctgagcataaaggagttatttttgtyacttatgcccttgatagaatcacaaccagttgcctgatggaatataatccacagctacctatataatctgggcgtgctgtgattttaatgcgttgttgcccagactggctggatgctattaatgaatattgctgccagctattgttatcataatgtaccggatgtagtcatttctattaa

SEQ ID NO: 467914 - DNA, 497 bp, Homo sapiens
agctttgaaaacaaatattggcccacctcactaaaacctatgcctaaacatactaacataaggtctaaatatgggrcggtctttttttatatgatatttttctgtggagataatctgaacatattttctgcaggaagacatttgcttctgttttcttaaaagtattttttagaggagattttctgtttctgtatctttgtgtttttttgaatttgaactttggaaacaaagaagggagataggcctaagtcatagggcaataggaaacttgtactaatgactgtaagatgagctataaaatgcttttttttttggatacataatttatagactgggtgtcagaagacttttccaatctactttttgaataaaggaagatggaatataaaatgatttgtttcccttaaaaagagggagggcaggttatagactgaggaactgaacaattttaaaaagttcaaacaattatttgaaccaactatttaccatatctgcag

SEQ ID NO: 467915 - DNA, 568 bp, Homo sapiens
ttggaaatggaaaatcatcaattttccaattaaatgtctgttccaatcaacattataccttttaggttgtcattgtcatttttaagtttaagcaactttaaggattttgaatctggctgcctgtaaattaaaggtgaaagtaatcattgtgttggattggwacattttgtcaattgagagtggtttccttgttcttagtgtatgaaaagtttatttttctaatgtagattaataaaggagataaagaaaaacaaaatgagtgatttatgtgtgtgagaaaagaaccatttcctcaaggattaaataaaattcataccttttgtttcttttgaaaagtttttaaaataaattttaatgaatgtgtcctttaaatattcctttaaaaatgtatcctattttaaaatggactctctgagagaaggaattgatacctgtgtttaaaatcaaaaatagcatgcatagagactgtttttctagttggttgaagcttttttccctctcctttacatcagtgaaccagcatcttgcccttcagaccctacagcacactcttgggctcatgaagtgt

SEQ ID NO: 467916 - DNA, 568 bp, Homo sapiens
ttggaaatggaaaatcatcaattttccaattaaatgtctgttccaatcaacattataccttttaggttgtcattgtcatttttaagtttaagcaactttaaggattttgaatctggctgcctgtaaattaaaggtgaaagtaatcattgtgttggattggaacattttgtcaattgagagtggtttccttgttcttagtgtatgaaaagtttatttttctaatgtagattaataaaggagataaagaaaaacaaaatgagtgatttatgtgtgtgagaaaagaaccatktcctcaaggattaaataaaattcataccttttgtttcttttgaaaagtttttaaaataaattttaatgaatgtgtcctttaaatattcctttaaaaatgtatcctattttaaaatggactctctgagagaaggaattgatacctgtgtttaaaatcaaaaatagcatgcatagagactgtttttctagttggttgaagcttttttccctctcctttacatcagtgaaccagcatcttgcccttcagaccctacagcacactcttgggctcatgaagtgt

SEQ ID NO: 467917 - DNA, 614 bp, Homo sapiens
tatgattttatccttccttytgttaatgtggtgtatcacatttattgatttgtttatgttgaatcatccttgcatcccagggataaatcccacttgatcatggcaaatgatagtttgatgtgctgttgaatttggtttgttagcattttgtgagaattttacatatatatttataatatggtttggatttgtgccccaacccaaatctcatgtcaaattgtaatccccactgttggaggagaggcctgacaagaggttactggatcatggggatggattttcacctagctgttctcatgatagcacgtgagttctcatgagaactggttgtttaaaggtgtgtagcaactccccccttactgtcttcctgctgctccggccatgcaagatgtgcttgtttccctttcctccatgatcaaaagtttcctgaggccaccgcagccatgcttcctgtacaacctgaagaactgtgagccaattaaacctcgtttctttataaattacccagtttcaggcatttctttatagcagtatgagaacaaactaatacagtttattagggatattggcctgcagtattgttttctggtggtgtccttatctggattcagtat

SEQ ID NO: 467918 - DNA, 614 bp, Homo sapiens
tatgattttatccttccttctgttaatgtggtgtatcacatttattgatttgtttatgttgaatcatccttgcatcccagggataaatcccacttgatcatggcaaatgatagtttgatgtgctgttgaatttggtttgttagcattttgtgagaattttacatatatatttataatatggtttggatttgtgccccaacccaaatctcatgtcaaattgtaatccccactgttggaggagaggcctgacaagaggttactggatcatggggatggattttcacctagctgttctcatgatagcacgtgagttctcatgagaactggttgtttaaaggtgtgtagcaactccccccttactgtcttcctgctgctccggccatgcaagatgtgcttgtttccctttcctccatgatcaaaagtttcctgaggccaccscagccatgcttcctgtacaacctgaagaactgtgagccaattaaacctcgtttctttataaattacccagtttcaggcatttctttatagcagtatgagaacaaactaatacagtttattagggatattggcctgcagtattgttttctggtggtgtccttatctggattcagtat

SEQ ID NO: 467919 - DNA, 611 bp, Homo sapiens
aggataaggaagagagaaagacagggtggggtaggagaaaaagagatgactttctggaggaggtagaggatttctggatcttttgtgtgtgtgtgttgaaaaagaaataattcaatcgacatttacgaaaaggtttcaccaagaaaaatggattcatgtctttgtcttagtccattcaggtggctataacaaaatcctttacactgggtaacttataagcaacagaggtttattttgcacagttctgggggctgggaagtccaagaccaagccactggtgctgcctagtgggcgtttgcttcctgacactgtttttctagctgtgtcctcacacagtggaaagtkccaaggcggctctctgggatctcttttataaggcactaatctcattcatgagggatcttcctctgtggcctgagcatctctcaaaggaccacctcctaataccatcacttagaattttaacataaaatttgagacattctgatcatagcagtctttcttttttaaatcacatctgggaacccagaacccccctctgcagaatgagaagtggttacactcagcaggggtgcctccctttaaatggggtacccactttccagtttgcc

SEQ ID NO: 467920 - DNA, 611 bp, Homo sapiens
aggataaggaagagagaaagacagggtggggtaggagaaaaagagatgactttctggaggaggtagaggatttctggatcttttgtgtgtgtgtgttgaaaaagaaataattcaatcgacatttacgaaaaggtttcaccaagaaaaatggattcatgtctttgtcttagtccattcaggtggctataacaaaatcctttacactgggtaacttataagcaacagaggtttattttgcacagttctgggggctgggaagtccaagaccaagccactggtgctgcctagtgggcgtttgcttcctgacactgtttttctagctgtgtcctcacacagtggaaagtgmcaaggcggctctctgggatctcttttataaggcactaatctcattcatgagggatcttcctctgtggcctgagcatctctcaaaggaccacctcctaataccatcacttagaattttaacataaaatttgagacattctgatcatagcagtctttcttttttaaatcacatctgggaacccagaacccccctctgcagaatgagaagtggttacactcagcaggggtgcctccctttaaatggggtacccactttccagtttgcc

SEQ ID NO: 467921 - DNA, 614 bp, Homo sapiens
ttaactgagaaggaaaagacttcgacaggagcagctttggagacagaagaccaggggctccattttaaacatggtatatctgagatgcatgttagccatgtgagtgaatatgcggagtgaagagttgggtatcagagtctagggttaggattgaggctgggtggtcctttaattttctgtgctatttttcagttttcatttggaaatcttcctcctccttctacacacacacagacacacacacacacacacacaaacacacacaatccttgaggcttaaatgaagtggactcyactctctaacttgatgagggggaaatgacttagaccaccaattcgaacctgcattgcctttccatagaaatggttttagagattggcataagattcctttacaatttcttccacaaaagattccttttcttctgtggaaaaaaaccacatttgtgacataattaaataacaataccagggtgcatgaacatgagaacttttcaaagacttttgagatcgaggacttgaagcagagacaatgaaagagttggagcttctgcagctgtattgtgactgtgaggagtgaagggaactgagtgcatgagatagacagagaccag

SEQ ID NO: 467922 - DNA, 559 bp, Homo sapiens
actggctgccttctgggaatttgtttttctcctttttcttttttgtttttttgagacaaagtcttactttgttgcccaggttggagtgcagtggcacaatctcagctcgctgcaacctccgcctcctgggttcaagcaattttcctgcctcagcctccctagtagctgagattacaggcatgcaccatgattcccggctaatttgcgtatttttagtagagacagggtttcaccatgttgatcaggctggtctcaaactcctgacatcaaatgatccacgcacctcagcctcccaaagtgctgggattacaggcgtgaaccaccatgcctggcctgtttttctccttgtttgaattcctacttcatggagctcctatcttcttcctttttcattctccagtgatttcaacaacttagagaaatggtgcactggcggaggatrtggtggtggcagtgcttcaattctttcgtctctctagtcaaactgccccagcctaggctggggttaagtggtagaggaggagtgtgggttccagggagggatgtgggaagtctcctg

SEQ ID NO: 467923 - DNA, 602 bp, Homo sapiens
ttcaaaggagcagaaaaaatgatgtaaaaatagacacaagtataaatgatcaattgatttcagataaatgttaaaagaaattctaagaatagaaagagtctgcaacaaatgttactagaacaactgcatatacacatgaaaaatataacacctacccttaactcacaacataaagaaaattaactcaaaatgtaccatagatgtaaatgcaaaaaaataaaaaaaaatttctagatataaacataggagaaaatttttgcatttgggaaataagattttttggcattacacaagaaccacaaaccrtaagagaggcaaaaaaaattatactttggttatgaattgaatttttgtgtcccctaaaattcacatgttggagccttaacttccaatatgatggtatatgaagatgaggctttggggaggtaattggggatataggaggtcatgagaatggggccctggcctgatgagatcataaccctaaagaagagacctcagaaactgaccatgctggcatcctgtttctgtagaattataagaaaataaatgtctattgtttaagcccccagtctaagtattttttatggtagcccatgctg

SEQ ID NO: 467924 - DNA, 552 bp, Homo sapiens
gggggttctgaaagaagcagtccagggacgcctcccatattagtccccatggtgggattacatgcccattcatgaactagtccggtgccccaaagatgggaaaagctgtctaataggtacttttcataattcctaccccrtgacatcccatgcaggcttctgttgtactaatatgctctataacctgatgtcagtgactgtatcacaggtgatgtacaaattgtgagaagtcatcaagatgtagagtcatgaattgtacactttacatacattggatttcaacaaagtgtataaaaaacatttcaggcacatatttaaaagggtaagtggggaataatagtaatgttaatctccaatttaaagccaatatgtcatggatataacaataatcaaaatgtggagatttttaacacactttctcaaagtttgagagagcaaacagacaacaaaaaatacaaaatggaaagatttgaataataaaatgttgatttaacaggtggtaatgagaataaataagatatagaacactttcatctcattaactctatattt

SEQ ID NO: 467925 - DNA, 622 bp, Homo sapiens
tcttgaaaatattgaagaaatgagaaaaactgggacaaagaaaaaacaaataacaagatggtagactaaacctaatcatattaatgatagccttaaatgtaaatagtttaaatgccccaatgaaaagacagagatttttcagattggctaaaagagcaagtctcaactatatgctacctacaaaacattcactctaaatataaagacacaaatagttaaaaagttaaagtatggaaaaatatataccatgctaacaccagtaaaaagaaagctcctgtggctatattaatatcagacaaaatatatttcagaacaaagaatattgccaggataaagaaaktcatttcataaaatgatacaaggatcaattcatcagaaggatgtaacattcctaaatgtttctgtttctacatctaataacaaagctttagaatacatgaaacaaaagtgattgaattgcaagggagaaatcaacaaatccacaactttggtagatattaatacccctctctcaataattgatacaacaagtagacaaaaaaatcagcaaaaagacagtagacaacactatcaaccaacatgacatggttgacatgaaacattctactaaacaacagcagaa

SEQ ID NO: 467926 - DNA, 438 bp, Homo sapiens
acttgcgtatatgttgcctggaatgacaccatgtggagaaagccatagatgctgcagaatagaaggagtttaactataagaacaagaatccttggaaaggtgagggtgggtaggatcagagtaggaccrgaaggattcacctctgataggagcagacacatttctcctgtttcaaaaacagggaaggcagagacaatatgggcacagagactgaggtacatagatttgacgagatgaaggcactcttgtccaatattagatttctttttcaatgaagtatgagtctaagtcatcagctatgaatagggagggagaagtgtgagaggttttgggagagaggaaatgtgaaatcgtcatttcaaagactcaaaggggaactttattagggaaaactagtaggactctttcgcagtactaagggcctatttgaggcctgag

SEQ ID NO: 467927 - DNA, 438 bp, Homo sapiens
acttgcgtatatgttgcctggaatgacaccatgtggagaaagccatagatgctgcagaatagaaggagtttaactataagaacaagaatccttggaaaggtgagggtgggtaggatcagagtaggaccggaaggattcacctctgataggagcagacacatttctyctgtttcaaaaacagggaaggcagagacaatatgggcacagagactgaggtacatagatttgacgagatgaaggcactcttgtccaatattagatttctttttcaatgaagtatgagtctaagtcatcagctatgaatagggagggagaagtgtgagaggttttgggagagaggaaatgtgaaatcgtcatttcaaagactcaaaggggaactttattagggaaaactagtaggactctttcgcagtactaagggcctatttgaggcctgag

SEQ ID NO: 467928 - DNA, 466 bp, Homo sapiens
ctccaacaggcatatttatagatatgaacaagaaagctgagcttttccagtagatgccttaagccacaytccctgcatctatctcttccattccatgttggtccttgagtaaactccgaggaatcatagcattccatgaaatttagtttaaaaagcactattataaatcattaaagccccttgatacttatgtgtctactgtctgtgatctgatgccataaacagttaaataataattttggactagactttgtcttgtttattttctaatttactttttttcaacaaactttccaacttctagttaataaaatgcattttcattgagaaaatttgaaaaatatggaaaaacacaaagaatgaaactatctgtgatcccatcttccaagaataacttctgttaacacggttacatttgtcacacttataagtctaattctggtcaatattttatatatagcaatga

SEQ ID NO: 467929 - DNA, 608 bp, Homo sapiens
tattttatcttttctatgacaagtcatagaatgcacaacctttaataacaagagctttaaggactctgggaggacaaggtggctgtcctggttcttcatgagtcsatgcttaacattggacttatgtcttcttgaataccagttgtttctccaatttaggtgcatagcagtgataactaatgggttatcatagttaatttgacttaggccatggagtttattcaaattgtatatctaaacaattttagtattgcccaatttagcatgaaatctggcaaagtattgtgttggtacttaattttttgttctacttggattagcagttttataaaccactcagtctttttattgaagtttaaggaatttttacttagtccaaatgatatgaatttaaagttactagaaacctatatttaagagtgcttttttagggtcctttccatcctttcatgagcctcctaaaagacactatattctaggattttgtgtgcttgtgaagttttcagaaactgcattaacattatgcaactaactgtggaaatgactttaaatagtcataattagagacacaattgacaaggaagtctggttattttggtggtccacaa

SEQ ID NO: 467930 - DNA, 608 bp, Homo sapiens
tattttatcttttctatgacaagtcatagaatgcacaacctttaataacaagagctttaaggactctgggaggacaaggtggctgtcctggttcttcatgagtcgatgcttaacattggacttatgtcttcttgaataccagttgtttctccaatttaggtgcatagcagtgataactaatgggttatcatagttaatttgacttaggccatggagtttattcaaattgtatatctaaacaattttagtattgcccaatttagcatgaaatctggcaaagtattgtgttggtacttaattttttgytctacttggattagcagttttataaaccactcagtctttttattgaagtttaaggaatttttacttagtccaaatgatatgaatttaaagttactagaaacctatatttaagagtgcttttttagggtcctttccatcctttcatgagcctcctaaaagacactatattctaggattttgtgtgcttgtgaagttttcagaaactgcattaacattatgcaactaactgtggaaatgactttaaatagtcataattagagacacaattgacaaggaagtctggttattttggtggtccacaa

SEQ ID NO: 467931 - DNA, 546 bp, Homo sapiens
aacatgttcctctgcaactctatttcctgcaagttggtagttcagtcttgaagcttgatagattcagattgaagatcttagcaagaatatctcaatctttagatgatggtttatttttccattgtrtctaatggactctctttttgtgatgatagtagccattcatggacattccttgatccattattttactaaagttcacaaaatgtgagtttctaattttatcatttttttttttttgaaggagtttctctcttgttgcccaggctggagtgcaacagcacaatcttggctcaccgcaacttccgactcctgggttcgtgattctcctgcctcagtcttccgagtagctggaactacgggcatgcaccatcacacctggctaattttgtgtttttagtagagacagggtttctccatgttggtcaggctggtctcgaactcctgacctcaggtgatcggaggtcacctcggcctcccaaaatgctgggattacagcctgagccatggtgcccgctgatttttcttaaagctggaatgcttctg

SEQ ID NO: 467932 - DNA, 546 bp, Homo sapiens
aacatgttcctctgcaactctatttcctgcaagttggtagttcagtcttgaagcttgatagattcagattgaagatcttagcaagaatatctcaatctttagatgatggtttatttttccattgtgtctaatggactctctttttgtgatgatagtagccattcatggacattccttgatccattattttactaaagttcacaaaatgtgagtttctaattttatcatttttttttttttgaaggagtttctctcttgttgcccaggctggagtgcaacagcacaatcttggctcaccgcaacttccgactcctgggttcgtgattctcctgcctcagtcttccragtagctggaactacgggcatgcaccatcacacctggctaattttgtgtttttagtagagacagggtttctccatgttggtcaggctggtctcgaactcctgacctcaggtgatcggaggtcacctcggcctcccaaaatgctgggattacagcctgagccatggtgcccgctgatttttcttaaagctggaatgcttctg

SEQ ID NO: 467933 - DNA, 584 bp, Homo sapiens
cgtatggtttggctgtgtccccacgcaaaatctcatcttgaattataatccccataattcccacgtgtaaagggcaagaccaggtggaggtaatgggatcctgggggcagtttctcctatgctgttcttatgatagagtctcatgagatctgatggttttataagcatctggcattttctcctgcttgcactcacttcatcctgtcaccctgcgaagaaggtgcctgcttcttctttgccttctgccatgattgtaagtttcctgaggcctccccagctatgtggaactgtgrgtcaattaaacctctttcctttataaattacgcagtctcaggtatttcttcatagcagtgtgagaacagactaatacagcacctgtagagggagtaggcaaaattagtgcatttctcctaccctagattcaggcccttggctttctagataccttaagggagaataaccaaggttccctctaaaccctgggcctggtctggccacccagtcacagatcttacagacacaactgaatttttattgttttagatctctctgtttcaaaaggggctcttactttacatttgtct

SEQ ID NO: 467934 - DNA, 577 bp, Homo sapiens
gacaatcatgccttcccaacaatccccaaaagtcttaactcattccagcattaactcagaagtccaagtccaaagtttcatctgagacaaggcaagtcccttccacctatgagcctataaaattaaaacccattagttacttccaaaatacaatgagrcattggctacattgccaatatacattacagcattggctaaatagttccattccaaaagaaagaaatcagccaaaaccaagggactactgtccccatgcaagtctgaaatccagcacaccagtcattaaatcttaaagctctaaaataatattttttgactccacgtctcacattcaggccacactgttgcaaagggtgggctcccaaggtcttgggtagctctgtctctgtgactctgcagggtacagccccccacccccagctgctttcatgggctggtgttgagtgcatgagactttttcaggtgcttgatgcaagctgttggtggatctaccattctggggtgtggagcatggtagccctcttctcacagctccactaggcagtaccccaattgcgactctgtgggggcttaaatc

SEQ ID NO: 467935 - DNA, 386 bp, Homo sapiens
gcagacttgaagacagcccagctgggagatcccacccttgtccatacacccctcaccactctacacacaacactctttcgacagccttcaggctgggaagaggaccacatgaatcttggaagcaggcccagaatcacctgggcagggacttcggggatgtgcatttgggtgccaggaggagcttgttctggaggaaacgtcgctcacactgtgaggaagggtgtggctggaggagggcyagagcagagtcctctataagatggggacatcagtgaagggcttcctgactagggactgagggtggtaggtgctgagtaccatggtgcacagacttccagtcaactaatttccagctttgctctcagttactgtctgtggttatttca

SEQ ID NO: 467936 - DNA, 550 bp, Homo sapiens
agggggcaggctgacagtaagggtgaagtatattcctggctcattttttgtctggttgcagactagctatggctaattcgcaactgaagttgtagttcctgtcaggtggccatctgagactacagcattcccttcaggttgtgggaatctctccatcttcctcactcyttgaagatgagaggtgatgatactcttcaacccgttaggcctagcatggagggttcatcattccttgctggttttccttcaccatgctcagacctttgtaaatatcattttattcaacgccctttaattactacatttgaggatggcaaactgcttctgtccagaacttgaactgttacatttttcttgaatttagtatagtatttttatattggacaatatcataattcaaatatccaacattatcagaaaagtaagaatgctggatttttagtatactgacttataagcacatgagtaaccgaccttcagtaaatactcattacacatttgcctgctaacttagggtacagttaatcaaagttaacttttttgatgagta

SEQ ID NO: 467937 - DNA, 248 bp, Homo sapiens
gaaaaacaagctactatccagtgatcaaccaaaaaagattgatgttttgctatttcttgattggtgaatagtattgtattatgtcttatgaagaatattaagagtaattgaaattttcacatcagtgagaaatacaaggcaatacatattcaaatatgkgatataaaatttgcaaaatgcctgtaaaagaaactatgtatttaagcgctaagagagataaaattcagtaattgttaaaaagcagtgca

SEQ ID NO: 467938 - DNA, 248 bp, Homo sapiens
gaaaaacaagctactatccagtgatcaaccaaaaaagattgatgttttgctatttcttgattggtgaatagtattgtattatgtcttatgaagaatattaagagtaattgaaattttcacatcagtgagaaatacaaggcaatacatattcaaatatgggayataaaatttgcaaaatgcctgtaaaagaaactatgtatttaagcgctaagagagataaaattcagtaattgttaaaaagcagtgca

SEQ ID NO: 467939 - DNA, 309 bp, Homo sapiens
gtgactactaggcacatattttgatatatatctgttgaataaatgaacaaataaggaattgatgaataatttgttatattttggcagtacaccatcctacctctcctttccattggtattctgattgttttttcaggatgactctattatgagtagtcttggtgagaagtaatgagcacttcccatatagaggtgaaagagagcagatactcattgtctccactcccataaatgcagggtgaacaggtagcataractcagccacccaaatctcatgacaaggcatgaacagggagatgggtgaaggtc

SEQ ID NO: 467940 - DNA, 422 bp, Homo sapiens
aatatatgaaaatcgccctgcattaagcctagcacatggcagctatcaagaagcaccagttgttaatagttgctccctctctcctgcccacccagttacagattgcacaccttggaactcatgctggagagargggcctttccctagacaaagtgtcaaccctttccgtgacaaagcagagtgccgcctgaaacattatcccacgcgggagcacattattcatcatatttttttttataagaattgctattgcccatcggcatcagcacagagtgtattcattctcttgtaacatttttctccgtaggagggacactggaaagtcaaaaattgtgaagaaagacttttttacatttgtaaaaaagcaggccatgtcctctctgatgctgaatcaggatgtcaagaggtaagtgctgttaaca

SEQ ID NO: 467941 - DNA, 592 bp, Homo sapiens
ccaatcagagcttctcagggccaagtctggcatatgccacctgctgtcccaagtctgacttgggcagagtgccccctgcctgacacctaggtcatggcatgcagggctatctccagttctctggagctgagtgtaccttctggagcttcttttaaagtggaacgatggcaaactgcaatgtctgtgggaggaggagagcaagggaacagataacataagaakagaagtgacaattgcaaacttcaattgtgtgtttcctctgtgcaggcactgtgctatgcatcaacacgcactgtcccctcagccctcacagcagctctgtgacacaggcactattacaattgccattttgtaagcaaggaaactgaggcttaaagatgcattagatggggaaactggaatttgcactgattgcagagcttaagtccagcactgcatccctcttctgaagttccaggaagagcacagggaggagagggcaagagagatgcctgtcaggagaaaggagcagtgtttgcaatttcagagccttgtttggggatgtgccagcatagaggagtttagccccgaaggcacaaagcccttcacaaag

SEQ ID NO: 467942 - DNA, 625 bp, Homo sapiens
caaactacattaagctggaacttcaaaggactaatctttccagtaatagtatgtgaaaactaaacccacctactctccagcccagaaaactgctggggaatttgacttggcaccaaaaaggccagaaggaaaataggaaaggaaaatttaatcctataaacttgtaactagataccagatatcctgcatatttttatctgagaatacgtagtytaagtagccaaggagcttcaagtcttgaacttgatttaaagtggtttactagcagtagtattcactcactggaaggtgtataaaaatctatcatgaagaaaggtatttccatccaagatctcaggatatcctggcaaatatcattttcaggatatggaccatcaaaagtcaaataaaagttggcacacataaaaatatggagctgtccagctgaaacagcacacagcaggtatacacttgcagacttcagactctggaattatcagatgaagatttaatatatttaaataaataaatgacaagcttaagaatatttgcaggagccaggagcagcggctcatgcctgaaatcccaacactttgggagccaaggtaggagaatcacttgagcccaggaattcaagattgcagtg

SEQ ID NO: 467943 - DNA, 649 bp, Homo sapiens
gactcagaaaaaaaaaaaaaaaaaagacaacttttcacaacatagtacaataagacacagagaaacaacacaaagttaaaagcaggaggatacagttaaagtgtagaacttttattagtcttccttttgtgtgtttgttttttgtttatgcagtctgttaagttgccatcagtttaaaataatgggtcataagataagtcataaacctcatgtaacctcaaatggaaaaacatacaatggatacacaaaaaataaaaaacaagaaattaaatcataccaccagagaaaattattttcatgaaaaagaagatggaaagaagggagagatgaccatgaaaccacgagaaaacaaattacaaaatggcaggaggaagttcctacttaaatgaaawtattgaatgtaaatggactaaactctccaataaaaagaaataaagtggctgaatggatgaaaaaacatgacccaatgatctgttgcccacaagaaacacttcacctatgaagatacacatagactggaaaataaagacatgggaaaagatattccttgctaatggaaacaaaacaggagcaggggtaactacacttataacagataaaatagatctcaagacaaaaactccaaaaagagacaaagaaggtctttgta

SEQ ID NO: 467944 - DNA, 649 bp, Homo sapiens
aagagaaatgctattgctctttttattaaactagcttatttattccctaagaattacttaaaatttgcccaaaaattgctacctgaagtataacccatattcttttgtgttaaaccgtgtttattattcttcagatgtatttctaaaaaacatgacatcaattttgctgtgctaaataagtattgtatattacacttttggaaacacttacagacataaagcatttccaacagacaagacatgtacaaataatttcccccagatttttgtatagtcattttagagctttttaacaagggtaagaactttgttgatgagatgtaagccttttttcccatttgggcattaaaaatgatgggatttggcaaatgggaaccatatttatgcaaagaaaaaacagtagcaggacacmctggggaagtgagttctgagcttggtgctctcactgactagtggtgtgtacttacttaaacttgacttactaaaatggtatttgggacaattggcctaggtactctctataagcccacagtctattctacttcagcaattctatatttgcttgtcgaattctacctcttaatttctaactcttcattcatcatgtaccaggcactgtactagatgcctgaaagataaagttccagcc

SEQ ID NO: 467945 - DNA, 552 bp, Homo sapiens
ctttaactatatcctatatatttaatacatttaattttcaggtttgttaaaaaaaaaaaaaaawttttcaggtttgtttagcttaaatttatgtctgccactttgcttttagttttctatattctttatccatattccaaatgtataatataatcacttgaaaatgaataggaagaaaacgtgttttgactagatgcatgctttatttttatgtaaagaggaagataactgtatataaacactgtaatctacttgataaattgtatcccacatgaatagagactatcaagttatactatgcttggacaaataagtaattattttgtaaattttgagaaccaagtttctgagacaggagttaaaaaaaaaaggctagactatatcttgtagtactggattgatagagatcagtataaattcatgtttatatgtaaatatattcatatacatatatacatacatgtatgcatataaacatatgtatgcacccacagataaagggatatagaagtatagattcctatatatacatggatatacatacatttctta

SEQ ID NO: 467946 - DNA, 603 bp, Homo sapiens
acgtatagtttgttttctgctcctataacaaaataacatagactgagtaatttataaataaaagaaatttatttggttcatgattctggaagctaggattcaaagattgagaggcgacaactggtgaggtccttcttgctgcaccataacatagcagaaggcatcacaaggtcagagagcatatgagagagatagagagaaaaagggggtgaatctctcatatcccacacccaagatgatggcattaattcatttgtgagtgcagagtcctcatcacctaatgcctcttagaggttccacctcttaatactgtcacaatgacaattacatttcaacctgcggtttaaggggacattcaaaccataccccaagggggggcaaaaaagcagattctgctatacccatatcattgtcatcttttcataatggtcaaactccaataaaaaaataggtaaggtttttcctcccagktttttagtaatttaaccgttaattaatatttacaacaaacgatacattaacattgttatttaagaggttaaccatattttgatgtatattttaagattttctaagagtgtagattttacgtcaagtgttctt

SEQ ID NO: 467947 - DNA, 620 bp, Homo sapiens
gaaactgttgcaatatcatttctattacaaaacatgacagatgtctaaagtttggttttcttaaaatggcaagaaattgaacttaccttaagggcataaagaaaggagaaaataatgattgtttcttttcctcataatgtgattaggccattttttagattcagcatgccatattctaaaaacttacattaattccaatcaaatatagagctgacatcttggtaatttaccacatattaaactgtattttttttycctcaaatgcgacaatatgattctcagttcatctggaataaagaatgtgagaataacctaggtaattttgaaaaataagagtaatgaggacggactttccttattagatattatagtgtataataaaaatctaataatcgagaaaataattaggtactagtccaagtttaggcagataaatggagtccagaaatagacctaaataaaataaggctaagtgtagtattaaagtggcatcttaatcagaggataaaagatgaattatctaactaatgatgttgggataattaggcagccactcacggaagaggaaaggatattcattattcacatctcacaaatatgttttagatatattacaaaca

SEQ ID NO: 467948 - DNA, 620 bp, Homo sapiens
gaaactgttgcaatatcatttctattacaaaacatgacagatgtctaaagtttggttttcttaaaatggcaagaaattgaacttaccttaagggcataaagaaaggagaaaataatgattgtttcttttcctcataatgtgattaggccattttttagattcagcatgccatattctaaaaacttacattaattccaatcaaatatagagctgacatcttggtaatttaccacatattaaactgtattttttttccctcaaatgcgacaatatgattctcagttcatctggaataaagaatgtgagaataacctaggtaattttgaaaaataagagtaatgaggacggactttccttattagatattatagtgtataataaaaatctaataatcgagaaaataattaggtactagtccaagtttaggcagataaatggagtccagaaatagacctaaataaaataagsctaagtgtagtattaaagtggcatcttaatcagaggataaaagatgaattatctaactaatgatgttgggataattaggcagccactcacggaagaggaaaggatattcattattcacatctcacaaatatgttttagatatattacaaaca

SEQ ID NO: 467949 - DNA, 602 bp, Homo sapiens
tgtggaactgggagtcacttaaatctctttcctttataaattacccagtctcgggtatttctttatagcagtaggaaaatggactaatacagacccccacggcttagagataaaaactcaaactccttaatatcttcttgcatcggggcccartttttctttaacaattctatctcctcttattgttctataggtactttgctctgtaaaaatttcattctactttatgttttttcaaacataaatgaacaatttttacccctgtttttgcttatcctatgtcatcttccttgaatgccaatttatgatgtctacctcttagaatcctgttcttcaagatttagattgaatcctaatgtttttcatatccttctctgatatccccatcaaaattttctcttttcaccgagaacttaaactttgctttgttgtatgtgtttttcttatattcaagtttcattcttgcttgcatttgtattcatcacagaacctagtagtgtgccttgctgctagtattcatttactaaatgcttattgtctagaaaaataaaataaaataaaataaaataaatgacccaatgacgcctctccctcagtggttt

SEQ ID NO: 467950 - DNA, 586 bp, Homo sapiens
atactagtgcgtgtgaggtgatatcacattagtttgacttggatttacctaaaggatgttgagcatcttttcatgtattttttgggcatttatatattgtctttggaataatgtcaacttaagtattttgatcatttttaaattcattatttttctgtgtgttattgcgttgtaagtgtcctttttatatttttsatactagactaccattatcagatatattttttacaaacattttctcccattctgttggctgtcttttttatgtacttgatagcatcctttgctgaacagaaattttcagttttctcaaggtcccacttatctttttttcttcttttgtttgtgtttttggtgtcaaatctaagaactaatatcatgaagatttacccctttgttttcttctaaaagtttaatagttttagctcttctatttaggtcatttatctattttggattaattttttttgtatgtggtgtgaggtagaagttgaactttagtttttacatgtggatatcctgttgtcccagaatcatttgttgaagagactgttctttctctattaaataatcttgacagcctcat

SEQ ID NO: 467951 - DNA, 607 bp, Homo sapiens
tttggtaaaaatagctatgcttttgacttccctctatatgggaacattaaatgttttcaaagaataaaaagaaataatatgcagatttaggtgcttaaaacatttgatttggtgcactctgtggttggtatatttgaatatttggtgtaattgtattaatgaaaatagtagtacattgacataattgtaatttttttaaaaagagtagttttaggaagccatttagtaaaatagtctatgataggcaatatttaatcaaggagagctctttaaaattaaatttgaggctgggactagttgcaaagtcagttgtattaatagtttgaacttggtttcaaataaaggcaacatttgtttcattgttttctttgtcttaaattcacttatttcttctttgatctttrgtatttcttttcgtctgctaattgtgggttcagtttgctcttgcttttctagtttttaaaaatgctttattgagcaatctatttgaagttttttaaattattttttgttgtaggcaattatggctataaatttccctcttagtactgcttttgctataactcataggttttgttatgttgtgtttccataatcatttgtttca

SEQ ID NO: 467952 - DNA, 507 bp, Homo sapiens
ttccattgatatgcttcttttttcatcagtggttgcagcatttgcctgactcaagccagaagtgacccaggagacagactatcatcaacagttcatcatctcccactcctcatctttcttttccttaaacaaaatcttagccaacgtttacarttagagacaaaggtcatttcaatactcaactcactgtgccaaatgcatcaagtacacagggtcagagaactattttaaaaggactccacaaggtgtgcttaaattaggttttgataaaggtaaagggtatggtacagcaggagaaagaaaacacagacaaacattagagaggtttgagattcccagacaaagcccccatgatctttctcaattttacagaatgtgctttgtcattagatcatgatttgccaagatatgtatgagacatggtggtcttagggcagtcaagcacaagtttcctgaggaatcctcctactcgactggtcaatagcttgaatcgggctgtgtaactag

SEQ ID NO: 467953 - DNA, 507 bp, Homo sapiens
ttccattgatatgcttcttttttcatcagtggttgcagcatttgcctgactcaagccagaagtgacccaggagacagactatcatcaacagttcatcatctcccactcctcatctttcttttccttaaacaaaatcttagccaacgtttacaattagagacaaaggtcatttcaatactcaactcactgtgccaaatgcatcaagtacacagggtcagagaactattttaaaaggactccacaaggtgtgcttaaattaggttttgataaaggtaaagggtatggtacagcaggagaaagaaaacacagasaaacattagagaggtttgagattcccagacaaagcccccatgatctttctcaattttacagaatgtgctttgtcattagatcatgatttgccaagatatgtatgagacatggtggtcttagggcagtcaagcacaagtttcctgaggaatcctcctactcgactggtcaatagcttgaatcgggctgtgtaactag

SEQ ID NO: 467954 - DNA, 535 bp, Homo sapiens
agattttctactttcattttggggtaatgaagccacactgagaagacctcataaagtcagagccagaatactacttcctcactctgaacttctgctcaattaatccctaaaacctatcaacgatggcagttgacagcttgtctctcatggggattttaagcagttaactcttttgggattctttcgttaacgttaggggcaatggttaagtgggtctcaaagggcctctctgcattttgtttagcaaagataagcagaaagccaatgaaataaacaaaaggagtaattgagaaaagcacttacatttgttttgacaaacttgaaastaccattacgcatcttttcataaaggaaagtaggaacaacttgctgggtaaaaccaagagttgactttttcatcagatgcttggtgttaataagctacattcactctacagggaagcattcaatatccatcatccatttaaggccttgaaaattgtgcacatctaaaaagaagagtcctggtttttttgttttagaataatgatgatga

SEQ ID NO: 467955 - DNA, 615 bp, Homo sapiens
ggaaataattattttcagatatatattaaaattactgcattgtttcacattactcataaaaaattggtactgggaaaagggtacacattcatatgtgtttcttttccaytgatcattctccattttattttttacaattctttggtacatttagcagcttataccagtttttcctctgcagctcctgcttcaaggcaaactttaccatgcattatttctcatccatttgtttattgactcatcttttaaacagacatcgaacatatatcatacatacttctgtccaattgctctatatagatatactgtatagtttatcattgtcaaaccctgcttacttctcctctcaggagattgtaggttgagtgaaattcattgctggccaagatgaaaagactgacactgagattattgtaggaaatctccaggtaccttcaggtgaaagatagaagttaaacaccttctgaaactctgatatattatccctggcctcttgccacaaatctataaatgtgttcttctctatctgtataaaatatgtatatctatcatacaaccaaggaaaaataatattggaatagtttatatgactaatctatggttttattacaaatt

SEQ ID NO: 467956 - DNA, 585 bp, Homo sapiens
caaatgtccatcactgagagactggataaagaaaatatggtacagatacaccatggaatactatgcagtcataaaaaggaaagacatgtcctttgaagggacacagatgaaactggaagccatcattgtcagcaaactaacacagggacagaaaaccaaacaccacatgttctcactcataagtgggagttgaacattgagaacacatggacacagagaggggaataacacacaccagagcctgttgggggtggaggatgaggggagggatgttagagaactggtcaacaggtgcagcaaaccatcaaggcacacatatacatatgtaacaaacctgcttttctgcacatgtatgtttttttttttttttgaaaaatattcccaccccctccaaaggaaagaaagaacacctagtgtgattagctcaaatttctagatactctagtttttaagcctttgtgtaaattttagatatttcaaataagaacacttattttcctgagagccatagatgaagaaataygggtcacattttttatacaaatctataaatattaataaaaacttgcctatttaaaaggcttc

SEQ ID NO: 467957 - DNA, 597 bp, Homo sapiens
gccccacccttatgctttcctggaagctttatgcctcctcaaggccccgtctccaatagggcattcaggacttccacacaaaaatcgcggggaggcagacgcaatccgttccttaatagaaagtctgatatttctcatcatctagtgcatgattgaacagacttctgaagtctgaatctgcctttgtaaacagatttctttagacatgtctatgttaaattgtttctgattttcactagtagttgtttcctatcatgatttcttcattcttggtcttttcactttgatccacgtcatggtggaggggaacttcccttagaggatactkttcaggaagggcccacgagtgggagcgtttttgagcactgctatctatgcttattggatgaaacacatcttgctgcttaaaactttctgtagtcatgcgttctcttccaaatgttgggaggccttgtttcatgacattttgacacttaacttttaggggaaaaatgaagttttggttgctgggtaggcaattgtcctccttgcccagttgctggtagattttagacttttctttgttattattgtacacacgactctatttgttgtcag

SEQ ID NO: 467958 - DNA, 595 bp, Homo sapiens
tttaactgataacatttgttttcaaaagttctattgaaattataacacttaacaatggaatgttaaaatatttcctttgtgattgggaacaaaataaacatagatggtacaagcaattttatttatccttttgcaggtcttagacactgggataggattgtaaatattaaaaaaataagaattatgaaagagaaaacagattactatgttaccaatgacactaagtacacagaaaattcaaaatgattgtaagatacattatactaatgaatatgagcttttagcaagatgctttgacacaaacgtattatgcaatattgaaatgcatttccaataagtagagaaccttatttagatgtgtcaatgtggcttactctcacaaacataatatttagtggtatgattaagtcacaaaagaatatgtacagtataactcagtttaaataaagttcaaataaacatagacataacattgacataaatatattcttgaatcgaaagaccttaatgaaatcacttstccccaaaattaatctttgtaactagtgcatccaaagtaaaacccagtaaggtttgatttagatattgacaagct

SEQ ID NO: 467959 - DNA, 548 bp, Homo sapiens
tatttgtatgtgcctcaaatgcccaattttattgcacatacatttatttaatatttgcttgacttgaatacaaaggtaaatatttgcttgacttgaatacaaaggtaaataaaacttggcattaaggacttgtctaatgtgggaaaatgataaacaatggagtatgtataatgaattattgttgttatgccagaagtggttagagggtaccatggatcacartgaatataagggtcaagactctcagagaggtcagacaaagtctttacagaattagcaatccagtactcaggaggctgagaggagaggatcacttgagcccaagagttcaggtccagcctgggcaacatagtgagaaccccgtcaataaaaaaaacaaaagtaggttaaataaaccaacaaataaaaggaaagtgtaatacttgagagctgagtcttgaaagatgattagctgttggcccacctttatgaggttttggtgaaattccttatcatacatttttctataaattaagtagccattctcaaagtttgtattgcagaataaa

SEQ ID NO: 467960 - DNA, 538 bp, Homo sapiens
ttgctctaacaaggtcctactctacagggaagagtaaaacttgagcatagccttatcccaacatgagaaatgagcattgctctctcttcagcacccgtcattgatgcatccttccagagaggaagatggaataggcagtgctgtgctttcttgagctttagcctcttgttatgccattacagtaagtaattaaatgcttaacactttcatactggacttgctgctttgactggctactctcatgcatggcagctcagcctatctcccagctcagctgagctcctgacatctaaaatagattttwttttttttttttgtaatttacaactcaataataaaaagatgaataatccaattaaaagatgagcaaaggaactgaaatgacatttctctcatggagacatacaaatggccaaaaagctgatgaaaaaatgcttaacatccttaaacatgagggaaatgcagaaaaccacaatgagataccacttcatatccactaagggggctataatccaaaaggtgaataacaagttttgga

SEQ ID NO: 467961 - DNA, 560 bp, Homo sapiens
ttggcttatagccaaccagcagatcctgccttctgttctgtaaggtttgtgtaatatccaattcaggccagagaaaggatacatctcagcattcgcttgggatctaccagaagagaacctctctgtactcttaaataatgtaggctgaagttaacacctggagccactgcagccattttgctaccatgaattgagagcttagcactgtgttggggtaagtggrgtgggctgcagaatggaggggtggacattgagagagatgtcaatgctgcagaaagcaggataaagagagagtgaggacaggtcctgagtaacatcgtctggatctgagttgagtctctcctgaaggtagtcccatatttggactttaagttagaaactgatttcattaatgtgaaagtcaaagtggtctggaatttctgatacttgagaccaaatgagccctaactattacaagaagtatgtaatcacataatgaggtcttcttgcttgctgcccagatagagctggtttatcaagacaggggaatttcagtagagaaaaagcttaattcacacaga

SEQ ID NO: 467962 - DNA, 541 bp, Homo sapiens
tcttcatgttcatgagtacccagtgcttaggtcccacttataagtgagaatgtgcagtacttggttttctgtccttgcattagttcactcaggataatgatctccagctgcatccatattgctgcataggacatgatttcattctttttatgactgcatagtattccacattgtatatgtaccacattttctttatccaatccacaccactggtgggtatctaggttgattccatgtctttgctattattaataatactacaatgaaaatacgagtgcatgtctttttaacaaaatgatttatttttccttgggtaatccagtaacaggattggtgggttaaatgttagctatatttataagttcttcaagaaatgtccaaactgctttccacagtggmtgaactaatttacattcccaccaacagtgtatcagtattcacttttctctgtagcctcaccagcatctgttacttttttactttttcataatagccactctagcatgagatggcatctcattgtggttttgatttgcatttc

SEQ ID NO: 467963 - DNA, 562 bp, Homo sapiens
tgagtgatctttcttcgtgccaggccagggccaagtgttccacattcaccggtgaccagcagggtgtggtccctgctttcagggagctcatagtcataggggaaatgaatgataaactcacaacatgtcaggagtgaggagcagagaggcatgagagggtgctggggcggggtcagaggatgcgactctgaggtgacgttcaggctgaggcctgaaatatcatgagccagcagaatgatgacacggcggatgagcagcccaagcagagggaatagctgtgcaaaggccctgaggagggcctgagcttggcttgtgggagggcagtgaggaggccagtgtgccatgatgaggaaggggaggcgaaggaggcctccaggcgcttcctccagggaggcccctaaccrcatccattcattgaaaccagaagggctccagcaagctggggtcagagttgggacttgtctagtcttgtgtccctggccagggcatcatagccaggtgacagtccccttgctccttgagggcaaggcagagctgtttttttcactgaagggacatgtta

SEQ ID NO: 467964 - DNA, 568 bp, Homo sapiens
tttttagttcctcctgcattaagctagttatgaaataatagaaattaagaggggtcttcctggccttaactgttttcatctaaatctaaatctaatttttcattgatttacagcaaaccttacgggagaagttgaaattcattgatctggaataggataaacaactatctttccaaaacccttcaggaaggtggagtgcccccaacttttaggacaaaagagtttttacagatcatagtaaatcaataactcgtagacagtatgacagatacagaatatccttacttaagatgaaaaacaaattgtrcattgagatctttaatcaataaaaagctaacaaatcagtagtgcaaacaaggtgagagaatcttatttcatcctcagtcacgaactgaagagacacaccgggcagtgttttgtggttaaaaattgctcctaggctggtgtactagcgaactattgagtaagaaggtcagtagagaccaactcactgtgggatttgcaatgcagaaaggacaagtaggtgtaacataaaagggcactctatgtaaatgtcaattaatgtatt

SEQ ID NO: 467965 - DNA, 594 bp, Homo sapiens
atctctccttctgttttaactccccaaatccagttcctagtctctgaagcaacaattgttttaagattttcatgtgtacttgaaagaatattttagacactttacaaaattattcagttggtgcaaaagtcattgcagtttttgccattaaaagtaatgacttgtgcaccaacataatacaaaagrtagtcactgggaggatatggagaaactgggtcactggtttattgctggtcagagtgtaaaattttacagacactttggaaaatggtttgtcagtttcctataaaactaaacacgcaattagcttaagactcagcaactgcaatggagcatctattctagaaaaatgaaaagtcaggttcacacaaaaacacatacaccgatgctcttagcaggtttattcataaaccaacttagcctagttggaaatatatcgttcaatgagtgaatgactagacaaactgggatacatatagtctgatggaatgctactcagcaataggaaggaatgaactattgatacatatgacaacatggatgaatgcccaggaaatcacaagtgaaaaacccaatcacaaaaggttacataac

SEQ ID NO: 467966 - DNA, 617 bp, Homo sapiens
agtgaaaaattgagagaaatacaataatactaggagatttcaacaccaagtttcaagaacggatagaacacccagggagaaaattaataacagatgacttgaaaaaatcatagataaagcagtcctaacagacatagacaggatatctaaacagcaacagcagaatacaaattcttctgaagcaaacagagaatagtctctggtgtaaatcacatgttagaacacacaaaaaaagtcttaacaaatttaagaatcttacaatcatataataaaactagaaaccaatagcagaaaaaaactaaaaatcttcaaatatctaaaaattaaacactctcttgaataatcaataggccaaataaaaaatcaaaattagaaaatatgttgaaacaaatgaaaattaggaaacaatatatcaaaatgtatgaaatgcagtaaaagcagtactaagaaggaagtttataatgataaacatctacattcaaaaagaaaaaagatctgaaataaatggtctaccattagacctgaagaaattagaaaamgataaactaaacacgagtttgtggaagaaagaaaataactaagattagggcagaaataaatgtaagagagaatataaa

SEQ ID NO: 467967 - DNA, 536 bp, Homo sapiens
tccttgcttcctaaaactcagatatgttcaaccagtgarttctaaggttgctttggaaagggaaaaattagcatggaaaaacatggggcaaatttggaagcagtatgcatcatcacttttgccctctttctactggtgaaaactcaactaaatggtccatgtaacatcaaggactctggaaagtagacttgttatatacacccaagaaaataaaatatatctagctagcatgtgccagaaaacattaggaaagctgtaaaagaaaatgaatagttaattatctttaactattttttaattttttattttattttattttaatttctggagtacttgtgcagaacgtgcagtcttgttacataggtacacatgtgtcatggtggtttgctgcacccatcaacccatcacctaccttaggtatttctcctaatgctatcccttctctagcccccataccctcagcaggctctggtgtgtggtgttcccctccctgtgtccatgtgttctcattgttcaactccctcttatgagtgaga

SEQ ID NO: 467968 - DNA, 536 bp, Homo sapiens
tccttgcttcctaaaactcagatatgttcaaccagtgaattctaaggttgctttggaaagggaaaaattagcatggaaaaacatggggcaaatttggaagcagtatgcatcatcacttttgccctctttctaytggtgaaaactcaactaaatggtccatgtaacatcaaggactctggaaagtagacttgttatatacacccaagaaaataaaatatatctagctagcatgtgccagaaaacattaggaaagctgtaaaagaaaatgaatagttaattatctttaactattttttaattttttattttattttattttaatttctggagtacttgtgcagaacgtgcagtcttgttacataggtacacatgtgtcatggtggtttgctgcacccatcaacccatcacctaccttaggtatttctcctaatgctatcccttctctagcccccataccctcagcaggctctggtgtgtggtgttcccctccctgtgtccatgtgttctcattgttcaactccctcttatgagtgaga

SEQ ID NO: 467969 - DNA, 536 bp, Homo sapiens
tccttgcttcctaaaactcagatatgttcaaccagtgaattctaaggttgctttggaaagggaaaaattagcatggaaaaacatggggcaaatttggaagcagtatgcatcatcacttttgccctctttctactggtgaaaactcaactaaatggtccaygtaacatcaaggactctggaaagtagacttgttatatacacccaagaaaataaaatatatctagctagcatgtgccagaaaacattaggaaagctgtaaaagaaaatgaatagttaattatctttaactattttttaattttttattttattttattttaatttctggagtacttgtgcagaacgtgcagtcttgttacataggtacacatgtgtcatggtggtttgctgcacccatcaacccatcacctaccttaggtatttctcctaatgctatcccttctctagcccccataccctcagcaggctctggtgtgtggtgttcccctccctgtgtccatgtgttctcattgttcaactccctcttatgagtgaga

SEQ ID NO: 467970 - DNA, 627 bp, Homo sapiens
ctggaatatacaatatcataaaaaattatttcaaacttgatgcaatattaatttgaatttagaatttctatgaaaactctttattctaattaaataaatttactcaaagctaataaggataaaagaatatttaaaaattagcatggacagcttgtgttggagccagggcctgataaggctggaagggaaagagaagtagagagaaaacccaaacaaaatgaccaaaaatgaaaataattgtcttactataaagtatatataaatatatactttatatatgtatactttatatatatactttatatatgtgtgtaagtgtagacaaatgaataaagtatctaaatagatgatatactcacatatatatccattatatacatattatggctttgttttgtaaaattatggaagtatgcctatatatcatgaaattatcaaataaacattaagataaaaagaaaaatttttcgagaagtaaaaagcctttttctggattttcaaatttaattaaagccattaagagaatactcttccaccttcgaaaataaaaccattattttggctttattattttttcttttattataaaaatrcatttaattagctaatagaaaatcaaaccctcaa

SEQ ID NO: 467971 - DNA, 505 bp, Homo sapiens
gaaaatgttatgtaagttgggctataaatagacagattttacaagacaaatgctccctaatatctcgggcaataacatatatacttagagatctcttttaatctgggcaaaaattcatgtgtgaagcagcaaagagaaacatgcagagccaccattagtrtcgagacctctccttgtattgtctgttccacctaatttcctatacccttgaaattattaataaattttgacaccacttgagagctctgaattctgtatgtctgaattaacaatctaatctatagtgtaaactcaatatgaaatatgtataattaccattgaatgcaaatcctcccctctaattagtgaattccattttgacaagctcaaagtcacacttgttcaaatattatcatcctttagaaaataaaagaaatgataaagtctcagtaacaatttaaactaatgaatacaacaaatgtacataaaatatatggaaaatgtaagttttaaaatagcatcattt

SEQ ID NO: 467972 - DNA, 556 bp, Homo sapiens
aagccactcagtttgtggtaatttttatggcagccctaggaaactaatataggtttcaagggttgagccacaggcctctctgcaggcccagatgtgttcactccattctttctctctgccacaggtttagggatttggcttatttttcttttttttcagcaactgccatcacccactctctcctctcatacaagcccagccgcagagtggtacacattgtttctgagacaggatctcactctgttgcctaggctggagtgcggtggtacaatcacagctcactgcagcctcaacctccctggactcaagccatcctcccatctcagcccctcgagtagctgggactacaggtatgcaccagtgcatccagctaatttttttttttctttgtagatacagggtttcaccctgttgcccaggctggtctcaaactcctcagctcaagtgatctcccacctcagccyctcaaagtgctggaattacaggcgtgagccactgtgtccagcctatataacttgttaaacctcagttcctgcactctagttcctgaatttgt

SEQ ID NO: 467973 - DNA, 631 bp, Homo sapiens
ggtgtcttggattcacaacatgagatgaaaagtgttctctcttctattctacacaatagattgtgtaagtggtgttatttatttgttaaatgtttagagaaattcattaataaacacatatgggtctgaattttctttgtggcaaggttttaatttcagattcaaaattattgttagtatagaattattccaattattttctgttrtatcaattttgataaaatgtgttttaatgtaagttttcaaatttgttagcacaaaattgttcttaaaattctctttatctgtctaataaatgttgactttatggtgacattcctttttagtctttctattggtaatcagtaactttactgtttttattctttgttagttttttcaaaggttatacatttattggccttttcaaggaacaactttgggttttatttaccttcattgcatttttcatcctgactcaatttctgtttgaatctttgttactctttctatctaacttatcggtgtctaatgtactattatttttctatcttctttaggtgactacttcaatcattgattgttagcccttctgttttctagaatagatgtattaaagatgatcattttttcttaaagcacatccatagct

SEQ ID NO: 467974 - DNA, 561 bp, Homo sapiens
agtttcatttctgcaattttgtattgttcaaccagagaaaggaagtaccagtggtgtgagaactttggrataaagtttttgttttcaattgaaattattttcattcagcccaacttccttaagcccaaatttaatgtgtgtgaagttcagctacagaaataccaaaccttagactaaagcggacacaggtaaaatatgtgaaatcctcttttgttctgaggattctttagtaggcaggagtgaccagattggaatatgcttggctggaaaaattaagattcaagttaacaaactgttaataaccagaaccatctgttcttccgtaatgtggatttgccactgcaggtcaccctacaatgctatgttagaggtacaacactcctaccctcaggctataaacaaggtgaattatcatctttatatctcttcatttagccctgatttgctgaagtgaaggcttgcttgagaattggttgcattataatttggtgagaatttaatctctcaatgacaacttacttgattctctcattctctttctgctacatagatcacagtaga

SEQ ID NO: 467975 - DNA, 561 bp, Homo sapiens
agtttcatttctgcaattttgtattgttcaaccagagaaaggaagtaccagtggtgtgagaactttgggataaagtttttgttttcaattgaaattattttcattcagcccaacttccttaagcccaaatttaatgtgtgtgaagttcagctacagaaataccaaaccttagactaaagyggacacaggtaaaatatgtgaaatcctcttttgttctgaggattctttagtaggcaggagtgaccagattggaatatgcttggctggaaaaattaagattcaagttaacaaactgttaataaccagaaccatctgttcttccgtaatgtggatttgccactgcaggtcaccctacaatgctatgttagaggtacaacactcctaccctcaggctataaacaaggtgaattatcatctttatatctcttcatttagccctgatttgctgaagtgaaggcttgcttgagaattggttgcattataatttggtgagaatttaatctctcaatgacaacttacttgattctctcattctctttctgctacatagatcacagtaga

SEQ ID NO: 467976 - DNA, 561 bp, Homo sapiens
agtttcatttctgcaattttgtattgttcaaccagagaaaggaagtaccagtggtgtgagaactttgggataaagtttttgttttcaattgaaattattttcattcagcccaacttccttaagcccaaatttaatgtgtgtgaagttcagctacagaaataccaaaccttagactaaagcggacacaggtaaaatatgtgaaatccycttttgttctgaggattctttagtaggcaggagtgaccagattggaatatgcttggctggaaaaattaagattcaagttaacaaactgttaataaccagaaccatctgttcttccgtaatgtggatttgccactgcaggtcaccctacaatgctatgttagaggtacaacactcctaccctcaggctataaacaaggtgaattatcatctttatatctcttcatttagccctgatttgctgaagtgaaggcttgcttgagaattggttgcattataatttggtgagaatttaatctctcaatgacaacttacttgattctctcattctctttctgctacatagatcacagtaga

SEQ ID NO: 467977 - DNA, 561 bp, Homo sapiens
agtttcatttctgcaattttgtattgttcaaccagagaaaggaagtaccagtggtgtgagaactttgggataaagtttttgttttcaattgaaattattttcattcagcccaacttccttaagcccaaatttaatgtgtgtgaagttcagctacagaaataccaaaccttagactaaagcggacacaggtaaaatatgtgaaatcctcttttgttctgaggattctttagtaggcaggagtgaccagaytggaatatgcttggctggaaaaattaagattcaagttaacaaactgttaataaccagaaccatctgttcttccgtaatgtggatttgccactgcaggtcaccctacaatgctatgttagaggtacaacactcctaccctcaggctataaacaaggtgaattatcatctttatatctcttcatttagccctgatttgctgaagtgaaggcttgcttgagaattggttgcattataatttggtgagaatttaatctctcaatgacaacttacttgattctctcattctctttctgctacatagatcacagtaga

SEQ ID NO: 467978 - DNA, 442 bp, Homo sapiens
  misc_feature (1)...(442): n = A,T,C or G
ttgcagttgtctttggtagtttttttgcactaacttcaggaaccagctcatgatctcaggatgtatggaaaaataatctttgtattactattgtcaggtaagtgattttatttcatcttggttctgttatattgggtatgagatcatagaataaaatatgaactaccctatttyagttctatcttatttaaatcaataaatgagtagtatttcctcttccagtctggtggatggattttactggaactcagctaccaatgtgggggaaatgacacaagggagcccagtatttatggccgaatccagttttctagtatgagaagcttacttcaattctaagtctagctagaattaaaataattttatcaaatgctatgagaaatagctctctgtgaataaatgtattgctttgtttgagttataaggannnnnnnnnnnnnnn

SEQ ID NO: 467979 - DNA, 442 bp, Homo sapiens
  misc_feature (1)...(442): n = A,T,C or G
ttgcagttgtctttggtagtttttttgcactaacttcaggaaccagctcatgatctcaggatgtatggaaaaataatctttgtattactattgtcaggtaagtgattttatttcatcttggttctgttatattgggtatgagatcatagaataaaatatgaactaccctatttcagttctatcttatttaaatcaataaatgagtagtatttcctcttccagtctggtggatggattttactggaactcagctaccaatgtgggggaaatgrcacaagggagcccagtatttatggccgaatccagttttctagtatgagaagcttacttcaattctaagtctagctagaattaaaataattttatcaaatgctatgagaaatagctctctgtgaataaatgtattgctttgtttgagttataaggannnnnnnnnnnnnnn

SEQ ID NO: 467980 - DNA, 442 bp, Homo sapiens
  misc_feature (1)...(442): n = A,T,C or G
ttgcagttgtctttggtagtttttttgcactaacttcaggaaccagctcatgatctcaggatgtatggaaaaataatctttgtattactattgtcaggtaagtgattttatttcatcttggttctgttatattgggtatgagatcatagaataaaatatgaactaccctatttcagttctatcttatttaaatcaataaatgagtagtatttcctcttccagtctggtggatggattttactggaactcagctaccaatgtgggggaaatgacacaagggagcccagtatttatggccgaatccagttttctagtatgagaagcttacttcaattctaagtctagctagaattaaaataattttatcaaatgctatgagaaatasctctctgtgaataaatgtattgctttgtttgagttataaggannnnnnnnnnnnnnn

SEQ ID NO: 467981 - DNA, 569 bp, Homo sapiens
ttactggtacccagcacaacacctggcacaaacaaatatataatttcctaatgttgttaaataacaactatctttattgatcacctactacacattttatgtataaatttcatttttacakgcaacaacctcaagaggttggtatcatttcactgaaattttcatacaattaaatgagtcacgggagcactgagaccggctaaaaatcatagcttgcagtcagtaaaaactggattctaacacaggcctccctggctccaaagtgagggctgagaccactgccccttgattttggaggctggacaagaaatctgaatgaaggggttaggcatagatcccctctcaacggtactgaacttggattggcttgaaggcattttttggaaactggaatcttaagagcaagccttcagttgttaattacctttgttaaataccaaggacttggtgattactttctagaggagaattagtaaaaaccttgaaaattatgagccagaacaatctttttctgctcttcttaggaaattttcccatttatttttaaactgcttcttgcctgggggcat

SEQ ID NO: 467982 - DNA, 598 bp, Homo sapiens
cattttcctctggcctggagcacagacgtaaggccagcagtgaagatgtcattctgtgaccttgagataacaagcatgaggataaaagccatgcrttgggtaggaagacagaaggagatatgaaataactgacattgtgcatcagttacatttcctctcatctgcctgtgtctggcttcttattacatgaggaaaatgaaactttttaaaacttacgccactgttatagagtgcttctaacatataaacaaagcaatctgaactgataccctattacagggcagagctggaatttgaacctaaatttaatttactaagggcctccatcatcctgtgtttccagagtgcacacagtctagaaaagccttggacaagggggtgagtgtgggctggtctcttcagcccatggcttgagtactattagctacttaggctgctctggagttacggtctggatctcaggtcagaatccagggaattggttggttctgatctgtgaattttagacaacttactggtgaaccagggaaacctgacttaggtttcctgggatagttctagaatcacattgcatttcttaattctgaggcagacccgt

SEQ ID NO: 467983 - DNA, 598 bp, Homo sapiens
cctatatttctgattaccttctttgaaacctatacccaaactttcaggactgcatatatatcttttcaatacatacattatatattttacatatatatatgtaaaagaaacatatttgattttagaacagtctgaaatatactgaatcccatatctaatttattgcttctttttagtggaaaagtgtcttttaatcatttaggagaagcaacattcttacagccaatcacaaacacacacacaaaaatctttttttccttcagaaaattgaagtgcattcaagtgatggttgttatactttttaatttgctaaagatagggattttataaaattccatgtgtgcttattaactatcgtcttttagcttcaaagccatctttctataagtgatttgtcatgctggggctgggactaggaaatcacattttcccttgccagttgctccctgttatatcctctctgtggtaggtggagtgtgggggcggtgttaggaaaggagcgtgttgggcttgaggaargaaaacagggctctttctttttgtttgttgtctgttcctgaaagctttacagagcaataattgacacaaaggcagtggg

SEQ ID NO: 467984 - DNA, 577 bp, Homo sapiens
gctgtatttgttcagacctttggtctgcctccatactccaagtcaacattggaagctgattcctccaagaattgcaggtataagtatatggaccttctgcccttttacttctttggtgtttcgctctccaaccctgaggttttrtccacaaggatagatctcagaattcttgctctcctttctctttctccagcttctttcctggcttaaaatgggcttctctcagccggatgtagtgactcacacctgtaatcccagcactttaggaggctgagacaggcagatcacttgaggtcagcagttcaacatcagcctgcacaacatggtgaattcctgtctctactaaaaatacaaaaattagccaaacataatggacacatggctgtaatcccagctacttgggagactgaggcaggagaatcacctgaatctcggaggcagaggttgcagtgagccaagatggtgccaatgcacccctgcctggcaacagagttaagactgtctcaaaaaaaaaaaagaggggggcttctctttcctctcttcttggaagacaactgctctttctcccaacttccct

SEQ ID NO: 467985 - DNA, 616 bp, Homo sapiens
gctgtatttgttcagacctttggtctgcctccatactccaagtcaacattggaagctgattcctccaagaattgcaggtataagtatatggaccttctgcccttttacttctttggtgtttcgctctccaaccctgaggttttgtccacaaggatagatctcagaattcttgytctcctttctctttctccagcttctttcctggcttaaaatgggcttctctcagccggatgtagtgactcacacctgtaatcccagcactttaggaggctgagacaggcagatcacttgaggtcagcagttcaacatcagcctgcacaacatggtgaattcctgtctctactaaaaatacaaaaattagccaaacataatggacacatggctgtaatcccagctacttgggagactgaggcaggagaatcacctgaatctcggaggcagaggttgcagtgagccaagatggtgccaatgcacccctgcctggcaacagagttaagactgtctcaaaaaaaaaaaagaggggggcttctctttcctctcttcttggaagacaactgctctttctcccaacttcccttttcttggcttaacttttataaaatcttagctctgatct

SEQ ID NO: 467986 - DNA, 467 bp, Homo sapiens
aagatttggggcagagcactccctcaggtatacaaagaacaggggccatgcccatggttgtagctttggctccaaggaggaaagtaagcatggagggcttccaaattggactaaagccatctctggctgaattctgggtgccacattctaatgagagggaattaaggggtaagacttgacctcatgtcatctctttacagtgaccttaaaaagcacawcaccttccttaggagtaaaattctattagtagaaccagccaggaaaaaataatgcatgcgagtgtgttgcatggaaaatctcagaaacttggccaagaaaactgaaagatcaagaacctgagtaaaattcatcgtaacaatagaagataatgagaaaaaacacaaaacttcaaaataaagtagttaagtgtatgtattgaggacatgggaacaacatttacgcaggtgagcatcagagaaggaaaggcc

SEQ ID NO: 467987 - DNA, 560 bp, Homo sapiens
aattggtatagaaaaagcatttgacaaaattcaacactcattcataatttttgttaagaaatgtcagaaaaatagaaatagagtagaatttcctatataaagaggatttacaaaaaacaaagcaaaacaaataaactcaataaaacctaccagtcatatacttaaccatgaaaaaatgaatgcttttattctaccaggattgtgaaaaaatatgtccaaactagtcactcttatttgacatagtactggtaattctagtcagtgaaatctgtcaagaaagaccaatagaagggwtacaaatcaaaaacaaataagaaaaactatttacagatgacacaattttctacctagaaaattccaataattctctttttaaaaaatgttcctagaactagcaggtttatttggaaaggtgacagaatacaagaccaacctacaaaaatgaattgcatttctataactagcaatgagcacattgatgttaaaattaaaaatgcagtatcatttaaaactgcttaaaaaagatcaaagcaacaaaatacttaggtataaaactaaga

SEQ ID NO: 467988 - DNA, 633 bp, Homo sapiens
ttcataaatattaccaataccaaggagtttaaagccactaatttgttctgtataaaacatcagaatttatctaatgagggctaggaacttcaggaatgatcttatagttactagaaaaatgataaacagagttgtacctgtcattcttctctctctgatagtgctgtgcttagaatctttcaggttcacctaagtaacatcttaaaatgtgcagatgccctaaggtcaaatctcagcactcctcttgatttattactaaatcatgatcatttaaagtaagagagacaacatatcttgtagatttattacctcaatgaaatatacatatgcagatagagaaaggacagaaaatatttttaaaagaataactcatttaagccycacactgatttaaaagaaaacattgtatacagtaataattttattgtagactacaaaagaacatattcgttttgaagctatagtctttggatatctgctacatgaaaaccactacataggcctactatttgatgtcttatgttggaaaggctcattttcttgagtgtttgggaggctgttttagggagagggaagagtcataatggaaatgagttggaagtctcttatatggttaaacacatactatttaac

SEQ ID NO: 467989 - DNA, 568 bp, Homo sapiens
tcctatattatgtgaacaacaaaatcgattttattttctttctagtgagaagtcatttattctagcaaaacttattaattttccttacttcctgtgacttagactgccttcctygttacatattaagttttcatatttactttattctctttactacttctaaattctgttaaaacaacctattaattgatttctgagccatttattatatggttttgaatttaaggtaatcattagtatcaaaaagcacatcctttttagtattttttaatttttaaaaatgttcatgaatatttgaagatgtttacgtttccatgataactacattaattttacccagtgctttttaaattgaattctgtgaagaattgcattcatttatatttagaaacagtacattcagaaagaaaacaaccagctcttaaaggtcctcataagcatctcaaggagtttgcatctttttttgaggtcagtgtgcttaaatgcatttcttgaggttgaaaatgctttgaaaaacagaagaaaaatagtcatatttgaaattacagacattactttgtttacaaag

SEQ ID NO: 467990 - DNA, 463 bp, Homo sapiens
gagagggggctctggagcacattccttgagggctctggttttgcagataatgttattaaatccttttcagagctcggctgcctatctctaggtcttggagtgagtcagcctagcaagagaagacttgttcctttcttttacttgttttttctttttacattttctgcttcattcccccctttgatgcttcttataaatgaagtttaatagaaagcatcatcatctttaaaatttatcctttcatgaggcgctagtttcctattaagcaggggttgatatttagttagaaccattagttgggtagtagtttgcctgrttacaagaatctcaatagctgactgcatgttcctaacaaggaggggcaaaagacaaggaagtatgaggcagccccctagtatggccagaactattcctactaaggttttaaatccttcaagagatgaaaaccagcctccaaagagtg

SEQ ID NO: 467991 - DNA, 508 bp, Homo sapiens
gttgtagtcccagctactctggaggctgaggcaggagaatggtgtgaactggggaggtggattttgcagtgagccgagatcgcgccactgcactccagcctgggagacagagtgagactccatctcaaaaaaaaaaaaaaaaaaggagaaagaaaaaagaaaagaattttaaaagttatacatagaaagaagctactgaaaatgtagcaaataataccacagaatgaatgatacagataataagagtcagggaaatttcatagcaatgaaaaattcctgtaagctggctgggacaatttagtcttcacagaagaggtgaggcattggtaggtatgcaaagtccacattactaatgtcgacactgaattgaaatgacaacctagatactcaagcctacttgttattcatgrtatcctactttttcagatttatggtatggacatttaacatgagatctactctcttaaaaatttttaagtgtaaaatatggtgttgttaataataggca

SEQ ID NO: 467992 - DNA, 559 bp, Homo sapiens
ttcatatttcatcagttttcccagtaatatctgttttttcagctccaggatcccaaagtacatttagctattatatctccttgcctccagcctgaaacaatgatcatgttcgtcttaattacttggataatatgtcttctgggttcctctgctctcaagttaatactttctcctttgtaattaataagtgtcttaaggaagatactttgagattctacagatatgccattgtatcgttttgttgcccactaattttagcatccatcagtggatcttgcctgtcttaattattactgtgatgttctaacagtgattttctatttccctcattctccttacatttattaattccttcaacttcatttgaatttaaagttgttactgtaaaaatagtcatgaatagttttttttgagtgcttacttggtgccaggtattggacaaaacacttgaacactcayggtgtcatttgatgcccatggtaaccctttgaattagatacagttatgtccattttacagattagcaaatggaggcccagagaggccaaataatttgacc

SEQ ID NO: 467993 - DNA, 565 bp, Homo sapiens
taatgatgttttgttcaatgacagaccacatatgcaacagggatctgtgagattatagtggagctgaaaaattcctgttgccsagtaacatcatagccatcctaatgtcatagagcaatgtattactcacctgtttgtggtaatgctgatgtaaccaaacctcctgcactgccagttgtgtgaaagaatagcacatgcaattatgtatagtacataatgcttgataatagtaataaaaaactatgttaactagtttataactttcctgtactgtgctttttatcattattttagagcatactccttctacttccattttttaaagttaactatcaaacagcctcaggtaggtccttcaggagatattccagaagaaggcattattatcataggagatgacagctccatgcgtgttcttgcccctgaagaccttccagtgagacgagacgtggaggtagaagacagtgatattgatggtcctgaccctgtgtaggcctagggtaatgtgtgtttgtgtcttagtttttaacagaaaagtttaaaaagtaaaattttaaattaaaag

SEQ ID NO: 467994 - DNA, 565 bp, Homo sapiens
taatgatgttttgttcaatgacagaccacatatgcaacagggatctgtgagattatagtggagctgaaaaattcctgttgcccagtaacatcatagccatcctaatgtcatagagcaatgtattactcacctgtttgtggtaatgctgatgtaaccaaacctcctgcactgccagttgtgtgaaagaatagcacatgcaattatgtatagtacataatgcttgataatagtaataaaaaactatgttaactagtttataactttcctgtactgtgctttttatcattattttagagcatactccttctacttcyattttttaaagttaactatcaaacagcctcaggtaggtccttcaggagatattccagaagaaggcattattatcataggagatgacagctccatgcgtgttcttgcccctgaagaccttccagtgagacgagacgtggaggtagaagacagtgatattgatggtcctgaccctgtgtaggcctagggtaatgtgtgtttgtgtcttagtttttaacagaaaagtttaaaaagtaaaattttaaattaaaag

SEQ ID NO: 467995 - DNA, 559 bp, Homo sapiens
ggcagtagaatgccacagagctatgtgttttgcgggggctgcggaggaggatcccccactgcagacacaaagagatagcatggaagcttgttgttgagctgcccagctggctggctgctacagctcttggctacattgtagtctgaaaataaatagcagttgtgaataaactgaataacctgagtgccacacagggcatgacagggaaagagatcacattccacctgctgagacaggggttatgaaacagmccttcccctcaatatagagacctctgtgcatttcaccagggccctgatgactcctctgccaccccattaatgctgaccattataaggagggcctggagtatgggcttgtcctgtccagctcagcccagctttgtctcccacctccatttgatcatggagcccagactgctacatatttcatagcccagaccatttcttgaggcactgaagagcttagctcctggtaaacaaagatcaagcataaacctactgataccaccacagccggctcttatctgcaagtgctgcctccgggcctggaggtggaa

SEQ ID NO: 467996 - DNA, 549 bp, Homo sapiens
attgtttttctgatttcagtaaattattcttcggtatcttgtaccttgctaagttttgttaagatcattattttgaattcctcttcaggcaatttgtaayttattttacttctgggtctactattggggaattattgtgttctttatggggtgtgatgtttccttggttctcatgtttcttgtgttcctacatgatgtctgtgcatctagtggaacaatcaccttttccaatgttatgaagcaggttttgtagagaaagactttctcccggagaggatacctagggtgttggttgggtacggtatgttggtttgagttttgaatatactcaatagtgtggtctctgtgaagtatcttcggatgcgattcttgttagcaatgtctgtcactgcctagtggcctaggctgtgggaatttgtggtgatagtggcatagctttgctggaggtgtaggcaccagtctggctgtcagtctggatgtatacatgtggggcaggccaactggctgtgcagtttggtatctgggaattttagtcacccataggtatgc

SEQ ID NO: 467997 - DNA, 549 bp, Homo sapiens
attgtttttctgatttcagtaaattattcttcggtatcttgtaccttgctaagttttgttaagatcattattttgaattcctcttcaggcaatttgtaatttattttacttctgggtctactattggggaattattgtgttctttatggggtgtgatgtttccttggttctcatgtttcttgtgttcctacatgatgtctgtgcatctagtggaacaatcaccttttccaatgttatgaagcaggttttgtagagaaagactttctccyggagaggatacctagggtgttggttgggtacggtatgttggtttgagttttgaatatactcaatagtgtggtctctgtgaagtatcttcggatgcgattcttgttagcaatgtctgtcactgcctagtggcctaggctgtgggaatttgtggtgatagtggcatagctttgctggaggtgtaggcaccagtctggctgtcagtctggatgtatacatgtggggcaggccaactggctgtgcagtttggtatctgggaattttagtcacccataggtatgc

SEQ ID NO: 467998 - DNA, 595 bp, Homo sapiens
taatggtaatcaaatagctaagaaaatgattttcaytgatatcgtaccttttagctcaaataagacaattctttcatttattattcatttaacgtgcttaaataatctaaagaaaaaggcaagaagaattcattttgatagaccttatgctgtatttttgaaatataaaagctgagtacttaaaacagtttcttaaaatgtaatttaattaatttgaatgaacacacatgtaaaagaaattatacataatcaaaatcctggagaagaaaggcagtatagtataccatagtgcttctcaccaggtggtccctgaaccagtggcatcagcaacactcggaaactggttagaaatgcaaattctcaggcaccacccccgacctagtgcatcagaaactctgggtttgagacacaccaatttgtattttaacaagctctccaggtgattctggtgcactctgtagtttgagaatcattaggaaactggttaatagtacttactccggagccagactggcagttcaagcttaactttgctaccagttagctgaatgactttagtcaagatactttaacttattgttctataaaatggggc

SEQ ID NO: 467999 - DNA, 579 bp, Homo sapiens
tagattaatcatattttgacataatattactttccagtcacaagtttcttcaaagactcagacaaccagatgaagaaggaactcctttgaatttcgtactggctttgaatttctatctactcttttaaaaatgtataactagcttataaatattttatacactctgcaactttttaccttacagtctacagtattgctgtaactcttattttataaagtgatgaagtattttggactaaatagtagtgtcagtcttaaatgaaaggaaatatttgtcaaggttttttgtttatttgtcttcagatagaaaaaaatgacacatatgttaaattcatgattttgctatttcacatctatgttttacaatttgtgtgagctttctcagtgattctgagggactgagggactggtctacattaaagattgataaaaaatggaaagattatctcatttgtttcatattaaatagtgaccaaaagtgtgttttgataaaggaagcaagtaagcatacacatttgtttgaatggatcastaatttaggatattacaaattgatgagccctattatcctatttgtaa

SEQ ID NO: 468000 - DNA, 355 bp, Homo sapiens
aatcctgaaaatgttcttattttacaaataaggataccaaaacacagagctggggtcttggaaattataaatggcagagttcaaagcagatggtagtttgcttggctaaatggttaatgtttttctctaggatattttgtcttaatagtagccrttgtttattatatactggatgattacataagtatttcagagaaccattaatttgtattcttggtacataagccaaacaatgttttcttctacttaaagtcacatattctaattctatgtgtatatgacatatattatccagttacaaaaggaaaatgaagttggtaagtgggtggctggttcacagctatatccacattat

SEQ ID NO: 468001 - DNA, 549 bp, Homo sapiens
ccaatgtacaacactttttaaatgaacttacattaaataaaaagcaaagtaagactagtctacacatrtttaaaatgcttccactttggataagcaatgtatctggttctacagagaaatgcaaaagtaagaaaaaatcatatttaagaaagtgttcaagtgctgcttacataaatcagtatcttccatagaaataagttgatgctaaaatgggttggtgtgaaatggttaaagggctatctttttgttgccatgtgtaaatcatggcacaaaatgtgcttagcatggctttatgcaaaggtaattgcaaggattatattttactattgattaatggattactgttcagaggcaatttaataatataaagcaaggagacaaggaaggaatagtcagttgctaataggagagaaaaaataatgattatgatcttaatcttattgtcaaagccctaatactagggctgtagtaaagttttgtgaaatgttaacatacataattatatacatgtaagaagcttaagccaatgctaaatcaatgtcaacatta

SEQ ID NO: 468002 - DNA, 549 bp, Homo sapiens
ccaatgtacaacactttttaaatgaacttacattaaataaaaagcaaagtaagactagtctacacatatttaaaatgcttccactttggataagcaatgtatctggttctacagagaaatgcaaaagtaagaaaaaatcatatttaagaaagtgttcaagtgctgcttacataaatcagtatcttccatagaaataagttgatgctaaaatgggttggtgtgaaatggttaaagggctatctttttgttgccatgtgtaaatcatggcacaaaatgtgcttagcatggctttatgcaaaggtaattgcaaggattatattttactattgattaatggattactgttcasaggcaatttaataatataaagcaaggagacaaggaaggaatagtcagttgctaataggagagaaaaaataatgattatgatcttaatcttattgtcaaagccctaatactagggctgtagtaaagttttgtgaaatgttaacatacataattatatacatgtaagaagcttaagccaatgctaaatcaatgtcaacatta

SEQ ID NO: 468003 - DNA, 589 bp, Homo sapiens
ggtttcatcttgaggctgtatctcmacttttctgatttttcatatcctatatctttcttgtatttgtcacttcctgtcccttcaactaaactgtctgaaaagttcatggccagcccagttactggatgcaacccaacattctttattcagactcttttgggctacagatataacacatgtatggcctgcacttgtatgtactccagctgagactgaactttctccttttttccttctctacctgtgaccctctttcaggcctttcttggtgttcttgaccatctgactgatatccagatttgtctgtattctgacaagacagagcgggccacctaacttcagaacaacatcataggtgccaatacaaagtagaccagatacaccgtccaaaatacccctccaaggttattccaaacctaaaactaagccaggagtttttccaaaaatacatcactatattttgtcttgggtgttacttccctacttggcaaactagggctagaaaaattggaacagagatttcctgtcagcctctcttatatatttttttcatatatatatatcttttacttgtaccgtctttactatg

SEQ ID NO: 468004 - DNA, 589 bp, Homo sapiens
ggtttcatcttgaggctgtatctccacttttctgatttttcatatcctatatctttcttgtatttgtcacttcctgtcccttcaactaaactgtctgaaaagttcatggccagcccagttactggatgcaacccaacattctttattcagactcttttgggctacagatataacacatgtatggcctgcacttgtatgtactccagctgagactgaacttyctccttttttccttctctacctgtgaccctctttcaggcctttcttggtgttcttgaccatctgactgatatccagatttgtctgtattctgacaagacagagcgggccacctaacttcagaacaacatcataggtgccaatacaaagtagaccagatacaccgtccaaaatacccctccaaggttattccaaacctaaaactaagccaggagtttttccaaaaatacatcactatattttgtcttgggtgttacttccctacttggcaaactagggctagaaaaattggaacagagatttcctgtcagcctctcttatatatttttttcatatatatatatcttttacttgtaccgtctttactatg

SEQ ID NO: 468005 - DNA, 578 bp, Homo sapiens
ggatgaggggattctagtcctgattggtgaaggttaaagaggaaatgagaggagaggctgaggaaacagggagagtggataatattacgaaaaatgttcactatagrtgacaacaacaaaatagggcagaacttgaagaaagatatgatagttaagggaaggcattttttttgcatatgtgtttttaagttgagaaaatcacaaaacgtataaactagtagcaataccacaacagagaagagaacattggcaatgaaggacaacaaggggtaaatccaggagcaacctctttgagtagtaggttctgcaatttgagatccaatgcacagaagagggagttgttattagatgggagaacagagagatcattgtaatgaaagaaagaaaaacatatggctaaagaatctggaatgttgataggtttgccattggagacagaggaagctcttctgattgcctctattttcacagtgaaataaaaggcaggatcatcagatgccagtggatggtgaggggaatgtattggatgctgggaaaggaaggaaaaaggaaatggaaaatgaagggaaaaaaggaaa

SEQ ID NO: 468006 - DNA, 517 bp, Homo sapiens
ccccctttttgtgtccatgtgtactcaatatttagctcccacttgtaagtgagaacatgtggtatttttttctgcttctcattaacttgtttaggataatggcctctagctgcacccatgtttctgcaaataacattatctcattattttttatggctgcatagtattccatcatgtacatgtgccacattctctctattcaatctaccrttgatggtcatccaggttgactccaagtctttgctattgtgaacagtgctataatgaacatacttgtgcatttgtctttatagtaggatgatttatatttctttgggtatatacccaggaacgagactgttgggttgaatggtagttcattttgatttctttggaatgtatctcaattgctttccctggtggctgaactaatttacattcccaccagcagtgtataagcatttccttttctccatcaccttgctgacatgttatttttgacttcttcttagtagccattctgactggtgtgagatag

SEQ ID NO: 468007 - DNA, 579 bp, Homo sapiens
ttctcaaatagcagcatggctattgtaactaataataacatttcactgaacatttcctctatgttgataaaggctttattaatccctatttttggctattcaatgttaaacatttatgcacaattcaaaatgtattgttacaataaatgactcttccacccctaccctagctgtgttcaagaaaatcaagaaacatgaaaatggtaaagtgacaaaggacacagaatttatgcatattcaaatcaaatgcagcagaggggaagacttttaagactggctaaagtagtatactctttctataattgtaagaatgaagaaggcttgaataattttgttgaaattttccatcacctacttacaatgggaattgtgaagatgccatttagcaaaaatcataaygcttttatcagaacttctttcttttcttttaacttgcttcccatcctttggataaaatataaagaattcaccctcctaattgctgatctcaagaaaactaaaatgatagttagacctagtctaattaattgagtccttcaggtaatatcttcatacacaaaattttataagaattttgat

SEQ ID NO: 468008 - DNA, 498 bp, Homo sapiens
aacactgaacaatacataggctttcyttcaagactttaatggatatttaatttgacaaggaccaccagatggccaaaatattttagtgaggttagcgaagcatcgtgcaaaaaataaaattaaaacgtggccttataacatttaatacttattgcatgtatcagagtgcttcaaaaatttagctagaacaaattatttttggataatatgattggagattttaaacctggcattaaaactagaagttgagagagtggaattttacatttttaattataccatgaagacttttactctttatagtttaacaaaataagataaaggggtataaattttcataaattcaatagaaatttccaatggatcccattaacatcctcattctgatcttaaaatatttggctgactaaagcatccaagcaaaactcattctatccctatatgactgaaaaataattttgcagatcattattaattgttttatatttattaactcac

SEQ ID NO: 468009 - DNA, 638 bp, Homo sapiens
ggaataatgtagtgtctgtcctttggtgactggcttatttcacttggcataatgtcctgcaggtttctgactgctttgttggtttgaggatcatgtaaaactctatttgggtgacatgacaatgaagtttcttttcttcaaatgtcatatgcactgaaacaattcttaattccaaaagttcaggacaagcataaatcccattatcgtagtttttggtcctaaaggatagatatataaagactctactattgttagccaatgtgttggagatgaaacactgaacaatacataggctttccttcaagactttaatggatatttaatttgacaaggaccaccagatggccaaaatattttagtgaggttagcgaagcatcrtgcaaaaaataaaattaaaacgtggccttataacatttaatacttattgcatgtatcagagtgcttcaaaaatttagctagaacaaattatttttggataatatgattggagattttaaacctggcattaaaactagaagttgagagagtggaattttacatttttaattataccatgaagacttttactctttatagtttaacaaaataagataaaggggtataaattttcataaattcaatagaaatttccaatggat

SEQ ID NO: 468010 - DNA, 498 bp, Homo sapiens
aacactgaacaatacataggctttccttcaagactttaatggatatttaatttgacaaggaccaccagatggccaaaatattttagtgaggttagcgaagcatcgtgcaaaaaataaaattaaaacgtggcyttataacatttaatacttattgcatgtatcagagtgcttcaaaaatttagctagaacaaattatttttggataatatgattggagattttaaacctggcattaaaactagaagttgagagagtggaattttacatttttaattataccatgaagacttttactctttatagtttaacaaaataagataaaggggtataaattttcataaattcaatagaaatttccaatggatcccattaacatcctcattctgatcttaaaatatttggctgactaaagcatccaagcaaaactcattctatccctatatgactgaaaaataattttgcagatcattattaattgttttatatttattaactcac

SEQ ID NO: 468011 - DNA, 636 bp, Homo sapiens
cacacagccataaagaaatatccaagactgggtaatttataaaggaaagaggtttaattgactcaaagttccacatggctgaggaggcctcaggaaacttacaattgtggcagaaggggaagcaggcacatcttacatggtgtaggcgagaaacggggagcaaaagcggggaaaactgccttataaaccatcagatcttgtgagaactcactaactttcatgaggacagcatggaggaaacccgccccatgattcaaccacctcccacttggtctctccctcgacacatggggattatggggattacaattcaagatgagatttgggtgggaacacagagccaaaccatatcagtgagyaaaatgaaataagaatttttttgaaatgaaaaaatgaaaatgaaaatgaaaatatttcattttgaaatgaattcatttgaattcatgaaaatgaaaatgaaaatatttcattttgaaatgaattcatttgaattcatgaaaatgaaaatatattcattttgaaaatgaaaaaatcaaaacacctctgagttagtgtaccaacgttgagcactaaagggaataccaaaaatctttgctaacacaatattaaaatattagtggacctcaaatagtaatg

SEQ ID NO: 468012 - DNA, 636 bp, Homo sapiens
cacacagccataaagaaatatccaagactgggtaatttataaaggaaagaggtttaattgactcaaagttccacatggctgaggaggcctcaggaaacttacaattgtggcagaaggggaagcaggcacatcttacatggtgtaggcgagaaacggggagcaaaagcggggaaaactgccttataaaccatcagatcttgtgagaactcactaactttcatgaggacagcatggaggaaacccgccccatgattcaaccacctcccacttggtctctccctcgacacatggggattatggggattacaattcaagatgagatttgggtgggaacacagagccaaaccatatcagtgagcraaatgaaataagaatttttttgaaatgaaaaaatgaaaatgaaaatgaaaatatttcattttgaaatgaattcatttgaattcatgaaaatgaaaatgaaaatatttcattttgaaatgaattcatttgaattcatgaaaatgaaaatatattcattttgaaaatgaaaaaatcaaaacacctctgagttagtgtaccaacgttgagcactaaagggaataccaaaaatctttgctaacacaatattaaaatattagtggacctcaaatagtaatg

SEQ ID NO: 468013 - DNA, 504 bp, Homo sapiens
gttgatttttaaaagatcagaagaaaatatggaagattatttctagagctgagttgttggtacaagcctctttgttatacgattcccatatttataaatgtgtttgaaatatttcaaaataaatatatttttaaagaataatctttatcagaaagtacccaaaggaagctagtgtattaaaagtcagttgaytgaaagaaattacaactcttagattcacaaacactagcaataataattgttagaaacttctaaaataaaaaacattttatagtaaaaaatattgtgggatccaaagtgctttttttatttgagttatatctacaagtacttttgccttagtataaattaaaactgagaaagttttaaaacacaagagcacacaatcacaaattctactagccatcagaactgttgttatcacacatgacaaagcctctagaaaagtccattgtacctcacaaaagaataaaaatgaaaaaaggcaaaatgaatgttaaaatc

SEQ ID NO: 468014 - DNA, 605 bp, Homo sapiens
acacttggtacagggagagtgctccataaattagttgtccaatcacagaagcatcccagagcatcatagaaacccagatgaggactgcccatcctgcttctctggctcttctcctccaggagctcctctccacagagccaggatattctgggtatgttcagagttcaaggtctccccatctcctttcctaacttcactgcattactagtccttggtgtttccttagggctactggctcctatggcctgaggcttccacagcctgaggcttcccaaggctacaagtcaacttagctgaccatgaaggcccctgatcactatgggctgaggaaaggatytggggtcttcccaatatcctccctgcctcctcagccagtggaggtcccagcattggagtcattccccagggcctggaaaacatctctcccttcccgttgctcatgattatgcaggcctagtcacaggtctcagctaaaccttggcaggttggaaggatggggcaccaagtggaggggctttttgagcaaggctggggctgctcctttgagtgagccctgttgagctccatgcaccctctggtggccaacctcatttttgcaactacag

SEQ ID NO: 468015 - DNA, 624 bp, Homo sapiens
agctgcaatttttgaaaaaagtcttattctccaatatgtaaatgaccgtcaggatgcctgtttagggagcagaaattgaattaaggcaggtttcaatcttagtagagatgacaggagttaaaaagagaaaatgaaataatggaaagtgtattgtggatacacagtaggsaggagaggtgacagttgcacaaaaacaaaggtgtatacttcctagctctgtcacaaaattcaactgtcgttgtgttttaggtaacttaaccagagcttgatgctaataagggtgaattttggaaaaaaaattaatcgctgcaaaataatataatctaccgcatttggtttaaaaaatctgttttcccaaatttgcttttgcaaggttcttgaggatacaatcaaccaaggtacactttaaattaaagcagatatatggataaaacaggaaaaatacaaggatattcaatatcaacatttccattaagaattgtactggggcatctggccaacagagtaaggaaataaaaagaaataagtatcaaaatgcaagaaccaaaatgaatactatttgcagagggtgttattgtctatattaagaaacataaaaaagaaatattaatgagagagttcagc

SEQ ID NO: 468016 - DNA, 544 bp, Homo sapiens
caggcaggattaaacagggggaaggagatctccaatgtgtttcctcctgaggcctcagttgatcctgtggggaaggactggaattcttccaattaagacaaatctcctcaccatacagtcattgacctgggctgcctcttgcatggcagttctgcaaatgggggcacctgcctctgacggatggcaattcccagagaaggaatgaggtaattggctctacagagagggtctgtataagcaacatagtatgcactacacctaaactttgagaggttcacagctacttccttcctaaaytctatcttcctaccagggcaaagctttccaggatcctgattagtcttgtttcctgggaaattatgaaaagaagtgtcagttggatgaactacagcccctgttgctgcagctgatttcaaaactataactgataccatcttcctgtaccatccattggaggttctcctctccctcagctcacacttccattgatctaggaagtttgcctcattaggtgatgcacaccatcattcttgagcagtatgag

SEQ ID NO: 468017 - DNA, 562 bp, Homo sapiens
cttgctgaccacgagaaagcatgtctcaatttaaaaaacttaatacaataaagacggtggatcacagagatgaaaagagcataggtctttcatggcaaacagcagaagcagctgcctcctctaagctttatgaagatgtggagaaacaactccctacttgttagggccaaattagttcagcttttctgttacttatagtcttgatatatataagatgacaaaagaaaggcttaaggcttcttaatttggtctcctctaacgtagaattgagaaaatttttgtttagcaaacttcaagcttatagggcaagtatgacttgctccagctatatttatatcatttagcacagaggcccttcggctttctcaatccagagtggtcgctccatccatctatccaaccaaccaaccatccaaccatccacccacctacctgccaacccattttttctttttttctaacaacaaccaactgctgaggcaggcatttcactaagcactgtggatacamacaacccaaagtacagaaaatacgatacccattttagagataaggacacagg

SEQ ID NO: 468018 - DNA, 605 bp, Homo sapiens
atgtagtatttagctattcaaatacttcgcattggttttaatgctgtgtttcatctgaattctyaggttcctagaaattcctaggaacatgatggtccattagggaaatatgggtattttcatctttgtcaagaggggcctgaagcagggagagcagggtggggatggaaagagtgtcacagagcacactctgggaggaaggcaccaggaagccccagggtctgaatcacaagccattatggcctggccagtaattgaatcactggagtgaagccaactttcatgagcaaacacacccatgtggctgtaataaaagagcaggttaaaagaaaaaaaaaagccactggctcccacttactctctggtcttgccttcaactttcaatgtctttctctagctctttatctgcctcttcttctgtaaaagagggactacaatgcagacctcatagggttgtcaggggagaaacagaagcaccttcccttgcacatacaaatgtttactaaatgccggcccctaggctcactaacaagatgaaaaacatgtgcttggtgggaaatgaaaaagattccagaaacaacagaagaatttcaaggtaatgtgac

SEQ ID NO: 468019 - DNA, 617 bp, Homo sapiens
tgatagggtctgtctattttgaatctgaaatccatctcaaagacaggccaagagcttattagtggacttaactggattctgctggcccaagcgcagtaaagtcaaacaaccatatcgaggttttgcaytggggaaaggaggacatttatttgcagggcatccaagcaagaaggaccaggcggctaactatcaaagtccctcactgaatgggggcaataatcatatctcttacagatgaaatcatgaatgaaatggtttatggaaaagcagcaatggttgataatcctaaatgttaagtatgtttatattttttccctgactttaaagtgcttctccttcattcctatacacaggtccagactgatggcttattttttaaaattctcttagtcacttcattggttctaacaataattttagaaactggatgactttgcaatgtagaaaggctatactttattcagatagagtacactcacatattggcttgtctatggcacatcgatatcatgccaagaatgtaagcactaagagagaataagaggaaaatccaggctttatccctattgaattatttatcccactattagaatactagtgaggtaggtgtggccaca

SEQ ID NO: 468020 - DNA, 587 bp, Homo sapiens
ggttggatgggcatagtcagttttacctttttgaatgctggatgtttctgtattcctataaacatttttgcaatttgttttgggatgtgattaagttacttggaggcagtaacacattctcattctacagtttggttaggtgagatcagagcagtgtgtagtttggtctaatttcccctccactatttgagacaaagtctttctgagtattttccccaatgttttgtaaataattaggttttctattttagcctgtggaaacaaattattcctggttctatgtgagctctaggtactgtttcttagcctttcaggtgattctttctcccaatctcagatagtttcctcacatgtatgatcagtacttasctgaagactaggagaggaacttcctttacagaggaaccccttacaatctctgaagctgtatttctgtgcacttctctcttctcaatactctgtcctgcaaactcattgccttggatactcattatattttgtatgcattttatcagagcatgtgtgacacactttattttgcttatttgtttgcttgttttatgcttctctctacttattagacttta

SEQ ID NO: 468021 - DNA, 514 bp, Homo sapiens
gctaacccactaactactctgtacaacttctttctaccctataccaatccttcacattccaggtgttttgttatcttcaaattctgatctcccccagacccatctcaaaaaagtgttctgtactctgtcttagctcgaccttcctgtaccacggtccagaaaaaaggtcctgggtggaaattcaagtcaagtgtaaaacttaaattgtgtgtttcttctctttcaaaaaacacagttgtgtataatttaytgcctaaagactgtgagaagtgcctgatatagtttatctagctttatagttgtgtcatatggaatggcaactgtagtataagttattttatcaaagtgagaaatagaaatatgtttctattattattgtgcagtggaaatattttctcttctcttttaaagagaccatttaaaatcctcatgtcattttacatgaaccgttatcaatccattgatcttaagtgctttaattattcttcagttgtttaacttacattaagaaata

SEQ ID NO: 468022 - DNA, 627 bp, Homo sapiens
tgatctagaatgtagaactgtagtaagcaattttaggtgagctattggtaaaaaattacctgagagttagcatgtgctaccacaatttatatacaacctgaaaattttatgatacagcgttaaataagaatggcttagctaaatagtgtgtgtaagcaataaccttccactgtctttatgtcttcacaatagcagcagatacctaccaggattgactcatgccattctgtcttaatgggtctgctttcacaagtttttctattgcttcaataatgcgaatccaactatattcctttgccttaattaagttttttcaattrcattctaaatcttacatgtttcatgccaatttccataactatcagctttaatgtgacactttagaaaacagaatttcaaatatcaaatatgcattccatatttctttaaaaaaaactgttccaatactgagtttccagattcatttatttgatcaaaaatttagaaataagctggtattttttaaaagcctaaagttatttgggaagcaattggggaaattttaattatgaactagaagttaggtgataggaaattatattaattttgttaggtatcattgtaaaattgtggcttgtagacaaaagt

SEQ ID NO: 468023 - DNA, 627 bp, Homo sapiens
tgatctagaatgtagaactgtagtaagcaattttaggtgagctattggtaaaaaattacctgagagttagcatgtgctaccacaatttatatacaacctgaaaattttatgatacagcgttaaataagaatggcttagctaaatagtgtgtgtaagcaataaccttccactgtctttatgtcttcacaatagcagcagatacctaccaggattgactcatgccattctgtcttaatgggtctgctttcacaagtttttctattgcttcaataatgcgaatccaactatattcctttgccttaattaagttttttcaattgcattctaaatcttacatgtttcatgccaatttccataactatcagctttaatgtgacactttagaaaacagaatttcaaatatcaaatatgcattccatatttctttaaaaaaaactgttccaatactgagtttccagattcatttatttgatcaaaaatttagwaataagctggtattttttaaaagcctaaagttatttgggaagcaattggggaaattttaattatgaactagaagttaggtgataggaaattatattaattttgttaggtatcattgtaaaattgtggcttgtagacaaaagt

SEQ ID NO: 468024 - DNA, 532 bp, Homo sapiens
gaatagacatttctccaaagatgacatacaaatggccaaaaaatatataaaaaagcattcaaactgggctcagtggcttacacctataatccaacactttggaaatctgaggtgagaggatcacttgagcccaggagttcgagaccagtctgggcaacatagtgagaccctatctctacaaaacatttaacaattagccaagcayggtggtacacgcctgtagtcccagttactcaggaagctgaggcaggaggatcactcgagtccaggagattgaggttgcagcaagctgtgtttgcaccactatactccagctgggtggcacagtgagaccctgtctcaaaaaaaaaaaaaaaaaaaaaaaaaaaattcaacatcattagtcatcagggaaatgtcaatcacctcacacctttaggatgactcttaaaaaacaagtgctgttgaggatgtggaaaacttggcactcttatacactgttgatgggaatagttgatgcagccactatggaaagcaatatggaggttcctca

SEQ ID NO: 468025 - DNA, 561 bp, Homo sapiens
attaattcacaccatcacaaggtccaacaataggccctctgccggctgaggagcaaggagagtcagtctgagtcccaaaactgaataactgggagtctgatgttgcagggcaggaagcatccagcatgggagaaagatgtaggctggaaagctaggccagtctcaccttttcatgtctttctgcctgctttatattcgctggaagctgattagatggtgcccaccttattaagagtgggcccgtcttccccagcccactgactcaaatggtaatctcctttgacaacaccctcacagacacacccaggattaatattttgtaccttcaatsaagttgacacttagtattaaccgtcacaatggtctgtttgttaatagtttatttttcagtgcagagctctttagttaggttttttgtcaatttttgtttttattgcaattacttttgaaaactgagtcataaattatttgccaagtctgatgttcacaagggtatttcctagggttcttataagatttttatagttttaggtcctatatttaagtctttaatctctcttg

SEQ ID NO: 468026 - DNA, 592 bp, Homo sapiens
gacttcgcctcccaaagtgctgggattataagtgtgaacctctacacccggcctgcattcactttctagaaggtctatgcccttctattctttgtccttaaattctctttttcacataatggctagtgtgatctttaaaggtactgtccatatcatattattctcctgcctaaaacactccaatggctgcacattaaaaatacaacaaaattgaaattctttccctgtgtctagaatctgcaagacccttgccaactatctctcatctcatggcactacctccatccagcctctttcttgaacacactaggctcattgccaccagatacctcttattctcttgaacacactaggctcattaccacmatatataacttattctcttgaacacactaggctcattgccaccatatgcctcttattgtctctgcctgagatgctttctcctgacacctttatctgtctggctcctttctgtctatcaggatatagatcaggtgccacctctgaagagatgcccaactcctaaccacactagtcttatttccctctttcattttctaactagcagaaattatttgtcaaccagaat

SEQ ID NO: 468027 - DNA, 592 bp, Homo sapiens
gacttcgcctcccaaagtgctgggattataagtgtgaacctctacacccggcctgcattcactttctagaaggtctatgcccttctattctttgtccttaaattctctttttcacataatggctagtgtgatctttaaaggtactgtccatatcatattattctcctgcctaaaacactccaatggctgcacattaaaaatacaacaaaattgaaattctttccctgtgtctagaatctgcaagacccttgccaactatctctcatctcatggcactacctccatccagcctctttcttgaacacactaggctcattgccaccagatacctcttattctcttgaacacactaggctcattaccacaatatataacttattctcttgaacacactaggctcattgccaccatatgcctcwtattgtctctgcctgagatgctttctcctgacacctttatctgtctggctcctttctgtctatcaggatatagatcaggtgccacctctgaagagatgcccaactcctaaccacactagtcttatttccctctttcattttctaactagcagaaattatttgtcaaccagaat

SEQ ID NO: 468028 - DNA, 608 bp, Homo sapiens
aaattaagcagaaaaggaatttattggaagaatactggataactccaagaataattgggaagagtaaagaactggcctcagaaaatgagcagaagctgaagtaggctagtgtgtgtgcctgaattacatctaagaagatgctacaaaaagaatctgacctacaatactaggtctgggtattagaagtcaccactgacatggttgctgggagatgcatgccgtcaycacagttagaggcattccaatttgcttcctgtgtctttgctttatttgctcccaattaaagtcccagggaaaatatgcaattgattgagtttcaatgaagtgcctgttgtctagctgccaggagttagggaaaacatatctgtcctccaagggagtgagttccaatactgagtagcccaaaaaggcaaatacccaattcagttgctatcttcttaacaacttatagatcaattgaatcagacagacatatagtaaaatgtacgaaattaaatacattccatagagtacaagtaaacatttttttttaatctggcacctttacaatttgaccaattgattatagttatacttttttcagtaaatatgaagaaatttatccctca

SEQ ID NO: 468029 - DNA, 586 bp, Homo sapiens
gtccagactgatgtgtttcttcacaaatcattctggaccaagagaattcatgtttaaaatggtaatccgggggttctggttctggtaatggtggaatrgtttatatggaactaatccttcaacagatgataagtagaacttttggggaaagtatttttaaaaatcctggtaataatgtgcttagataagaatcatcaataaatgttaaaataatgtatgaaagtttgagaataaaagggtagtactcatcattttaactttgtcattatttgtactttgtagttatttgcaatttaggaagtatactctcaatatattttgatttctttgtactatagaaaatgcattctaaataaagtagcactaaaggggcatcatatcagcaaatttctctcataagatttagaaaaaaattatatatgtgtatgtatatatatgtacacatataaaatatttataaatgaataaatacatcgtcaggattatgtataataaaagggaagtaagatgtctacaccgaagcctataagatatgccttagatgaattaaagagctaaactaatgatgagatatgccatgttcatt

SEQ ID NO: 468030 - DNA, 603 bp, Homo sapiens
aaatatatttctccttggatacccaccaccgataaagtgaagatttgtattcccatcttactgaagaggaacctgaggttcagagtagtcaaatgaccaagcagaaatcacagacccggtggggaataaaaggccagtctcccgcaaacccagcacccttcctacttcaccaacttcactcatttccttgttttccttgttactctccagcttctccctcctatcaccttcctttctttacccttcatcttcatccttctaagaaatatgtctaaaatcagaaaaaatgagcactaatgaaaataactgtgctaggagctttygcacacaatatctcaatacataatttcagctactcagtgtggtaggtgatatgtattcattccaatatttattgaacactgatggtgtggcagatatcataccagacacgccaagtgaaataaggaaaacaaacccaattcctgtcctcaaggagctgtagtctaggaaatattcctattatttgttttcaaaaagaaataaactaagacttggaggaattaattagttttttaaatgccatagttcaaactcaaaatcctttatcacactggattttaa

SEQ ID NO: 468031 - DNA, 602 bp, Homo sapiens
ttctggtagaataaggatcagagatcagtaacatttttctgtaaagggccagtatagtctcagccacaactatgtaacgttgccctgtagcaccaaaggggccatatagcatatgtaaatgaataggtgtggcagtgttccaataaaactttatttacaatagcaggtggcagtgggctggactggctcacaggctgtagtctgcccagscttgggtttggagctggtgaagaacatgcccctggtgaagaaaactagagggccaacctccctctttctgccagcaccctcttagaaatccacctcgagggctccagaggcagagcccatgaaagccactgaaatcccccctctgcctttgagaactggaggtttagatttataggcatgacaatttgtttcacataattctgtcagtaattacatcgacttccaccagcagccattaggtaaatgatttggccctttcccctgagtaatattttcccccactgaaataaatggagggtgcatttctctcccataagttaagcatattatttgcctcatcacacaaggcaaatgcagtagctctgagctattagtctatcactgcagcaatc

SEQ ID NO: 468032 - DNA, 573 bp, Homo sapiens
gactgtgtggctttggtggcagctgtggtggtagtggatatggtggcagtggggatgaatataatggatttggtaataatggaagcagtttyggaagtagtggaagctacaacaattttggcaatgataggattcaatcttcaaattttggatgaatgaagggtagaaactttggaggcagaagctctagttcctgtggtcatggaggccaatactttgccaaccaggaaaccaaggtggtcatggtggttccagtagcagcagtagctatggcagtggcagaagatcttaattactgccaggaaacaaagtttagcaggagaagagagccagagaagtgacaaggaagctatgggttacaacacagttgtgaattcagctgggcacagtggtgacagggcttgctgctgtcaaagaagatgtgttttagacaatactcatgtgtatgggccaaaatctcaaggattatatttgtgaccaattgtataacacgttattttagtttctgttttgtgtaaagcattccagtgaacgtttttaatgcagatattttttgcacccttgatgttgatt

SEQ ID NO: 468033 - DNA, 611 bp, Homo sapiens
tccatattttcatcaaaattagagtgtgttgcatcagtttcccttactgactgccaattttatcaatttgtctaataaggcattcgattttamaacttaaatcagaagctttacatttatcaagtatttaagttcagaacttttctaaaaaatttaatacaatctgaatacatataaattagttttcaatattaaattttactttactgatataaaaataaccctaggcaaacaatttatttcaaaaggtttcatttgagcataaatactagcataacacattttgtagtacattagattttatgtaattaatatgcggcatcaaaattataagtgatataataagagtactttatgcttataaaaaggcaaaattgcttagctattttaatttatttgaatcaagaataagattatgttaactttatagtacaatatacaagaaacaaagaactaaagaactaaaactaaaaactaaaacacacaaaaaactaaagaatatctcttataaacatagatgtaaaaatcttcaacaaaaaataccaaatttaatctcacaatatataaaatgaacaatacattatgatcgagaggtttatcccaaaaataca

SEQ ID NO: 468034 - DNA, 611 bp, Homo sapiens
tccatattttcatcaaaattagagtgtgttgcatcagtttcccttactgactgccaattttatcaatttgtctaataaggcattcgattttaaaacttaaatcagaagctttacatttatcaartatttaagttcagaacttttctaaaaaatttaatacaatctgaatacatataaattagttttcaatattaaattttactttactgatataaaaataaccctaggcaaacaatttatttcaaaaggtttcatttgagcataaatactagcataacacattttgtagtacattagattttatgtaattaatatgcggcatcaaaattataagtgatataataagagtactttatgcttataaaaaggcaaaattgcttagctattttaatttatttgaatcaagaataagattatgttaactttatagtacaatatacaagaaacaaagaactaaagaactaaaactaaaaactaaaacacacaaaaaactaaagaatatctcttataaacatagatgtaaaaatcttcaacaaaaaataccaaatttaatctcacaatatataaaatgaacaatacattatgatcgagaggtttatcccaaaaataca

SEQ ID NO: 468035 - DNA, 620 bp, Homo sapiens
tgaaaaaaattatgggcaaatgcaaagaaaaaaattgttgctatttaggaattttctgaataagcatcgtaatactgtctttcaaagagygtatattttagcccacagcccggcaagtagtttctgaaaatgctttacataagttgcactgcaagccagaactatgactgccgaaaactcgcaattaaagcagaaatgatatatctaaaaagaaatacctggtttgtaaggcctagccaattataccaatagataggtgatcaaatatattcctacacagacattcccagtgctgaaaatggaagttgccacaattggggtaaacttaaaagagtcagctactttcttgtagcaaaaaagtcggcaaaacatctaagttaaaactaaaattagaagtgaactccatttccatttaacattctttggaaattttttaagtgccacatccacttactagagagctttctctaagacaaatttaactgagaactaaattagagccaaatgtatcagagtattttaagtgtctaggataatctcttcttcactataccttatattggaagattcatcgagttcaggcaaagatagtacagcttaatcgatggagttaacacagt

SEQ ID NO: 468036 - DNA, 620 bp, Homo sapiens
tgaaaaaaattatgggcaaatgcaaagaaaaaaattgttgctatttaggaattttctgaataagcatcgtaatactgtctttcaaagagtgtatattttagcccacagcccggcaagtagtttctgaaaatgctttacataagttgcactgcaagccagaactatgactgcmgaaaactcgcaattaaagcagaaatgatatatctaaaaagaaatacctggtttgtaaggcctagccaattataccaatagataggtgatcaaatatattcctacacagacattcccagtgctgaaaatggaagttgccacaattggggtaaacttaaaagagtcagctactttcttgtagcaaaaaagtcggcaaaacatctaagttaaaactaaaattagaagtgaactccatttccatttaacattctttggaaattttttaagtgccacatccacttactagagagctttctctaagacaaatttaactgagaactaaattagagccaaatgtatcagagtattttaagtgtctaggataatctcttcttcactataccttatattggaagattcatcgagttcaggcaaagatagtacagcttaatcgatggagttaacacagt

SEQ ID NO: 468037 - DNA, 620 bp, Homo sapiens
tgaaaaaaattatgggcaaatgcaaagaaaaaaattgttgctatttaggaattttctgaataagcatcgtaatactgtctttcaaagagtgtatattttagcccacagcccggcaagtagtttctgaaaatgctttacataagttgcactgcaagccagaactatgactgccgaaaactygcaattaaagcagaaatgatatatctaaaaagaaatacctggtttgtaaggcctagccaattataccaatagataggtgatcaaatatattcctacacagacattcccagtgctgaaaatggaagttgccacaattggggtaaacttaaaagagtcagctactttcttgtagcaaaaaagtcggcaaaacatctaagttaaaactaaaattagaagtgaactccatttccatttaacattctttggaaattttttaagtgccacatccacttactagagagctttctctaagacaaatttaactgagaactaaattagagccaaatgtatcagagtattttaagtgtctaggataatctcttcttcactataccttatattggaagattcatcgagttcaggcaaagatagtacagcttaatcgatggagttaacacagt

SEQ ID NO: 468038 - DNA, 620 bp, Homo sapiens
tgaaaaaaattatgggcaaatgcaaagaaaaaaattgttgctatttaggaattttctgaataagcatcgtaatactgtctttcaaagagtgtatattttagcccacagcccggcaagtagtttctgaaaatgctttacataagttgcactgcaagccagaactatgactgccgaaaactcgcaattaaagcagaaatgatatatctaaaaagaaatacctggtttgtaaggcctagccaattataccaatagataggtgatcaaatatattcctacacagacattcccagtgctgaaaatggaagttgccacaattggggtaaacttaaaagagtcagctactttctygtagcaaaaaagtcggcaaaacatctaagttaaaactaaaattagaagtgaactccatttccatttaacattctttggaaattttttaagtgccacatccacttactagagagctttctctaagacaaatttaactgagaactaaattagagccaaatgtatcagagtattttaagtgtctaggataatctcttcttcactataccttatattggaagattcatcgagttcaggcaaagatagtacagcttaatcgatggagttaacacagt

SEQ ID NO: 468039 - DNA, 550 bp, Homo sapiens
actgggataggctgtcaaaggtgtccccagttgaagcaaagcaactgaactttagtatgacagcatgagacagtcattggtgctgcctcctagaagaaggagcaaccttgggtgagtcagctcttcactggaaattaagggcaatttccagtgaagagcatatctgtgagcctttagcagccaatattaccagaagcaagtattacaggatactgggagtgttgcttcattagccagaaaactttgtggccagtggcacctttgcctgagttttgctcgagcccactggayttgtttcacccactcacactggcaggccatgcttggcttgtgctactggcctggatcccattccttcaagggtgaaccaggcatgaagcagtgaggggtgtatgagtgagcaagcatggagtccggctgctctgcacagccaggcacactggctgtggtggggtaggcagctccagatgctggcatgggtgccagctccctgcaaggctgcagctggtccaggcttgccacaagcagcttccactgctggcaccaggga

SEQ ID NO: 468040 - DNA, 604 bp, Homo sapiens
tatagcttatgaactatggtactggatagcagagctctagagagacatacctgtaagaaagtaggaagcagaattggacagaggtagaagctgactcagccagtcctctgggcacgtctagaactgggataggctgtcaaaggtgtccccagttgaagcaaagcaactgaactttagtatgacagcatgagacagtcattggtgctgcctcctagaagaaggagcaaccttgggtgagtcagctcttcactggaaattaagggcaatttccagtgaagagcatatctgtgagcctttagcagccaatattaccagaagcaagtattacaggatactgggagtgttgcttcattagccagaaaactttgtggccagtggcacctttgcctgagttttgctcgagcccactggacttgtttcacccactcacactgrcaggccatgcttggcttgtgctactggcctggatcccattccttcaagggtgaaccaggcatgaagcagtgaggggtgtatgagtgagcaagcatggagtccggctgctctgcacagccaggcacactggctgtggtggggtaggcagctccagatgctggcatgggtg

SEQ ID NO: 468041 - DNA, 558 bp, Homo sapiens
ggaagaattgacaaataatttgaaactatccttaaccctccacacttgttaggtgtgtacccaagaaaaaggaggaacagattaggtgaacagctattcagcctctgtcatgattggagctttttaagctgtttatccttttaagcagtaactgtatattttgatcaacatcctatgaagtacttaaaacttgtcttaatccattcagactgttataagaaaagtccttatactgggtaatttataagcaacagaaatttatttctcacagttctgaggccaggaagttcaagatgaaggtgctagcagatttggtgtctgctaagggtccattccttatagatagcacagtctttctgtgtcctcacatggcaaaaggagtgaaccagctccctcaggcctcttttgtaagggcattaatcctcttatggagggttccasccccatgatgacctaacaacttcccaaaggcctcacctcttaatagtattgcattggtgattaggtatcaatgtatgaatttggccgtggggattagaccatatcacttatggatta

SEQ ID NO: 468042 - DNA, 604 bp, Homo sapiens
tttatataaaaataaattccaggtgagtcatacacatttaacctaaaaatactctaaaaattctagayggaaagatcggatgagatttttaaaaataatctcaaagtggggactgtagtttacaacataacataaaacctataagctgtaaactgatacaattaacactgtaaacttcaaaaaaaactaaagaaatttaaacaaaatctaaagaaattatgtttgaatcctttatcaagacaaagtgcaatttccttaaaatagaacaaggtcctatagatcagaatacataaatcaataaaaaatgaagaaaactttgattaaacattgaagtgcctttttaatatacaaatatgtttaaacttatcaatatttagataaatgtaaattgaaattcctcagcaataattttttatatctatcaaatttgtaaaaactattaagacaatgactacggtctgaatgttgggtatcccacaaaaaatcatatgttttattgctaaagtattcctaatactcaatgtgataggattaatagttgggaatttttggggaattatcaaataataaaactctgctcttatgaatgagacctgggccctaa

SEQ ID NO: 468043 - DNA, 604 bp, Homo sapiens
tttatataaaaataaattccaggtgagtcatacacatttaacctaaaaatactctaaaaattctagacggaaagatcggatgagatttttaaaaataatctcaaagtggggactgtagtttacaacataacataaaacctataagctgtaaactgatacaattaacactgtaaacttcaaaaaaaactaaagaaatttaaacaaaatctaaagaaattatgtttgaatcctttatcaagacaaagtgcaatttccttaaaatagaacaaggtcctatagatcagaatacataaatcaataaaaaatgaagaaaactttgattaaacattgaagtgcctttttaatatacaaatatgtttaaacttatcaatatttagataaatgtaaattgaaattcctcagcaataattttttatatctatcaaatttgtaaaaactattaagacaatgactacggtctgaatgttgggtatcccacaaaaawtcatatgttttattgctaaagtattcctaatactcaatgtgataggattaatagttgggaatttttggggaattatcaaataataaaactctgctcttatgaatgagacctgggccctaa

SEQ ID NO: 468044 - DNA, 645 bp, Homo sapiens
cgggacgtattttgaaaacaaacccaactgctaaaattgagtcgacccagaaaagaattaagctgagatatctcttagtgatactttcacatccagatttacgcttagattcatgatgcattacaactaataaaattgtttaagtatgagaaagagcagaccaaggggccatgaagaaaatataattaaatgcagattaaaggggcagggcttctggtttggcagacacttacacttcaaagactggaacattctctttaataatacytcagttatctaataaaaatgatcatttggaaatcatgctggtcacttctgtctagctcaagtgtcaatgttctggatatactgggtactttattcacactgaattgcttttatacatcgagaaaggtgttaactcttactcttcttaaaatggactgtggtaattaattctgatgcctggaagcaaataagtaaatctttgaaatattcattttatttatacagacttagatatctactttttaggaaaatcacacttaaatacccctttcacttttgtacatatttgacacagtttggtatcaactgttactcggattatatagaaatattttgttgcaatgaatttatccaatttccttaaaggaagaagcaaca

SEQ ID NO: 468045 - DNA, 457 bp, Homo sapiens
cttttgctctattcctaaaaaatagcaataattaaataaaattgagttactgagaaagcacattacaatagtttaaccgtaatagactttgctaagatatgttcagtaaaaatggctttttttcctgagaattttacaatgtccgttatggtaatgatctggatttggatgaatttaatgataactaaaggaagattccacagattttattaatgtccgtgattcgtattacctttttctacagtgcttttttaggtaagcgcatgctgtttgagatacataagtgaaygagttaagaaaggcagcatttctgctgcagtggtaaaggtagacctcatttggtaaaacacataaccaagggaagttgttgcctcttttttgaagtttctctgctagtcattggcaagagaagtcactctcgaataatctcttcacattgtatgtgaccaagccctgt

SEQ ID NO: 468046 - DNA, 574 bp, Homo sapiens
ttagcctagctcaaactagatgtttctgttttcttaatttgtttccatttctctccaaggtatatatatatatatatatrtgtgtgtgtgtgtgtgtgtgtgtgtgtgtgtaaacgtttatgtatccctattaaatgtcaaacattattttaaactcttgacatgaattactcaatttaatgctcacaacagttctatgaaatagctatcattatcattcctatttaatgatgagaaagttaaggcacagggtgggtaaaccaattgctcaacatcacacaggcatcaggggcaggatttactctggaaaccctgcatctatgcttataagttcagctgccacttaactgtgtatgctgcctccagggcactctttctgaaactcatatccagtcacatctatcccctcttaaggatctgcactagtttcccattatttattaaacaaattcaaatatatgttgcttgacatttgaggttcttcacaatttgtctctcttttaacattctattttcatttatctattgattagctacttcacccactctggactatttgccacccctaaactag

SEQ ID NO: 468047 - DNA, 598 bp, Homo sapiens
tcttgtttttccatttctaaaaaagaaaagggaactgatacaccttgaggatagcagagaaacaaaaacaaagacagggcttatattcaacatagtccacaaccagttgyatatgagcccaggccacacagagactccggccttagatcaggaggagacctgcagctggtcccaacttagtacttgtagagagatcatgggaaggaacaaggattctgggaggagtcaggggaatcagttgaggggctgcaggccgttcagaaatatttccgcattttaacaacaggtgacccaccagtgtgcactctctggatactaccctctatatcaagcccaagtctaaatagctatttcctttaaaaaataaatcaatgaaacaaaacaaccacaaagcccagaggctgggaagcatgggggcatttaaaagaatttgattaatgggtacaaatatacagcctgatagaagaaataagacctagtattagctagataagtagggtgactatatttacaataatctattgtatttcaaaatggtagagaagaatttgtatggttttagcattaaaaagatagatatttaagacaatagatatcc

SEQ ID NO: 468048 - DNA, 598 bp, Homo sapiens
tcttgtttttccatttctaaaaaagaaaagggaactgatacaccttgaggatagcagagaaacaaaaacaaagacagggcttatattcaacatagtccacaaccagttgcatatgagcccaggccacacagagactccggccttagatcaggaggagacctgcagctggtcccaacttagtacttgtagagagatcatgggaaggaacaaggattctgggaggagtcaggggaatcagttgaggggctgcaggcygttcagaaatatttccgcattttaacaacaggtgacccaccagtgtgcactctctggatactaccctctatatcaagcccaagtctaaatagctatttcctttaaaaaataaatcaatgaaacaaaacaaccacaaagcccagaggctgggaagcatgggggcatttaaaagaatttgattaatgggtacaaatatacagcctgatagaagaaataagacctagtattagctagataagtagggtgactatatttacaataatctattgtatttcaaaatggtagagaagaatttgtatggttttagcattaaaaagatagatatttaagacaatagatatcc

SEQ ID NO: 468049 - DNA, 560 bp, Homo sapiens
atagatagatagatatctaatagatctatctatctatctatctatctatctatctatctatagatcttgttagtattctctgcctagatrgatagatctatctatctatctatctatctatctatctatctatctatctattcatctatctatctatctatctatctacccattgatatggtaagggacagaaagaaagacagacagattatgtggattggctgatgtgattatatggaggcttgagaagtaccacaatctactgtctgtaaactggaaagccaggaaagttggcggtatcatttagtccacatcttttcaaaagccctggaaaccagggaatctaaaggtataaatccaagtctgatgacaggagaagatgacatgagatgtctcaactcaagcagccaggtaggaagcaaaaatgggttgaaatttcccttccactgcctttcattccattcagtccctcaacaaattagatgcccgccacactgaaaaagtcaatctactttattgatttcactgatttgaatgttcatctaatcttgaaacaccct

SEQ ID NO: 468050 - DNA, 560 bp, Homo sapiens
atagatagatagatatctaatagatctatctatctatctatctatctatctatctatctatagatcttgttagtattctctgcctagatagatagatctatctatctatctatctatctatctatctatctatctatctattcatctatctatctatctatctatctacccattgatatggtaagggacagaaagaaagayagacagattatgtggattggctgatgtgattatatggaggcttgagaagtaccacaatctactgtctgtaaactggaaagccaggaaagttggcggtatcatttagtccacatcttttcaaaagccctggaaaccagggaatctaaaggtataaatccaagtctgatgacaggagaagatgacatgagatgtctcaactcaagcagccaggtaggaagcaaaaatgggttgaaatttcccttccactgcctttcattccattcagtccctcaacaaattagatgcccgccacactgaaaaagtcaatctactttattgatttcactgatttgaatgttcatctaatcttgaaacaccct

SEQ ID NO: 468051 - DNA, 560 bp, Homo sapiens
atagatagatagatatctaatagatctatctatctatctatctatctatctatctatctatagatcttgttagtattctctgcctagatagatagatctatctatctatctatctatctatctatctatctatctatctattcatctatctatctatctatctatctacccattgatatggtaagggacagaaagaaagacagacagattatgtggattggctgatgtgattatatggaggcttgagaagtaccacaatctactgtctgtaaactggaaagccaggaaagttggcggtatcatttagtccacatcttttcaaaagccctggaaaccagggaatctaaaggtataaatccaagtctgatgacaggagaagatgacatgagatgtctcaactcaagcagccaggtakgaagcaaaaatgggttgaaatttcccttccactgcctttcattccattcagtccctcaacaaattagatgcccgccacactgaaaaagtcaatctactttattgatttcactgatttgaatgttcatctaatcttgaaacaccct

SEQ ID NO: 468052 - DNA, 563 bp, Homo sapiens
gccttcccttttgttttactctgcctcaggcaaatgttttaaataaacacaaatactcaagcatctccctataagtcagtccctctgataaatgaatatttaaataaatttctatgacaggctgaataagggcccccaatgatgtctatgtcctaatttctggaacctgagaatgtgtcagcatatatggttaaaaaaaaaaaaagaaaaaaaaaaagactttgcagacgtgactaagttaaggatcttgagagcagatataatcctgattgtcctagtgaccacagtgtaatcataagcgtccttcgaagacagaggcaggagggtcagcgtaagagtaagaggcctaagaatggragtaattcagagtgactcaaggacggagctacaatacagggagtctccagaaggtgaaaaagccgaggaaacagattcttcactaagagcctctagaacaaaccagccctgtaaacaccttgactttagcacactgatagggtttggctttgtgtccccacccaaatcttatctcaaactgtaacccccacgtgtcaacagaggga

SEQ ID NO: 468053 - DNA, 563 bp, Homo sapiens
gccttcccttttgttttactctgcctcaggcaaatgttttaaataaacacaaatactcaagcatctccctataagtcagtccctctgataaatgaatatttaaataaatttctatgacaggctgaataagggcccccaatgatgtctatgtcctaatttctggaacctgagaatgtgtcagcatatatggttaaaaaaaaaaaaagaaaaaaaaaaagactttgcagacgtgactaagttaaggatcttgagagcagatataatcctgattgtcctagtgaccacagtgtaatcataagcgtccttcgaagacagaggcaggagggtcagcgtaagagtaagaggcctaagaatgggagtaattyagagtgactcaaggacggagctacaatacagggagtctccagaaggtgaaaaagccgaggaaacagattcttcactaagagcctctagaacaaaccagccctgtaaacaccttgactttagcacactgatagggtttggctttgtgtccccacccaaatcttatctcaaactgtaacccccacgtgtcaacagaggga

SEQ ID NO: 468054 - DNA, 563 bp, Homo sapiens
gccttcccttttgttttactctgcctcaggcaaatgttttaaataaacacaaatactcaagcatctccctataagtcagtccctctgataaatgaatatttaaataaatttctatgacaggctgaataagggcccccaatgatgtctatgtcctaatttctggaacctgagaatgtgtcagcatatatggttaaaaaaaaaaaaagaaaaaaaaaaagactttgcagacgtgactaagttaaggatcttgagagcagatataatcctgattgtcctagtgaccacagtgtaatcataagcgtccttcgaagacagaggcaggagggtcagcgtaagagtaagaggcctaagaatgggagtaattcagagtgactcaaggacggagctacaatacagggagtctccagaaggtgaaaaagccgaggaaacagattcttcactaagagcctctagaacaaaccagccctgtaaacaccttgactttagcacactgataggrtttggctttgtgtccccacccaaatcttatctcaaactgtaacccccacgtgtcaacagaggga

SEQ ID NO: 468055 - DNA, 580 bp, Homo sapiens
aatttaatggaaataagtggaaggcaatgtgcttacaaaagaaaacccaagtgcataaacacaagatggaaatgtactgtgttcagccatggtagaaaaatatacaagagttacagaaggccacccaccgagcattagccattaggataatggcgctatttaaaaaggagacaagacacccatatgcatgaactgaaggataatgggtgagagctgtgaagtcatcaacacatagtcattccttattgatcaggccctgactgtgtggagacaggaaaaatgtggcaaagatcaagagtacatgggtgtgatcacataaatgaaaaatgaagtctttggagacagtaatctggagaaggaatagctgcagrgtgacaaagtttataagcttcttataaaaaggtgaccatatgaaggatggtctttgtgctcataacagagctaacgaaagcttgtactatatcatcaggaattttaggtagaaaacttaaatcccatagaagcctggaaggtaccttagcacagtaagccaggggaagcatgaagccctcttggaacctctttgattgtcccaattttg

SEQ ID NO: 468056 - DNA, 519 bp, Homo sapiens
atattaattccagaagagctccataggggctaattgctattctcttttctttttcctcacccttagttctggcatctgccctttgtttaataatcttaaattttcaatctatgcaccaaatataatttatatccacacagtttaaaaattgcaaaaaatagtagtttcccatttattatagaaaagaattaacagagagcctgcatttgctaaatggacacatgtgtcataaaaataactgggcacaaaaatattctaccactatttttagaaaatttaatagaacatatgcttcaaaaatatacagctcactaaaatcctaatggaaacacatctatgaaaagcaatgtttgcaracacagaaatacgataaaggcaaaagcagaataagccatttcaacaggtgtgagaatgaaatgtgacaaatcaacatgtcagctgttattccactcatcctaatatattcccttcttaagcatccattgctctttaaaaaaagataataatgctcttttatct

SEQ ID NO: 468057 - DNA, 519 bp, Homo sapiens
atattaattccagaagagctccataggggctaattgctattctcttttctttttcctcacccttagttctggcatctgccctttgtttaataatcttaaattttcaatctatgcaccaaatataatttatatccacacagtttaaaaattgcaaaaaatagtagtttcccatttattatagaaaagaattaacagagagcctgcatttgctaaatggacacatgtgtcataaaaataactgggcacaaaaatattctaccactatttttagaaaatttaatagaacatatgcttcaaaaatatacagctcactaaaatcctaatggaaacacatctatgaaaagcaatgtttgcagacacagaaatacgataaaggcaaaagcagaataagccatttcaacaggtgtgagaatgaaatgtgacaaatcaacatgtcagctgttattccactcatcctaatatattcccttcwtaagcatccattgctctttaaaaaaagataataatgctcttttatct

SEQ ID NO: 468058 - DNA, 454 bp, Homo sapiens
aaccacttttgaaagtgattgttttcagttacatcaaaagattagtcagtgtatctgtcaggaaaggaaaaaaaaatctttatcttggtgaaaatatttgaaactgttagacatatcaatttttttttgagacagcatctcactctgtcgcccaggctggtaagatcatggatcactatagcctcaacatcctggcattcagtaatcttgccatctcagcccacggaggagctggaactacaggtgcacaccctcatgcccagctaattttcgtggcttttttwaaaatttttttctttggtagagacaaggtctcattatgttgaccaggctggtctccaactcctggacacaagcaatcctcccgcttggcctcccaaactgctgggattaccagcgtgagccaccacacctggcttcaaatcttaacaaatctaataaaaatcactgatac

SEQ ID NO: 468059 - DNA, 454 bp, Homo sapiens
aaccacttttgaaagtgattgttttcagttacatcaaaagattagtcagtgtatctgtcaggaaaggaaaaaaaaatctttatcttggtgaaaatatttgaaactgttagacatatcaatttttttttgagacagcatctcactctgtcgcccaggctggtaagatcatggatcactatagcctcaacatcctggcattcagtaatcttgccatctcagcccacggaggagctggaactacaggtgcacaccctcatgcccagctaattttcgtggctttttttaaaatttttttctttggtagagacaaggtctcattatgttgaccaggctggtctccaactcctggacacaagcaatcctcccscttggcctcccaaactgctgggattaccagcgtgagccaccacacctggcttcaaatcttaacaaatctaataaaaatcactgatac

SEQ ID NO: 468060 - DNA, 659 bp, Homo sapiens
gaggctgttaaccgttacacacacatacacacacacacacacaaacacacacacacacacaaagatctttagactttcctgaacagtacaacaacaaactatttttgttcagacactttatactgggggaagctatttttagagtgaatcacatcctggtcttcaaaaacaatgggataaaactggatactaaatacaagggcaatatttctactctgaaaaggaaatgtgtgtgtgtgtgtgtgtgtgtgcgcgcacacatgctcgcaagtgcaatatctttccaaaaatctgtcaatgattgactgaatccactatatattttataatctgttttatcacctgtgtactatgctttcacatgattcagttatttgtttttattgcttcttctgagttctttcataaataatgtaattctacctattagtggtttcgtttgttttgaaagtataattcktgttattaccaaattaagaattattactgtgtacaaataatacacaccaacagtgtgtttactactgtgatcccatttctcctaagtaacactgaaatttcttttaaaatgttagagaagtgtgccctttacaaaaggaaaatagaatttctgtaaatcaagtggtctcagacagcttgcaaacagatgggaagttcct

SEQ ID NO: 468061 - DNA, 611 bp, Homo sapiens
gtcattttcttagtcttgatttctaattttattgcactgtggtctgagagaatgattggtatgatttcatttattttgtgtctgctgaagatgtttttaatgtccaattgtgtggttgattttagattatgtgccatgtggcgatgagaagaatatatattctgttgtttttctagtggagtgttctgtagatgtctatcacatkcatttggtccagtgctgagttcaggtcctaaatgtcctgttaattttctgcactgatgatgtatttaatagtgtaagtggggcgttgaagcctcctactattatagtgtgagagtctaagtctctttgaaggtcgctaaaaacttatgtatgaatctgagggctcttgtgttggatgcatatatatttaggatagttagatcttgttgaattgaaccatctaccattatgtaatgcccttctttgtctttttcgacctttgttggtttaaggtctgtttcatcaaaagctaggattacaactcctatttttttctgttttccattttcttgatacatttttcttcatccctttattttgaggctatgtatgtcacttcatgtaagatgggcctcttgaaaatagca

SEQ ID NO: 468062 - DNA, 627 bp, Homo sapiens
tccacgtgccaattggctaccacattggatagctcagatacagaatatcttcacattgcagaaagttccactgggtagccctgatgtggagcatacctcagtgttgcccacctgggagcaagggagctggaaatttatatatcagccttatttgtcaatggttgctctcctaattccctgacatatctggtttgccctgcacgtataagggaacaaggacagaatatggatagacaccaatagcatctgctgcaagtataaatcagattgtgtcactcttggcttaaaaatcctttttcatgkcttcctgctacaaatcagataaaacccacactctttatcatgccctacatggccccataatctgacttcaaggttacttccccagtctcatgccactttgctctcaattactctgctttcaaatcaaactgaagagactttctgtaagtttcacaaacacattgagttcttccttggctagggcagtggcacatactaatttgtccacttgaaacacccccactggttcactcccactccccctcagctctctgcatcgttgtatcttgctatcctctagttctcagctaaatgccacctcctccaggagatgttccatggtca

SEQ ID NO: 468063 - DNA, 627 bp, Homo sapiens
tccacgtgccaattggctaccacattggatagctcagatacagaatatcttcacattgcagaaagttccactgggtagccctgatgtggagcatacctcagtgttgcccacctgggagcaagggagctggaaatttatatatcagccttatttgtcaatggttgctctcctaattccctgacatatctggtttgccctgcacgtataagggaacaaggacagaatatggatagacaccaatagcatctgctgcaagtataaatcagattgtgtcactcttggcttaaaaatcctttttcatggcttcctgctacaaatcagataaaacccacactctttatcatgccctacatggccccataatctgacttcaaggttacttccccagtctcatgccactttgctctcaattactctgctttcaaatcaaactgaagagactttctgtaagtttcacmaacacattgagttcttccttggctagggcagtggcacatactaatttgtccacttgaaacacccccactggttcactcccactccccctcagctctctgcatcgttgtatcttgctatcctctagttctcagctaaatgccacctcctccaggagatgttccatggtca

SEQ ID NO: 468064 - DNA, 593 bp, Homo sapiens
gtccattgcaagataataaaggaagctgcaagatttcatacgacctagtcttggaagttcagacttctgtatcattttattggtcaaggaagcactcaggacagcccaggttgaaggggagaggaattacagtctactactcaatattagaaacagcgttttttggaaggccattttggcaactataagcctcaatatcctggctgttttcctaatttattcacatttacaactgattytcgttaacgctgatctttctgggtaaaagggtaggccttgctaccctccttgcatgtctcactggggaacaacttttggtatcctttagccaaaccacagacacagtgatatttgatttgagaaggtctgttgtttgtctttttttttttttttttttttttttttgcttcagggaaaaaaggttcactataggttgttatttcaagaggcaagtgaaaaaatcctgcagaataaacagaagcacttcaaaggacccttctgaaatcactatctgcacaaatcacttttccttttaagcctgtgaaggaagtttggcattgcctaacttgctttcatgtaaattcctttcttgg

SEQ ID NO: 468065 - DNA, 593 bp, Homo sapiens
gtccattgcaagataataaaggaagctgcaagatttcatacgacctagtcttggaagttcagacttctgtatcattttattggtcaaggaagcactcaggacagcccaggttgaaggggagaggaattacagtctactactcaatattagaaacagcgttttttggaaggccattttggcaactataagcctcaatatcctggctgttttcctaatttattcacatttacaactgattttcgttaacgctgatctttctgsgtaaaagggtaggccttgctaccctccttgcatgtctcactggggaacaacttttggtatcctttagccaaaccacagacacagtgatatttgatttgagaaggtctgttgtttgtctttttttttttttttttttttttttttgcttcagggaaaaaaggttcactataggttgttatttcaagaggcaagtgaaaaaatcctgcagaataaacagaagcacttcaaaggacccttctgaaatcactatctgcacaaatcacttttccttttaagcctgtgaaggaagtttggcattgcctaacttgctttcatgtaaattcctttcttgg

SEQ ID NO: 468066 - DNA, 593 bp, Homo sapiens
gtccattgcaagataataaaggaagctgcaagatttcatacgacctagtcttggaagttcagacttctgtatcattttattggtcaaggaagcactcaggacagcccaggttgaaggggagaggaattacagtctactactcaatattagaaacagcgttttttggaaggccattttggcaactataagcctcaatatcctggctgttttcctaatttattcacatttacaactgattttcgttaacgctgatctttctgggtaaaagggtaggccttgctaccctccttgcatgtctcactggggaacaacttttggtatcctttagccaaaccacagacacagtgatatttgatttgagaaggtctgttgtttgtctttttttttttttttttttttttttttgcttcagggaaaaaaggttcactataggttgttatttcaagaggcaagtgaraaaatcctgcagaataaacagaagcacttcaaaggacccttctgaaatcactatctgcacaaatcacttttccttttaagcctgtgaaggaagtttggcattgcctaacttgctttcatgtaaattcctttcttgg

SEQ ID NO: 468067 - DNA, 593 bp, Homo sapiens
gtccattgcaagataataaaggaagctgcaagatttcatacgacctagtcttggaagttcagacttctgtatcattttattggtcaaggaagcactcaggacagcccaggttgaaggggagaggaattacagtctactactcaatattagaaacagcgttttttggaaggccattttggcaactataagcctcaatatcctggctgttttcctaatttattcacatttacaactgattttcgttaacgctgatctttctgggtaaaagggtaggccttgctaccctccttgcatgtctcactggggaacaacttttggtatcctttagccaaaccacagacacagtgatatttgatttgagaaggtctgttgtttgtctttttttttttttttttttttttttttgcttcagggaaaaaaggttcactataggttgttatttcaagaggcaagtgaaaaaatcctgcagaataaacagaagcacttcaaaggacccttctgaaatcactatctgcacaratcacttttccttttaagcctgtgaaggaagtttggcattgcctaacttgctttcatgtaaattcctttcttgg

SEQ ID NO: 468068 - DNA, 574 bp, Homo sapiens
acccagtttgtttggtgacctgggtgcagggaaagccgtgcaaatgtgtagtcaagtggtctgtaataagatgagcgatacaaatgctgaacaagcctcctctgggcagcatctgatagatttctgtactgaagaaaatatttgatgaggacagaccccttaatcctgtcaaacgaactaattcattttcagttccatctatgaaattatactccacaaaagcagaactatggcccaggaggagacagtsatctgacagagaaacagcattgctgagatgagatagaacttgctctggatcaaaagtgatcatttctattattctcatggtatctttgatttgtcacagcaattgcatttgtataaggcctagttaattaagactgtggactgtgatcaaatttaagcagcacagttcctaaaatatacccagccttatctgctcccacttgctgataaacacacacacacacacacactcacacacactcgcacacttttgctccagaaatgctgaactaatagttgccagaatacaacattctaactcatacctctgggtcatgcacaagca

SEQ ID NO: 468069 - DNA, 574 bp, Homo sapiens
acccagtttgtttggtgacctgggtgcagggaaagccgtgcaaatgtgtagtcaagtggtctgtaataagatgagcgatacaaatgctgaacaagcctcctctgggcagcatctgatagatttctgtactgaagaaaatatttgatgaggacagaccccttaatcctgtcaaacgaactaattcattttcagttccatctatgaaattatactccacaaaagcagaactatggcccaggaggagacagtcatctgacagagaaacagcattgctgagatgagatagaacttgctytggatcaaaagtgatcatttctattattctcatggtatctttgatttgtcacagcaattgcatttgtataaggcctagttaattaagactgtggactgtgatcaaatttaagcagcacagttcctaaaatatacccagccttatctgctcccacttgctgataaacacacacacacacacacactcacacacactcgcacacttttgctccagaaatgctgaactaatagttgccagaatacaacattctaactcatacctctgggtcatgcacaagca

SEQ ID NO: 468070 - DNA, 666 bp, Homo sapiens
cacgtttttgttagagaacgctttttgttagaaaacaaaggctcttgctttctttcctgataccccgttcctacctcactcatatcttaattgtcttacacttttagagggacttttttccattcccctacaacattccattgctgacagaaaggctgacaaggcagctgacacagtggctattactttgagcagtttctaaacaatattattttgctgcccttctgctttctgtgaaattatagggtgctttcttttgtgtgcaacaatggagctcagctcccacactaggggtcctgaacagattccatatcaacctcctgagctttagtattaatgtaattatcagctgaagatatcaattcaggcactcacgttgtcactatattggttcatcttcatgccagaaaaagcaggaatggarttctaaagtctggtctggatttataatgggtgtgttgcatgtatataatcatatatatttatgcatgtatacattatatagatacatatatgtatacaccatatacatctatgtatagataatctcttgctaatttgagtaacatcttgagtaaataagagcaatatttgtagaaatgcatggtgacagatcagccatgaatctgaatagggggctgataaattctcactaccttcatctac

SEQ ID NO: 468071 - DNA, 605 bp, Homo sapiens
actagggttgctttcatttctgttaacacaatagcccataaatcaaggagtaattttcctctcatgcatctaagaaaagtaaattggaaaaagttttggaaagtattcaccattttataatagatgcctctaagaatatttgtgattcatgagaccagatcaaaatatcaacattaaaargacattggaagaaatagatatcaacactcatggattacttttatttttatttttatttatttttttgagacagagtctcattctgttgcccaggatggagtgcagtggcacagtcttggctcactgcaacctctgcctcctggattcaagtgattctcatgcctcagccacctgagtagctgggattacagacatgcaccaccatgcccagctaatttttgtatttttagtagagatgtggcttcagtatgttggccaggctgatctacaactcctggcctcaagtgattcctctaactcagcctcccaaagtgctggaattacaggtgtgagctacagcaccaggccatgtatgacttttagacactcaggattccagcggagtcttgcagcaagtaactgcagatgtggcagaaagagcaaag

SEQ ID NO: 468072 - DNA, 540 bp, Homo sapiens
caatgccaaatggactagcacaccatgctctaagtagggcataaagaaaggagcctggatccctaatgactgcagagccatgatcccagccctggactgcttgcctccacacttctgtcttattggttaagccaaaattattttgggttttccgttacatgctgcagaacctaacctaacgaatacccctgctctctgttggtttyacagtgtgtctccaacaccatcttgaaggtgcagtgacttgcatatagtaggtgcttggtaagtgtttgacaagttaagtacccaatggcattgaggtaaagagttcaaaggcttcagctgctctgacctgtccccttttctgctttagattaagttattcatggggaccttttgttttttgccatctcaccccccaggaaggtatttcccagccctcagtgcagggctttagggctacaggcttgaatcattttgacaagacagcaggcagaagacattggagattctaactgcacatatgcgtaattccaaatgaaaatataaggggtgggc

SEQ ID NO: 468073 - DNA, 646 bp, Homo sapiens
gcattagaaaaacagtaaggagaagactaggaaggactttgtattgtggtttgagagccagcttacctgcagtagaatagaacatcaggtaaacttaaaaggttttcgactccaatctctgcttctcaaacagcatttctggacccacccaggacctaggggaacttcccgccctaaagggaaggacacagacctggctggctttgctacctgctgatcactgagccctagtgccttgagtcaacagaggtggtagccagaaagtgtttacagtgtgtgtggggcaagacccagtgctgtgctggcttcaagtctgacagagcacagtttcaatggctgtggccacaggggtgcttgcatcaccataccccaagttccaggtggctcagcagagagagagagagagmgagagattgagagagagacactgactctatttgtttaggagaaagtaaggaaagagaacaagagtctctgcctggtaatcaagagaatcatttcagatcttatccaagatcaccaaaatgatacttctatgagtctgcaaaaaccacagcattagggggcttagaacctaggtccctttgagtatctggaaagccttgccaagaaggacaggcacaaacaagcctgtactgcgaagact

SEQ ID NO: 468074 - DNA, 490 bp, Homo sapiens
tcacaagttggtccacagaggctggaaaagaacctccgccctccactacccatgagccatgggaaaggttaattagcaaggtaccacagtaccacctagtggctggcayacccgtcctccctctcccccaggtgttaaggaaaggctatcatgtgattctggtcacatacttcactggctgattagtcagggatggagacaaaccaaatacaccactctcttttaatattaacatatacaagcagcagaaagagccaactgctctctgctgttccctgagggaaagccggagcacaaagctgttcctctggccttcctccaactgccgggcctgcttagctcctccctaggcagaagctttgttccagccccacttccacatcccaactccacagtcaggatgggaggcacatggttgctagcaggggaaagaatactgtagttccagcctctgctcctttcagtctcagcctggatggtggtcactcat

SEQ ID NO: 468075 - DNA, 566 bp, Homo sapiens
tcaacttcctccaagcagcttcacggaccagcatyctctttctgctcctctcccccatcctccgtacttccctctaggtaatagtcctctggacatgggaatggcaccaagtttccaagaatacagcaatcaaagttcacttcacagagcaatctgcggtgcccccatatccagagatttgtcttttaattcacagaagttttacaggaaaacctatgacactttggatacagattaaataacagaaacaaagatgctggatccagaagagagtgttgagtttgtcctgtccaaccttctcactttacagatgaaatgactgccagagcattacacaagactggagaggggctagaacctgggcttccaaactctcagtccagtgctccttttaatcatcatcctgcatcctgacagaggcaaagggaggctgagtttgtctcccactgtggaattcctgcttgaagtgaggaatcccttccaggccctcagtcacaggtaccaggctgtcacaggtggtggaggccagctctaatgggagagcaagggtgttggtttcaaagggt

SEQ ID NO: 468076 - DNA, 566 bp, Homo sapiens
tcaacttcctccaagcagcttcacggaccagcattctctttctgctcctctcccccatcctccgyacttccctctaggtaatagtcctctggacatgggaatggcaccaagtttccaagaatacagcaatcaaagttcacttcacagagcaatctgcggtgcccccatatccagagatttgtcttttaattcacagaagttttacaggaaaacctatgacactttggatacagattaaataacagaaacaaagatgctggatccagaagagagtgttgagtttgtcctgtccaaccttctcactttacagatgaaatgactgccagagcattacacaagactggagaggggctagaacctgggcttccaaactctcagtccagtgctccttttaatcatcatcctgcatcctgacagaggcaaagggaggctgagtttgtctcccactgtggaattcctgcttgaagtgaggaatcccttccaggccctcagtcacaggtaccaggctgtcacaggtggtggaggccagctctaatgggagagcaagggtgttggtttcaaagggt

SEQ ID NO: 468077 - DNA, 566 bp, Homo sapiens
tcaacttcctccaagcagcttcacggaccagcattctctttctgctcctctcccccatcctccgtacttccctctaggtaatagtcctctggacatgggaatggcaccaagtttccaagaatacagcaatcaaagttcacttcacagagcaatctgcggtgcccccatatccagagatttgtcttttaattcacagaagttttacaggaaaacctatgacactttggatacagattaaataacagaaacaaagatgctggatccagaagagagtgttgagtttgtcctgtccaaccttctcactttacagatgaaatgactgccagagcattacacaagactggagaggggctagaacctgggcttccaaactctcagtccagtgctccttttaatcatcatcctgcatcctgacagaggcaaagggaggctgagtttgtctcccactgtggaattcctgcttgaagtgaggaatcccttccaggccctcagtcacaggtaccaggctgtcacargtggtggaggccagctctaatgggagagcaagggtgttggtttcaaagggt

SEQ ID NO: 468078 - DNA, 438 bp, Homo sapiens
attgccattcgtttttcaatttagtttttactaatttctgaaatttagtttgggcagctgatttgatgggaaatggtcactttttcaaaacaagccagaggtgattatattctctggagattttgacataaacattatgggaaatgaaatgcctttttgtactgttaaataatcttgctctttaagcagcatcaagtcatggtaaaaagcattttataaatggcaaaataatgagctcaacaggaagtccagaaaaacatccagtgatgtttaaaatacctctaatcaaatcgaatgcttytgctaaaaaatacctgctctttattttaagaagaagtgaacctcattttcaaacactgatagcatggtataaaattattcacaaggtcaaaaggaaattgagttttccagcttctgcaattgtggcttttgtgaatg

SEQ ID NO: 468079 - DNA, 635 bp, Homo sapiens
ctgaaggctgcctcttggcagcgacactgatgactttggaagagtctagggttgaagttgcctccttatcatcgttagtgcatgagcaccagaaaattcaggcatgcccaggggtagctggtacccaagggtgtctcccaggcgcactgtcaaggccaattctccaaggcctctgaagctaatraggaggctccaggcccaggccctttgacaatttcttcatccccctagaggtcagacagggcattcccaggtgtgaatcattttgctgatacgtagacctatttgcatagtgggattgcttcctccctgtctccccccacccccaaaattctgtctgcagacgtgagaaaaatgaagcacacaggaaaattgcctaggtgagcacatcccagaatgtgttcctgggaacacatgatcaggtacatttgggaatgtggggctgcatgaggttgccttggtgtaggatttcttgctcatgtgtgttgtgtgtctccagaaatgggatagagtgagtttccagactttatttgatcacagaatcctttcccatcgaggatctagagaacctgcaggactgatattccctagaatataactttgggaaataccagtctaggcttttcagataatcc

SEQ ID NO: 468080 - DNA, 550 bp, Homo sapiens
tagtgttagcacaaaacaaacattccttattggatacttggaatgcatcattatgagatctgaaaagagtttaaattataacagtctatattaagtgatatcaaaagagtcacgaattcatttataggaatttattttaaaaacattatgtccatataatctgtccaaagtttggcactcatttctgtttaccagctagagagttggataaccatgaagcaagcataaaagcyagatttgcaactcattcaaccagctctaagatgatagtgctgatggtttcttgagatattcacattatttaaaattttgagcctaagttgagattcattaatattttaatatcacaatatttcaaatttacataattcatatttgagttaaatgtgatttaactgtatacatacacatacagacacataataatatatattttaatatatatatattgaggtgacattatccattatatttatatatttactgtaacaactcatgtctaataataagataataggatgctgtgatatgaactatttgacatgatttt

SEQ ID NO: 468081 - DNA, 596 bp, Homo sapiens
acagcatttctttttttattattattattttgagatggtgtctcgctctatcacccaggctggagtgcaatggcgccatttcagctcactgtagcctccacctcccgggttcaagggattctcctgcctcagcctcctgagtagctgggattacaggcatgcactaccacacccagctaatttttgtatttttggtagaggcaaggtttcaccatgttggtcaggctggtctcgaactcctgacctcgtgatccgcccgcctcggcctcccaaagtgctgggattacaggcgggagccaccgcacctggccacatcacagcatttctaagcaataaaaatccacagcaccattgtccccactccatttgatccacattggaataatgtatgaagcttaaagaatactaatacctgaatcccacctctagatattctgatttgattggtctgaaatgagacacagaaattagtacagtttcgaagctctcccaagagattgcaacgtgcatcttagattgacacttacagatattaaatgaaatgaaaggaatgagrataaaatgtagaaaatgggtaaaatagaggaaaataccct

SEQ ID NO: 468082 - DNA, 521 bp, Homo sapiens
aagaaaaagcatgcgacgtgttttgttttcttttcctatgaccttcaggcggtcaactactttattatgtaaacctatgctaaactatccaattgcctcccactgcctggtaatttttgtaaatttagaaataattatatattttcagaaaagttgcaagaatagtacaaaaaattttcacacaatygtcacctatattcccctattttttcacatttgctttattactccctttaatatatacatatatacatatgaaataataattttaaattgcaaacatggtattgctgtactcctaaatacttcagtgtgcattatctccataaggaacattcccttaatattaccacaattaacataacaggacattaacattgatacaatattttacacaatcaattgctcctttctgattccttggtttataatttccttttaaacattaggacacacatactatgaggcaattttttttgttgttttcgctttaataagcaccaaatgttattttgattaga

SEQ ID NO: 468083 - DNA, 605 bp, Homo sapiens
taaaatgcccaaaattctgtaaacacaagaacaatggtatatatacttaaatataagttctatcctatgtttctggacttttcaaatctttgtagatccattcctcttttaggaattcacaaagcacactacaataagaaaaattctcaaaagccctctacaaaagaaacatattcaatattatttaatcctgtacttcccaaacttatttaacaatacaacccctttaatcccatataatatctattaacaatctacagaattagtattctaccaaaacacactttagaaaatcagctctaaacctcttccaattattcacattgccttgtattagaaggggcaagagtaaatcccaaaaggcttataaaactgcacagtgctacaatatagaccatttcccaaaaaaactaccatttgtttgaagaataaaataaacacaaaataaactggagaagyatagagttttgtcagcatgccctgagcttctgggaaggttattaaagaaggtctcaaatacatgtgcacactacagaaacacaagcaacttcaacttcagggctctatatgaccttgattattacatgtcactaagcacacaataa

SEQ ID NO: 468084 - DNA, 553 bp, Homo sapiens
tacatatgacaaagtctcaataagtaatcagtgaatgagtgagtgcatgtgagccaggaccaacaagactggatcagcctctccttttgcaagaccacccagaacccccacagctggggacagagactcttcaccaagccccagctgagtgagtgggaaatgagggaagtagcttttgattgatataratgggatcacttagaggacaaatgtgactgccacccaaggcactgatgtaggacccttgaagggaagtgatcacattgaacttggctgtgtccaacatggttagtggtttccaggagtgtagagtcttctgtgcattgggaaatgaggacagcctctcattttgcccagcattttttgggactggttcccttttatttcatgacctaagagaaataagtgatcctgtctttttttttctttttttgagacagggtcttggtctgtcatcaagctagaccgtagtggcatgatcatagctcactgcagtctccaattcctgggctcaagagatcctccaacctcagcctcctgaatagctgggact

SEQ ID NO: 468085 - DNA, 570 bp, Homo sapiens
acttgctgttttctattgtctacaaaatacactgtactaactgcactcctgtttatggtaccaaaatatctaaaggattaaaacttaagacacaaatcaaacatatctgggaaagaaaacaaatttctatccacataaaatgtttaggatagtgttgtttcatttttaaatacagattccagaaggattttaaagaggaagctgaagtcaacattttctacagtgacctgcacagttgctgacccacttgacggagatactgggtactccacacctaacttatgtcttggccccttgtttcctactgtcttgtttcttctctcctacttactgatttattttactcagatcttcaggctcagctgctatcttmtagggcatacattttttcaattcatacaataactagttaaatcaagacatgacagtctatctttgaccttatgcctccatctttttgtaatttggcttctgtcctgtctgaaaccgttctaagcactgtggcttacttttactttcatttggttcccgtgatggtagcagccctccagacaacctgccactgccatc

SEQ ID NO: 468086 - DNA, 502 bp, Homo sapiens
ggtaacaaatgtttgttgagacctgtactaccatttcacacatagcatctatcacttttaatactcgcctccaaatctgaggaccaaggtggtactctctccatttgacagataagaaaatagattgaaagaagctaagtcacacacccaagttcacgcagcaagaaggcccagatgatttttcttaaactttattcaattctaacacaaccagtaaaatgacagatcaagaaatgaaaaacaggtctgtaatgctttaagcctacgctctttctagaaccactcaatattgtctccagggctgactcaattcctagaaagtgaattgggcttctgaagagactacaagtaaggtttaggggaaataaacatagttgagccatttgggtcctgcacaaagatgcccagctgaggaattgaaggaactgaggaattkaacatccagctactgctctgctttccaagaggcatgctagcaggagatgcatctgtcaagaggaag

SEQ ID NO: 468087 - DNA, 274 bp, Homo sapiens
ctaattcattttgccagtggtagatacattcctatttgggttgcagatagcactgtaacttcagtgtctctggaggctactataaaaatcccatttctgtgagtctttagctcagtagagaaaatgattggcagcacgactgtgggtatggcattttcactttatattgataataatgaaggatactttaaatgacaaatattgaaatgagaatgtctattcaagcttttagctcacatttattttcwcaaaagctctacaatttcagtctcaa

SEQ ID NO: 468088 - DNA, 599 bp, Homo sapiens
ctaatatgaaggtttaattgcagctagctcctcctacaaccaaaaaaaatgcagaatgcctagtgggtctctttcaatttttgaggcaacatatttcccatttgagtgggttactctggatcattctccaagtgcccagaacactactaattttgagtgggttccattacaagcgaagtctctacaacaggtccaggctgctgtgcatgctactctgcctcttgarccatatgatctagcagatccaatggtgcttaatgtgtcagtgataaatagggataatgtatggagccttgggcagacctctgtaagtgaatcacagtgcaggcttttaggattttggaccaagatgctgccattctctgtagacgatcactctcctttctagaaacagctctttgcctgctagtaggtcttagtagagactgaatgctcaatcatgggctaccaagtaaccatgcaacctgagctacttaccataaattgggtattatttgactcagtaaatcataaagttggctgtgcataacaacccttcttgatctaatggaagggttatgtgactagacctgaggaagctctgaaggcacaagtaagtt

SEQ ID NO: 468089 - DNA, 584 bp, Homo sapiens
aaataacaaatttaatccatagttagcaattggttgcagctgtggtaaagcatatgtgggaggtgaaggttacagatccatataaaaacccctttaaaccatagcatcagtgctaaggctaagcactgttctggaacacatgatgcaaacatacacaaaactattttttatataatttcaacttttattatagattaagggatatatgggcaggtttgttacatacatgtgcaggtttgaggtgatgggcatattagtttgatttaattatttcacattgtattaataagtcagaacatcattaaactaaaaagcttctrtacagccaaaaaaaaaataccaacagtgtaaaaagacagcctgaagaatgggggaaatatttgcaaattatgcatctgacaaaggtataacttccagaacttataagaaacttaaaccaacaagcaaaaaacaagtaattcaatttaaaacattggcaaatgcatgtgaacagacatttctcaaaagaagacattgaaactagccaacaaatatataaaacaatgcaaaactttttattgtttatttcttatcttgtgaaacat

SEQ ID NO: 468090 - DNA, 601 bp, Homo sapiens
gctgacatggatggtatgttcttcattttcttttttgtatactcctggttttgtggatgcttttgctttattaagcaatggaaagggcagagaaaccatgtttagaagactttgatcttggctaattacttatttatatctcatctagtgttagaaaggaccaaccaaagcagcttccattccttagctatgagaggttggcaagttgtttttatcttctttaccttggtggtattatctgcaatttggggatacaaaattttatttcacagggctcttgtataagtcaagtaagaatgaatataaaacattttgcagatttttaagtgctaccctacacaaatgtacctaatgctaattaatagtaaatttgaacctttatattacagcagttgatgctgaaaatcaagtggaactggaggaaaaaacaagacttattaatcaagtgttggaactccaacacacacttgaaggttggcttgcattttgtagtttatttgaatgacagccaattaattgaacttgtaaamatttatattgctaaattttgtttgttaggatgtataatttttaaaagaatgaacttcaaagtacacacata

SEQ ID NO: 468091 - DNA, 531 bp, Homo sapiens
ttgaaatcaaggtaatactagcttctaaaagtgagttgagaaatcttctttactattttttgaaagacacaatgtaaaatttgttttacttatttttaacatttggtatatatctttcgtaaaaacagtgaaactcactgtggtcccagaaccaagctgggtctggctgtgttttcttgaggcccaataacaagaagcagaaaaactaggaaagaagggaattcactgctgtaactggatacagggagaaggctggagataattccaccagaccaactcaaagttgtacaattttcttagtgcttatattggttagggttatatgcctatgtacagtatagcatttgcctaagtctattggcaactaattcgtttcaactagtaggttagaggcttgctaagtttgattaagctgtgataaccccagtacctttaaggcctgtctattatgttactggggtgactatttctatyttatctcttttacagcttggtctggagagctgcctttgactctccagcgaatttatt

SEQ ID NO: 468092 - DNA, 560 bp, Homo sapiens
agctaaaagacaaaaatagccgttttaagaaagaatcaaactgggctgggtatggtggctcacacctgtaatcccagcactttgggaggctgaggtgggtggatcacttcaggtcaggagttcgagaccagcctggccaacatggtgaaattctgtctctgctaaaaaaaaaaaaaaaaaattagccagtcccggtgtggcaggtgcctgtaatcccagctaytccggaggctgaggcaggagaatcgcttgaacctgggaggcagaggttgcagtgagctgagattgcagtattgcactctggcctgggtgacaagagcaaaactccatctcaaaaaataaaataaaataaaataaaataaaataaaaagaaccaaactgaatttctagaattgaataattcactataagaatttctgatatagtcagaagcattaacaacagaatagcccaagctgaggaaaaaatctcagagctcaaaaactggttcttcaagtcaactcagtcagagaaaaataaagaaaaaagaattttaaaaaatcaacaagacccccaacaaa

SEQ ID NO: 468093 - DNA, 560 bp, Homo sapiens
agctaaaagacaaaaatagccgttttaagaaagaatcaaactgggctgggtatggtggctcacacctgtaatcccagcactttgggaggctgaggtgggtggatcacttcaggtcaggagttcgagaccagcctggccaacatggtgaaattctgtctctgctaaaaaaaaaaaaaaaaaattagccagtcccggtgtggcaggtgcctgtaatcccagctactcyggaggctgaggcaggagaatcgcttgaacctgggaggcagaggttgcagtgagctgagattgcagtattgcactctggcctgggtgacaagagcaaaactccatctcaaaaaataaaataaaataaaataaaataaaataaaaagaaccaaactgaatttctagaattgaataattcactataagaatttctgatatagtcagaagcattaacaacagaatagcccaagctgaggaaaaaatctcagagctcaaaaactggttcttcaagtcaactcagtcagagaaaaataaagaaaaaagaattttaaaaaatcaacaagacccccaacaaa

SEQ ID NO: 468094 - DNA, 560 bp, Homo sapiens
agctaaaagacaaaaatagccgttttaagaaagaatcaaactgggctgggtatggtggctcacacctgtaatcccagcactttgggaggctgaggtgggtggatcacttcaggtcaggagttcgagaccagcctggccaacatggtgaaattctgtctctgctaaaaaaaaaaaaaaaaaattagccagtcccggtgtggcaggtgcctgtaatcccagctactccggaggctgaggcaggagaatcgcttgaacctgggaggcagaggttgcagtgagctgagattgcagtattgcactctggcctgggtgacaagagcraaactccatctcaaaaaataaaataaaataaaataaaataaaataaaaagaaccaaactgaatttctagaattgaataattcactataagaatttctgatatagtcagaagcattaacaacagaatagcccaagctgaggaaaaaatctcagagctcaaaaactggttcttcaagtcaactcagtcagagaaaaataaagaaaaaagaattttaaaaaatcaacaagacccccaacaaa

SEQ ID NO: 468095 - DNA, 578 bp, Homo sapiens
gaagatgactctcactatagccacattaattacatctatttcaatttaaggggacacagtaacaaatcttacctctctgaaaagaaatcaaacctgaaacatggtgaagtgtgagccctgaccaagagattttcttggaagacatagattgacttataacaaatgttatctgaagtagtaaaatcttacactttatttttatagaaaacamgcaataaaaatctttctaaattaatgcataggtacttttgtaaaaataacataaaaatatctgattaacttagatacacaagttctttaagttccaaaataaagaatgagagaagtttatagtttgtctgacttttattcttttcaatccataattccatagatagaatgatttataatgtaactttaatcattacatcctttgatgaaaaatatacagatattcttttcttctcattatatttacttaaattatttttcatcactttaatatttctttattcactggtaccacaatagttcactaagtttggtatttcttggttttgtaaaaaatttcccaattcagctcctgagcacaatgagta

SEQ ID NO: 468096 - DNA, 522 bp, Homo sapiens
tcattcattcatttattcaacaaatatttattcatcattaaatatgatgcaggtgctgtgctargttattgtgtagacatattagatttctacttggccacttttcagagctcgagagcttcactggaaattatctcacaggtgtagtgtcactgcttttgtgtcataaaatacacattaaaaccaagaatatgtcactcttgaggtcatgaacattatttacaagaatggtagcaccagttttattgccagtaacatctttttttgttgttgttttaaattggaaatagtgagagtagaaaggagtatggtaagaaataacattaaggaagccaatctactgggttataaatatgtataagtatctttacagcatgatttattaataattaacggttaaaatatgctacctgccatcattaattagtcaacaggcaaatcatcatcacactagtgaaaatagctaacatttattcagggtccagtcagtgttaggtgttgtggtgaataacacactttaaa

SEQ ID NO: 468097 - DNA, 609 bp, Homo sapiens
tcattcatttattcaacaaatatttattcatcattaaatatgatgcaggtgctgtgctaggttattgtgtagacatattagatttctacttggccacttttcagagctcgagagcttcactggaaattatctcacaggtgtagtgtcactgcttttgtgtcataaaatacacattaaaaccaagaatatgtcactcttgaggtcatgaacattatttacaagaatggtagcaccagttttattgccagtaacatctttttttgttgttgttttaaattggaaatagtgagagtagaaaggagtatggtaagaaataacattaaggaagccaatctactgggttataaatatgtataagtatctttacagcatgatttattaataattaayggttaaaatatgctacctgccatcattaattagtcaacaggcaaatcatcatcacactagtgaaaatagctaacatttattcagggtccagtcagtgttaggtgttgtggtgaataacacactttaaaaaatttcttacactaaataccaaggtaaatattattgttatttcctctataggaaaatggagataaattaagctcccacatccatccagga

SEQ ID NO: 468098 - DNA, 573 bp, Homo sapiens
tacaattgcctacataattcagtacaatactatgctgtacaggttggtagcctgggaacaatagaccatatcatctagcctaggtgtgtagtaggcaatagtctctaggtttgaataagtacactctacaatgtttaaacaatgatgaaattgcctaatgacacatttctcagaatgttttcccattgttaagcaacaagagcctctcttgctctgtttatgtacatatatgccatctctattgaatattcttatgtgtgatttaaatttaactatctaaaattaaactgaaatttttgctttgtaagcttaatatataatgaatatttttaaacctcagttcagaatcataacattttcatcgaaatcactccyctcttgacttttagtttaggctgattatttctcttctagctgatttctataggttggagttttttagggattacttttcctttctttgaagaacagtctgcatttccagcctaatagctctgtgatctactgtggtagtacccaaaaagtctgaaagtttttctttgttcttcccacattctctgtcttctttagttc

SEQ ID NO: 468099 - DNA, 522 bp, Homo sapiens
atgagaatggccagaacaggctaactccaggactgggtaatctttagcatctggtcccactgttatggcactctgaaagaccccagtggtcctcagtgcagcccggctatcgcctgccccgtctaccatcctttgtactgtatttcataaaccaaacttgtgccgcccttaacctgtcctgaggactcaggcctagccttgctacctctgatggaaagcctcttctccacccattgtacatgcaccaataggaaacaattttcctgatttaaaggtggaggaaamgtggacagaattccctctggagggtggtagaactattactgggtctggtaaaattgctggcctggttttagccacaagggtgtaaaaccatggaactagcaagaaaagcctctaatggcttcctttcctgacagtaggttgcaaagggctcaatgacccctagtgtaaatgtaggtatatctgtgtgtgtgactctatgtgtgtacctctgggtatttttattggattatgtttatt

SEQ ID NO: 468100 - DNA, 522 bp, Homo sapiens
atgagaatggccagaacaggctaactccaggactgggtaatctttagcatctggtcccactgttatggcactctgaaagaccccagtggtcctcagtgcagcccggctatcgcctgccccgtctaccatcctttgtactgtatttcataaaccaaacttgtgccgcccttaacctgtcctgaggactcaggcctagccttgctacctctgatggaaagcctcttctccacccattgtacatgcaccaataggaaacaattttcctgatttaaaggtggaggaaaagtggacagaattccctctggagggtggtagaactattactgggtctggtaaaattgctggcctggttttagccacaagggtgtaaaaccatggaactagcaagaaaagcctctaatggcttcctttcctgacagtaggttgcaaagggctcaatgrcccctagtgtaaatgtaggtatatctgtgtgtgtgactctatgtgtgtacctctgggtatttttattggattatgtttatt

SEQ ID NO: 468101 - DNA, 535 bp, Homo sapiens
cccccggggttgggtgagggggaaggtgcaccatctctgctgtttggttgactcagccattccaacttgtgggctatggagagtccaaatggtccagacaagaaagggtccccccagcagtgtagcacagtggctttgccagatcatggacagacttcttctttatgtgggaccccaatccattcctcctcactggggaggacctcccagccagggcctctagccatacccatctgcaggtattatggagaaagctctgatctctctctgggacagagtgcccggagggaggggacaacaacaacaacaacaataacaaaaccacaaaaaaacccatccaaacgtcagcaaactcaaagattgaaggttgtatataagcccacaaagatgagaaagaatcaaagcaaaaacaattaaaactcaaaaagccagaatgctttattttcctccaagtgacagcaacrcctctccagcaagagctcagaactgggctgtgtctgagatggctgaaatgacaaaagtgggcttcagaatg

SEQ ID NO: 468102 - DNA, 610 bp, Homo sapiens
ttccatgatctgtcatctgcaagctgggggcccaggaaagcagttggtgcatttacaatccaaggacaaaggcccaagaacccagrgaaccaatggtttaagtccaagtccaagtctgaaggcctgagaacctggcgggggtctgggcgttataaatagtgtaagtcttggtctgagtccaaaggcctgggaaccagaagcactgatatcagagagcagcaacaggatggatgacccactttaatgagaaagagcaaattcaaacttcctccaccttcttgttctattcacccagtagttgctcagtgttatttgattaaagtgcagtttagttgggccttaacaaatgagatggtctaagtaggcagagaatagagacgataatggagattattatagtactgttagggataataccaagaaattccattgcagaaaatattacataattccaacatcccggacttgacaagtagattttctgacctgccgcacacagagcatacaggaggtttccaaatgtgaattcaggaatgtggctgcagctgttctctggagctgagaggccccagatagaaagctgagtggtgtgcacacagattcacctaaa

SEQ ID NO: 468103 - DNA, 577 bp, Homo sapiens
ggcacatgtttacaggatctcctggggctgtgtcactggccattggtcactcatatttggctcagaataaatctcttcaaatatttyacagagtttgactcttttcatcagcatatttcataaatagaagagaagcaatccaaaaagaacttccatgaacttctattatcttttctacctacccactcccattgtactcatttgtattctactctctttccagttgtaaaggtaacttatttgagatcctacctactgccaacttctcaattttggcactggatttaacctcttctcacctactcaaagaacttacttttgaaattataccctttctctcattatcagtttttttccctcactctctactggattttactattttgatacaatcatgctataatattttctgttaaaaataagacctccctagattccatatattgttctaactaccactctattttttattcctcttatagcactcctttaaaaagttgttcaaatttgcaaacttcacctttttactccccatatctatttgaacctatcccaattagactttccccactgaaca

SEQ ID NO: 468104 - DNA, 577 bp, Homo sapiens
ggcacatgtttacaggatctcctggggctgtgtcactggccattggtcactcatatttggctcagaataaatctcttcaaatatttcacagagtttgactcttttcatcagcatatttcataaatagaagagaagcaatccaaaaagaacttccatgaacttctattatcttttctacctacccactcccattgtactcatttgtattctactctctttccagttgtaaaggtaacttatttgagatcctacctactgccaacttctcaattttggcactggatttaacctcttctcacctactcaaagaacttacttttgaaattataccctttctctcattatcagtttttttccctcactctctactggattttactattttgatacaatcatgctataatattttctgttaaaaataagacctccctagattccatatattgttctaactaccactctattttttattcctyttatagcactcctttaaaaagttgttcaaatttgcaaacttcacctttttactccccatatctatttgaacctatcccaattagactttccccactgaaca

SEQ ID NO: 468105 - DNA, 576 bp, Homo sapiens
gtttattgactggcagaagaaatctaaatgccatagataattaaagccagcattcattaagaattttcaataaaattttcaataaagtaacatttcaacagaaagttaagagctaatatagataacattttttttgtagatatatctgcggaaataggtttgctccattcaagraaccattaaatctcaattcttagaaaaagtatttttgtatcatgtgtacttttgaaaattaaggaagagtcagtacactctatttaacattgaaattgtgaagaggcagaaggattcaaaaatcatattaagaaaaattttcactcacaatttttagtttttattcattatctcatatttttttccatttctcttctaagagcttttttgttaactgcacaaatgatatattagcaattattctaaaataaaagtttttagaactgcaacagtattcattccactaaaaatgatacatttaaaagtatttcaagaatgcttttggaatactattaaaatataaaaatgaaataaatgaatgaaggaacatttttaagaggcttattttttcaacaatgctgc

SEQ ID NO: 468106 - DNA, 524 bp, Homo sapiens
cctgggtttcaagcacaaaactgggcagctgtttgggcagacgctgagctagctgcaggaggtttttttcataccccaatggcgcctggaacaccagcaagacagaaccatttactcccctagaaaggaagctgaagccagggagccaagtgatctagctcagcagatcctacccccatggagcctagccagctaagatccactggcttgaaattctcactgccagcacagcagtctgaagtccacctgggacactcaagcttgatggggrgaagggtgtccgccattactgaggtttgagtaggcagttttcccctcacagtgtaaacaaagccaccaggaagttcgaagtgggtggagccaccgcagctccgcaaagctgctgtagccagactgcctctctagacacctcttctctgggcagggcatctctgaaagaaaggcaacagtcccagtcaggggcttatagataaaactcccatctttcttggaaagagcacctgggggaaggggctgttgtgggt

SEQ ID NO: 468107 - DNA, 582 bp, Homo sapiens
tgggccaggcacagtggctcatgcttgtaatcccagcactttgggaggccagggcggggggatcacttgaggccaggagttcgagaccarcatggccaacatggtgaaaccccgtctcactaaaaatacaaaaaattagctgggtgtggtgttgggcgcctgtaatcccagatactggggaggctaaggtgggagaattgcttgggaggcagaggttacaatgagccaatatcatgccactgcactctagcctaggcaacaagagcgaaactatgtcttaaaaaaacccacaaaactctgatatattcttcagtatgccagttgcattcttcaactctaaaatttctgcttgattatttttaattattttaatcttttattaaatttatctgaaataattctgaattccttctctgtgttatcttgaatttctttcagtttcctcataacagctcttttgaattctctgaaaggtcacatacctctgtttctccaggataggtccctggtgccttatttagttcatttggtgaggtcatgttttcctgtctatcttgatactcatagatgtttgtctgtatt

SEQ ID NO: 468108 - DNA, 582 bp, Homo sapiens
tgggccaggcacagtggctcatgcttgtaatcccagcactttgggaggccagggcggggggatcacttgaggccaggagttcgagaccagcatggccaacatggtgaaaccccgtctcactaaaaatacaaaaaattagctgggtgtggtgttgggcgcctgtaatcccagatactggggaggctaaggygggagaattgcttgggaggcagaggttacaatgagccaatatcatgccactgcactctagcctaggcaacaagagcgaaactatgtcttaaaaaaacccacaaaactctgatatattcttcagtatgccagttgcattcttcaactctaaaatttctgcttgattatttttaattattttaatcttttattaaatttatctgaaataattctgaattccttctctgtgttatcttgaatttctttcagtttcctcataacagctcttttgaattctctgaaaggtcacatacctctgtttctccaggataggtccctggtgccttatttagttcatttggtgaggtcatgttttcctgtctatcttgatactcatagatgtttgtctgtatt

SEQ ID NO: 468109 - DNA, 582 bp, Homo sapiens
tgggccaggcacagtggctcatgcttgtaatcccagcactttgggaggccagggcggggggatcacttgaggccaggagttcgagaccagcatggccaacatggtgaaaccccgtctcactaaaaatacaaaaaattagctgggtgtggtgttgggcgcctgtaatcccagatactggggaggctaaggtgggagaattgcttgggaggcagaggttacaatgagccaatatcatgccactgcactctagcctaggcaacaagagcgaaactatgtcttaaaaaaacccacaaaactctgatatattcttcagyatgccagttgcattcttcaactctaaaatttctgcttgattatttttaattattttaatcttttattaaatttatctgaaataattctgaattccttctctgtgttatcttgaatttctttcagtttcctcataacagctcttttgaattctctgaaaggtcacatacctctgtttctccaggataggtccctggtgccttatttagttcatttggtgaggtcatgttttcctgtctatcttgatactcatagatgtttgtctgtatt

SEQ ID NO: 468110 - DNA, 610 bp, Homo sapiens
ctggaggagtgaaatgctctgatttatatttgctataatgatcattctggctgccatgataaaaatatactgtgggttgggatgagagaataaggtaaggtgaagagtgtgtgcatttcaaattttgatgcattttgctaaactgctctccctagaatctgcaacttctccacatcatcctctgcacaaygggctctccagatgttgaatatttgttcatttgatgaggaaaagcaatagctgaaggcaattttaatttacatttcttgcattagggtgggatttatcttcttttcacatatttgagagccatctgcagatccttctctatcaactgactgcatatccatgcccatttttttctattgattcatcaatatgttttccttacatatttgggcatgcccattgcatattaagggaattaaacatggtctgtgattttggctacagctacattttttctgggaataaacttaaaaatttcttccccactcaaagatcattattaaaaataataccaataataacttgaaaattcaatgttttcttttagtacttttgcacttcgttttttttttaaacttaaatcattgttttatttataatt

SEQ ID NO: 468111 - DNA, 575 bp, Homo sapiens
acctgtaatttcatggctaatactgatttgcatgaggttgggtaaaaaggtaaaccaatttaaagagaaatattatgtaaataataatactgttaatataaagatccggggtaagtcacacaagaaaaaaaaatacattctaggaatataaaatgcacacgagagktttcctgtcctcaaaaagcttacagcttaagggctgtgcagatcaagaatgagcaaacaaatgaaataccccaagtaagagttcagaaacatgtatgttatattcaagaagaacagtgctaaaagtccctctcttcttggctcttttaacatgtatcacatataaaagctctttaaaaataaatgagtttaacaattgtcatgctgagttgtaacataagctgatttgcaagtccttgtatagtggcatgttagagattttatgttaaatcttctctttgaattatccaggaaatcattattttctcacctttatttcctttataggaaactaagaaaacaaaggtttctgctggtttaacagccaaatcactcaagacacttggagcaaaacaaggaacaatctactt

SEQ ID NO: 468112 - DNA, 619 bp, Homo sapiens
tgcctgttaatattctgagtattaaaaatgccctcatctttctgagctctattttgaatgatctaccacttmggagctatctctgtcttgttcctagaatttctgaaatattcttcagcctgattgacactttcagtatgtttaaataaataaaattttgtttagcccagtggaaatattgattgatccattcattcactaactaaataaatgtaattgaaaaaaaatatgtgcaaattagttccaggtgcattaatagtttcaggtgcattgtcaagtttacttttaccattgaagaaattttctactatgttgcctcagtttctccacataaaaaaataagggcagtaataagatttagcttctgcctatttcctgagtaactcatgataatttatattattgtagatagtgctagtaagtgaggataagagtgaaaggaaaaaatctactgctattatgagagaaaagtgactgtaagaaagagactattaggaggaaatggatacatctgatggtgatgttctaggaaatcacagtactcccaaaatatagtattgccagagaggagtgggcaaaaatatcatggtaaatcgaaggaaaggaaatttaagaatgg

SEQ ID NO: 468113 - DNA, 619 bp, Homo sapiens
tgcctgttaatattctgagtattaaaaatgccctcatctttctgagctctattttgaatgatctaccacttaggagctatctctgtcttgttcctagaatttctgaaatattcttcagcctgawtgacactttcagtatgtttaaataaataaaattttgtttagcccagtggaaatattgattgatccattcattcactaactaaataaatgtaattgaaaaaaaatatgtgcaaattagttccaggtgcattaatagtttcaggtgcattgtcaagtttacttttaccattgaagaaattttctactatgttgcctcagtttctccacataaaaaaataagggcagtaataagatttagcttctgcctatttcctgagtaactcatgataatttatattattgtagatagtgctagtaagtgaggataagagtgaaaggaaaaaatctactgctattatgagagaaaagtgactgtaagaaagagactattaggaggaaatggatacatctgatggtgatgttctaggaaatcacagtactcccaaaatatagtattgccagagaggagtgggcaaaaatatcatggtaaatcgaaggaaaggaaatttaagaatgg

SEQ ID NO: 468114 - DNA, 575 bp, Homo sapiens
ttgttatattaaatctatcattagatatctagcagttttgagttctacatttgcagaaaaaatattttaaatgcaaagcaagtttttcaaacataatatgctcttacaattcagtaataattccacaaataatccaataaaaatggacacaatattttaatagtcacctcataaaacatgatatacaaatgactagtaagcacatgaaaagatgttaaatatcattagttttcaggaaaatattaattaaagctacaacgcaatgcttttagaaacctattagaagarccattagtaaaaagactaacaatgacccattagacaaggatgtaaaacaactggaattctcataaattgctcctataaatttaaaatagcataaccattttggaaaaaatactgtggcagtttttaaataaaatttaacatacacttacaacccagaaataccagttctcagtattcaaaataaatgaaaacatgctcatgtaaagatgtatatacaagtgttgataacgcctttactcaatagcccaaacttgaagtaagtaaaatttccatcaagaggtaaatag

SEQ ID NO: 468115 - DNA, 632 bp, Homo sapiens
aatccccaaaacaatgaggaaaatgtctccagggcatgccagatacctttgcagcctaaacctcccattactggctgcgaggtttaggaagagaaaacggttgtgtgggccaggcccaggctccctctgctgtgtgcagtctagggatttggtgctctgcatcccaaccactccagccacaaagaaaaggggacaagctactgctcaagctgttgtttcagaggatggaagccccaaggcttggaatcttctacatgatgttgaggctacaggtgcaaggaaatcaagaattgaggtttggtaayctctgcctagatttcagaggatatatggaaacacatggatgtccaagcaaaagtttgctgcaggggtagggccttcatggagaacctctgttagggcagtgcagtagagaaacgtgggatcagagcccccatgcagaatccctactggggcaccacctactggagctttgagaagagggccactgtcctccagaacccagaatggtagattcaccaacagcttgcactgtgtacctgggaaaagccacagacactcaatgctagtttatgaaagcagccaacagggagattataccttgcaaagccacagtggcaaagctgcccaaa

SEQ ID NO: 468116 - DNA, 632 bp, Homo sapiens
aatccccaaaacaatgaggaaaatgtctccagggcatgccagatacctttgcagcctaaacctcccattactggctgcgaggtttaggaagagaaaacggttgtgtgggccaggcccaggctccctctgctgtgtgcagtctagggatttggtgctctgcatcccaaccactccagccacaaagaaaaggggacaagctactgctcaagctgttgtttcagaggatggaagccccaaggcttggaatcttctacatgatgttgaggctacaggtgcaaggaaatcaagaattgaggtttggtaacctctgcctagatttcagaggatatatggaaacacatggatgtccaagcaaaagtttgctgcaggggtagggccttcatggagaacctctgttagggcagtgcagtagagaaacgtgggatcagagcccccatgcagaatccctactggggcaccacctactggagctttgagaagagggccactgtcctccagaacccagaatggtagattcaccaacagcttgcactgtgtacctgggaaaagccacagacactcaatgctagtttatgaaagyagccaacagggagattataccttgcaaagccacagtggcaaagctgcccaaa

SEQ ID NO: 468117 - DNA, 569 bp, Homo sapiens
atctcatattattgaccagacatgttgagatgtgttgtagcctcacaataaatgtgagaaatactgctactgtctgtagactgatcaattcttatctcacactcatccacgctattgaaaattttcttcgtttaggtctcctacttaaagtatgcagtttttctcaagaatagtgtttaagcaaaaatcragaaggtttcagactcccacaagaaaatttaaaaaaaagaaagaaaaaagtttaagaaggtccaaattagagtttataaaacattcatcttaaaattcttgagatcaaagagaatcttatcaaaaggccaaagctataaagcagttaagctataattgttattttagattgagaagttaatctttgccagttcccgaggtaagtgctttacatgcttttatatttgttatataaaataattcttagaaatcactatgaggtaaatgttattattcctgtttttctgtgaaaaaattttcttatatcgcacattcactaaatggcaaagtcaggatatagactcaaattcacttgattcaaatgcctgcactttcaacca

SEQ ID NO: 468118 - DNA, 566 bp, Homo sapiens
cttaagctcttgctttctccacatacaaatgcatcgctataatggtctacatttcctccattcattttcatttttttggcagtgggattagcaacactctatgacaatttttgttatttctgttaccaggagcagacattggaacaaaatcaggaaaatgtacaggtgcaaggatcagggctcttggatgaggtgataggaattgtgagtatactgagagtaaaggcagagatcacgacagagagatatttgctgactttgtccttttggcaawgctgtccaataaaaatataacattatgtccatttaaatttgatagtagctatattaaggtaaagtaaaaagagataggtgacattaattaaaataatacattttatttatcttaatatatgcaaaaatattttagcacataaatggtgttaaaattattaataaggaattttatgttcattatactaagttttcaaaatctgatgtttattttacactttcagcacatctcaatctggacactaaaatttgaattgttaaagtgtgttttgagtcatgttaaagaaaacaat

SEQ ID NO: 468119 - DNA, 567 bp, Homo sapiens
ttatttttcacttattcctgtttcagaagccatttgttcttctacctgtgttctagcttaaatatcctttgcagtgcttttcttacgtgrcttcacagcagaatttgacccttaggtctacttcctggttgctcagagccttcttgccttccactgtaccacattgtctggctttatcggcttattccatgttttcagctcttcctcgtcataccactccatgtgttgaaccccacaattctatcagagacaaactctcattagtgcttctttttactcttccaaacttcagttactatctgtatcagtgctgccccatagaaatagaatgtgagtcataatgcaacttgacatgtaattgtaagttttctagtagccacactacaaaagtgaaaaactgaagaaattaatttctataatttgtttagcctggtatatcaaaatattatttcaacatatcagtataaaaattgagatcttacattcccttttcatactgtcttggaaatgtagcatgtatcttatttatagtacatttcactttgccctagctgtatcccaggtgca

SEQ ID NO: 468120 - DNA, 567 bp, Homo sapiens
ttatttttcacttattcctgtttcagaagccatttgttcttctacctgtgttctagcttaaatatcctttgcagtgcttttcttacgtggcttcacagcagaatttgacccttaggtctacttcctggttgctcagagccttcttgccttccactgtaccacattgtctggctttatcggcttattccatgttttcagctcttcctcgtcataccactccatgtgttgaaccccacaattctatcagagacaaactctcattagtgcttctttttactcttcyaaacttcagttactatctgtatcagtgctgccccatagaaatagaatgtgagtcataatgcaacttgacatgtaattgtaagttttctagtagccacactacaaaagtgaaaaactgaagaaattaatttctataatttgtttagcctggtatatcaaaatattatttcaacatatcagtataaaaattgagatcttacattcccttttcatactgtcttggaaatgtagcatgtatcttatttatagtacatttcactttgccctagctgtatcccaggtgca

SEQ ID NO: 468121 - DNA, 571 bp, Homo sapiens
gctctacataacccagaggaatacatgttggtagaggcagatccaggccagacctcctgcgtgctccattaggcccccacccctttgctgttgcagtgtctctttcttctttatagacttatctctcccgtgggacaaggtatgtggtagaaggtcaagaaaatctttcctgaagtgaatcgaattrgtatatgatactttgaaagtggtcattacgagggtggggagagcctggtaatcactcgcagtctcagttgtctcctgtgtgttatgaaagagttcatgtccttttgaatctgtggcaaccactggtaaacatcaaataataatttgccagaaactggtgaaatcaaatataaatcaatgtacaatgtactacattctttgttgcctaagcagcatttatgaattaaccaagtaatgagttatgttattttttattatataggttgcataatttttagcacttttcttaccatattctaaaaaccaatagagggattgtaagggccttttgccaactgaactatgaaaagggtagataaggcactgaatatatgactataaatga

SEQ ID NO: 468122 - DNA, 571 bp, Homo sapiens
gctctacataacccagaggaatacatgttggtagaggcagatccaggccagacctcctgcgtgctccattaggcccccacccctttgctgttgcagtgtctctttcttctttatagacttatctctcccgtgggacaaggtatgtggtagaaggtcaagaaaatctttcctgaagtgaatcgaattagtatatgatactttgaaagtggtcattacgagggtggggagagcctggtaatcactcgcagtctcagttgtctcctgtgtgttatgaaagagttcatgtccttttgaatctgtggcaaccactggtaaacatcaaataataatttgccagaaactgrtgaaatcaaatataaatcaatgtacaatgtactacattctttgttgcctaagcagcatttatgaattaaccaagtaatgagttatgttattttttattatataggttgcataatttttagcacttttcttaccatattctaaaaaccaatagagggattgtaagggccttttgccaactgaactatgaaaagggtagataaggcactgaatatatgactataaatga

SEQ ID NO: 468123 - DNA, 571 bp, Homo sapiens
gctctacataacccagaggaatacatgttggtagaggcagatccaggccagacctcctgcgtgctccattaggcccccacccctttgctgttgcagtgtctctttcttctttatagacttatctctcccgtgggacaaggtatgtggtagaaggtcaagaaaatctttcctgaagtgaatcgaattagtatatgatactttgaaagtggtcattacgagggtggggagagcctggtaatcactcgcagtctcagttgtctcctgtgtgttatgaaagagttcatgtccttttgaatctgtggcaaccactggtaaacatcaaataataatttgccagaaactggtgaaatcaaatataaatcaatgtacaatgtactacattctttgttgcctaagcagcatttatgaattaaccaagtaatgagttatgttattttttattatataggttgcataatttttagcacttttcttaccatattctaaaaaccaatagagggattgtaagggccttttgccaaytgaactatgaaaagggtagataaggcactgaatatatgactataaatga

SEQ ID NO: 468124 - DNA, 616 bp, Homo sapiens
gagcctccagggctttgtcagaggctccttccttcctggaatccaattgtacaaccaggagccagaggtcttggtggccggatgtgggtctaatcctggttccatggcctcccaactgagtgaatgagattataatgataaaatataatttactgtgtacccggcactgccctaagcactttgtgtttcttatctcatttactcttcacagaaactcttggtactattactatacttgatttctagagaagaaaactgcggcacaggatagagttggtttgccaaggtcaggacatacacctcactgtgtgaggttagaaactgagcactggacccccatcctacgctgcctgtttcatgaattgtaaaaggggggataaatgtagcacctcctccctaggttgttgtgatattcaagtgggataatccatttacagcatgggcatggtggctgcmtgtgaaacagtgggagctactgtcagtttgattagttctggcctctctgcagccttgctactctctgtttattctcagcagccttcagacaattttcttttcttttctctttcttttcttttctttttttttttttttttttggagacgggagcctcatt

SEQ ID NO: 468125 - DNA, 563 bp, Homo sapiens
agatgaaaaagacatggctttctaacaaggagaagactgagctccaaacaagtcataatcctagagacaggtacctgggcaaggtaacactattaataagagtttgttaaggaaaagtatggtggaagtgtaaacggttttgccagcctctaccttcagctctctattgcgrttaagtgagaatgaaagcaaacattttacatttcctgcccttaaacaaaggaaagctttatgtgtaaattttcatactctttttctttgtggtctgagattgggtaaagtcagggaaggaagacatatatgatagagcaatgtcaattacgaagaccttagtttccaggcagagcatttgagatttcagctacagacttccatttaatgctttaaaatgtaacaataagcctttggttggtcaatgttaagtggttggacttcatgtaatatgttttgccatctcagttcattccagtgtatcggtgttccagagccaggatgcagaaaaactcatctcattctttaaaacacagttttttaaacagcactgttgacattttgagccaggt

SEQ ID NO: 468126 - DNA, 563 bp, Homo sapiens
agatgaaaaagacatggctttctaacaaggagaagactgagctccaaacaagtcataatcctagagacaggtacctgggcaaggtaacactattaataagagtttgttaaggaaaagtatggtggaagtgtaaacggttttgccagcctctaccttcagctctctattgcgattaagtgagaatgaaagcaaacattttacatttcctgcccttaaacaaaggaaagctttatgtgtaaattttcatactctttttctttgtggtctgagattgggtaaagtcagggaaggaagacatatatgatagagcaatgtcaattacgaagaccttagtttccaggcagagcatttgagatttcagctacagacttccatttaatgctttaaaatgtaacaataagcctttggttggtcaatgttaagtggttggacttyatgtaatatgttttgccatctcagttcattccagtgtatcggtgttccagagccaggatgcagaaaaactcatctcattctttaaaacacagttttttaaacagcactgttgacattttgagccaggt

SEQ ID NO: 468127 - DNA, 563 bp, Homo sapiens
agatgaaaaagacatggctttctaacaaggagaagactgagctccaaacaagtcataatcctagagacaggtacctgggcaaggtaacactattaataagagtttgttaaggaaaagtatggtggaagtgtaaacggttttgccagcctctaccttcagctctctattgcgattaagtgagaatgaaagcaaacattttacatttcctgcccttaaacaaaggaaagctttatgtgtaaattttcatactctttttctttgtggtctgagattgggtaaagtcagggaaggaagacatatatgatagagcaatgtcaattacgaagaccttagtttccaggcagagcatttgagatttcagctacagacttccatttaatgctttaaaatgtaacaataagcctttggttggtcaatgttaagtggttggacttcatgtaayatgttttgccatctcagttcattccagtgtatcggtgttccagagccaggatgcagaaaaactcatctcattctttaaaacacagttttttaaacagcactgttgacattttgagccaggt

SEQ ID NO: 468128 - DNA, 699 bp, Homo sapiens
gattcatagctgcagcatgagtgacacatttccagctgtgtgactttaagtacatcacataacttctctgaacttgttcctgtatctgtaaaatgaatatatatatattgagatggcatcttgctgtgtctcccaggcaggcatatagtggtatgatctcagctaactacaacatctgcctcctgggttcaagcaattcttctgcctcagcctcccacgtagctgggactagaggcaygcaccaccacgcctggctaatttttgtatttttagtagagacggggtttcaccatgttggtcagtctggtcttgaactcctgacctcatgatccacctgcctcagcctcccaaagtgctgggattacagacataagccaccatgcccggccaaaatgagtatttttcaaaagtacctgctatgacttctgtttccagaaagatgaagtgacagacatactttaccctatttttctcactaagcacaacaaaagctctaactgtatacagaaaacaagcaaatgaagatgcttcaaggtagagaggaaagcagacaggttaggaacctcaggacccaaggagagacatgctggtgaggcttctgcatttcctgttcctcatatatcccagactggatactggagaagccaagaagccagaaaagctaatagccaccaacaagaaaattatacaaaaaaaagc

SEQ ID NO: 468129 - DNA, 699 bp, Homo sapiens
gattcatagctgcagcatgagtgacacatttccagctgtgtgactttaagtacatcacataacttctctgaacttgttcctgtatctgtaaaatgaatatatatatattgagatggcatcttgctgtgtctcccaggcaggcatatagtggtatgatctcagctaactacaacatctgcctcctgggttcaagcaattcttctgcctcagcctcccacgtagctgggactagaggcacgcaccaccacgcctggctaatttttgtatttttagtagagacggggtttcaccatgttggtcagtctggtcttgaactcctgacctcatgatccacctgcctcagcctcccaaagtgctgggattacagacataagccaccatgcccggccaaaatgagtatttttcaaaagtacctgctatgacttctgtttccagaaagatgaagtgacagacatactttaccctatttttctcactaagcacaacaaaarctctaactgtatacagaaaacaagcaaatgaagatgcttcaaggtagagaggaaagcagacaggttaggaacctcaggacccaaggagagacatgctggtgaggcttctgcatttcctgttcctcatatatcccagactggatactggagaagccaagaagccagaaaagctaatagccaccaacaagaaaattatacaaaaaaaagc

SEQ ID NO: 468130 - DNA, 616 bp, Homo sapiens
caatttaagcaaactgctcctttctttatgataacttacttgaccccaggtagtaggagatggctctaagatggttaaaagatacttggaggccgggccagtggctctcgcctgtaatcctagcactttgggaggccaaggcagggagatcacctgaggtcaggagttcaagaccagtctggccaacatggtgaaaccccgtctctactaaaaatacaaaaattagctgagtgtggtagcctgctcctgtaatcccagctagttgggaggctgaggcaggagaattgcttgaacctgggaggcagaggttrcagtgagccaagattgcgccactgcactccagcctgggtgacagagcaagactctgtctcaaaacaaacaaacaaacaacaacaacaaaaaaaaaaaacttgtagatttacttactgagtctgtgaacttgcacaaatctttatcactaaatgttaattttcccatctttaagacagaaatcatagtaagtacattaaagacatcctatggggatcaaacagtatcttgcacatcatatatgaatatgtggtttgtggatttatgacttggtagaaatttcccatgagataaaaggaaattacta

SEQ ID NO: 468131 - DNA, 577 bp, Homo sapiens
ggaataaagaggagactggaagaataactctaagaaaacttccatcactgtacatttttcccaatgctgatcttggctatgagtctcttggccagctttcgttgactctccatgtcaagggcagttatgggatggtacygagcattccaggtatgactggaagctggaattcacttcctattgtatactctactcttacacatatctcaagctttcagtcaaaataaaagaaaggttaatcctcccaagacacttagagctccctcatctcccaagtggccacagatacccttaaaagtggagccagcccctctctgcccaacatctactcaccaaaacccacttgttctatcccactgtcttcaaccacatttttgaccagggtttgcctttctccatcaacctttagactgattgtttgtttgacttaactattttgctctagattttactcacttctactctggataccccatttagtccttcccttagtaccactccctagagtgagctgccatttctgacccaattcaattccaagcccagagttccgaagcctggctggagtcagagcact

SEQ ID NO: 468132 - DNA, 571 bp, Homo sapiens
tacaacagccgctggaccatgtgtaacatcatttcaggtgggggcaaaagatgtgatgtgtgaaaatatagtaaaggcaccatcagagaatcacttgaagaaccctttgaaattataacttaattaggcctcttggaagagaatgccttgccaagtgcaagtattcattcatcataatctgaaatatcattttcttmtctttattattctaatgtatttattgagaagaagctgtgtaattcttgttgtcagttaagaaaaaaggtgaaacaccatatggtggaaagaattagtagagtgctagacctttctctgccattgaagtgtaaacctgggcaattcatgatctgtccagtaacagttcccccatgaataaaatttttctttaaataccctcttctcatattcctccccaatctcctgtttattcatttgagggtggcttaccctagactgtgatcaggaaattcaggtactagttcttggtagcctttgatttgcacatgtgcccaacatcactgggtttccactcctgacaacactgtttaccttctagaaactccctctttct

SEQ ID NO: 468133 - DNA, 571 bp, Homo sapiens
tacaacagccgctggaccatgtgtaacatcatttcaggtgggggcaaaagatgtgatgtgtgaaaatatagtaaaggcaccatcagagaatcacttgaagaaccctttgaaattataacttaattaggcctcttggaagagaatgccttgccaagtgcaagtattcattcatcataatctgaaatatcattttcttatctttattattctaatgtatttattgagaagaagctgtgtaattcttgttgtcagttaagaaaaaaggtgaaacaccatatggtggaaagaattagtagagtgctagacctttctctgccattgaagtgtaaacctgggcaattcatgatctgtccagtaacagttcccccatgaataaaatttttctttaaataccctcttctcatattcctccccaatctcctgtttattcatttgagggtggcttaccctagactgtgatcaggaaattcaggtactagttcttggtagcctttgatttgcacatgtgcccaacatcactgggtttccactcctgacaacactgwttaccttctagaaactccctctttct

SEQ ID NO: 468134 - DNA, 538 bp, Homo sapiens
acctcgttgagccggtcgtcgtccgcctcgatgcctacgctgtccaggatcctcttgatgtctttggctctgagggaggtgctgcccccgagggcagccagcaggagggaggtgaccgagcgcactgggggcgggcgtctacggaggcggtggcaaggcctccatgcrtgcgatcttggtggagtcagggaggaaaagcccaggtggtcttggttaacagtaggaatgggggtgggatacaatgcagttctgctaccctagaccccggaaggaacttgtgaattaccgtcgcctttccacttggcatagtttgagaaacagggcttatggaccagaagctgggttggtagggcttccccctctcttgttatttgaaccaagccaaatgtccaacaatgatagactggattaagaaaatgtggcacatatacaccatggaatactatgcagccataaaaaatgatgagttcatgtcctttgtaggcacatggatgaagctggaaaccatcattctcagcaaactatcgcaaggacaaaa

SEQ ID NO: 468135 - DNA, 660 bp, Homo sapiens
aaaatgcaaaatgtggggaggtaatggaactaaaaagtaaagtggatttcttcttatgatcaaaattaaattgctatcaattcaaaataacctgttatagccatgtttttagtaagccttgtattaatcaaaaaacaaaagcatttaatagatacattaaaaatagccagatcaaaacatgctaatagagaaaatcacttaatcacaaaggaakacagtaagagaaaaagaaacaaagattctacaaaacacataacacagaaaacacataacaacatagcaaaagcaagccgtcacccatcaataatgatgcttaatatagatgaattaaattatctaattaaaagacatataattgctcaatggattaaaaaataagacccaacttcatgctgcctacagagatgcactttacctgtaagtgaatgcacagactgaaaacgaacggatggagaaaaatattccatgcaaatggaaatcaaaagaaagcaggagtagctatacctatatcagataaaatagacctcaagttaaaactataagaagagacaaacaaggccattatataattataaagaggtcaatacaaataagaagatataacaatcataactatatatatgcacttaacattggggcacctaaatatataaagcaaac

SEQ ID NO: 468136 - DNA, 594 bp, Homo sapiens
aataattccagagctgagaagccaatgtttaaactcagccctcagacagcattaacccaggcgaaagcttgtgttccagtaactgggctccacaatcaaaggtatccggctgctgtcacgtggttcccacaaagtgacaagatgctgcatctcttcaaggctttcccggtgaaaattatcacccaaccaacccctgcacggcttagaccaacacttttaatctcaagttttatccgcctgctaacccaccccatcattcatccccaaccctttagaaatccagaacttgctcacttctcagcagaggcgaggtttccaagtagctgaacaaatcaacagcactttccttctgatattccggggatctcagggtttattaytgtgcctttctgcgccgaggaaagttcaacttcatattattgtatgcgactttccggctgagcatgactttgggctcgctcgccgcagttccacacccactcgatttctccaaacaatggcggtaacgtcaagattcagctgcccccagagcgggtgacttcccggcggtccgcggctgggctggagctgcagctctcagcaggctaacacgcg

SEQ ID NO: 468137 - DNA, 596 bp, Homo sapiens
atacctgggcaccttgtggtccaggccacttgacatataaaattaagcatcacacttactaataggaatgaagggtgagaaagaatcttagtgataaattgatcaacacaacaggcaaaaractgctattcacaaaatagtcatgatttgtggaagagtgaacaatatttttcagatgaaaatgtccctaaataataatggttttttttctgacttcacttatgtattatttgctttaggcttcccatctttctggaaatcaggaaacctgaactatcttgatgtattgatatagctctcatcactgtaactatatttaacatttttctccataaggaaaagactgtttctatttctgcagcattttgtgaacatacattttgtgaaaaacctggctaaacaactgcttcctgtttagagatagaaactgcattttatcatggattcaaaataccagggagaactgctctcagtaataatttctcaactaatttatttatttcacatatttaaattagttattatctccttgcacttaaagaagcaagcataccccttgtaagttcctttgtccaaaaaattaatgtaaccagatc

SEQ ID NO: 468138 - DNA, 618 bp, Homo sapiens
gaaacatcagctcttttggaggactgagctttcctgcttttggactagaactgacagcatctgctctcttcattctcaggcctttaaacttggactatacacattggctttcctgggtctgcacattttgggagttatcagtctccataattgtttaagccttttttaaaaaagaataagtcaatctcctaatggctgtttctctgatacaatgagtgttttcagtttatacttgatgttttcgagaataataagttattggaaataaaagcctatatttttgttttgttaatatgctgttggtttcttcgttgtttggtttttgcctattttgtcataaactaacaaaagtttatatatatatatatatatatatatatatatatatatttccatgtccaataatttatggtataattcattttaaaaaactaaataaatatgctttttcaagtttgaattgtggtcaaatactaatcaatataatatattaacttagccaatactttagtcagttaaaactgttgttgcaaagtacattgaccgtgtarcttatacacaacagaaatttattttttatagctctggaagctggaagtctgagatcaagatgagagc

SEQ ID NO: 468139 - DNA, 632 bp, Homo sapiens
taatcatgctattttatcaagaataatattaaatgaaactgtcttgcttttctgggatatagcagtaaataattcaatgtctactagtacacttttggtagcactgccttaatttctgttaaagcaccaacaattttacccaccattgcctttgtttcatagtgcaaatgtcaactcactgagaaagccaagtaatgtcttggtattattgtaaaaatakttttgatcttgtatatacttgaaaggatctgggaaattccctggggtctgcagaccacattttatgaaccatggtcaagagaaaaatctgagtcctatgtggtagcaatccacttttcacacaatttgcccctctgagaagagtctgtgctgttttcaccaatcctggctttgacgcctctctcattggccttttctgcttgctgatatcatgaccatcatattccattctcggttctagttccgtttcccatgtctaaccatttattcttgtcatcaaagtaaagattctttgcctctttttgtatctacttgatcaaatctcacacaaatcttttaatgattctattttaattcttgatcttttgttaccaaacaggcccttcaggatagaacttaatttcattcattat

SEQ ID NO: 468140 - DNA, 623 bp, Homo sapiens
ggactgttttaatcaatcactgcagaattgctatatagaggaacactcctattaaactgaatatcattaatttcagatactggaacaatgtrtacttagcaactggcctgatatctatgaaaagtgagcttactaagtggattatccatataagcatgacatttacaaagataatgtttatatttctaaggggaagctattttccttcttggtccctattggccaccgggttggcctcgttctccccacttgactgtgttcatgagcagcccttctcctctggaaatgtctctgaggctgagagtggttctcaagggcagtggagacagccgccccaaggggttctgtagaaggatcctggtataggggactcagcttaatggacaggaagaggggagacatcggtatgtttgcacagggaagtctgtgcaaagttgagcttttatgagcatgaacaggatggacagccattgttatctaaaacagggggacctaatctcctatgaacagcattgaaggcttcttctgagactagaaaacctcctaaggaggattgaaaagagaattttattgtgaggaaagatgggatcaaggtaggcctagagcctctggaggaggaagct

SEQ ID NO: 468141 - DNA, 594 bp, Homo sapiens
gtcatctttccatccaatgacaacatcaaggtttcagaatttttgtatatgaaattgaatgacgagattggacaggttyacttggttttggtaaagtggcttgtttttcacgatgcatcattccttttcctataaagcctcataattgtgcacctaataaatcagtatgtaaataaaaatacaaactcaaatttctagcagagtttgtgccactgcctttgtctcctgttcttgaattgtataaggtaccatgtgttccaaaaagtggaatgagtcatgaaaaggataaattcatataatgaatcttaatttaattttcagactgctttagataatttcagactggttaagataattttgaaataatggttcttctggatgttttatgagagttatttcatctgttaacagcatttaaatgttttatttctccttttctgaagaaaaagaatccattagtgcacatgatcctgaactagggtagcatgattgtgatgccaagctggcctgcgtcactgctttaatcctacgtggccaaagcagcttgctctgattgtttaggactttaatggaacttcatagaactcatgacca

SEQ ID NO: 468142 - DNA, 619 bp, Homo sapiens
aaggcatactgtagttctgtttactgcagaaaggaagttcaagaacagcatcacaacttgtctgggcattatttcctcacagctaatttaggcttctctgcaccccaaactggccaagaaagttaaaatgctacatttctctaataattagacttcttcatactgaaaatttcctttgaaaaaaataaggatattttaatatgaagcagaagtttagcagttactttttgcgtgcctgtgtgcatgtgtgcatgctaatttctgtgagacttggtcataatcttaatcattcttgaaagcagagagtgatgagtctgacctcagggaaaagctaggctgtctttcctggcatcttgatattataatagattttaagattctgtcaagtatactgaagggagaatccatgaacactgtacatttattaaagacctactatgtgtccrcaattttctctatgctatgaaatgtaaaaacaaaatttagtgtctctgtcttcaagttgctaaaatataattggagagagtaaaaaaaaaaatccccaatattattagataagattttgtggcaatacaatcttttaaaaacttggtaatgcaggctatgaaagcaatgggag

SEQ ID NO: 468143 - DNA, 542 bp, Homo sapiens
ttttcccctatgttttcttctagtagtttcacaatttcaagtcttacatttacgtttttaatccattttgagttaaggactgcaacactackttctcagcaatgggtagaacaaccggacagaaggtaaggaaagaaatacaggacttaaccaacacattaaaccaacttgatttaacagacacatacagaacactacctaacaaaaataacatacatattctcctcaagtatacatcagatttttttcaggatagaccatatgataggccacaaataaagtatcaatatattttaaaatatagatgtcttatgaagtatcttctccaaccacgatggggtaaaaattaaacaacatggaaacaagcaatggatcaaggaagaaatcacaagaataaatagaaaatacttaaaaatgaataaaagtgaaaacgtaatgtaccaaaactcatgagacacagagaaagcagtgataagaaagaaatttatagctataaaggcttacatttaaaaaaaaaaagtctgtaatcaacatcttaaatg

SEQ ID NO: 468144 - DNA, 542 bp, Homo sapiens
ttttcccctatgttttcttctagtagtttcacaatttcaagtcttacatttacgtttttaatccattttgagttaaggactgcaacactactytctcagcaatgggtagaacaaccggacagaaggtaaggaaagaaatacaggacttaaccaacacattaaaccaacttgatttaacagacacatacagaacactacctaacaaaaataacatacatattctcctcaagtatacatcagatttttttcaggatagaccatatgataggccacaaataaagtatcaatatattttaaaatatagatgtcttatgaagtatcttctccaaccacgatggggtaaaaattaaacaacatggaaacaagcaatggatcaaggaagaaatcacaagaataaatagaaaatacttaaaaatgaataaaagtgaaaacgtaatgtaccaaaactcatgagacacagagaaagcagtgataagaaagaaatttatagctataaaggcttacatttaaaaaaaaaaagtctgtaatcaacatcttaaatg

SEQ ID NO: 468145 - DNA, 530 bp, Homo sapiens
cataatttttctttcaagactattatctggtgattatttattcttactctccctgatcactagttcagttaccacatgaaggaagagatacattcaaagtttcctgaagtaagaagctctgggatgcttccagggtgcagaccagggtatgactcaaagcttgactttgcatggttttagggtcttaaattgaaactaaattaggtttgacagtaaagttcaaacttgaataactgtagacttaaataattttgaaaagtgacttttttgcaattaacagttctaaaacgccccatggcatttatgtcacccaagattttaatctagaatttgaaacatggattgctgaaagctttgagaaacatatcaatgttaaaatctgaattcaggtttacatamtgtcacatcaattttggcatgaatttataacaatgttatttagtaggtatatatattaaattaataacaaaccatccatgttcaagaacaacctacgttatttccgtagtgattcatgtaaaatagaccta

SEQ ID NO: 468146 - DNA, 532 bp, Homo sapiens
tgactattaattcaccaactgttagggcagaaggaattaaacacagccatgttcctttagaccctaggaaataaagcagcagttttatatgggcacacaggctttttaagggattctgtccccttgcaagcagtgccaaaaaagagccttaaaaacatagctccctgtctccttccagaagggatttttaaaacagccatccagtggctaactgaagatctgaacttctcactaatttatattgttgagtcgaagagacaatcatsaacccaccaccagcatgggaggaaattgtactcacactgagagcactagattttacaacatccacctaagttactgcaccataaatcctctagctctgggagcagaagggactggcatatataggtatcttcttagtggcacgcaagtacctccagggactttatcctcctggagctatgcagaaagggcctaaaaaaaaaagaaaaaacaaaaagaaggaaacgtaacttcctgtttatcccctgaaaaggtttaggacacacat

SEQ ID NO: 468147 - DNA, 593 bp, Homo sapiens
atgaggggaatagaatagaaggtaagaagacgtcatcctgcaagatgccaataccttggaatcagagtattttgaacaaagttggaaatataataattgattactacacagcaaaactacaaatatagagccattcctagtactgtgctttatccaatatagccaaagttttattacacaaaatagcagagtaaactaatctcattctagacatacatttttaaaggcaaacaaatcactgctyccttaaaaaaaataaaaacaatgccaggaatccagcattcatgagcagccataaaataacaaaccaatgtggatagatttgtttaagtgttttcaaggaaactaatttattcccagagcttccaagagtttagtataaaaaaacagtgactacatgttttgtgaaaacaagaaaaaatagccttatggtgtgtataactattttcaagaggaagttacatggcctattgaactgcatcttgggttgagagtcaggaacttcaattttgttctttctcaaacactgtctgactgtgtggctttgggtaaattacttaccctctctgtgtttcctaattttaaaaaaatga

SEQ ID NO: 468148 - DNA, 516 bp, Homo sapiens
tatcagctcatcaattgtaatggataagccacattgatgcaaaatgtttataatggggaaaccgtctgagggtgtatgtgggcatgctctgcacttaaatttttctgtaaacttaaaattgctcaaaaattagattttatcaatttttttttttttttttttttttgagacagagtttcactcttgttgcccaggctggagtgcaattgcacaatctcagctcactgtaacctctgcctcccaggttcaarcgattctcctgcctcagcctcccgattagctgggatcacaggcatgtgccactacgcctggctaattttgtatttttagtagagatgggggtttctccatgttggtcaggctggtctcgaactcctgacctcaggtgatccacccgccttggcctcccaatgtgctggaattacatgcgtgagccaccatgcccgagtttatcaattttttaaaatgcagttttgtgtggaaggaatttggagtgagaggagaggagtgtccaga

SEQ ID NO: 468149 - DNA, 555 bp, Homo sapiens
cttgttattttattaatttgtggcagagttcatatagaaagaattgtttttattgacaaaaatatctcgataagacttaggttttggcaagaatcaaggcaatattatacacttttgagatgtctgtgaaaaagtgaccatgtaaagtcaggtgtatagaaaaaagtgaatatgctttatagcagagcaaggaggaagaagagagaagccacagaagatggtagataattggagtgcaagatggtaggtaattggagtgccaatgaaaatctctagcwatagggaaactaaagggatattatgaattgcaaagtaatgatttaattcctcttttaccccgaatctttaataaggtttaacgactacaatttgtttgtttgttttgaacaagacttcttgaaattgaggcattagctgagtttcacctctgggtgacatagggcagtgctggcagaagccagaaagacttcaaaatggaagaagcagaagtgtagggtcagggcgactacgaaatgatcaatacgcatagaattcttataaacttaaggaggactt

SEQ ID NO: 468150 - DNA, 562 bp, Homo sapiens
atcttctacacaggttccatcttcttggagacaaatctctcctgggagctgcctgttctccaactcccatctggacaggctgccctctgggcctgcaatgtggctggcatcctaggactggcaggcagcaatatcctgtgcacccctcagcattctctcctgtgtttgagcccctgtttgctgaatccgcgccttcctaactgtggtacagcactcttcagcggcctcctgacaaaaggtatgtggagtgtaaattttttgagatttttttatatctgaaatgtattttatccccagattttgttagtcttttggctagatgatgaatttaagattaggatttattttccttcagaaagtaattttttttttcctctagtgtttctgtsaagaagtctgatgccactctggttcataatttttttggttttgaccatgatttttttttaatctggaagtttctgcagccttctctttgtgtccagtgttctggaacttagttatggtgtgcctcgacatgggcctgtttccatccaccgtgcagcatatttgatgaaccttc

SEQ ID NO: 468151 - DNA, 541 bp, Homo sapiens
actggataactgcttgttgaatgactacatatgtaaggcaactgtgcatggcacatgatcatgtctgccctcatataatgttgcccttcctcccggatgcatcccaattcaatgtcctaacaccccagagggagattttttccttccaaagcacaaaacttattgttgcatgcaatttcattgcaactgacattaaaagaagacatactccaggtgccatcctacaragagttttatcatgtcacatacacttcttcagtctctgccctttcgtttgtgacagggaagagaaaacgaaacagaggtagaataaaatttttttccttgataaacatcatataatctagatggatgtgtgtaggggatttaatatcattaataaatctctatactatgctacttaatgtatttcttcttgtttttgttcattacataaaaacatttatttgattttgtactggcttaatgttgaatatgactgtatactatcagtgcacaaaacaggaagagtcaatgctttaggtgataatgaccatgacag

SEQ ID NO: 468152 - DNA, 494 bp, Homo sapiens
catttctgttagatacaagttagaacttttaaacctttaaacttagaacttgtatctattagatacaagttagttagttagttagaacttttaaatcttactttccatgtccctttatttcgctttcatgtagtctaactcttttgctttcagtgctacattctggatgaatttctcaacattagttacttgtcaatatataagttttatgcctgactgtcagtgtttggggtgctcaagtggagaagacttctagatraaagagttttagatattcttggagctcaataatgggcttaccactggtatatagcatttacattaacatttcagagctgaactatagagtagattccaaacaatgaatcagtataagatttcttggcagtaactgacttgggatggttatgtggactctgttttcttatgcagggcaatcagatatagggcacatgttctgaatgtccttgtgctggacttcctattccagtgct

SEQ ID NO: 468153 - DNA, 502 bp, Homo sapiens
gtgtggtggcacatgcctgtagtcctagctactcagtaggccaaagtgggaggatcacttaagcccagaagtttgaggctgyagtgagctgtgattgcaccacgggacaccagcctgggtgacagagtgagaccctgtctcaaaaaaaaaaaaaaaaaaaaaaaatcaagatcatgaaagtcaagaaatcccgaagaactgttccaggttgaaggagactagagagacatggtaattgagtgcaaaatgtgatcctggattgggccctttgctataaaggacattattgggcatgggatagatatttaatagaagttcttgtactactctggaaacctttctgcattttaaaaatgtttcagaattgtgtttaaatgccaatgccaataaataagtaaaacatgtagatagtaaaattatgaagctaaatgttagtctgtgtcaccactgctacttccaaaaacttcttttggctgtttcttgtgatggtggtttcccttgc

SEQ ID NO: 468154 - DNA, 502 bp, Homo sapiens
gtgtggtggcacatgcctgtagtcctagctactcagtaggccaaagtgggaggatcacttaagcccagaagtttgaggctgtagtgagctgtgattgcaccacgggacaccagcctgggtgacagagtgagaccctgtctcaaaaaaaaaaaaaaaaaaaaaaaatcaagatcatgaaagtcaagaaatcccgaagaactgttccaggttgaaggagactagagagacatggtaattgrgtgcaaaatgtgatcctggattgggccctttgctataaaggacattattgggcatgggatagatatttaatagaagttcttgtactactctggaaacctttctgcattttaaaaatgtttcagaattgtgtttaaatgccaatgccaataaataagtaaaacatgtagatagtaaaattatgaagctaaatgttagtctgtgtcaccactgctacttccaaaaacttcttttggctgtttcttgtgatggtggtttcccttgc

SEQ ID NO: 468155 - DNA, 502 bp, Homo sapiens
gtgtggtggcacatgcctgtagtcctagctactcagtaggccaaagtgggaggatcacttaagcccagaagtttgaggctgtagtgagctgtgattgcaccacgggacaccagcctgggtgacagagtgagaccctgtctcaaaaaaaaaaaaaaaaaaaaaaaatcaagatcatgaaagtcaagaaatcccgaagaactgttccaggttgaaggagactagagagacatggtaattgagtgcaraatgtgatcctggattgggccctttgctataaaggacattattgggcatgggatagatatttaatagaagttcttgtactactctggaaacctttctgcattttaaaaatgtttcagaattgtgtttaaatgccaatgccaataaataagtaaaacatgtagatagtaaaattatgaagctaaatgttagtctgtgtcaccactgctacttccaaaaacttcttttggctgtttcttgtgatggtggtttcccttgc

SEQ ID NO: 468156 - DNA, 502 bp, Homo sapiens
gtgtggtggcacatgcctgtagtcctagctactcagtaggccaaagtgggaggatcacttaagcccagaagtttgaggctgtagtgagctgtgattgcaccacgggacaccagcctgggtgacagagtgagaccctgtctcaaaaaaaaaaaaaaaaaaaaaaaatcaagatcatgaaagtcaagaaatcccgaagaactgttccaggttgaaggagactagagagacatggtaattgagtgcaaaatgtgatcctggattgggccctttgctataaaggacattattgggcatgggatagatatttaatagaagttcttgtaytactctggaaacctttctgcattttaaaaatgtttcagaattgtgtttaaatgccaatgccaataaataagtaaaacatgtagatagtaaaattatgaagctaaatgttagtctgtgtcaccactgctacttccaaaaacttcttttggctgtttcttgtgatggtggtttcccttgc

SEQ ID NO: 468157 - DNA, 560 bp, Homo sapiens
actgtaatgcctaagggaaggggagcaagctaggttcaccttctagtagtcccagattattgcctggaagtagtgtccaggccaaggctcagagaagggaaccaaaatagagtgcaatgatttcagcaagttgaggagacagagatcagagtttgaacaggtagaagcctaaaatttgtgggcaaaatatcaagaatctaatgctattaagtgatcaaatacatacaataagaatccccaaagcaggagaagggcagaaaaatatttgaaaaaataatggataattttttttwaaattggaataaaatgataaacacacaaagccaagaatttcatcaaaccccaggcaggataaacatgaagtcaaccacaccaaggaacaatataatcaaattgatgaaaaacagcaaaacagaaagtaaaatcttaaaagtagccagagaaagacatatatacagagaaagaaagataagaatgaatgacggtagactgctcatcagaaaactaagacaatgaatgacatctttaaagtgctaaagagagagaaaaaaaaaaaggac

SEQ ID NO: 468158 - DNA, 436 bp, Homo sapiens
atcgactacataatatattagcaatatattatggagttttaatatataaagaaaatttaaatgttttagtttctgtgatttaggaaaggtaaagttataytaagcaaacaatgcccaacagaaagtagataacgctatattaatttctgacaaattagactttaagaagaaactactatatatacttttgcatgtgtgtgtatatgtataatacatctcgtatatatatatacatatgtactatatatattcagactattacacaggaataattagatattttaacaaacttttctcagaaactgatagaacaaataggatcaaaaactttgaggatacattttatataaaaagccatataaacaaaatcatgataactgggacttataagaaactgcatctgacaactgcataatgcatattgtcatcatgtaca

SEQ ID NO: 468159 - DNA, 586 bp, Homo sapiens
tcattgggaagtccacctagatttcaccataaacagtttctgttgatttctttgttttctgtgtatacactatactttcttatttctttgcgtgtctcataattttctgttgaaaactagacatttcaaataataaaatgtggtaattctggaaatcagattctctcatctccccacagtttgtttttgttgytctttgttatgtgtgttgttatttgcttattgactcttctgacctaattctgtgaagtctgtattttttcatgtgtgatcactgaaatctttgctcagttagttcaatcaccagctaatgattaggtagagattttcttagataacttggaccaataagtctctgactttgctgaagagctctgtatatatgttgagacaagcacttaaccctcaggcaatcagattttattttctgcttgcatagagccttagagtcagtcagagattaaagattagggtattttcaggtctttttcaagcatgtgcacagccctgagcatgaacacagcccaacacgtgaatgtggctttttagattcccagtaatatgtcaggacgttttaaagcgccct

SEQ ID NO: 468160 - DNA, 586 bp, Homo sapiens
tcattgggaagtccacctagatttcaccataaacagtttctgttgatttctttgttttctgtgtatacactatactttcttatttctttgcgtgtctcataattttctgttgaaaactagacatttcaaataataaaatgtggtaattctggaaatcagattctctcatctccccacagtttgtttttgttgctctttgttatgtgtgttgttatttgcttattgactcttctgacctaattctgtgaagtctgtattttttcatgtgtgatcactgaaatctttgctcagttagttcaatcaccagctaatgattaggtagagattttcttagataacttggaccaataagtctctgactttgctgaagagctctgtatatatgttgagacaagcacttaaccctcaggcaatcagattttattttctgcttgcatagagccttagagtcagtcagagattaragattagggtattttcaggtctttttcaagcatgtgcacagccctgagcatgaacacagcccaacacgtgaatgtggctttttagattcccagtaatatgtcaggacgttttaaagcgccct

SEQ ID NO: 468161 - DNA, 572 bp, Homo sapiens
catgagtggcactctatgaaaggcagatttattagtcaaaatgtacctcttaataaatgagagtatatatacaccagtgataaaacatttatcttgtggatagatgaagtatgatgtttgatgcacatacttttaaaagtttagttgagtttatctaaagataattgaagcttgcttttatctgctgactgagtacactttttatttcacatgacctagtgttccttggacttaaatggttttagtgtggctttggatgcattgatattttcacaggatgatttatgatacttaccaagatattcatttgtaaaatcaaaatttaaattagagtcaatttggcagctttccaactcgaaacctactacataggttattaagaatagaaaatcattaaacaaaaatagcatctggtggtccgtactgtatctgtaagattagtagaaaaaattttccctaaaacaaataaacagatttgcaaaacaatctatcaggcaactmtgtttatagaaataaaaatgacttaaatcaatgctcttcagtattatagctccttaaaacaacatagtaat

SEQ ID NO: 468162 - DNA, 556 bp, Homo sapiens
ttctacaagctaactaaagttattaatgaccatggcagtcatcaaaacaaaattatttaatatttaaaatatatatcatttagatatttacttaaaacatgcatgaataactgttataataaaatgaataattttgtcaaactataaacatgaaatttatttataaaaaggaaacagmattttatacataaaaatctcatttgtttgtgctatcactaacacaaacacctatttttaaagaaaattatccatcaaaagactgcttatctctgcttagtaaattttcttaattttttcagtgaaatggtgtggttttacctatgcagggtttctactttctttcaatcctattttattaagatatctatgtatttacttaatttatgttcttatattttacttatatttatataaatataaaaaatggtgttttgtatatttttccaattacattttacaattaactattattaaacccatataaaaaagagcttcaatatttttctacttgcagagctgactgtattcacctagtaattttaccaaataattgtaa

SEQ ID NO: 468163 - DNA, 482 bp, Homo sapiens
ctgggatgtaaagcaagtttttaaacayatgatgctgagaatcatctggtatacatcactaaagtatatatttctattcataaattcttactgtgtagaacaaaaaatgggaagaaaaaaacctctgggaagcacaaacagctgtggaactagttactcttattgttttaatctactatgtctaacaagactcgtgaatttatttccaagtccatagtgaactatgtgcaaattatgtggtgagaggctgcctacacatgctgaaagcagagaaaagtaaatgttgccagcctaacagtaaagtaagatagagggaaaaaatatgaagagtaaactgaagagctcaaaaagcatagcagcctgagagtaaagggggcaaaagttcctacaaagctggcggggtcttcatggcttcaccatgttacagcataacacaatagttaatcttcactatgtgaaaacttggttatcaagtaaattat

SEQ ID NO: 468164 - DNA, 482 bp, Homo sapiens
ctgggatgtaaagcaagtttttaaacatatgatgctgagaatcatctggtatacatcactaaagtatatatttctattcataaatycttactgtgtagaacaaaaaatgggaagaaaaaaacctctgggaagcacaaacagctgtggaactagttactcttattgttttaatctactatgtctaacaagactcgtgaatttatttccaagtccatagtgaactatgtgcaaattatgtggtgagaggctgcctacacatgctgaaagcagagaaaagtaaatgttgccagcctaacagtaaagtaagatagagggaaaaaatatgaagagtaaactgaagagctcaaaaagcatagcagcctgagagtaaagggggcaaaagttcctacaaagctggcggggtcttcatggcttcaccatgttacagcataacacaatagttaatcttcactatgtgaaaacttggttatcaagtaaattat

SEQ ID NO: 468165 - DNA, 519 bp, Homo sapiens
caccttcaaacaaaaagattaagggggaagtagctatcatgctaggactttggtaatgcctcaaagaagttggaaaagtcattacagaaatttatatagaaaactacctggctttctgaagttgacctgaaggtttacggtatttgttcctctggctatatcaaggctgcttgacatggttgagttcaatagtataagtttgacactagtcttaagtaagtgctacataagacaagctgatgaacagatttgatatcagccagggtgaattatattagagtaacagagggagtggggaataatacaaaaatttgccaagagccagggcattgtaaaaccaggaagtggatattcagagagaaaattctccttgggtttctcatattccatgcattctgggcaaaggacatgacaaactataataaaaatagaaaacayctacccacacactccttggaattgcttttcagggttgtaagaaactaaggacctccccctacactcaccaaagagaatttg

SEQ ID NO: 468166 - DNA, 481 bp, Homo sapiens
tgtttgttttttatagaaacaccagactactatataagataaaagactattacaaccaaaaagtagctgaagtgtgtacgtaggcatatatgtaagcatgtgcatacatgtgtttatgtgtgtatgtatgtgtatacgcacacatagttttagttaacagaataaaactgctttcatttttaaaaatttacatataaacatatgtatayatatttataaaagctgatagaatttagccaatgttagtgtgtacctttagctttggattccttgaaattatattttcaaaccaactataacataaaacatagagtatcttctcagctaggtattattttattatatttattgcagctatctttaaactttttacaagatacattatcatataatttgaccattatttatttgtaggcacacatttaaattcaaataatatagctacattgattatctattgtagattggaaaaacatacagt

SEQ ID NO: 468167 - DNA, 547 bp, Homo sapiens
gctgaagtgtgtacgtaggcatatatgtaagcatgtgcatacatgtgtttatgtgtgtatgtatgtgtatacgcacacatagttttagttaacagaataaaactgctttcatttttaaaaatttacatataaacatatgtatatatatttataaaagctgatagaatttagccaatgttagtgtgtacctttagctttggattccttgaaattatattttcaaaccaactataacataaracatagagtatcttctcagctaggtattattttattatatttattgcagctatctttaaactttttacaagatacattatcatataatttgaccattatttatttgtaggcacacatttaaattcaaataatatagctacattgattatctattgtagattggaaaaacatacagtaaacattggaaacacaattaaataattcacaaagaaaatcaaattggtaattattccagattgagtctgatttcttgattacattttatttactaagaataatgcttctatacttaaatttgtatttttaa

SEQ ID NO: 468168 - DNA, 481 bp, Homo sapiens
tgtttgttttttatagaaacaccagactactatataagataaaagactattacaaccaaaaagtagctgaagtgtgtacgtaggcatatatgtaagcatgtgcatacatgtgtttatgtgtgtatgtatgtgtatacgcacacatagttttagttaacagaataaaactgctttcatttttaaaaatttacatataaacatatgtatatatatttataaaagctgatagaatttagccaatgttagtgtgtacctttagctttggattccttgaaattatattttcaaaccaactataacataaaacatagagtatcttctcagctaggtattattttattatatttmttgcagctatctttaaactttttacaagatacattatcatataatttgaccattatttatttgtaggcacacatttaaattcaaataatatagctacattgattatctattgtagattggaaaaacatacagt

SEQ ID NO: 468169 - DNA, 526 bp, Homo sapiens
agtgtataattccatttacatgaatttttaaaattatagtataaataagaacctaggaagttaaattgagagttttagaaaagcataatgtatttttagaatttttaaaaccagttaatgcttatgtaaacctgaagtagtataggtgtagtagtggtattgtaagtagttctgaggtttgtagcagtaaaagcttcctcaatattaacagttccagtgatctatccattaccatgcctcactaacttttttaaattttctgtagagatggggtcttgctttgttgyctataggtcttgaactcctggcctcaagcaatcctcctgcctctgtctcctaaagcactgggattacaggtgtaagcctttgcactcagaccattttcaagagattcatgtcttacaatgcctatattaattaatattcactcttaatttctgaaattaatttatattttataaaatataaaattttatcattttaaaagattgatatcagaaatagccttaattattatttttaaatt

SEQ ID NO: 468170 - DNA, 526 bp, Homo sapiens
agtgtataattccatttacatgaatttttaaaattatagtataaataagaacctaggaagttaaattgagagttttagaaaagcataatgtatttttagaatttttaaaaccagttaatgcttatgtaaacctgaagtagtataggtgtagtagtggtattgtaagtagttctgaggtttgtagcagtaaaagcttcctcaatattaacagttccagtgatctatccattaccatgcctcactaacttttttaaattttctgtagagatggggtcttgctttgttgtctataggtcttgaactcctggcctcaagcaatcctmctgcctctgtctcctaaagcactgggattacaggtgtaagcctttgcactcagaccattttcaagagattcatgtcttacaatgcctatattaattaatattcactcttaatttctgaaattaatttatattttataaaatataaaattttatcattttaaaagattgatatcagaaatagccttaattattatttttaaatt

SEQ ID NO: 468171 - DNA, 586 bp, Homo sapiens
gatcttatgagactcattcactatcatgagaacagcacaggaaagacccaccccacaattcaatcacctcccatgacacatgggaattgtggaagttacaattcaagatgagacacagccaaaccatatcaatctgtattatataactttttaaatatcaattataaaaaatttagaatattttaagccaagaatataagaaaagaatataaaaattggccttattcctataaattctttgaaagttaaataaaatataaataaaataacactgtaaactatttgcattgctaagataaatttttataggatggcagaataataaacattatctttgggagaatacagtaggttaatttcaacaaattcccatattttctatagtaaaactctttagaaacaaatttttttatcatcaaaaaacaatttactacttgaatgggggaaaaktataaggtcagctattacttagttacattgtcctttaattttgagaataataacaggtattattagaaaccactttctttatccttgttgagaagagaacacacattttctttgacatctctgtcttcagtgatga

SEQ ID NO: 468172 - DNA, 586 bp, Homo sapiens
gatcttatgagactcattcactatcatgagaacagcacaggaaagacccaccccacaattcaatcacctcccatgacacatgggaattgtggaagttacaattcaagatgagacacagccaaaccatatcaatctgtattatataactttttaaatatcaattataaaaaatttagaatattttaagccaagaatataagaaaagaatataaaaattggccttattcctataaattctttgaaagttaaataaaatataaataaaataacactgtaaactatttgcattgctaagataaatttttataggatggcagaataataaacattatctttgggagaatacagtaggttaatttcaacaaattcccatattttctatagtaaaactctttagaaacaaatttttttatcatcaaaaaacaatttactacttgaatgggggaaaatyataaggtcagctattacttagttacattgtcctttaattttgagaataataacaggtattattagaaaccactttctttatccttgttgagaagagaacacacattttctttgacatctctgtcttcagtgatga

SEQ ID NO: 468173 - DNA, 496 bp, Homo sapiens
cgtcctttgaaatatactgagacacatttgatggcccaatttatggtctattttggtgaataaagtacatacatgtaaacataaaaaataaagtacataaacataaatgtwcacgggaacataatgtgtattctgtaattgttcagtaatgtttgataaaatgccaattaggaggccaggtgtggtggttcacgcctgtaatcctagcagtttgggaggctatggtgggcagataacctgagctcaggaattcgagaccagcctgggcaacatggcaaaaccccatctctactgaaaatacaaaaaaattagctgggctggtggtgcactcttatagtcccagctactcgggaggctgaggcaggagaatcacttgaacccaggaggcggaggttgcagtaagctgagatcgcaccactgcagtccagcctgggtgacagagcaagactctgtctccaaaaaacaaaaacaaaaaaaggtcaattaggttctgttt

SEQ ID NO: 468174 - DNA, 526 bp, Homo sapiens
agcctcatgtggattacacggaaaatgtactaagatatttaaggtcctgagcctttcagctcaccaagggcaagacctktttctgttagtcaagaatgactgctagtgtgccagcccttacaccggaactcccagccttccccctttgacactcatcccaggaagaccaatggggaaatgagaaaggggcaaagtgtgcatcagaaggatttttcaagtttcattcaatatttacaggtgtagacccttgactctaactcagcatatcatcacctaacagcaatgggagcttgaaaacaaagacttaattctgtgcacccatgagccaaactaaagttaggggaagaagaaagaaggcaaagttaacaatgagataggcaataatattttctggtgcaccatctaaacaatagatgatatgctggaataaacctctcattaggtaatgaaggcatttttctccccacaggaaaaaacagtgaaggctgcaatgcactactagaaatgggaaaacagcctggaagca

SEQ ID NO: 468175 - DNA, 526 bp, Homo sapiens
agcctcatgtggattacacggaaaatgtactaagatatttaaggtcctgagcctttcagctcaccaagggcaagacctgkttctgttagtcaagaatgactgctagtgtgccagcccttacaccggaactcccagccttccccctttgacactcatcccaggaagaccaatggggaaatgagaaaggggcaaagtgtgcatcagaaggatttttcaagtttcattcaatatttacaggtgtagacccttgactctaactcagcatatcatcacctaacagcaatgggagcttgaaaacaaagacttaattctgtgcacccatgagccaaactaaagttaggggaagaagaaagaaggcaaagttaacaatgagataggcaataatattttctggtgcaccatctaaacaatagatgatatgctggaataaacctctcattaggtaatgaaggcatttttctccccacaggaaaaaacagtgaaggctgcaatgcactactagaaatgggaaaacagcctggaagca

SEQ ID NO: 468176 - DNA, 526 bp, Homo sapiens
agcctcatgtggattacacggaaaatgtactaagatatttaaggtcctgagcctttcagctcaccaagggcaagacctgtttctgttagtcaagaatgactgctagtgtgccagcccttacaccggaactcccagccttccccctttgacactcatcccaggaagaccaatggggaaatgagaaaggggcaaagtgtgcatcagaaggatttttcaagtttmattcaatatttacaggtgtagacccttgactctaactcagcatatcatcacctaacagcaatgggagcttgaaaacaaagacttaattctgtgcacccatgagccaaactaaagttaggggaagaagaaagaaggcaaagttaacaatgagataggcaataatattttctggtgcaccatctaaacaatagatgatatgctggaataaacctctcattaggtaatgaaggcatttttctccccacaggaaaaaacagtgaaggctgcaatgcactactagaaatgggaaaacagcctggaagca

SEQ ID NO: 468177 - DNA, 526 bp, Homo sapiens
agcctcatgtggattacacggaaaatgtactaagatatttaaggtcctgagcctttcagctcaccaagggcaagacctgtttctgttagtcaagaatgactgctagtgtgccagcccttacaccggaactcccagccttccccctttgacactcatcccaggaagaccaatggggaaatgagaaaggggcaaagtgtgcatcagaaggatttttcaagtttcattcaatatttacaggtgtagacccttgactctaactcagcatatcatcacctaacagcaatgggagcttgaaaacaaagacttaattctgtgcacccatgagccaaactaaagttaggggaagaagaaagaaggcaaagttaacaatgagataggcaataatattttctggtgcaccatctawacaatagatgatatgctggaataaacctctcattaggtaatgaaggcatttttctccccacaggaaaaaacagtgaaggctgcaatgcactactagaaatgggaaaacagcctggaagca

SEQ ID NO: 468178 - DNA, 632 bp, Homo sapiens
tttaaatttaaactgtaaatttgttattaggcaaatttaattcatttatagtcactgttacaaatgtcccatttgtagaatttaaacgttagagttatcaaataatctttatttgtgtgatatttcctcttcattcacagtccactttttgggttaactgcctatttttgtaaatctatttatcaaaattattttgtattcttgaacccacctcccgggttcaagcaattctctgcctcagcctcccgagtagctgggattacaggcacctgccaccgcacctggctaatttttgtatttttagtaggaatggggttttaccatcttggccaggctggtcttgaactcctgacctagtgatccacccaccttggcctcccaaagtgctgggattataggcgtgagccaccatgcccggtctattttgtgttctttaggccacagaccctccctgtgtgttgaaacctacaaattccttctcagaacactgttttgaaaygcacaaaaaatacatgtatcttgtctactatttgttaatgttaacctatcttcattgttttggatttctgcacatcttgtgtgattattgaaggtctgctcctcttcctatttgagattccttatttgttgcc

SEQ ID NO: 468179 - DNA, 502 bp, Homo sapiens
caagtgaacatatggatttattttgttaaccccaacatctaacctagcacagtgctttgcacaagttaggtactcaataaatattttcttgaatttgttgaatgaatgaacttttcctcattctgatcactccttgacttcaagctcagcatttactacaaatttaacttaaaggcttgtacttaatgggatcgttttargaccatttcatgagtatgtattttgagtggctaacacaatcatagagtctttaacttccttataatgcctatgccaatgctttaaacattttagaggttcaatatatgataaccaactaacaagttacaatccttagaccaaatattatctcccatagaggtgaaagaccagaccaggcattgctcttagcatacccactacctggtcaacaggctaagcttaagcataaaactattattcacacaacttggtaagcatgcctctaaactgtaagctatagtttaataatttagtataagct

SEQ ID NO: 468180 - DNA, 305 bp, Homo sapiens
actcttctgaagatcactcttgtcactttagtacctgaattctgtcttaccctccttggcttcttggcagcccttgagccttggttaaaagcatcagttttttattttttatttttatttttattttaagttccgggatacatgtgcagaatgtgcaggtttgttacataggtatrcatgtgccatggtggtttgctacactgtcatctaggttttaagccctgcatgcattaggtatttgtcctaaaaatcatcagttcttaactctctccttccttggctttcagaaggttagattttttgtt

SEQ ID NO: 468181 - DNA, 651 bp, Homo sapiens
gttatgctcccaattttggacccagaaacaacctcattttccaaagagtttggctacagccccatttggccttgagacaactaccaaaaccatctgctaagggatctgggaagaatcacacacgctagttccttgagagacaggcctgtcttcttgctgacatctgtctctgcagtggacctgaaagttaccctgtaaataggctacagccctcctgagctgtggtcccagctttgtactcgttgcgcatagaccaagaaggagatttgcctacctgatgcaccaggacgggcttgctggcctctgtcctatagtagatccygaaatgaccctctcttgccccagccaccctgccacatccccagagttaattttcttatgcagggactactatcctggccagcttgccagcctgtcccagagcagttcctgaagaggccttgaatctcagctctggcccctctgagctgaggtctgggagtaactctgtccttatgctggaagtctcacacattggtgtcactgagtcaggcttgccaacatcgatcccatagcagattctgaaataactcagaagcttgattgtagcccctcctggctgtgttctggaaacagctcttccaagtacagctccctctgggagacaagccc

SEQ ID NO: 468182 - DNA, 651 bp, Homo sapiens
gttatgctcccaattttggacccagaaacaacctcattttccaaagagtttggctacagccccatttggccttgagacaactaccaaaaccatctgctaagggatctgggaagaatcacacacgctagttccttgagagacaggcctgtcttcttgctgacatctgtctctgcagtggacctgaaagttaccctgtaaataggctacagccctcctgagctgtggtcccagctttgtactcgttgcgcatagaccaagaaggagatttgcctacctgatgcaccaggacgggcttgctggcctctgtcctatagtagatcctgaaatgaccctctcttgccccagccaccctgccacatccccagagttaattttcttatgcagggactactatcctggccagcttgccagcctgtcccagagcagttcctgaagaggccttgaatctcagctctggcmcctctgagctgaggtctgggagtaactctgtccttatgctggaagtctcacacattggtgtcactgagtcaggcttgccaacatcgatcccatagcagattctgaaataactcagaagcttgattgtagcccctcctggctgtgttctggaaacagctcttccaagtacagctccctctgggagacaagccc

SEQ ID NO: 468183 - DNA, 528 bp, Homo sapiens
agaaaaaaaaggagatgcaagaaacaattctcagatggttggaatagtggcacgaggagaaagcttattacctcttgccttcttagtcccattcacaacaatgtttaccacaggccaatctaacaccaaacaagaggttcctactaaaattactcaccaaggtagataaatcaagagtgaagaggattattccctttcaaagccgacaagtggcatcatcactgccctccctgatcccctcacaaatcctaccaacttggggtaagacaaaattcaattrtaatctaaaactatattatgcttttaggctttttgttcgttttgcttctctctctctgtgtatatgtgtgtgtgtgtaaaagaaagcttaaatgtatgtgtgtgtgtgtgtgtaaaagaaagcttaaatgtccactggtgggtaaatggttatattatacttcatttgtttacattaagaaagtgaggtatgtctttacgtgctgacaccattatatattgttaaagaaagaaatataagtggtagta

SEQ ID NO: 468184 - DNA, 631 bp, Homo sapiens
ctttctctttgctaattaattgcatatctgtcatttaaggtcccactcaagtctcatgtcttccatgaagtctctttgcatggagcttgattgttttctaagtaatgcctcttaattctccctctccactgcttcagaatccaactgatacgttttctcctctggttcttctgtgttactcatttaggctacagggcctgaactatccacttcctccgctaaatattctcttgattctaccctcacttgatttattttctctgatttcttctcatacttayatttatattttataatatgcctatttacttattaactatatctataccttggtatttccttgagagtaggctatatctcatagcttttcaacctgtacaaggagaaaagaaggtgcacaaaacatactaagcaattaaacaaggaagaaaaggaaaagagaaaaaagagtacgaggaaaaaggacactttttagagattccagaaattgaaatatctctatcatcaatactgagtctcattattagtctgtcacttctaacttaacgtataagaaaaaatgaaaatggtgttacttgattcttagataaagcctgagttaaatgtgcattaagccatgttcaaatttact

SEQ ID NO: 468185 - DNA, 557 bp, Homo sapiens
ctttaaggacattaactcttagatttgcccttttgaggctattttctggatcctgcagacatgtttcatttgttttattctttatttttttgtctcctttcactgtgtcttttcaaagagtcagtcttcaaacttgctaattcttctgtttgaccaattcatctgttaaagaactctgatgcattcttcagtatgtcaattccatttttcaactttagaatttctgcttaattcttttttactatttcaatgtctttgttaaatttacctgatagaatgctgaattccttctctttgttcccttaaatttcactgagtttcckcaacacagctattttgaattcactctctatgaaaggtcaaatacctctgttgcttcaggatttgtccctagtgccttacttagttctttggcgaggtcatgttttcctgggtgatgtcgacggtactagatgtttttcagtgcctgggcattgaaaggttagccactgacttggcttattcatagccattctccttgagaaggctttctagatatttccaaggacttgggtaaa

SEQ ID NO: 468186 - DNA, 596 bp, Homo sapiens
caccccagtgtacactcctccaagtgtgcaggctggtcagagtttctttggggacccctttatacttggctgtctyactggtgctcagaaaaatgcacagtggtttatatttgctcagcaaatatttttaaataaagtgtggttttttttgtatgatagcagaacattcacaatgacacgatgagcaggaaaaaaataaattatttcatcctcattactatatgagcattatgttggtgctagaaaaaataaaatcaatgaaacatggtaaaccttgacagaggtttacagtcctgggaaaaaaaaggcaaagctgaacgtacagatacaaggtttattggctcttaaaacttgagagtgggaggttttggcagagagtaacggttcagcttcatgggaatttttgcttttaatacatactctgttaccttgctctacatcatctaaacaggtatcaactgcacttgtattttgtagtttgatatctaatgcataagtctgatatgagcaccttttcccatttgtaggattcaggctcagtacttatgcatcatcaaggtgcatcacctccatctgtaacagctggcaacattaag

SEQ ID NO: 468187 - DNA, 636 bp, Homo sapiens
catcaaacataatggcagaatcagacttgtgtagatattaaaattttgtgaaagaaaatattaaatgtttgatatgtccaaagaaataagagagtacatcaaaatatgtataagaaataaatgatttcaaaaagtctacagatttggaaaaaaaattaaccttctagaaatgaagacaaactataatagaattcaggwactcagttgaagtattaaagaggaagtttgacaaagtcaaaaataattagtaaaccagtatatatagaaaaaagctaattctgaatatagcaaagagaaatgaaatttaaaatattaaagagaaataacgaattccaaatggtagaataaaaatatatgaaattcaaactgggtttccagatgagagaaaggaaaggcacaacacttgaagagatatttgctgattgtttaccacaattgatgatacacataaatatgtagattcaagaagtctcgtagataccaaccaatcaaaataaataaatatttccacatccagattgcagtataactacacaccaccaaagtcaatgataaagtcacgttatctacaaaaagggctataaatcttctaaaaataagaaaaaaattattagagaagcattcatagcatgtgag

SEQ ID NO: 468188 - DNA, 546 bp, Homo sapiens
gaagtctcgtagataccaaccaatcaaaataaataaatatttccacatccagattgcagtataactacacaccaccaaagtcaatgataaagtcacgttatctacaaaaagggctataaatcttctaaaaataagaaaaaaattattagagaagcattcatagcatgtgagaaacatctgggctgtaagcatgtagaagtataatgcaaatacctggtgaaatagttttccaggcagataaaatgtaatgtgcaaaagtccttggaagggaatccattaaagaatagcaaggtagtgtgactggaatccagctgaggagaatttggagagktataaaatgaggtctgtgccctagctagaggccatgtcactcactctgttgtcatctagagtaagtactttggtttttatgcaaaaaaaaaaaaaatgagaaatgttcatagagctgagagcagttataccattacagatttttatttcggtatgtttatgtgagttgtttaagctactttaactgctgtactaagtaggccccagtaatagatt

SEQ ID NO: 468189 - DNA, 592 bp, Homo sapiens
gaaacaattattgagacaactgagacacaaagaggtaaagtaattttctaaatgttgaagtttaagtgaaattatttagaaaaactacttatttaaaattagaaacagaactttggacagattaaaagttgccaacattgatttcacatgtatctcactctgtgttaggaattcatttctaaaacacctctcaagttgaattacattttcaatagatgaagacatgtaaaattttggacgtattaagttgtgtattttacatatctttatgtaaaatttgtttgaaggaatttccataaaatgttggaaaacaaaaaatgatagtacaaccaagaatcgaaatataaatagacatgatgacaaaagaaactgtgtttagaaaaatctcagtttcctgaaatgtatcattttcaacatgatatcacaaaaatcccaaatagagatttttaatttaaaaatrcaccctcttcattataatttattttatgatatgcaaaaaacagttttgcctgagttttcaaaaattgctaagatatctatttccttatcaccacatttaggaagtcactctaactgaaagaagcaagaagtg

SEQ ID NO: 468190 - DNA, 594 bp, Homo sapiens
cctacaccctgggccaataaaatcagaatctctggggggagggggttataatttataaatcatttttttcctaaatgattccaaggatgaactaaatttgagatccactggtccaattgcagtctattcttaaacctataatgactgccagcaatatttttatatcttatcaacgaccacattatgtgagtcactcttaactctccttttatgttatggaagcctgcctgataaataagattgtaggaattatttaatagtgagatacacataagttcaagyaattctcctgtctctgcctcctgagtagctgggattacaggcatgtgccaccacgcccagctaatttttgcatttttagtagagacgaggtttcaccatgttggtcaggctggtctggaattcctgacctcatgatccacccaccacagcctctcaaactgctaggattacaggcatgagccaccacacccggccaccagctacctattatgactacatgtgaagaagcagcaaagctgtaagttcagatcatagtatctaagccattcttttctagcagtctatatcatttctatttaaaatgtactcatt

SEQ ID NO: 468191 - DNA, 622 bp, Homo sapiens
catttaagtctttaatccattgtgagttgacttttgtatatagtacaaggaaggaatccagtttcaatctcttgcatatgactagccagatatatttgcaccatttattgaatattgcttgtgtttgtcattttgttgaaggtcaggtggttgtagatatgcagttttatttctgggctctttattctgtttcattagtttatgcatctgtttttgtaccagtaccatgctcttggttactgtagccctgtagtatagttgggtagtgtgatgcctccagctttgttctttttggttaggattgcctagggctatttcaactcttttttggctccatatgaattttaaattttaagtagtttttttctarttctgtgaagaatgccattggtaatatgatagaagtaacattgaatgtgtaaattgctttaggcagtatggccattttaacaatgttgattcttcctatccgtgagcatggtatgttttccatttgcttatgtcaatctgatttctttgagcagtgtgttgtagttttccttgtaaaaatatttcatctccccagttaactgtatttttaggtattttattctttttgtggcaattgtgaatgagattgtgt

SEQ ID NO: 468192 - DNA, 492 bp, Homo sapiens
ctgcaatccctggtcactccagataacaggaagcttaaatacttccatatgtgctatatcattgataaaactatgatgcttctctgtaaataatttgggaaatattcttacctttataaaatttttccaaacaaaatttattttggagagaaaaagataattttatgtacttcacaaatttgattttrtaaatagtaaccagttgttacaggccatagtcattgaaggtctgccttatgttaaagccataatactttcaatatcattaatcaactgtaaccccaggtgaaaaatggatttaacattttctcaaatatactaaaggaactaattaatatcggggcttatgctacatagacatgaatgctttggttgagtagtgatggatatgttggtaaaaaattgaatcttgttcagataaaattttgcttgagaactcttgcttatgaggtctcagtagataaatttttctatttactccactcagcccta

SEQ ID NO: 468193 - DNA, 591 bp, Homo sapiens
aactggttacaggtatggcagaggcagaatggtctagaacaaaggcacagcagtcaaagtcttcgagatatgagagaacaggacctgcttgaggaggaacaagggaacagccaaagcttgggtagagtgagtgaacaatagagaagtcaaagagctaacttctgtgcaggccgtgttggatttgatcataagacttgagactatcataagaatttcacattttctgtgtgaaatggggtagaatgaaagagaaacagaacaaatattctaacaacctatagtcacagagctatttaaactttttttggattttttacatttattttatgcaatgccttgtattcaatagcattgaatgttaacttcttatamaaagcatttttgaaataacttgaaatttagaatattttgtaatattgctccagataagtaatatattttttaaaccaaatcaggtcttcaaagaatgaataggatctagtatttgatagcacaacagggtgactacaatcaacaataatttattgtatattttaaaataactaaaatagtggaatcaaaatgttcatggtacaaagaaatgacaaacac

SEQ ID NO: 468194 - DNA, 604 bp, Homo sapiens
ctctctctgggtgtaaagagtgtgaaaaataataagaaaagattattatgaatgtaagaaaaggaaatggtagcacraatttgatatagtgcatctgtttttgctcctgaactaattttaagcaaggtgtcacaaaatcagattcctgcctgcaggttatatgaatatatgatcaatctgagtgtaataaagcaataagaattggtgtcacaaataggaaattgcttgctctgtcttagggctaaacccattcaatttgtgtttgtttttaaacactgccttaataaaatgactccagattacatttgccctccaaggcaaacagtttattaccccctttgagaaggaaagaactttctatatttttatccacattgtgtttcaaagatattttaccatcaatatttgtggacaggacaattatagtgctccaaggtttttcatgaagtggtaaaatattaaggatacatgttttagtctaaagtggtagaactaaaagctaatagaagaattatattgaaataaaagaacagatggtataactagggaaaaattaagaaaaataggggacagggagaaggaaaacttattcacacttgaggct

SEQ ID NO: 468195 - DNA, 287 bp, Homo sapiens
tgttattatcatgagctagtgatacaggaagagaagcattgctgatctgtgaaactggacaatacatttaatctgtcttggtatttaaaccacagtaggcaccatgtttaaytgggtttatgaaatgacatcttgttcagggcaaggatcagtattgaagaggagctatatttaatgctaaattaagtgcccaagttaaagctaaattgttacacacacaagtcagtaatttcagaactatgacttgcaaataaatcacaaattgacctctttgagcacactgcagg

SEQ ID NO: 468196 - DNA, 602 bp, Homo sapiens
atctcttacatctggctgttcatccttatctttttataataaatgaacaaacataagtaaattgtttctctgagttctgtgagcaactctataataattgaacctgaggagggatttatgggaaccacccatttataggcggttggtcagaatcacaggtaaaacaacttgggactttcccttggcacttcagctgaagtggagaggggcagtttcataatactgagctcttaacatgtggagtctatactcattcgagttaatgtcagaattaaattgaattataggacatccagatggtattgagaattcgtcaatgtgcagggaaaaaaaaatacacatctggtcataaaagtgctctgtgttgagcatgagagtagaaraagaagtttggtttttcccaccttttagagtaatgtccttggttttataagtagataatcacattgtatgcacatggtcacaattttgactcttcctattatttataacttttctctttgtccctttgcattgatttggacatatcaattgtaatactgacaagtagtggtagtagcaggaaaacttgccctgttcctatttttattaagaaagtatca

SEQ ID NO: 468197 - DNA, 558 bp, Homo sapiens
gtgaacaatatttttctttaaggtgtactgtctagaattttcctgtatcatttctgctgttaagtcaataccaagatagactttgttatgtgaccacatttagatttggaaatacagttgttattccaggcagccacatatccaagtggaaaatatgagaaaataggtgatatcagataattggggagaacattcacatcacagtgagaaacaatgaaaggtgttatgataacccaaaggacagaagaacgggtgagactagattcctgatcttcagaatcaagcagcataaatgatacagaagaaaggcagtgtttagggaatgaggcaaggaattaaattgattccaattggggaattatcattattgaaaaaagaacagctgagctggactctaaagtgggtgtcagsatttgaggggaagaagagtttgagcattccagggagcggaaacagcatgttacagaatctgccttgagggacctgtatgtgcttcatgtgcctagttctgtaaccacacttactctcttttcagatgatttaatgaatcatcttagc

SEQ ID NO: 468198 - DNA, 635 bp, Homo sapiens
tgaatggtggttgaggtcctgatgaaccattgaaaaacagtggaacactttagtgtttgcacagagtaaaatcttcatgcctaggaaattttgataaagaaagccctttagctattatttttttctagcatttaaaaaaatctgtgctccttagagctctcacaagttactataggaggtaaggagaagtccaataggacagagttccaggtacccctgcttcactttcaatcaatatagctcactttaatcaacttcccccacttgaggaattctcctgagatatagttgtaagaaagagcttctagatattctgacaccaccccccccccaccgcccctcacacacaaacacacatacaaagattgaaaattctggatggagtctttttcatttaaaagatgaaaaaactgaggccccaaagagataagtaattttccaaagttatccaactccacttccattggcaaagtgaggattaaaatctaggttctgattcccctaccttcaccatctcatcatgcagcatcttcctgtgactgggaagttttaagattcaacagtgccacttctggttttgttttattttgtttaggaagacatggtattrtatatgaacttaattataggattga

SEQ ID NO: 468199 - DNA, 581 bp, Homo sapiens
atcttgtccttttgatgcctacttagactgccattgtacagatgttacaatttgttttactrcttaattgatttacatttagcttaatttcaatggcaaacaatacctcttgcagaaccatttatgtgtactttttcagtatttatgtagatttctactaatggcatagctgaatcaaataaatgcctgtcttaaatgttgagataatttttttccaatttatttcataaagattttacaatttaaacatccactaacagttaaggagtatcctcaaattgaagtttaatacttccatacagtgaaaactttcattaacctgtgaaattagcctccatgtttccctaaacttaatactctgattagtgagataactcaaataaaagaagcataataattgaatatgagaaggtaatagcaatgcccttttgatttataggtggattttttaaggcataagtgtttagagtctctgaggtagttaattaacaaaaatcattgataacaatgatttgtaaacattgtttggaaaacaatgtctttaaaaaccaatacttaagattagagtgtattaggccatg

SEQ ID NO: 468200 - DNA, 464 bp, Homo sapiens
gaataaaatgaggtaatatattggaaatgcccagaatctggaacatawaagttgctagataaatgataatttattttcatttcctctaatagatccggtacttgttccctgtttctttcttttggtgctgagcacatgcctgggtgaatattactaagtttgtgcaataaaataggatagacctctggtaatgtccccgtcataccaaaccttaaattggtcccatcttctcttcacatttctcttgcttctttccaagacactggatatctcattttgagatgctttaatgactgtcttaaaactatgcttccagtgtaaagactcttcttaagattctacacataattatatattttatgttgcctgtctttattcttatctgccttacttggaaaacaaaatcatacatgagttattctttgtataaattttttataatataagccctacacttgtaatcc

SEQ ID NO: 468201 - DNA, 357 bp, Homo sapiens
gatcaacacatatctcatacaggagagctctggctggcatctggcaggtgtccctctggaacaaaccttcaagaggaaggggcaggcaggaatctttgctgttctgtagcctctgctggggatatccaggcaaacagtgtctgtagtggacctccagcaatctctaacaracctgcagaagaggggcttgactgttagaaggaaaactaacaaacagaaagcaataacattaacgtcaacaaaaaggacgcccgtgcaaaaaccccatccaaaggtcttcaacatcaaagatcaaaggtagataaatccatgaagatgaggaaaaatcagctcaaaaatgctgaaaattcctaaaac

SEQ ID NO: 468202 - DNA, 357 bp, Homo sapiens
gatcaacacatatctcatacaggagagctctggctggcatctggcaggtgtccctctggaacaaaccttcaagaggaaggggcaggcaggaatctttgctgttctgtagcctctgctggggatatccaggcaaacagtgtctgtagtggacctccagcaatctctaacagacctgcagaagaggggcttgactgttagaaggaaaactaacaaacagaaagcaataacattaacrtcaacaaaaaggacgcccgtgcaaaaaccccatccaaaggtcttcaacatcaaagatcaaaggtagataaatccatgaagatgaggaaaaatcagctcaaaaatgctgaaaattcctaaaac

SEQ ID NO: 468203 - DNA, 564 bp, Homo sapiens
caagaagtcctgactatcctaaatatatatgcacccaatacaggagcactcagattcataaagcaagttcctagagaccaacaaagaattagataaccacacaatgatagtgggaaacttcaacaccccgatgacactatcatacagataactgaggcagaaaactaacaaagatatttggtggtgtgagttggttgaaggtattaagaaaaataaagcaaagaaaaatacaatattatgaataaaaaaagatatttgggacttaaactgacacttgacaaaaataggcctaatagacatctayaaaactctccacccaaaaccaatagaatatacattcttctcatttgcacatggcacatactctaaaatcaactgcacaaatggccataaaacaatccttagcatattttttcaaaaatgaaaacataccaaacacaccctcgaatcacagcacaataagaatagaagtcagtacttggaaaattgctcaaaactatacaattatatggaaatgacacaatctgctcttgagtgactttgggtaaataaaattaaggcaga

SEQ ID NO: 468204 - DNA, 643 bp, Homo sapiens
tatgttattcctaactacattttattccaaaattcatttttggattaacatttgaaaaccaaccaattaagtactgaaatagaataatggggaaaattatatgaacctctcaatagatgaaaaattgataaaatccaatattaattctgattaataaataaaagattatgtctttgaaaaatgtcatagcaaaaattatatttaatggtgaaatgaaagctttcatctccaagtttgggaatgaaactagtatgcctgcatcatcctattgatatatactatgtatagtatcatcctatttaacattgtactaaaagtcctagctagagcaatacgttaggaaaaggaattaaaagcagagtaattggaaaagaagtaataaaactgttattactcacagaatgwtataacttttgtatgtggaaaatccaaaagaatgtatagctaaactattagaataaataaactaaacatgcttctggttataagtatacaaaaatcaattgtatttctatataacagcaataaacacttagaaaatgaaataagaaaagatgctatttacaaaagcataaaaaaatcagaaaaattttaggaataaatctaattaaagatatgaaatggctgtactcagaatattata

SEQ ID NO: 468205 - DNA, 590 bp, Homo sapiens
ctgggctgctgatgtgggtcaggttgtcacrattcaaggatcagccctttgagatgtgtgactgaggctgtaggagtgaaggggagttggaatttgtggttaaatgatttcctacaggagctgtagtcatcttttgggaggtgctgtttggggttagaatttttccaggttgaatattctcttgaattccatggcatagttgaagctgatattcctgcttagttagccatagagtggtggagcagtatctggctaaaacacttccacttgcagcttatatttgccaggacaatggtgatggaaaggaatcttgatcccaagcaaacaaaatgttcgaattaccattgatgccctcagatgctgctttctttatagccagtctctctttctctctctctctctctctctctccctctctctctctctgtgtgtgttgtgtgtgtgtgtgtgatagagacagaatgagagacagacagaaagacaaagagaaggaggtaaaggatgtagaaggaatgagtgtgagtgataataaggcttttccagataaaagcaggccattttatggcaatatggattgtctttcagttttt

SEQ ID NO: 468206 - DNA, 590 bp, Homo sapiens
ctgggctgctgatgtgggtcaggttgtcacaattcaaggatcagccctttgagatgtgtgactgaggctgtaggagtgaaggggagttggaatttgtggttaaatgatttcctacaggagctgtagtcatcttttgggaggtgctgtttggggttagaatttttccaggttgaatattctcttgaattccatggcatagttgaagctgatattcctgcttagttagccatagagtggtggagcagtatctggctaaaacacttccacttgcagcttatatttgccaggacaatggtgatggaaaggaatcttgatcccaagcaaacaaaatgttcraattaccattgatgccctcagatgctgctttctttatagccagtctctctttctctctctctctctctctctctccctctctctctctctgtgtgtgttgtgtgtgtgtgtgtgatagagacagaatgagagacagacagaaagacaaagagaaggaggtaaaggatgtagaaggaatgagtgtgagtgataataaggcttttccagataaaagcaggccattttatggcaatatggattgtctttcagttttt

SEQ ID NO: 468207 - DNA, 347 bp, Homo sapiens
tcaattacgtgaaccaatacattctccctttaatttaataagctttgagttgttctattacttgaagcagaattagaactgatataattgctatttactttttgctgtgttctgcattcataataaatataaaaaacatagcaagataaccaggggcatgttaatgcaagggtggtaatagagaaaggggaggaagaggaataacaagccctcccctcagttctttcatgtctcctcttttccttcggattaaagatcagatccctgaaccagtatyatcacattatacttttctaagttttattttgtttttaactgacatctagtaattgtgcatgtttatattt

SEQ ID NO: 468208 - DNA, 588 bp, Homo sapiens
ttttcttgaaatgttgacttacctgttcgtggatctttattcttccataaaaacttgaggttattgaacttctcaagaaattcaacacaaatattttgaagtatttgtgattgtgttgaatgtatagattaatatgaactgacatgtttataatattaagtcatcycccccaagatatggaatgtcactccatttattcagataatcttctatgtcatttattagatttaaaaattttctccatggaagtattatatgttgtcattattttctagttatttaacattttttgttgctgttctgaatgatatcttatttttaaatacattttgtaattggttattgttggagagaaaagtgcttttaatttttgtaacttgattgtttctgataaacttgctgaattatcttattagttgtaatactttgttgattaggtgcttttttctagctagagagtcatattatcttacctgcaaataatgtcatttgttttctttttttttttctaccaatgtatttatttctctttctttccttatagcatagggcagggcaccccactatggcaaacactaataatgatat

SEQ ID NO: 468209 - DNA, 462 bp, Homo sapiens
agtggccatgtctagtggtatctgctgtttgtccatgagtagttccgtgtctmtcatgaactgaggatcctgactctggatagtgagatccagcttgaccgtgagtgtgtcctgaatgtgtgtgtgagacccctgagggcccttcactgtcactgtactcactgtggccagatccccttcttccagttgtcctggaccctgtctgtatggtttgtccatgactagggtggccatgttcagtggtatctcctgtctgtccatgagtagtttggtgtctcttgtgaactgtggattctgactctccatgttgagacctggcttggctgtgtgtgtgtcctgaatgtgtatgtgagccccctgagtgcacttcactgtcactggactcactgtggccagatctccttcttccagttgtactggatcctgactgtgtggactgtccatgaccagattgagaatgtc

SEQ ID NO: 468210 - DNA, 584 bp, Homo sapiens
ctgagacagaattttaaagcatttttgcactgtcactccagcattatagttgagaactctgaaactcctccatagttcagaactccattattcagtcttttgtattctttgcatttaggtctctcttcctcttctacttgcttagcataatggataaaattatagtcagaaagacctaagttctaatctcaattttgcctcttactgcrtttcttgtacaattatctaatcttctcagcctcagtctcccaaattatagaatgggaacaataacacttacctaacaggtggcaattacttaacatatgaaattgcttagtacctgcctggcatataatacattcttagtacactatataattactgcaaacttattttgataaatatttcatacaatctatcacagcattttacacaaagaaagtacttgataatgtttgataaaaatgagttagaagccacttactagtggcttttaaaggtagaaatactacacctctgtcaaaagcattgcctagaaggtaagtcatggttctgaaaataaaccaccttttttgggatataattcacatatcataaatttc

SEQ ID NO: 468211 - DNA, 572 bp, Homo sapiens
aaaaaccaaacactgcatgttcgcactcataggtgggacttgaacaatgagaacacatggacacaggaaggggagcatcacacaccagggactgttgtggggtggggggagtggggagggatagcattaggagatatacctaatgctaaatgacgagttaatgggtgcagcacaccaacatggcacatgtatacatatgtaacraacctgcacattgtgtacatgtaacctaaaacttaaagtataataataataagaaaaatgaataaataaataaaaataaaaatacgttgtgcaaagtgaaaaaaaaaagaagctcaggaaaggtttttccttaccagctctccataaaagttgtcttcaaagacagttctttggctatgcagaaatcctaaattgcaaacccattttgattgttttattagggtactcccagctgagagatgttaaaggctggaggatactgacttctgttattatccaggtctattggaacatcctgtggctttactcagcaggtgagggtgcaatcatctcacaatctcctgactccactttgaagtcttagcctt

SEQ ID NO: 468212 - DNA, 560 bp, Homo sapiens
tgaaatgggaagaatataataatctttgtcttgcaggactattgtgaggatctaattaagtcatggatgtggaagagctttcgaaattgtaaagtgaaggggaaggtattgttgttgtctgggacatctccacgcatactggctacaagggcactgtggagaaaaaggagaaatcctctccctcaggggagctgtatccagtgaactcctacagctgtcagcctctaatcaatcctcttgggaagtccaaagtttgtgtgaaacctcagtggcatgtagtactaaagattactaactaatttacctttccttttggttttcttcctccaaatgtaggcttttaaaggaaacttgctcttttattccctttaaatctttccaactgacctccagaaagctgacataatagttttaagcagattatgccttgctgtcctaatatcaggcagtattatattggcattgtttaccagttttgagaatgtagcccaaacactttcattcaggcctcyccatgacaagtaacatatttgcgagattgctacctacagttgaggggt

SEQ ID NO: 468213 - DNA, 544 bp, Homo sapiens
cactccagagcctagttgcctcagtttttccagtatctgcagrcatcaccagtgaagactgcaaaacagcaaagataacagcctgctcctacctctgggaacctcatcccagggggctactgacctgttgcctgcctgaacacacctgtagaatgtggctggagtcactggttgggagttcttacccagtcaacaggaaggggatcagagacccacttaaagaagcaggctggctgcattttggccataaaaaagaatgagtacagggacatggatgaagctggaagccattattctcagcaaactaacacaggaacagaaaaccaaacactgtatgttctcactcataagtaggagttgaacaatgagaacacatgggcacagggaggggagcatcacacaccggggcctgtcagggggtggggggcaatgggagggagagcattaggacaaatacctaatgcatgtggggcttaaaacctagatgacaggttcataggtacagcaaaccaccatggcacatgtatacctatgtgacaaacct

SEQ ID NO: 468214 - DNA, 541 bp, Homo sapiens
agtaatatgtcattacagttttaatttgcatttacctgatgattattgatgctgagcacctttttacatacttgttggccatttgtatgtcctctttgaaaaatatctattcaggtcctctgatcattttttaatcagattttcttttttacttttgacttgtaggagttccttatatatttagacattaaccacttgtggaatgtttgacttgaaaatattttctctatttctggggtttgccttttcattttgttgttttgcagaaactttttagtttgatacagtcccacttgtttttttttgttgttgcctgtgttttcaccatcatatttaacaaatcattccaagaccaatgtcaaggagctttttctctatattttcttttagaagtttttgttcagaacttacatgtaagtttaatctgttctgagttaattttttcttatggtatatgctaagggtgaaattwcatccttttgagtctggatatgctgtttctcaacaccagttattgaaaagactatcttttaccaattgt

SEQ ID NO: 468215 - DNA, 621 bp, Homo sapiens
tttttgaggaacctccaaactattcttcatagtgattgtactaatttacatttccacccacagtgtacaagggttcccttttctccacatcttcaccaacatttgttatcgcctgtcttttgaagataatctacaatgagataytatctcatcccagttaaagtaggatgagataatatttcattgtggttttgattttcatttctctaatggtcagtgatgttgaactccttttcatatgcctgtttgccatttgtatgtctttttttgagaaatgtctattcaagtattttgtcattttggatcagattaccagatggtttcctatagagctgtttgagctccttatatattctggttattaatcccttgtcagatgggtagtttgcaaatatttcctcccattctgtggattgtccctttactttgttgtttatatcttttgctgtgcccaagttttttaacttgatgtaatcccatttgtttatttctgctttagtttcctatctttgtggggtattgcttaagaaatctttgccctgaccaatgtcctggagatttttcccaatgttttattgtagtagtttcatagtctgaagttttagatttgagtctgtaatc

SEQ ID NO: 468216 - DNA, 550 bp, Homo sapiens
gccatatttattgatttgcataggttgatccatcctcatatcacaaggatgaattacacttggtcatggcgtatgattctttttatatgctgtttaatttggtgtttagtattttgttgaggatttttgctctatgtttaccaggaatattggcttgtagttacattttcctttaamgtatcctaatttggctttagtatgagggtaatactggcctcataaaatgagataaaatgagattaaaaatgttacttcttcttgaaatttttggggagtttgagaagaattattgtttattctttttttaaatgcttgatagaactcacctgtaaatccatctggttctggggattttcttgttgggaggtttctgactagggctttgatctccctacttgctattggtctatacagatttttcacttcttcctgattcatttgtggtaagttgtatgtttctaggaatttatctgtttagtctaggttatctaatttgtggtatataatcgttcattatagcttaagatcatttgttttgtagggtatcagt

SEQ ID NO: 468217 - DNA, 550 bp, Homo sapiens
gccatatttattgatttgcataggttgatccatcctcatatcacaaggatgaattacacttggtcatggcgtatgattctttttatatgctgtttaatttggtgtttagtattttgttgaggatttttgctctatgtttaccaggaatattggcttgtagttacattttcctttaacgtatcctaatttggctttagtatgagggtaatactggcctcataaaatgagataaaatgagattaaaaatgttacttcytcttgaaatttttggggagtttgagaagaattattgtttattctttttttaaatgcttgatagaactcacctgtaaatccatctggttctggggattttcttgttgggaggtttctgactagggctttgatctccctacttgctattggtctatacagatttttcacttcttcctgattcatttgtggtaagttgtatgtttctaggaatttatctgtttagtctaggttatctaatttgtggtatataatcgttcattatagcttaagatcatttgttttgtagggtatcagt

SEQ ID NO: 468218 - DNA, 361 bp, Homo sapiens
cactttttatccactcccccaatctytgaaattttggtagagagtttaatcaatgtacatttaaaaaaatatggtaagtaaaaacttactttgccatttatttcttttcttcatgtcttataactgttttgtcccttattgctttcccttactaccattttctgtttagttctttttttttgtaatgacacatttttattttcttctaattgtcttttgtgtttattttatagatattatctctgtggttaccgtggaggttacataggacattaaaaatttacaagaatccactttaaattaataacaactgaacataaatcagatacagaatctctatttatatatatatctgttcctc

SEQ ID NO: 468219 - DNA, 361 bp, Homo sapiens
cactttttatccactcccccaatctctgaaattttggtagagagtttaatcaatgtacatttaaaaaaatatggtaagtaaaaacttactttgccatttatttcttttcttcatgtcttataactgktttgtcccttattgctttcccttactaccattttctgtttagttctttttttttgtaatgacacatttttattttcttctaattgtcttttgtgtttattttatagatattatctctgtggttaccgtggaggttacataggacattaaaaatttacaagaatccactttaaattaataacaactgaacataaatcagatacagaatctctatttatatatatatctgttcctc

SEQ ID NO: 468220 - DNA, 361 bp, Homo sapiens
cactttttatccactcccccaatctctgaaattttggtagagagtttaatcaatgtacatttaaaaaaatatggtaagtaaaaacttactttgccatttatttcttttcttcatgtcttataactgttttgtcccttattgctttcccttactaccattttctgtttagttctttttttttgtaatgacacatttttattttcttctaattgkcttttgtgtttattttatagatattatctctgtggttaccgtggaggttacataggacattaaaaatttacaagaatccactttaaattaataacaactgaacataaatcagatacagaatctctatttatatatatatctgttcctc

SEQ ID NO: 468221 - DNA, 542 bp, Homo sapiens
ctggctaacacagtgaaaccccatctctactaaaaatacaaaaaattagcctggcatgttggtgggcacctgtagtcccagctactcgggaggctgaggcaggagaatggcaagaacccgggaggtggagcttgcagtgagccaaatccagccactgcactccaacctgggtgacagagtgagactctgtctcaggaaaaaaaaaaaaaaaaagaaaaaaaagaaaagaaaattgttcttttttttttttttaaagaatgttgaatataggcacccaatctcttctggcttgtagggtttctgctgacaggtatcttgttagcctgatgagattctcttagtaggtgatctgtcccttctctcttgctgcatttaactttttttttttttttcacttcggtcttggaraatctgatgatcatgtgtctgttttttatatattttttttgtttctataggttattgggaaacaggtggtgtttggttacatgacaaatttctttagtggtgatttgtgagattttggtgcccccatcactcaa

SEQ ID NO: 468222 - DNA, 540 bp, Homo sapiens
ttcccttcactgagaaacattgttgaaatactgaaatacgtctttattcattggcaaatagccaataactttatatcacctctctccctccgtctctcacatcagtgctcctctgaagcctcccactcagcctctcaactctaagatccagcaaatatgaaggtcctatctggcatagcgagaggcccctagtatcctgattcagcaccaaggcaagagtacactctggttgggtgatacctgcacacaagyccggtcactcctgcaacaattgttcttgactttgattattttgctctctcttctgcagtttttaaaaatatactgataagttagaggaagggaaaatgtggggatgattgttggaggtactagtacaatatgtgctaccacttggtaattttagtgagtccttaggaaagtgttgggccaaaattttcgacaggtatcttaagaatataggtttcttagagcctctttatcctcagctgtagactggaggttatcattctggagaattaggaaaagtctcactcagta

SEQ ID NO: 468223 - DNA, 575 bp, Homo sapiens
gtgttgtattttactcaagaaaatagtcagttgccacttggcaggtgaagatacctataatggtgttctcagatccaatcagacataagctgagataacatgttctagttcaatcatgccatacattcatcttcatgtatctggggtggaaatgtgagtggtagtggggatgcttttgaggaagaaaacactatattactcctatcagtaggatgatattctaactgcaagggagtaacggctggagagctatatgttagagtcctctgcttgcaagcaagcaaacaacaataacaataaaacaaaacagaattttagacaaacccaaactctaaaaggaaattgttgaaaggattcacaaatcacaggaataaaatttttacttwtgtttcttctaagagtttcacttcctttatttaggtattttaacattttgaattaatttttgtatagactgtgaggtaccggtcaaaattcattcttttgcatgtggacatctagttgtctcaacaccgtattttaaaaatattaccttttcatcattgaattttcttggcacccttgtctaaaatctg

SEQ ID NO: 468224 - DNA, 575 bp, Homo sapiens
gtgttgtattttactcaagaaaatagtcagttgccacttggcaggtgaagatacctataatggtgttctcagatccaatcagacataagctgagataacatgttctagttcaatcatgccatacattcatcttcatgtatctggggtggaaatgtgagtggtagtggggatgcttttgaggaagaaaacactatattactcctatcagtaggatgatattctaactgcaagggagtaacggctggagagctatatgttagagtcctctgcttgcaagcaagcaaacaacaataacaataaaacaaaacagaattttagacaaacccaaactctaaaaggaaattgttgaaaggattcacaaatcacaggaataaaatttttacttatgtttcttctaagagtttcacttcctttatttaggtattttaacattttgaattaatttttgtatagactgtgaggtaccggtcaaaattcattcttttgcatgtggacatctagttgtctcaacaccrtattttaaaaatattaccttttcatcattgaattttcttggcacccttgtctaaaatctg

SEQ ID NO: 468225 - DNA, 574 bp, Homo sapiens
ctcttgagaagcagatgccaacacaatgcttcctgtacaacctgtagaaacatcggccaattaaactaattttcttataaactatatagtctcaggtatttctttatggcaatgcaagaatggccaaatatggaaaacttatactgaggagatgggtgaggctataaagrtacctgaaaatgtgaaagtggccttggaactaggtaacaggcagaagttggaagagtttggaggtctcagaagaaagtttggaatttcatagacactggttaaatggttgtgaccaaaattctgatattgatatggacagtgaagtccaggctgatgaggtctcagatgtaaatgaggaattcattgggaattggagcaaaagtgacacatattatgccttagcaaagagcttacctgctttctgttcatgctgtatggatatgtggaagtttgaacatcggagtgatgatttaagatatctgacagaagaaatttctaagcagcaatgcattcaagatgtggcctggctgctttgaatgacctaactcacatgtggaagcaaaggaatgagttaaagttggag

SEQ ID NO: 468226 - DNA, 565 bp, Homo sapiens
ttatagcaatgcaaaacagactagtacatgtgtcctcaaagtttatctatgtttttacattgaaagattatcttctttttaaatgctagtaatgtatgtatacatgacattattttcttatccattcatctgtcaatgccatttagattttcccacctgttagctattattaatcatgctaaaattatatggaagtgctaatatctttttgagaccttgatttcaattattgggacaagtatatrgaaatggattttctgtatcacctggtagctccatttttaattttttgagtagcatccatactcttttctgtagaggcagtaccattttacattctgacctatcagtatacaaacaaatattccaatttcttcacatcctagccaacacttcttattgtttgttgtggttttgatttgcatttctttatgatagtgatattgagcatctttttacattggttggccatttgtatgtcttctttgaagaaatgtctattcaagtccttggtccctaggcaaaaactgcacagacatttcttcaaagaaaacagacatatgtt

SEQ ID NO: 468227 - DNA, 529 bp, Homo sapiens
ttatacattaagaagaaaaaatcaaacttaagtttgattatgtttttaagtagataaaatacatcaaacttgttaagatgaaaaaaacaatttctggcaggaaatatacatttaataggattattatacatcagaggagattactacaaaaatgaagattaatgaacttgaagacacagtagaaactgcccaggaaaggagagaaaagactgaaaataagagcaaatcatcagtgaactgtggtccaatttcaagtgcactattttatgtaaaattatcatcactgaaataggaaaggggacaaaataytggaataataaatgttttcaaatgtggtaaaaataaaaatctttgtatctaagaaacataacaattacaaatgaaaataaatagagaaagctataccaaggtccattacaattcaattaaaaaaaaaagaaaagtaaagtaaaaaagagaaagctttaaaagcagccatagagtgaaactacgtctctactaaaaatacaaaaattagccaggcatagtg

SEQ ID NO: 468228 - DNA, 563 bp, Homo sapiens
aactgtaactaagtgattgatggaaaggtttaaagtgagtagatattaacttagaagcaagcaagtgaaataaaagcccttgtttccataaacagaatgagaatagcatacgatattttatatgagagttttttctctgttatagagggccacctctattattggtgcttaggtctcacttatacttaaagacacgtgtatgtgagccaaaggcaaacctaaaatacaactgttgtgtgataaagctcactkaagcacatcttcagtttaagaaaataaatgaataaataaataaataaatatccatgaccttagctatggcttttagaactgttgtttttactgtgaggctgaccgccaagagtcatgactaggaattcatggtctaaaaacctcaaaatgcaattggctaaattaacaaactcagtattgtaataaaggataacccaatgttgcttctcaacaaggccgaaaatagtcattaagtggaaaccatatgtgattgatttttaaaaatcagagacacgtctttaagtttactatctaaaatccaaaccaatgcc

SEQ ID NO: 468229 - DNA, 520 bp, Homo sapiens
cagcctccggccagttttacaacttggaaatgctttttctcagggcccctagtaaaatctctttgaaatgtaatcatcataaaaaatagtgcccctatatccttgtctttgtgggaagatagaaacctaacttccattaatgycaattaataaatacagacgacctattcatattgaccaatcccccaaccccactacttcctatagttttccactagatcacccaagcccctaaaatctctcctgtcttttgttccagtagagtcgagttaaatctgtttcctctattgcaatagtctcgaatagtcttcactgcctatttgtttgggacactttttatattacatactttagagaattattgtgagaattaaatgagttaatatatgtaaacttttaaataatgccttacatctaatactatgtaagttttacctagaaaagtataatgctatctttacttattaacttcctcatcattctttctatatgcatattcaaaacaatgttaaactaaatt

SEQ ID NO: 468230 - DNA, 520 bp, Homo sapiens
cagcctccggccagttttacaacttggaaatgctttttctcagggcccctagtaaaatctctttgaaatgtaatcatcataaaaaatagtgcccctatatccttgtctttgtgggaagatagaaacctaacttccattaatgtcaattaataaatacagacgacctattcatattgaccaatcccccaaccccactacttcctatagttttccactagatcacccaagcccctaaaatctctcctgtcttttgttccagtagagtcgagttaaatctrtttcctctattgcaatagtctcgaatagtcttcactgcctatttgtttgggacactttttatattacatactttagagaattattgtgagaattaaatgagttaatatatgtaaacttttaaataatgccttacatctaatactatgtaagttttacctagaaaagtataatgctatctttacttattaacttcctcatcattctttctatatgcatattcaaaacaatgttaaactaaatt

SEQ ID NO: 468231 - DNA, 553 bp, Homo sapiens
agtcatgcagctccctcctacctgtcttggacacactctgtcagaacccagctgccatgatgcaggaagccccagccccacagagaggtcatgggtaggtgctctagatgacaaatctcagctgagccaaccttcaagtgatcccagcccaggtgccaaacctttragcgaagaaacctgcagatgattccagttcccagtagttcaagttacccccagtcatttaagtcttcccagctaaggctccagacaacaggaaaaaaaaaaacaagccacccctgctgtgacctgacccacagaatccaggagcataataaaatagcttcagttttctactactaagtaagtttggtttggtttattacacagtaaaaataactggaacatcccctttataaaccagtttctgagaggaattgtctgttctcatcatctctattccttcatcctccacttattcctctaatctggaaatccaccccatcttttaagcctaatcatgttctctaaagtcaatgatctccaacttgttaaatgtaatggacattttctt

SEQ ID NO: 468232 - DNA, 558 bp, Homo sapiens
ttaataaattcaacatgatagcatataagaactttataaaaaagaaaagctataaaatttgtaagagttatcaagaatgaagccataataaatgacgagtcatatattactgtaagaggagagtgaatattataaagatatcaattcatctgtattaaatttacaggtttaaatgttattccaaataaaacttaaatatatttaactttagggctttgaaaaaaatgacttaaagcctttctgaaaaataaagtttcaagtagattagaaaaagcatcgctagagaagacatgaggaggggataatcatattaggtactgctatrcatttgaacactgtaacaatttaatcaacagagcacaaagaccaatggagggaatagagagaagtataacatggtagttaaggccatgaatgttgatttattaaaaacaagatttggagacttctttttttcagctcctttacctaagcagcttggaaatcatcactcttatcctcactgtcaggcctctgagcccaagcctgcatgtatacatccagatggcctgaggcaac

SEQ ID NO: 468233 - DNA, 543 bp, Homo sapiens
caaactatgcttccaacaaaggtctaatatccagaacctataaggaactttaacaaatcaacaagcaaaaaacaaccccattaaaaagtgggtaaaggacatgaacagatagttttcaaaagaaaagayacatgcagccaacaaacatatgagaaaaatctcagtatcactcatcgtttgagaaacataaatcaaagctacaatgagataccatctcacaccagtcagaatggctattatcaaaaagtcaaaaaattacagtttctggtgaggttgcaaagaaaagggaatgcttatacactgttggtgggaatgtaaattaggtcagccattgaggaaagcattttggtgatttcttaactcaaaacggaattaccatccaatccagcaatcctattactgggtatatacctaaaggaatataaattattctaccataacaacacatgcatgcctatgttcatcacagcactattcaaaatagcgagtatgtggaatcaacctaaattcccatgaacagtagcctggttgaagaaaacatgg

SEQ ID NO: 468234 - DNA, 543 bp, Homo sapiens
caaactatgcttccaacaaaggtctaatatccagaacctataaggaactttaacaaatcaacaagcaaaaaacaaccccattaaaaagtgggtaaaggacatgaacagatagttttcaaaagaaaagacacatgcagccaacaaacatatgagaaaaatctcagtatcactcatcgtttgagaaacataaatcaaagctacaatgagataccatctcacaccagtcagaatggctattatcaaaaagtcaaaaaattacagtttctggtgaggttgcaaagaaragggaatgcttatacactgttggtgggaatgtaaattaggtcagccattgaggaaagcattttggtgatttcttaactcaaaacggaattaccatccaatccagcaatcctattactgggtatatacctaaaggaatataaattattctaccataacaacacatgcatgcctatgttcatcacagcactattcaaaatagcgagtatgtggaatcaacctaaattcccatgaacagtagcctggttgaagaaaacatgg

SEQ ID NO: 468235 - DNA, 543 bp, Homo sapiens
caaactatgcttccaacaaaggtctaatatccagaacctataaggaactttaacaaatcaacaagcaaaaaacaaccccattaaaaagtgggtaaaggacatgaacagatagttttcaaaagaaaagacacatgcagccaacaaacatatgagaaaaatctcagtatcactcatcgtttgagaaacataaatcaaagctacaatgagataccatctcacaccagtcagaatggctattatcaaaaagtcaaaaaattacagtttctggtgaggttgcaaagaaaagggaatgcttatacactgttggtgggaatgtaaattaggtcagccattgaggaaagcattttggtgatttcttaactcaaaacggaattaccatccaatccagcaatcctattaytgggtatatacctaaaggaatataaattattctaccataacaacacatgcatgcctatgttcatcacagcactattcaaaatagcgagtatgtggaatcaacctaaattcccatgaacagtagcctggttgaagaaaacatgg

SEQ ID NO: 468236 - DNA, 580 bp, Homo sapiens
gagctatatattaaaaattcaaaatttcctgttttctctaacaaaggtttatacaaagaaatgaacagttgttctyatcttataaaaaactggaaacaatctaaatatccccaaataaagaaatggttaaatggtttttagaatattcataatttagggtgttgaacagctgttaaaatagtatttagattttctaaaactcactttgtttctaataaataatatttcctcattataaagaatttaagcaattcaggaaaaagctacaaatttccaaacctccctctaccccaccattaagccaaaacaaaacagacttttaggcattattccaggtatatagataggcaaatagacaaaaacaaacaaacaaacaaaaaacaaagaagataactagatgcctattggcattattttttatgtttctttttaaaaataatttcaactttcaattatgcagatatatgtacaagcttgttacataagtatattgtgtgacactggggtttggggtacaaatggtcccatcacccacatagtgagcacagcacccaataggtagtttttcagccgctgtccc

SEQ ID NO: 468237 - DNA, 456 bp, Homo sapiens
aaaagacaaagctataaggacagaaaacttctcagtggttttccagcaggatcaggttagagtgaggattgactacaaaggggccttagaaaaatttctggagtgatggaaatattttatgtctttatcgtggtgataattaaatgatgttatttgacaaacccatagaattatatttacctaaaaacaaattttactgtatgtaagttatacccaatgaaacaaagacaacaaaatatcaatgtactattttgttacttaaaaaaattatatagtaagtattgagagagaaggcactgagagtggatggagggaagacacagaagctgggctgaygggagaaagctggcaaacctgcatggggttattgcacacagggacttgttcctgtcccccagtggctcctgggaaatgggtgtgttgaaccggcaaggagcaacctgctcctgccagagt

SEQ ID NO: 468238 - DNA, 623 bp, Homo sapiens
tatttcaatttgaaaaaaataatactgatggtgatgttacaaaagaattggagagagacaagtctgaggcacagttattgttattctggggagagctggtcctatgactttagaaagtagcaatgggaatgggaataagagagaatgatgtggcagttgtggaaaaggtaggatctatagaacctgcaggctatttggatgcagagaatgaggaagggattaaagatgatggcctaagtgactgggtttttttgatggtgtcttcatttttctctacaatcccagcacagtagctttcacattaaaaaccttcagtaaatattctttgaagtgttaaaatacatgccaagtaacagtgctttggttggatcacaatgctttgagaaggcccacccaatagatttttataaayctacagagtgtcctttttttttttcttgggggttttgtcaaagggaagaacctagctctaacgactgcatttttaatttttttttcacagtggcttctgaattaaaaggatgccttctactaagaaacctaactttagaaaatcctttttgtcctataacttggatagcatctgaatggaaaatcctcttttacctgaaacccagtgggta

SEQ ID NO: 468239 - DNA, 642 bp, Homo sapiens
cctctttacctccccaggcatctcttggctgctgagaaaattccccagggcttctgatccaagttgtgttttaatccaagagtagacacattttaaggttattgcttagttcagggaatgcagaaaaatgttctggatcattgaaatatttattgctattggctgcccaatggagcaaaggtacaagcaattaaagaaaagggcactactagaaaactctctctaggccaggccacaaatgcacgcccgccctggagctctcctgttgaaagctgtttcccacatactgggactgattcactctgtcactccctaggattttcactaatactttctattagttsccattggcatctccaaatctgggttgaagggaggaagccagaagcctggacttgtcatttgcttagaaatatatacactatcatttatatgtgaactctaagaatgttgatgtattttcttggtcagattaggattctataatttaacttcaggaatatacagagattttaagtaaatgaaagctataataaatttgcatagtaattaaagtcttaaacaactttttagttttgaaagaatagtagctagatacaaaatacaggtatgataacccaaacaatataataataatacatt

SEQ ID NO: 468240 - DNA, 457 bp, Homo sapiens
ataatttctactgatctactgtgcagcatcatgtccataattaacagtatggtattgtatactgaaaattttgccaaaagggtagatcttatgttaagtgttcttatcacaaatataggtaaacaaagatggtgggagaagcctttttggaagagagagatatgataattgatgtagtgatggtttcactggtgtattcttaactccaaagtcatcaagttgtacatgtgaaatatgtacagctttttgtatgtattcatacctcaatacagtgtttctttaagtacaaggatggtttgttattcagaaatgtgttaatacatagcttataatgttgaagaaacattgtgatcattttcatatatgtcaaagagacatttgacaaarcataacagccattcttcacaaaaatattcagtcagtaaggatgtatacacactttttaagcataggaaac

SEQ ID NO: 468241 - DNA, 442 bp, Homo sapiens
ggaataattgcaatttctaccacagacacaggaatactttttcctaatatataaatagcttccccaaattaacagtaaaagataattgtatagaaaaaaaaaaaaagaaatagattgaatggacagctcaaacatataaaaaaagatgaggttcacttttaatacagtaaaaccacrtagatataccattcttcatctatcaggttaattcagataccacagtttagaaggcccctttggtgatgctgagggacataggcattgtcctacagtgctgatagaagcatgcattgccagggagctttcccaccactgtcctgggagatattgatcacctcagccctctggcagctagatggatcccgatcaatttacagctcctacgcttcttgcctttggccataagtcatcttttatacagctctaaatcttttcaagttta

SEQ ID NO: 468242 - DNA, 442 bp, Homo sapiens
ggaataattgcaatttctaccacagacacaggaatactttttcctaatatataaatagcttccccaaattaacagtaaaagataattgtatagaaaaaaaaaaaaagaaatagattgaatggacagctcaaacatataaaaaaagatgaggttcacttttaatacagtaaaaccacgtagatataccattcttcatctatcaggttaattcagataccacagtttagaaggcccctttggtgatgctgagggacataggcattgtcctacagtgctgatagaagyatgcattgccagggagctttcccaccactgtcctgggagatattgatcacctcagccctctggcagctagatggatcccgatcaatttacagctcctacgcttcttgcctttggccataagtcatcttttatacagctctaaatcttttcaagttta

SEQ ID NO: 468243 - DNA, 472 bp, Homo sapiens
gtcattaacacaagtttctcatctcattccatagtccactgccctgttaggaaaacagggcaataattatggttggttttctggctaaagtggagagaggctttcattcaaaaagagcatggaagaaaactaagagatagggtgagagggattattctcactctattaaaaaaaaaaaaaaaagaaaagaaaaacactacctttgtattagtccattctcacattgctgtaaagaactacctgagacagggcaatttataaagaaaagaggtttaattgactyacagttctgcaggctgtacaggaagcatggctggaaggccttgggaaacttacaatcatggtggagggacaaaggggaagcaagcatgttttcacatggcggcaggagagagagagagtgaaagaggaagtgccacacacttgtaagccatctgatctggtgagaactcactcactaacatgagaacag

SEQ ID NO: 468244 - DNA, 588 bp, Homo sapiens
ccatgtacattttaaaatggcttatttttatttctgtatgaaacagaattttggrattctgggattttgatagtgattgaattgaatctatagattgctttgggtattgtttttcttttccaacttttattttaggttcaagtggtatacatgcaggtttgtcacatgggtaaattgcatgtcatgggggtttggtgtacagacaattttgtcacctgaggaaccagaataatacctgataggtcatttttcaatccttcccatcctccactctcaagtaggccctggtatctatagtttccttctttgtctccatgtgtactccatgtttagctctcacttataagtgagaacatgcagtatttggttttctgtttttctgtgttaatttgcttaggataatggcctccagctccacccatgttgctgcaaagaatgtgatttcattcttttttatgactgcacagtattctaccatgtatatgtaccacattttctttattgccttgggtattattgatatcttaaaaatactaatgtttcaaatttatgaacatggaatatctttctacttacttgtttctttaa

SEQ ID NO: 468245 - DNA, 550 bp, Homo sapiens
ttccttctttgtctccatgtgtactccatgtttagctctcacttataagtgagaacatgcagtatttggttttctgtttttctgtgttaatttgcttargataatggcctccagctccacccatgttgctgcaaagaatgtgatttcattcttttttatgactgcacagtattctaccatgtatatgtaccacattttctttattgccttgggtattattgatatcttaaaaatactaatgtttcaaatttatgaacatggaatatctttctacttacttgtttctttaatttcctttggcaccattttgtaattttcactctacaagtctttcatctatttggttaagtttattccaaagtattatttttgatgttattgtaagcaaaattgttttcttaatttcctttttggactgtatattgttacggaaatgccattgacttatgagtgttaattttggattttgaaattgctgaattcattttttagttctagctgttctgtgtgtctgtttgtaatctttagggtttcctacatataagattat

SEQ ID NO: 468246 - DNA, 441 bp, Homo sapiens
gttccacttctttttttaaacttctttctsggacttcttctcatagactggattctcttatatagcagcgtgagctttcttgtacatctccttcatgtctgaagttatgctgttctttatgtattaagagaaacatttcttgtaagcatcttcatctttttctattaggtaacacatgtagcctgcagcatttggatccataatgggcttttgatgtacttctgcattaaatttcttgctttcagaatcataaccaggaaatcgtttaatattgtgaggaatcaacaaacctccatccacaactcctttccagaccccataaaagcttatcggtagttctggcaaggcctgcatccaaatagcacgtaaaggcacctggctgagcatcaatggtttttacattgtattcatctccattcatctctacttggacttcttaga

SEQ ID NO: 468247 - DNA, 441 bp, Homo sapiens
gttccacttctttttttaaacttctttctcggrcttcttctcatagactggattctcttatatagcagcgtgagctttcttgtacatctccttcatgtctgaagttatgctgttctttatgtattaagagaaacatttcttgtaagcatcttcatctttttctattaggtaacacatgtagcctgcagcatttggatccataatgggcttttgatgtacttctgcattaaatttcttgctttcagaatcataaccaggaaatcgtttaatattgtgaggaatcaacaaacctccatccacaactcctttccagaccccataaaagcttatcggtagttctggcaaggcctgcatccaaatagcacgtaaaggcacctggctgagcatcaatggtttttacattgtattcatctccattcatctctacttggacttcttaga

SEQ ID NO: 468248 - DNA, 614 bp, Homo sapiens
  misc_feature (1)...(614): n = A,T,C or G
catatgttgaatgtgtatgtatgaatacatacatatgttgaatrtgtatgtatgaatacatacatatgttgaatgtgtatgtatgaatacatacatatgttgaatgtgtatgtatgaatacatacatatgttgaatgtgtatgtatgaatacatacatatgttgaatgtgtatgtatgaatacatacatatgttgaatgtgtatgtatgaatacatacatatgttgaatgtgtatgtatgaatacatgnnnnnnnnnnnnnnnnnnnnnnnnnnnnnnnnnnnnnnnnnnnnnnnnnnnnnnnnnnnnnnnnnnnnnnnnnnnnnnnnnnnnnnnnnnnnnnnnnnnnatttgaatttaacttttttgtagaatgtaagatgagtctaaattcatctttttgcaggttgttacctaactgaccctgcaccatttattaaaaagaccatcatttctcccattgaataaccttggtaactttgctagaaattgattgaccttaaatgtaagggtttatttttgtactatcaattttgtttcactgacttgtgcagatgttcctcaacttattatggagttacatagtgataaacccatgataagttgaaaacgtca

SEQ ID NO: 468249 - DNA, 614 bp, Homo sapiens
  misc_feature (1)...(614): n = A,T,C or G
catatgttgaatgtgtatgtatgaatacatacatatgttgaatgtgtatgtatgaatacatacatatgttgaatrtgtatgtatgaatacatacatatgttgaatgtgtatgtatgaatacatacatatgttgaatgtgtatgtatgaatacatacatatgttgaatgtgtatgtatgaatacatacatatgttgaatgtgtatgtatgaatacatacatatgttgaatgtgtatgtatgaatacatgnnnnnnnnnnnnnnnnnnnnnnnnnnnnnnnnnnnnnnnnnnnnnnnnnnnnnnnnnnnnnnnnnnnnnnnnnnnnnnnnnnnnnnnnnnnnnnnnnnnnatttgaatttaacttttttgtagaatgtaagatgagtctaaattcatctttttgcaggttgttacctaactgaccctgcaccatttattaaaaagaccatcatttctcccattgaataaccttggtaactttgctagaaattgattgaccttaaatgtaagggtttatttttgtactatcaattttgtttcactgacttgtgcagatgttcctcaacttattatggagttacatagtgataaacccatgataagttgaaaacgtca

SEQ ID NO: 468250 - DNA, 560 bp, Homo sapiens
ctccattctcccaactgaatagacatatgatcaacctcccagaggaagacagcagctctgagttcttttggaggcccatctagtgtgtgtgtgcctgtgtgtgtgtgtgtgtgtgtgtgtgtgtgtgtgcgcgtgtgtgtgtgtgtgtgtgtgaagtgtttgtacaaaagagaaataggcagtgtttgtaacaaaaactaatataaaatgagaaactgaattgacatttggttagtttacaattctaaaactgaaaatcatccacattgtgtgttctagaaagacttcctgcattgtgacagaattgcaactgttacaaacttcttccagtatgcccacatagaaattggaaaatccccaaaatgatgccatgtattatacttgtctgcattctttattacggtaaatgtgatgagaaatacaagatacttgtactcatgtgatattagcaaaagggttcattaatttgtcatagattattgttctctgtgcaacaaattcaaaccaacctctaaagagtaacastgtttaaagattacaaaggcccagaaaatgtgatg

SEQ ID NO: 468251 - DNA, 451 bp, Homo sapiens
gactatgacaatttcttcaaataagacaatgatgaagtttgcagcatcaagatttctctgtagcatgtaatgctatttaatagcattttacccacagcagaacttctttcaaaattgcaatcaatctgctcaaaccctgccactgctgtatcaactaaatcgaaggaatattccaaatcctctattgtcatttcaacaatatttatgggaccttcaccagaagcagatttcatcttaagaaaccattttttttttttgctgattcataagaagcaaagcctcactcattaaagtttttttttttaaataagattgcagcaattcagtcacatattcaggttccccttctaatttcaattctcttgttatttccaccacatgtrcagttacttccttcactgaagtcttgaacacttccaagtgatccatgagggttggaatcaacttcttc

SEQ ID NO: 468252 - DNA, 555 bp, Homo sapiens
gtttaatattaattatgtggtcttatgtcatgatcatttgacattacacacacaagagttaatatagtgtgctagacagataatttggtcaactggatttcaaaataattaatattatccattcattactatgcctctccttatactcatctctcccatacttatgtacccctgttttactacttgtcatattgggttttaatcattgatgttggtgtctcttccctcccccagattttgaagacaagcactgtrttttattggttgttatagtcacaacacatagtgcagtgctcctacctctcttgttacttctctgaagattcttcagcttttgttaatcacttgctcttccatgttcctcaatgttctgtcctacatcttcttctcttctcaatctatactctcctcttgggagattttagctactctcatggatttaagtaccatcaatattgtgatgatccttgatctctatttctaattgatctttagacccatcattcattgtctacaagacctctccactggtcctgaaactcaaaacatttctag

SEQ ID NO: 468253 - DNA, 598 bp, Homo sapiens
aagagatgcacaactttatgcagattaatatgaaagacatacatttctctgtagaacagtctgaggtcacaggtaataaggaaatgttagtaaagactttaagagtcaggattcaggagctgggaagactaggttcattttctgaatccgttcctgmttccatgacacttatgacaatcctgcatctacctgtgagaatgaaacttggccatcttaaaaactcactacactgacctagcacctggcatataatttgttttccacaaggtcagctctgcctcctagattatttaagctctgtctgataaatccaattctcttgaagagggaaaggggtaaacagggagatgtgaatgaaggcagggataaagaaaaaagaggtgcagtactagaaaagagacaaataagatgttcttatacaatgagaaattgttgcacctataactacctctgttctcttgcaaaatcacaaaatcaatttcgtcatatacttctaactggacatgagcctatagcaaaataataatatgtctcatcttttccactctccccttccttattcccttctaaccacaccatctttttggtattattgaaa

SEQ ID NO: 468254 - DNA, 510 bp, Homo sapiens
agggactccatcccctgtatggcctgtgttccaaggaatgagccagggctcagatgtccttcatagataaggagtgaaactctgggttggccactcccggattccttagctcaggactccgaacacacattcttctatagaccctaagatcattctcagggtacgcttaagttaatttattgctggcagctgcatatgccatatacaggcatccttagcgggtgaatgcctggacattggaaagccacctccacatggcttgcatatgaaaccgatcaactgcttcatctggggtgttccatttgacatttatagggaatgyaggggccaagggaaaaacttctcctttgccctctcaaggatcactgtacattcaacccacaaaatgcagattaatagagaaatgtcatacaaatttattaatgtgtacatgagggaaaaatcacagagtgcttacccaacatcccaatgaggcccaaatacttctatagctttatttcagaggggatg

SEQ ID NO: 468255 - DNA, 536 bp, Homo sapiens
aatttttagtgagcaggcaaatttaggtgcctgcctcccatcatggaatctgaaggggacagatccttccagttctgaaccagtaaagctagaagatgggcctgggacctatgctgggccagtcgagaaaacgcgccctggctgctaactcatgagggagtaaagatggttcatcatagccttagacaggcctttgcaaaagcttgcaaagctgctctggttctaagggaggagaccacccctcatattgtcttgtgcccaatttctgcctccaaagaaagaagaagtaaaaactaaaaggcagaaatgaaatccacaagcagacagcctggcgccacaccctgggcctggcagttaaagatcgacccctgacctaattggttatttgcataaaaaaggcactgtgaagatcctgtcctgttcagttcctttctaattaccggtgtatgcagcccccagtcacgtaccccctgcttgctcaatcgatcacgaccctctcacgtggacccycttagagttgtgagcccttaaaaggg

SEQ ID NO: 468256 - DNA, 556 bp, Homo sapiens
ggtctgcagattgcaaaaaccgtgggaaaagcatagtatctgggctggatatcacagtccctcatggcttcccttggctaggggagggagttccccaaccccttgcactttctgggtgaggtcatgccccaccctggttctgctcaccctcygtgggctgcacccgctgcctaaccagttccaatgagatgaataatgtacctcagttggaaatgcagaaatcacctgccttctgcattggtctcactgggagctgcagactggagctgttcctatttggccttcttgccagcagaatctactgtgccgttttggttgctatagccttgtagcataattttcacttgggtaatgtgatactttcagcttggttctttttgcttaggattgctttggctatttgggctcttttttggttccatatgtactttataatttttttttctaattctgtggaaaatgacgttggtaacttgataggaattacattgaatctgtagattgggcagtatagtcattttaacaatattgattctttcaattcatgcacatgagt

SEQ ID NO: 468257 - DNA, 556 bp, Homo sapiens
ggtctgcagattgcaaaaaccgtgggaaaagcatagtatctgggctggatatcacagtccctcatggcttcccttggctaggggagggagttccccaaccccttgcactttctgggtgaggtcatgccccaccctggttctgctcaccctctgtgggctgcacccgctgcctaaccagttccaatgagatgaataatgtacctcagttggaaatgcagaaatcacctgccttctgcattggtctcactgggagctgcagactggagctgttcctatttggccttcttgccagcagaatctactgtgccgttttggttgctatagccttgtagcataattttcacttgggtaatgtgatactttcagcttggttctttttgcttaggattgctttggctatttgggctcttttttggttccatatgtactttataatttttttttctaattctgtggaaaatgacgttggtaacttgataggaattacattgawtctgtagattgggcagtatagtcattttaacaatattgattctttcaattcatgcacatgagt

SEQ ID NO: 468258 - DNA, 444 bp, Homo sapiens
aatatacagaaggagatgagaggacagcctgggacagaagcctgggaaagtctagcttttaagggaagagtagaggaaaatgatctaactaaggagaatgaagagtgtctggagagttcgagtcaggagtgtgctgtcctggaagccagcaaagaactgttttcatcaggaggacatgggcagcccactgagaggtcaaggaagatgggggccgacaggtggccaggggtggtgacaccatgaaggtcattggtggccttgacaacaagctgatttggtggggtcatggaagccaggccagactggagtagactgagagagagtgagaagtgagatgayggagtgtttgagggggttgacagggaagaggaaggttaagggagagaggaggggatgtagttttgaaggagactgttttcctttttgcttcctgaatattggaga

SEQ ID NO: 468259 - DNA, 524 bp, Homo sapiens
ccatgtgtctatgagttctcatcatttagttcccacttataagtgagaatatgtggtatttggttttcttttcctatgttagtttgctaaggtaatgacctccagctccatccatgtccctacaaaggacatgatcttgttcttttttatagctgcatagtattcctttttttgttttttgagatggagtcttgctccgtcgccaggatggagtgcagtggcgcgatctcagctgactgcaacctccacctcctgggttcaagcgattctcctgtgttagcctcccgagtagctgggactacaggtgtgtgccaccatgcccagctaatttttgtattctttagtagagacrggggtttggtagaaaccatgttggccaggatggtctttatctcatgacctcatgacccgcctgccttggcctcccaaagtgctgggattataggcgtgcaccactgcacccgaccatattccatttttatttaactgattatttcagttctaaaatttctattgtgttctcc

SEQ ID NO: 468260 - DNA, 529 bp, Homo sapiens
caaatcactttagacaagagtttaccagtttctttcaaaattcaacatatgcttactttctgatccaacagttctaacagctccactcaagaaaaatgaaaatatatgtccgagaaaacattgtacagaagtgttcatagcagaattattcataatatccatcataatagctcagatatctgtcaacaggtaaatgaataaacaattgcattatattcctaaaacagcatactattcaggattaaaaggaataatacatgcaataatatggataaatgtcacagaacattacattgagtaaaaagaaccaatacaaagagaacatactctatgattctgtttttaagaagttctagaacagacaaaactaatatgtagtgacaaaaaaatgattcttctgaggccaaggtctgggccaggtcaggrgggtgtagtagagatggacccaaccagtaagggacaagaaggaacttttagggcatgatggaaatgcccaatatcttgttgaaggggtcctcttgaaactgta

SEQ ID NO: 468261 - DNA, 532 bp, Homo sapiens
tctagccaggcaatttttctatttgggattctgcagatgggcaaggatgcaagttgatctctgaggttaggtgaactccctttaaacatttacaaatgtatgtattccactatgaacaggtggaactcaaggctatgctccttagaatgaatgacccagttatttcctccctgttagaaggaagatggttgagggtgccagggtgccagggaggggggctagcagggggaggcgactttaggctgggttgggtgactgacctcctagataaaacaggtctagcccttacattttctgaaatttacagaggtaggagactacctgcctgggctggtcattgggtgggttttttggctgtgcagagtcactgcttgacatcctcaaccaagccagtgtagctcttttgcttctctgagattcatggcartgggagttcctctgcctggtagagtcattgaggtgggctttgaggctgggtagagaggctagcattctgggggctcaagccagattgtgtttaccaccatgcttc

SEQ ID NO: 468262 - DNA, 595 bp, Homo sapiens
aaagcagacaggttggcaaagcaaaaggaattgagccctgcaaagaactcatctccaagattaaatctttgaagatcctcagatagccattattaccctggcttccttccaactgagagtcagcaaaatgatcagtgtcttatctcccaggtaaaggaggatactcagagcccatttctttttgagtgtataaaataaaaaatttactgagtggttacttcctgtgtttggcagttttaagatagacagtacttttctgagacagaggggagctggcaattgcaagtttccatatgctggaagagttgatgagcttctttttgcatgattgttaagtggatttaattgctgyattttttatataatttatagatgtattgattaaatatatgttgtgttttacttccacggctagcccaaggttccaggtaatttaaaaccaatgttagctaatagactagaaatgttgaatacttttttttgcaattttatattttgactaattgataaactatttcagtacacacacaaattaactgtatttgaacttacattaagtcatgaaataatacctttttgagtcaagattataaat

SEQ ID NO: 468263 - DNA, 648 bp, Homo sapiens
tgctccccgcatgctaactttctatacggcatatttctgcacaatttctgtttacttgtgcaagctgtgcagtgaggtcaattctttaagcatactatgtcctataggccatgtgcrgtccaccacctattttcgtacataaagttttattggtcatagtcaggcttgttaatttacttattatcaatggctgcttttatgctacaatggcagagttgagtatgtaacagggaatgtatggctttttaaaacctaaagtatttatcatctggccccttacagagaaattttccaaaccccattttaagccaatagctgaagttagcagaattgcttttagattctgtgttttttaccaatgtttccagggacagatttttgtctggatagatacagatcactttgcccacactgagcaatcccaacactagtgccatgctattaccttcctgtttcagaagtgtatacattactcagaagacactaaatatgatctggaaacctggtgcttcgcggtttcaaggctctgatccacaggcagtggagggagagagaagggctagatagcaggccaaggtcactgtgtaaaggggcttcctatttagagcaatggttttcttggagaccgtggtgtctggtgttcatctg

SEQ ID NO: 468264 - DNA, 648 bp, Homo sapiens
tgctccccgcatgctaactttctatacggcatatttctgcacaatttctgtttacttgtgcaagctgtgcagtgaggtcaattctttaagcatactatgtcctataggccatgtgcggtccaccacctattttcgtacataaagttttattggtcatagtcaggcttgttaatttacttattatcaatggctgcttttatgctacaatggcagagttgagtatgtracagggaatgtatggctttttaaaacctaaagtatttatcatctggccccttacagagaaattttccaaaccccattttaagccaatagctgaagttagcagaattgcttttagattctgtgttttttaccaatgtttccagggacagatttttgtctggatagatacagatcactttgcccacactgagcaatcccaacactagtgccatgctattaccttcctgtttcagaagtgtatacattactcagaagacactaaatatgatctggaaacctggtgcttcgcggtttcaaggctctgatccacaggcagtggagggagagagaagggctagatagcaggccaaggtcactgtgtaaaggggcttcctatttagagcaatggttttcttggagaccgtggtgtctggtgttcatctg

SEQ ID NO: 468265 - DNA, 603 bp, Homo sapiens
tgcattgaaatcaacatatctttctgaatcgaataggttttcatggggccaataaatttcttcaaaacaatgcatttttattacaacatatttttgttcaaaccaatactttttgacaaccagatattaatgacctggccagaactataaatttaccccaaactatgtgttttctcagcagaaaataatttttcttatacaaacacatttttatttgaatcaatccttttctgaaatcagatatatttctgcaggggacactgagaacctctttactaagaaatgtcattttgtttaaaggaacatggcctggatttcaagcttccctagtgacctaccttaaacatctttattcaaaaatgaggtaaaggctattaaagaatttttttacttggtcagacagaaatacacaaaggtatcaataaacagttcttatagcatctcaaagaaatgcacctcaagttctatctatcrtcagggcagacactagccagcaacactttgcctcctcgagtgtagcagagacaaggatcatatccatccttagaaattcattgtaaatatacaagcagaaatgatccatagccacagtattaaggccct

SEQ ID NO: 468266 - DNA, 599 bp, Homo sapiens
ttgtatagtcattcaaaatagtcaattctctcctaatataaaagggtccagtttcaatgttatatgagacaatttttcagtgtatgaggtaagagtgcctatgttgcaaaaaattaaagaccttattgaatagaaaaaaagtattgaaaatggaacactcagtttttattaataaaagtaattactggggttaagcctttactatgtgcaaagcactgtgataagtacctcaaacctgtttttttatttccatcttatgagaaatcgatgaagtaggttttcttattcccatgtttaggtacagaaacaaaaccaaaacaatccaaagaagctgtttacccaaattaacatagctaataattgtatattaagaagggctttgaacacaaatctgtttgccttcaaatccagtgcgctgtacctcaagctctcttacctttccaggctggctgtttgaactttggtcttctataaacacagtatgtttatagatgccccatctayctctctgctttgtagtgagactcagataacaacatgaatgggaaaatattctgaaaataacaggctacaacagaaatatataaagtagcatttgg

SEQ ID NO: 468267 - DNA, 606 bp, Homo sapiens
aattgtttctttttctatttgttaaccatgttctttgtaaaaaatttagtaaatttggaaaaatatgaagaagaaataaaaattacttgaatctccacagccagacaacactactgttaacatgttggcatatatatttctattttatttttatgaacttgtgtgaaaatattttttagtgtggtcatactctacatatagtttatatcacatttttttcttttaattttgactttcaagcattttcctttgactttaaacagtcttttaaaaatatttttatagaggtggctggcaagatggccgaataggaacagttcctgtctgcagctccgagcragatcaacacagaaggcgggtgatttctgcatttccaactgaggtactcaactcatctcactgggactggttagacaatgggtgcagcccacagagggcgagcagaagcagggtggggaatcacctcacccgggaagcacaaggagtcagggaactccctcccctagctaaggaaagccctgagggatggtgccatgaggaatggtgcattctggcccagatactatgctttccccatggtcttcacaacccatagaccaggagatt

SEQ ID NO: 468268 - DNA, 533 bp, Homo sapiens
aagttcttaggaggattgcagactaatcacatatttttctttgaataatgcttattgagatatcctgataaaagacgaggggcataaaaatgatttaccaatttaggtggcttgaaatataatgaaccctgaagagttttcaaataatgctaactacatgtttattctaaatgaggaaagagagaaatatctttgttgattagcataggactaggagaaggttatggttatggatactaaaccagagagtttttctcttgctgctraagccaaacacagtaaagccaaaggagctatgcaatgcttaataataccaataggcattgttaaagaagcctctcttatgtacaggtcctataatggttctctatatactcacccatgaagttgttataatatctctaaaatgtatattttacaaagaaatcgagactcatagcattgtgaaaattttccaaggtcaaaaatttgaacccatgtttaaagctcatactcttatcataaagctctatgcttttcctagcacccttttg

SEQ ID NO: 468269 - DNA, 560 bp, Homo sapiens
tccataaaacttattttcatctgatatattgcatatttggtttatccatttattttctacctcctctcctacaacataaactctatgaagcacaaattttcatctatttccttcattgctacatcaccaaggcataggtcattatttgacacatagtaagcagttaataaatatttgtttaatgaataatgaaatgtattgatggaggcaggaggatggatcttggaataagcccaatttctgtgagcaggagatagtgctctttcaagagtctagaaatgtatgtggtaaaaattagaagaagaagacaagaggaaggtgttttccagagaaaattacagactagaaggcaagttttataactgaactgtacacatgaaatgtttaaccctgggtactttcttagactataactgttatatatgacctgccagttttactgtcytgtttcatatgatgtaattccctttagttttacgcaaatacagtaaagtcaataaacccaaactcagcatggtagctatctgaaggaaaacaccctgcccacctccacagagccc

SEQ ID NO: 468270 - DNA, 454 bp, Homo sapiens
cccttcaaatgttcacttagaaggtcttctctaatcactctrtgtaaagaagaatctccctttggatcattctcttttcctttatcctgctttatttttattaatggcacttttatatcaaacacatttcaaatcaatactctgcttatctgtctcctaccactagcccactggttctcaattttgggtgactttgcctcctggaagacatttggtaatgtctggaaacatttttgtctgtcacactgagggaaggagtagaggccagacatgcggttaagcaccctaaaatgctcagagaagttccctacagcaaaaaaaaaaaaaaaaaaattatctggtctaaaatatcaatattgagaaggccagctgtagggttcagcagcatgagagcaggaacctggtctatgttgtcccaggtatttacaacctggcacataggaggtccacaata

SEQ ID NO: 468271 - DNA, 572 bp, Homo sapiens
tctaacatatcctgactgatgcaaataccaatgtggaatatgagtaacatttaagtgtgtccttcagctgtgctgccattaaaaaaaaaaggctagtttcctattagtgtaagactttcccagcttcactcagtagtgttcccmattctctaatgtcaggaaattaactttgaaattcctttcagtatcaggtttatatatatgttatgaatactatttaatttatatataaataatatatatttaattcatacagtatacatagtatcatgaatactattttatttatatataaattatatgtaaacaatatatattttatatacatatataagtcatatatttttatatacatatataaatactatatattaaatagtattcataatcttatttgctgacaacataccttatttgtttccctacaaatttagtaaactactaagtcttttgttttcctccttaagtattgtcctaggaattggggatgtatgctccttaaagtgttgataactgcctttcagttctagctcattaacagatgctaaattcctaggctatcagaagtcaaa

SEQ ID NO: 468272 - DNA, 636 bp, Homo sapiens
cccatttaatgtgcttatttaatgtgcttattattatttaatgtgcttattcacattaaataaatttgtatcccttttattcctgctaatctgtctatcatcaaatcattttagcagacttagactctaaccttcagagggaaagtttgaacttccctcacttaacatattcttaaataaatgagggaggcaccttgagtccatgtatgtaatcttcggttagcctctgaaacttactggcctccaattctgaaatgtacaggtgataaatttcttggtctgttttctaggtacaatcattgtctggtggccacaccttagctctttctgaggttgcagatgctctaagtcttagccacatcctccatcttgcccttggattacaccatcawtccaggaccccctacgttagagtcaacttgtcttttgccaaaactgccccatagcaggcccactcattctgcactctgctatcttctgtgtcaccacaaggagcacactggacattcttgattttctcaagagaccgatggggaccgtgtttcttccaatgttcttttcttattcctgcatcatgttaggggtggccctttctgaatgtggatcaaattggagaggcctctcatccacagggaa

SEQ ID NO: 468273 - DNA, 547 bp, Homo sapiens
aacttgaatagttcaccatcttcctttccaaccttatatggaaattcttccaaaaataaaccctgtcttggtggggaaargctgtttaaagaaacatggtgaattactacaaagtactaggtgtgcctcaaaatgcttcctcccctgatattaagaaggcttatcaccagttggctctgcaggtacacccagacaagaacccagggaacaaagaggcatctgaggagaaattcaaacaagtagcaagaggcctatgaggtcttgtctgatgccaggaaatgaaatgagtatgacaagtccagaaggaaccgaaccaaaagggaaacagaggagatggcagagacaaaaaacatttggaggaggaactatgcattctcaggattctcaggtgatgatttttcccttggccttgtgggtaaagccaggagattccactcctccatctttgatgtggctcccatattggacacaggattttccacttttttatctctgggctccagagcaagtacctctacctctgagacatttgaaccctttgtaagca

SEQ ID NO: 468274 - DNA, 547 bp, Homo sapiens
aacttgaatagttcaccatcttcctttccaaccttatatggaaattcttccaaaaataaaccctgtcttggtggggaaaggctgtttaaagaaacatggtgaattactacaaagtactaggtgtgcctcamaatgcttcctcccctgatattaagaaggcttatcaccagttggctctgcaggtacacccagacaagaacccagggaacaaagaggcatctgaggagaaattcaaacaagtagcaagaggcctatgaggtcttgtctgatgccaggaaatgaaatgagtatgacaagtccagaaggaaccgaaccaaaagggaaacagaggagatggcagagacaaaaaacatttggaggaggaactatgcattctcaggattctcaggtgatgatttttcccttggccttgtgggtaaagccaggagattccactcctccatctttgatgtggctcccatattggacacaggattttccacttttttatctctgggctccagagcaagtacctctacctctgagacatttgaaccctttgtaagca

SEQ ID NO: 468275 - DNA, 469 bp, Homo sapiens
  misc_feature (1)...(469): n = A,T,C or G
gtgtactattgtattagctcgcttgggctttcataacaaaatgccacagactggrtggcttaaagaacagaaatttattttctcacaattctggaagctagaagttcaagatgaaggtgtcagtggttattattcatttttaatagcaagtatgtatattatgggaaagagtcaagagagnggaaattgaccatgataagattgactcctcatcttgagaggcaaatggagactggagtatatggagtggctggttctatgagacccggtaaaggagggtccgggtgcccaggagacagatgtgggacaggagctcttagaaggtcttttggagattccttctgtttctcagtgaaataatatggaaagtcatctgctgaggatgaaggccaggaaaacatattgggaacttgaggagaaggaaaaattgtgatatattcttttaggagagagagtgaattgactgaga

SEQ ID NO: 468276 - DNA, 469 bp, Homo sapiens
  misc_feature (1)...(469): n = A,T,C or G
gtgtactattgtattagctcgcttgggctttcataacaaaatgccacagactggatggcttaaagaacagaaatttattttctcacaattctggaagctagaagttcaagatgaaggtgtcagtggttattattcatttttaatagcaagtatgtatattatgggaaagagtcaagagagnggaaattgaccatgataagattgactcctcatcttgagaggcaaatggagactggagtatatggagtggctggttctatgagacccggtaaaggagggtccgggtgcccaggagacagatgtgggacaggagctcttagaaggtcttttggagattccttctrtttctcagtgaaataatatggaaagtcatctgctgaggatgaaggccaggaaaacatattgggaacttgaggagaaggaaaaattgtgatatattcttttaggagagagagtgaattgactgaga

SEQ ID NO: 468277 - DNA, 596 bp, Homo sapiens
ataaatatagttaattcatacatacaaccaaacattcctcttaaaccctgactagagcagctcaaaggaatgacagtggaatagagaataatggaaatgaagcttacagtcaggcaaaccgcaatctgaatcctgtctccmcaaactgctatgtgaccctgggtaggggacttaactgccctgagtctcaatttcctcaccttaagatggaaataaaccagtaaaggactttagggattagaaatgctggatgcaaagcaccgcacacagtgcctgacatgtaggaggttctcaatgactactaagtggaaatggataggcttcgaaagaaatgggatgtgttctgattccaaatccaccttctgcttcctttttgccagtgtgctcccctttgccaggaagatgtaggcatgttcctatttaggctcagaaaatttactgagattaaagagttcaaagactacataaaacattcgtttcataaaaattgtacacacaggaaagttccttgattaagaaagctaataatttgatacataacgtccatgggatgcaagtgaaatccaaattctaccaacagcatgctgtgctacaat

SEQ ID NO: 468278 - DNA, 593 bp, Homo sapiens
acattttatttttaaaattcattaatctgtcaacggacatttcagttgtttccatatcttggtgaatagcattgctgtgaatatgggagtactaatatctctttgagttcctgatttcaattcctttggataaatactctgaagtgggattgctatrtcacatagtagttctatctttaatttcttgaggaatctacagttccatagcagcttccccattctgcatttctaccatttctacgatagtatacaaaggttatgatttattcacatccttgccaacatttgtcattgttgtaaaaaataatagtatcctaagaggtatgagatgatatctcattgtggaattgatttgcatttccttgatgattggtgattttgaacctcttttcatatatatacatattggctatttgtgtgtcttcttttcagagatatctattatgtccttcgaccattttttcaattgagttattagtttttttgctatagaattgtaagcattccttatatattttagaaagtaacctcttatcagatatatagtttgcaagtattttctctcattccataggtttcctttttactctatt

SEQ ID NO: 468279 - DNA, 623 bp, Homo sapiens
caacactgaaagcccaatatcctgatctgtctctcactcctcaytctcattaaacccattttttttatgtcaactccactttctccagggttatcagtccctttctgactcctctttcataccaagtctgaacccaatgattgaccagggagctattcttttattagccctctataaagtagccctcttaagccattagctttttgcagtgtccatcccacaaaccccccatccaggatgagtccagcaatccagcttctctaactcctctacctagtgcagctggggaaaaaaatcaaggaaccatgaagatgaaacacatcacatttgcagtgtaccaatctcagctggccagtagaatacctcaactgttcttttgttatccttggtcattgccctctcccattccccttggtggccattcttaaccttcactgctgtcctccagttccttattaaatctctaccaatccccatctaccccaagcagaggagcttgactcttgtttagcaaaggaaatagaggctgtaaggaactcccttaatgtccatgaagacaaagtgtattagttagggttctccagagaaacagaaccaatgagatactggttagatatgaccaa

SEQ ID NO: 468280 - DNA, 623 bp, Homo sapiens
caacactgaaagcccaatatcctgatctgtctctcactcctcattctcattaaacccattttttttatgtcaactccactttctccagggttatcagtccctttctgactcctctttcataccaagtctgaacccaatgattgaccagggagctattcttttattagccctctataaagtagccctcttaagccattagctttttgcagtgtccatcccacaaaccccccatccaggatgagtccagcaatycagcttctctaactcctctacctagtgcagctggggaaaaaaatcaaggaaccatgaagatgaaacacatcacatttgcagtgtaccaatctcagctggccagtagaatacctcaactgttcttttgttatccttggtcattgccctctcccattccccttggtggccattcttaaccttcactgctgtcctccagttccttattaaatctctaccaatccccatctaccccaagcagaggagcttgactcttgtttagcaaaggaaatagaggctgtaaggaactcccttaatgtccatgaagacaaagtgtattagttagggttctccagagaaacagaaccaatgagatactggttagatatgaccaa

SEQ ID NO: 468281 - DNA, 623 bp, Homo sapiens
caacactgaaagcccaatatcctgatctgtctctcactcctcattctcattaaacccattttttttatgtcaactccactttctccagggttatcagtccctttctgactcctctttcataccaagtctgaacccaatgattgaccagggagctattcttttattagccctctataaagtagccctcttaagccattagctttttgcagtgtccatcccacaaaccccccatccaggatgagtccagcaatccagcttctctaactcctctacctagtgcagctggggaaaaaaatcaaggaaccatgaagatgaaacacatcacatttgcastgtaccaatctcagctggccagtagaatacctcaactgttcttttgttatccttggtcattgccctctcccattccccttggtggccattcttaaccttcactgctgtcctccagttccttattaaatctctaccaatccccatctaccccaagcagaggagcttgactcttgtttagcaaaggaaatagaggctgtaaggaactcccttaatgtccatgaagacaaagtgtattagttagggttctccagagaaacagaaccaatgagatactggttagatatgaccaa

SEQ ID NO: 468282 - DNA, 572 bp, Homo sapiens
ggtgaaactaagcatcatatatgaaggaaagatacagtcattttctttccttcaacaaatgctgagagaattcactattaccaagccaccactacaagaactgctaaaagagctctaaatcttgaaacaaaccctggaaacacatcaaaacagaatctctttaaagtacaaatcacacaggacctataaaacaaaaatgcaagttaaaaaaacaaaaacaaaaaacaaaaaataaagagcatgatgaatgcaacagtacctcacgtttcaatactaacrttgaatgtaaatggcctaaatgttccttttaaaaggtacagaactgcagaatggaaaagaactcaccaaccaactacctgctgtcttcaggagactcacctaacacataaggattcgcataaacttaaagtaaaggggtggaaaaagacatttcatgcaaatggacaccgaaagcaagcaggggtagctattcttatatcagacaaaacaagctttatagcaacagtggttaaaagagacaaaaaggagcattatataatggtaaaaggccttgtccaacaggaaaatatcac

SEQ ID NO: 468283 - DNA, 521 bp, Homo sapiens
aatattatcttttccaagtgaaaaaatatgatccgttgccatcttgcaattttaattgttctcttggacagattttgaggaagtcatacaaaggagtagatggtatttgatttattcttgagtaggaaaataagattctgacatccttctgttgggaatatgagtctcatcatatacctgtgaataagctgtaaaggttttctataataagggatttgtctggtgttggttctgacttcctggcacagggcttttaaagctcttggatttttctgagtggtagaactgcgtttgttattcatgagcctcttggctcactcttgagtttatgctaatgagstgactcccagtgagccttaagacagcttcaggaataggggctggacagaagaaagaccatccatgagatactagggttgggactttgacccagcccaagctccagagaaggtaggggaagctggagactgagttcagcctggtggccaatcatacctacgtaatgaacccgtcaaaactcc

SEQ ID NO: 468284 - DNA, 558 bp, Homo sapiens
aaacccagtcacataaaccaatggaatcaaatagagggtccagaaataaaccctcatgtgtatactttgrcaaggatgctaagaccatgcaatagggaaaagataggattttcaacaaatggtcctgggaaactggatattcacatgcaaggaattaagttgaacccttaccttacgccatctacagaaattaacccaaaatggaatagagacctaaacataaaactaaactagaaaacttactgggaaaaaacctgcatgacattgcatttggaaataatttcttggatatgacatcaaagcaaagcaataaaaaacagattaattgcatttcatcaaaattaaaaacttttgtgcatcaaagaacacatcaacaaagtgtaaagacaaccgacagaatggggaaaaatatttgcaaatcatttatctgataaggaattgatatgcagaatatataaagaactcctacaatgcaacaacaaaaagacaaacaagtcaggaatggtggcacatgtctgtagtcctagctacttgggaggctgagatgagaggattgtt

SEQ ID NO: 468285 - DNA, 558 bp, Homo sapiens
aaacccagtcacataaaccaatggaatcaaatagagggtccagaaataaaccctcatgtgtatactttggcaaggatgctaagaccatgcaatagggaaaagataggattttcaacaaatggtcctgggaaactggatattcacatgcaaggaattaagttgaacccttaccttacgccatctacagaaattaacccaaaatggaatagagacctaaacataaaactaaactagaaaactyactgggaaaaaacctgcatgacattgcatttggaaataatttcttggatatgacatcaaagcaaagcaataaaaaacagattaattgcatttcatcaaaattaaaaacttttgtgcatcaaagaacacatcaacaaagtgtaaagacaaccgacagaatggggaaaaatatttgcaaatcatttatctgataaggaattgatatgcagaatatataaagaactcctacaatgcaacaacaaaaagacaaacaagtcaggaatggtggcacatgtctgtagtcctagctacttgggaggctgagatgagaggattgtt

SEQ ID NO: 468286 - DNA, 616 bp, Homo sapiens
tcacaaataataaaagtcttcactgataagaaaagttctgctcatgggatcctaaaggccgatcttgttcatattttaagttcataatagctgtcagattctgataagcaaaattaatttaggggaaacacttcatcatctttttgtaaacaaatggaatattttcaatactacaatttttgtttaataaatacatatttttatgaattttatctggttgtgataatatttacaaatttctgagaaaaatatgttgaagcttacacttgtaatttatttatccaattggtctcacttctaatcttaataatcctgtttccttatatgtggttattcaaaagaaacttcaaagcattttagtttaggttgcagaactgaaattgattgtataccaagtagasgtgaggcagttcaagatatcatgacaaattcaagagtgttttgtatagttgggagacaagcagtctccactagtttacacatgacttactttgaataagaaccaacaataaagcataacaatttatgagtttaaattaaagtaaacattccggaaggaatcataaagtctttcctgtacttacaggtaatcccaatggaccgataggtcctggaa

SEQ ID NO: 468287 - DNA, 438 bp, Homo sapiens
ttggccaattgtttatcttacttgaggaatttytattcagattttcctgtttttttttttttttttttttttttttttttttttttttttttttactgataaggatctctatgtttcccaagctggattaaaactcatgggctccagccgagagctgggaccacaggcatgtgcaactgtgcctggcttctatcttttaattgggttattaggctttttattattgagttatatttatatatttttatattttctgtatagggtatcctatcagatatatgatttacaaaatattttcttccattctaaaggagaattcacttttttttgcttacttttttttttattatactttaagttctagggtacatgtgcacaacttgcaggtttgttatataggtatacttgtgccatgttggtttgctgcacccaataatt

SEQ ID NO: 468288 - DNA, 467 bp, Homo sapiens
tgtgaaagggaatttatgcacgaaaagttgtccaattcaaaggttgttagatctgctaaacgcttcatgaaatgccacwatggttcttactgtataacttgcctgctttacagctaggtaaggcctggggacatgtggagttagacatgcccccagctatgctggagagtcagaccttatctgcacttctgcctggtgtgtcctagtgtatctaggagcagtacactgctccacacctagtgtagaattaaaatctcaaacttaccaaagttttcaccaaaaataaaagttgctaagagttaacattataatatgcaattgaaactactgaaataattttacatgcaatgtgtaaagaaagtaaaatttgtttttggtgaaagattgtaagaaatcatgggaatgtgaatttttttctgcctaaagtattgaaggattgttttaagtaagaaaaaaaaatctaaagg

SEQ ID NO: 468289 - DNA, 560 bp, Homo sapiens
  misc_feature (1)...(560): n = A,T,C or G
cactgctttttgttttcttaaattaacctagctgctgttgtaatctataaaaatgcyctttctttagtcctcagcagcagattaactccaagccagttctcctacttgaacttaaaacagatcttttacagctccatcatcagagctgctgaagcatacaatctggaagggcagaggccagatctttctatgcactgtttagtcagcacattgcaaattatctgcttcacaagatcattcaataaatatgccaaatgaatgaaggctgaaagtgcttcttgacaaggagcaatacatctagggatacttgattaatgctcaaaacatctcaccattttgaaaaggttttccttataacaaaattcaattaaaatttcatttttgctcctcctgagaagaaaaaataattgtgtctacaagcagtagagttcccatgcaaaaatgagaacatatttataaatgaaataatatgaagataatcatgccagaggatggcacctgtccatatcactcatctaaagaatgaggcctttgagacatggctttgagttntcatgtga

SEQ ID NO: 468290 - DNA, 557 bp, Homo sapiens
aagctcagggagcaccttcttggcagcagccccacgaaggcagaagagggcccaggcctgtccctgcctgctgaaggagcaaagacaggagcaaagggaagcagccttcaccggtgtcctcactccccactcctcagcacccaaccacctctggcctcacaacctgcagagaacttgagctctagaggactgagcaggaccccacttacctgggacctcaggatccatgctctcccagaggacgcctctcacacacatggggcggcagtcatgtkacactcctgcagggcacaagaagccaagatgtgactgatgcacttggcactgcttatggcaagtccaggaaaccacgatattcacccacagaaaacacaccaggggaatcagtgtctcaggaggtgaatgtactgacagcttgtctagcccatcctggtcactgacacagtcccctgaggtcatcccgtctgaaatggacaatggtgcctctacacaagaggaaaaccttgtaacttttcctttattaccaataaccaagacacaagcagcctgtaatcact

SEQ ID NO: 468291 - DNA, 563 bp, Homo sapiens
tggcacaatgactggcactttgtaggcaacagtcaagtggctttggaggcttccaatgccaggagtcgggggcgggcagctaaagtcgccgagccctgtttcccgccatccaggggcactaagcctccccgcagagtagctgcgcggacagggggtctgacgaccgcacgtggccsgctcagcactgccgcggccaagggcgcgactcacccgccagtgtctttcccgaggacacgcgaatcctggggggctcactccggcaaagaggacgagacactgcaccaaggacagggcctgacctctctggccgccttccccggggcctcagtttcccccgatggtgagagtggagccgaccatgcgccctgctgtggactcacccggcgccctggcgtcgagtggcggcggagacctgacagacagcgtgggaaaaatcaagatgtctgcagatttcgagagatggggtgcggtggcgtgcgatggcgaaggacggcgagggacggcgaaggactgaggccacacgacaaggaagctacgctcgtttcgcgccggcggaaatacag

SEQ ID NO: 468292 - DNA, 583 bp, Homo sapiens
tttgttaaaaactaataagtgcatagcagtctaattattaaaatagtattggaaattaactttttctatctctgacagaaatctggaagatagatttattgatcaggcacatgcgcagggacttaaccttattctaccaatggtttagaatgtggctgaaaaacaccaaactggacagcagccctgtaacacataaatctatatcaaaggaagaataagatgatargtttccttgaaacaaaatgtataatttcacattttttaagaattagcatggggtgcaaagtagcatggcagccaatctttggaaaatcaaaacaagaagtcagaccttaccaaagtgaaatggttgccacactagactgtctctcctaccccatagatatgagtaatcactctgtatgttgcagagcatttaaatttgagagaggagatatgataagttattgactttggggaggtttaaaattcctcataaatatttgtcttgaaattatgcttggtgggaaacctttcagattacaagcttatagaggcaaaaaaataccttaaaagtcagcaagccaaatagtttctgtcctca

SEQ ID NO: 468293 - DNA, 500 bp, Homo sapiens
gttataaaacatattttataatttatgtaatttttttaaagtgacagtgtgtgctgtagaaaagagactcaaaaactattcattatttcacctcacacaacacttttattggactagaaggtcatattgcactcaaatactttgagaacaaggatgtggcccctagtctcaraagagttgcaacgcggttgccaaaaaaaaaaaaaatcaaaagagaaatagactaaacaatttttatgaggcccgctcaaggaaaagcagtgagctacttctctgtgagtctcatcgtgtagtgcgaagagcagatgtttcaggactgagttagtcacccttgatataccttgatctacgtgttagagggttaggatgccactagtcattggaacatcaggagggagccctccaggtgggcaaagggtttcagcaaatatgacagcataaaatcattttagactattaaatgacagaaaattcattacttataattagtattttactat

SEQ ID NO: 468294 - DNA, 542 bp, Homo sapiens
aaacttttttcaattgttatgatttatttttcaataactcttctttaaaaaaaatagcatcaaaattccatgattcttctttctctacartttcagggggcagaaaattcagtagaactaaacacaaataatttaatgttttaagatttgatttttttgaattacagtagaaccctattgtggtaggatttgttatctgacatattaaaaaataattgagttgaatttagttctctagtatacaattacatgtgccaaaatcctcagactttttttttttttttttttgagacggtattgctctgttgcccatgctgaagtgcagtggtgtggtcaatagctcactgtagcctctaactcctgggctcaagtgatactcctaccttggcctcccaaggcgctgagattacaggcatgagcaactgctcctggcccaaaacccccagacttttaaaacagtgacggtttgtggagacacacctggtctgctagatttacagctgaggccagaggtaattgcttttccaaaggtcacccaaggc

SEQ ID NO: 468295 - DNA, 542 bp, Homo sapiens
aaacttttttcaattgttatgatttatttttcaataactcttctttaaaaaaaatagcatcaaaattccatgattcttctttctctacagtttcagggggcagaaaattcagtagaactaaacacaaataatttaatgttttaagatttgatttttttgaattacagtagaaccctattgtggtaggatttgttatctgacatattraaaaataattgagttgaatttagttctctagtatacaattacatgtgccaaaatcctcagactttttttttttttttttttgagacggtattgctctgttgcccatgctgaagtgcagtggtgtggtcaatagctcactgtagcctctaactcctgggctcaagtgatactcctaccttggcctcccaaggcgctgagattacaggcatgagcaactgctcctggcccaaaacccccagacttttaaaacagtgacggtttgtggagacacacctggtctgctagatttacagctgaggccagaggtaattgcttttccaaaggtcacccaaggc

SEQ ID NO: 468296 - DNA, 542 bp, Homo sapiens
aaacttttttcaattgttatgatttatttttcaataactcttctttaaaaaaaatagcatcaaaattccatgattcttctttctctacagtttcagggggcagaaaattcagtagaactaaacacaaataatttaatgttttaagatttgatttttttgaattacagtagaaccctattgtggtaggatttgttatctgacatattaaaaaataattgagttgaatttagttctctagtatacaattacatgtgccaaaatcctcagactttttttttttttttttttgagacggtattgctctgttgcccatgctgaagtgcagtggtgtggtcaatagctcactgtagcctctaactcctgggctcaagtgatactcctaccttggcctcccaaggcgctgagattacaggcatgagcmactgctcctggcccaaaacccccagacttttaaaacagtgacggtttgtggagacacacctggtctgctagatttacagctgaggccagaggtaattgcttttccaaaggtcacccaaggc

SEQ ID NO: 468297 - DNA, 541 bp, Homo sapiens
ttgcttcttttcaacagtcctttgtttaatgtctctttattttgcaaaaacatttcatgagtttttggttcagtaccattttgaacacttctgaactttgaatctggggcaattagtacaaactgagcagttttatacaccaaaatcaatccaggccactgtttcttgggctatttttaaacacagaacctactgattaaaataactatttattgaagtggattcaaacctgcagcttccaccatggtgactaaaaagaaaggtttgggggaggaaaaaaggcggggcatggtggctcatgcctgtaatcccaacatattgaaaggcccaggcggaagtatcacgtcaacagcagcctggacaacagagygagaccctgtctctatatttaaaaagaaaaaaaaaaagcatttggagataacaaggggttaaagggcaagcatttttggaggaaatctatggttcaggcaaggttcctcacctaaaagttgtaccagattaggatgcttgatttccttcattactgcagcttctttcagga

SEQ ID NO: 468298 - DNA, 572 bp, Homo sapiens
aaagggccgtgtaggagtttattttgacctacaattaagacatattcttgacaagacaatagatttggctgggcgtggtggctcgtgctgtaatccaagcactttgggaggctgaggagggaggattgcttgagcccaggaactcaagaccagcttaggaaacatagcaaaacaccatctctaacaaaaatataaatatttgcmgggcatgatggctcatgcctacagtcccagctactcaggaggctgagatgggaggattgcttgagcccaaaaggtggaggttgcagtgagtcaaactcaaaccactgcactccagtctggatgacagagcaaaaactcatctcaaaacaaacaaacaaacaaacaaacaaacaaacaaaaaaagacagtagattataaatgttcttaacacacacacacacacacaatggtatgtaagtaatggatatgtcaattagtttgtttagacattccataaagtatacatacaggcatatttgggagacattgccagtttgtttccagaccactgtaataaagtaaatattgcaataaattggtggcacatt

SEQ ID NO: 468299 - DNA, 546 bp, Homo sapiens
gctgtctcctcctctgtgttctctgttttcagtgatggtcccaccattcacccaactgttcaagccgtgattgccctccttactcccccacatcattttaattctatctccttagtacatctcaaacttgtccacatttctctaaccccatcactagatccttatttcaggctcttttcttttcactcacaatgaacttctttggttgtatcttaactggttactcggcctgtcttgcttcccatactgttgccagagtggcctttctttagtgcaaatctgattaagttacttcactactaaaaatcctccaatgactccccacagtcgtattaataataatggcmatcacacaagagaacagtgaatgggaaatactgagctaagcacattacaagcatttatattttcataattgcccttttgggtgagtatctattttatggatgtggaaacatgtacttacgtggacaaataaccgccaaagatcactaaggtagtaagtggaggagcagagacttgaatagctctaaccacagagcttct

SEQ ID NO: 468300 - DNA, 592 bp, Homo sapiens
tgtcactttttggtttacagaagtcttcatgggtgcggttgggacccaaaggtaggagtgggtatccctgcatggggtagaaggccaggactggcttcctggatagaagccctcattttaagawctggaggatgagttcagggtgaggaagcgctgccaacaattgcacagaggcacaatgcacatttgggaaaccacagggtattctgtgtggcagagcagaggggcaggcagatgagcaactagccagagcactcagcggagcagattccaaaggacttgtgggtactctggcccgtggggaggccaggactcagggacaggacatgatcagactcatcactcatgcagcacgaaccagaggggaggctgaggccccgaggctggagcacagcagctggagcaggcctggcctggaaagtcactgtgttcagctgcctatttgcatgtcacttgttccagggtaaaaatccacctatcaaggagtagagaccaattaattttcttacagttttgcaagagaaccttaaaggaccacccccgcaccctccccccggcacaaacatctgcacacacagtcacactcatgcac

SEQ ID NO: 468301 - DNA, 544 bp, Homo sapiens
agtgggggttcactgtcacctttagccactttttcagaaattgctcataagaaggcgctgagatcttaatgatacttctttatccaagaactacaattaggattctaacaaatttacaaaagttttcctattagccaatattgcatctttagtcaagagcatacgtgttacagttatgcacatcaaagaactttattaactaygcacgtaacttttggcaggcataatgaaaaaaatgtttactagaagaaaactcttttaggttcttgaaaaaaatggaaattacagttcaggtcaaagtatttcctaattcaatgaagtaaaccactgaccaaaattaggactggaatgtaactaatgcaataaaaagctctgacctatccaattgcattgtaatataatggtagaacatgaatgctgagaaaagaaaattcagagtcaaaattttcttattagtttctaattacagatgcaatgtgaacaacatttaatgaatccacttataccacattgatgaaaatatcacttaagaaccattaattcc

SEQ ID NO: 468302 - DNA, 555 bp, Homo sapiens
tgtcagaaagcttgtgtctgtctagggaatgtaagtgaaataggcaactgatcattttccaagttatctttatttctataggtcccaccaaccttattgacaacagagtatacagattttacatagaaatttttaactccaaactccatccttcttaactcccatcacctaccatcttcccatcattagtkaaagttgatgatttctggctgctattgctgatatactttccaatctattcatctttggctatcatgttctatagcagctgttgctgctctcagagcctgtcagaaatgaccagcactgatcatctgagcctgttagaaatgaccagctgagaaccactgctgtggctctcagctttgctgatggcatttgttatcactctctctcacttcctgctgttgtctttatcaccatgattcctggcacttctacccctggaatcttctcaggaggcctctctccttatggtgattataggcctaaccaacctgtaggtttttggactctgctgaagaacttgaaacacacaggtttacagaagtttga

SEQ ID NO: 468303 - DNA, 567 bp, Homo sapiens
aataacttgccattatggaaaatatacattggttccattgcaaatttaaataggaatttaatagggctcaaacaataggacatttattatgtcaaaactatacagagatattaaacttctcaatgcattttattctcaagtaaaaartcatgcaagttttgcagtgatcttgagaaactctgtacaataattaaatgagcactgaaataagagtcagctgacctggcttccagttttagctaaacagataactccctgaaaatccctgaattcgtccatgaagctttctcagcagaacttcatcttcaattagtaatgagactgaggcacttctaagaccctgctagcccttacagaagaaatcatacctctcacctttcttattcctaagaatggcttcatggttaacaggcccagattataaagcatggttcaaaatcccagtcgcattttcaaaagtgaccaaatgccccaatatacttagtatagtcacttttttattatccattttaacagacaggaaaaaaaaggaaaacaatcttttttaagcagatgagctttaaaaat

SEQ ID NO: 468304 - DNA, 613 bp, Homo sapiens
ctataagaaaagagtaatggttatttgaaaaagtagattttagaaataaaaaatagtaactgaaatttaattccatgaccatcctatatggcaagtactgtaatcatcccctccacttaacagataaagaaactgaggttcagaagattaaataatttgcccaagttcacaaagcttgtaaatgctggagctggacttgaacccatgtctctgactccaaagtttgtacttttarctattgtgctataattattaatgaaagtatgaatcgcataaacataataaaggtagacacacacatatatctttataagttaccaatataagtatctatataagcaaacacagagatatagtaatgttaatagtggtgaattatgagagttgatttacttgtaatcttctctgtatctagaattttttatgctatggactcttcgtcccctctccccccagattcatatgttgaaacctaatcttcaatgtgatggtatttggaagtgagacattttggaggtaagtaaaacatgaagatgggaccctcatgaatggaattagtgtccttataagggtatgaaattaccctctcctctatgtgatgatatgagaagac

SEQ ID NO: 468305 - DNA, 611 bp, Homo sapiens
acccaacaatgctggcaacttgatcttggatttcaagcccctagaactgtgggaaacaaatgtttgcttaagcgcacaccttataatattttgttacagcagccgaagctaaaacactttacttaaaacataacaatataaaaataaataatcacaccttatgacttcctttgctgaataattggatgaagcaaataacgaaaaagcaaaacaaaaccagccacaataaagaggataaaaggcagtttggattctgctgaagacagaatgtgtgatatgaaaaatagatctgagaaattacccataatacagtgaaaagaaatcttatacattcaatttctagtggttgctgtcatattttaaacatacatacctggttttaaataatctwgttactcagtatctttaggctcttcccaatcaacacaatgatattccaatttttaactcggaacatctgtttgaaatataatttttgctagtattttatttctaacttctgtgtgttcccccatctttattattatttacattgtcctatatagtcaatgtttgtttagagttacccattgctttttatatctcctgtttccatcttttaaaaatacagt

SEQ ID NO: 468306 - DNA, 655 bp, Homo sapiens
attacatctgtaacttactctcaaaaggttcagaaaaatatctgtatatctataatagaatgcttatgttaaacattgggaaaatccagattaaaggtatctaggacttcttttcattatttttgcaacttttctgtaagtctgaaaaatttttgaaacattaaaaataatcagtcttataggttctatcatattatattatctaatcagctgtttgtagcactcataatgaattgtgtactctttgattgtagcatttggaactgtgaactgatctttagtggggctttaactatgagactcagtacacctgaactgacagcattttgtgttggkttcttccaggaaatctagggataatattggcctgagaacaaatttggagtcatttgtttcagcttacggtttcccacaatacaaagatggtaaaaatttgagaccaaagtacacatgactttcagttctgtggttataaagtcttaagggagactttgtccacctatagacaagttctctgttatcttcttgccagcgagcagattttctttctttctttttttcaccctgtcattcactgatgctgtagctctttgacttgtattacatttcccactccctcccacatgtaggcctaatatctcaaatttgtgtgtga

SEQ ID NO: 468307 - DNA, 632 bp, Homo sapiens
gtggttcaggtctgcactttgggaggctgaggcagggaggagttcaataccaacctggtcaacatagtgaaacatgtgtggtggcatattcctgtaatcccagctacttgggaggctgagacaggagaattgcttggacctgggaggtgaagtctgcagtgagacaagatcctgcacaatgtattctgcactccagcctggccacagagcaagacttcatctcaaaaaaaaaaaaamaaacaaacaaaaatagaagaagagattttaaaattggtaacatgggagagagtgtagagaacaattaaagataagaaaatgcaaagtttcactaagtgtgatcttggagagcacccatatctgaatcacctatggatatttggtaaaaatgagaagtccccagttccactctaaacctacataatcagaaaggagagggcagacaagtgcattttaatgtcttctttaggagatttttatgttcacattcaaaaaaaaaaaagaatagaaggaattctgaagcacaccaagtgttcagatgaggttaggttacttaaatttgtatatgaaacattcaattaattttaacttttatattaagactgaggaatttttaaagactgtctttaacacta

SEQ ID NO: 468308 - DNA, 584 bp, Homo sapiens
tcaaccaatttgtgacagatgaaaaaaagaagaaatacttacttgttccttttgttaattaagtaatttgagtccttaagcacaagctgtgtatctaagcacagtcttttcctaaaccactttgtgctgtctcattaagtcatatggaaagttcgtttgttctgcagttttctaacttcaccatgatcctattactgtttcctgatttgtcactttgtcatcaattcctacctccccaaggatctattttcctcacatccttcaaatacattttactgattctctcccgaaatggctcctcatcatttttaaaatttttacccagtatccagacaaggaagatttgtttagaaacaagggctttaaaagagggagagagagagagagagccttctttactgaactactattttaggtaaacaatggacattgggcatacagaaracataccgaagaccagaatatttgagaaagaaaatagcattgggaagttcccttctggtagccactgatatattcctatttttactctcttctctcttcaatccattccccactagggctgtaatcccaatactctagac

SEQ ID NO: 468309 - DNA, 374 bp, Homo sapiens
agccacgtctgcagtgatcccagcatcatctcttctttctgtctccaagtatcttgaggttcctgggccttctaggaagtggcattctttacccacctgtaacgctggaaacgcatttaaattgggtaccaaggcagtttttctggggggtcagggaatggttattgtctccatgaagttaaccttagttccttaaaaactgatcatatctagttctatgcacattctcaaatatgaygttctagtcaaatgccttggtaatataatcaatgtttccaattatgtcctgttaaaaaagaaaacagattcttattgaacttatgcaaataactacattgccataaaaacagaatacccactaatagcttctgaat

SEQ ID NO: 468310 - DNA, 625 bp, Homo sapiens
ctgacatccttatcgacatcctcatgtaaatgttccctctcttattttccacgtgggtatgtgttttaaatagtccctttaaaaaaaattaatggtattttgagacagtgagaggataaaagtatatggccatcacacatttaataggaaactaaaattatttttgaaaactttggaaagattacataaaaagtctcaaaattttatcgttagaaggtaaagatttctattttcccctcacctcttacatttagcataaatgacagtgaagcatttttttcaaatttaagaaacaagtataaaatctgatttttagtttttcatgaaacgaattttgtatataattcttgtawcaatattaacaccaataaatcaggaccatctagaaaacaaaaacaggattaaaaaagataaccaattgacatgacggatgaagaagacactaggtgagaagaaacatgtatataacaaagcctacaattgggaaattgtgggaatcaaagtcaagcagttaattactaacaaagatggcaaccatgtttcttttgtctttcacagtgaatgcataattagcacttaatactaagactagggaataaaccatctataatctattgaaaaagac

SEQ ID NO: 468311 - DNA, 637 bp, Homo sapiens
  misc_feature (1)...(637): n = A,T,C or G
gtatacattaatcatacatgttagtaggaaactttccaagcagcacrgtagtgcttgaaaaggggaagtattacacatttctttttgttttgtcatacaaaagcattttttaaaagcccccaaaactactgtcttagtttcatagatactataatgtacacaaaaagaatataatccctaataaaggattcctttacattgattacatttagcttcgtgaaaattttagcatttctttttttactttaggccattaaaaaaattctggcgactatacttaggaacctctgcaaaaggggcatggcccaacaaaagcaattttctcgcttcctttgtaagaacctaggtgactcgggtaatgaatagcatttcgatatgggaaacccgtggctcttcaaggaaggtcacctaatcccgtgggactcccctttccttatctgtaaatgactagatgattcatccattctatcattcagaaaattatgaacatccattatgcccaggcattacgctcagcattacagctcttaacaaatttatcattttatagtctttatcagtcaactcacatttattagttgttatataccaggctgtgaactagattgagatgcaaaatgaatacaatttaagnnnn

SEQ ID NO: 468312 - DNA, 699 bp, Homo sapiens
gtgtacttttagccccaaaatactcagtgcwcagatatgtccacaaaactgaccctcatatatgcgcacaaaagatatgttttatttagaacctttttttctagcaaataacagaaaatcaatgccatccagcttaaacaataaagggggtttgctggtttacagacttggaaaattcaggcataagatggtttataatttgagctttttttaggaggtgaaaaaaattgacaaaacagtagaaaagtgatacaggaatgagatgacagccaatatagggtgtatcatcaagctaatttccactgtggacaactagaatttaatttcaatagaaaaaccctgagaaacagtgtaaaacgtattgcctcagaggtcatccatcctagggccacagggttgaaagattatcttaaggagctttaattccactgtgctagacagaggactccagtagtaagagaaacccctcagacaacaaattcagtactgacaattagaatttgggccagtggacactgaagtggtaaaaacaagtggatatgggtaggggaccaataacatctgcctcagatagattttggattgggtgacccatcagctcaacaatgccattgaagattctctcctctccattctgatttctaggattaattttatccaaacaatcgtttccatggtggtcattaagtgagtaccagt

SEQ ID NO: 468313 - DNA, 578 bp, Homo sapiens
acacttgttattttctgttttttgttttttcgggttttttttttttatagctatcctagttgatgtgaaatggtatctcataatggatttgatttgcctttccctaataactgatgatgttgaacatctttttatatgcttgttggtcatttctttatcttctttggagaaatatctgttcaagtttttttgtaaatttttaattgggttgttggtctttttgtttttagattgtaagagttatttttatatttttgatattagaactttatcwgatatacaatttgaaaatatttttcccattctgtaggttttttcactttcttcataatgtcctttaattcacaaaagtttttaattttgatgaagtccagtatatctattttttttcttatattgcttatgcttttggtgtcatgtctaagaatccactgccaaatccagagttatgaagatttacccctaggtattttttctaagagttttatagttttagcattcttactaagctgctactgtacatattcatggagaagttggaaggggcagggagcactctatctatcatgtaacactgg

SEQ ID NO: 468314 - DNA, 613 bp, Homo sapiens
cagctgtccaggggctggctcattgttggctggcctaggccggccttagtaggacaacttagctctcttccatgtgtctcctgctctccagcaagcaaggccaagcatgttcttcctagacagtgtcctyatagcataagctgacttggcagtgtgcagatgcttttctatgcgtttgcttctggcaaaattgcttccatcccattggccaagacaagtcacatgactagactcagagccaaggggcaaggaaagatacttcttgatgagaagagcagcaaaatcttgtggcaaagggcatgaatatcgtgaagggtgaagcatcaggaccatttataatatcaatccaccacatgttaccctgtctttcagaagagaaatggattaacattggtcggtcagcacctgttgcttcactaacctacaatagggccatatttgtttcaagggttctgtgaaatattcagggttaaatattctcctggtgacagctattctattttttttaaagataggaaagatgtctatgtggcaaatgagcattctattgttgaaaacatcttcagtgccataatgagaactcaggacaaacctggatcaaacagcagcaggt

SEQ ID NO: 468315 - DNA, 613 bp, Homo sapiens
cagctgtccaggggctggctcattgttggctggcctaggccggccttagtaggacaacttagctctcttccatgtgtctcctgctctccagcaagcaaggccaagcatgttcttcctagacagtgtcctcatagcataagctgacttggcagtgtgcagatgcttttctatgcgtttgcttctggcaaaattgcttccatcccattggccaagacaagtcacatgactagactcaragccaaggggcaaggaaagatacttcttgatgagaagagcagcaaaatcttgtggcaaagggcatgaatatcgtgaagggtgaagcatcaggaccatttataatatcaatccaccacatgttaccctgtctttcagaagagaaatggattaacattggtcggtcagcacctgttgcttcactaacctacaatagggccatatttgtttcaagggttctgtgaaatattcagggttaaatattctcctggtgacagctattctattttttttaaagataggaaagatgtctatgtggcaaatgagcattctattgttgaaaacatcttcagtgccataatgagaactcaggacaaacctggatcaaacagcagcaggt

SEQ ID NO: 468316 - DNA, 613 bp, Homo sapiens
cagctgtccaggggctggctcattgttggctggcctaggccggccttagtaggacaacttagctctcttccatgtgtctcctgctctccagcaagcaaggccaagcatgttcttcctagacagtgtcctcatagcataagctgacttggcagtgtgcagatgcttttctatgcgtttgcttctggcaaaattgcttccatcccattggccaagacaagtcacatgactagactcagagccaaggggcaaggaaagatacttcttgatgagaagagcagcaaaatcttgtggcaaagggcatgaatatcgtgaagggtgaagcatcaggaccatttataatatcaatccaccacatgttaccctgtctttcagaagagaaatggattaacattggtcggtcagcacctgttgcttcactaacctacaatagggccatatttgtttcaagggttctgtgaaatattcagggttaaatattctcctggtgacagctmttctattttttttaaagataggaaagatgtctatgtggcaaatgagcattctattgttgaaaacatcttcagtgccataatgagaactcaggacaaacctggatcaaacagcagcaggt

SEQ ID NO: 468317 - DNA, 613 bp, Homo sapiens
cagctgtccaggggctggctcattgttggctggcctaggccggccttagtaggacaacttagctctcttccatgtgtctcctgctctccagcaagcaaggccaagcatgttcttcctagacagtgtcctcatagcataagctgacttggcagtgtgcagatgcttttctatgcgtttgcttctggcaaaattgcttccatcccattggccaagacaagtcacatgactagactcagagccaaggggcaaggaaagatacttcttgatgagaagagcagcaaaatcttgtggcaaagggcatgaatatcgtgaagggtgaagcatcaggaccatttataatatcaatccaccacatgttaccctgtctttcagaagagaaatggattaacattggtcggtcagcacctgttgcttcactaacctacaatagggccatatttgtttcaagggttctgtgaaatattcagggttaaatattctcctggtgacagctattctattttttttaaagataggaaagatgtytatgtggcaaatgagcattctattgttgaaaacatcttcagtgccataatgagaactcaggacaaacctggatcaaacagcagcaggt

SEQ ID NO: 468318 - DNA, 643 bp, Homo sapiens
ctacgtggataagaacagatgacaggagagtgggtggcttcctggagagaacttgggctttaactcttattaactgtrtttcctagtagagtagcatctgtgcatactagatgtgtaagcttcaacaaatgatcttgccctgagtctgttttattgtctgtaatatgggtaaaataatatatttttatgagattaatttaaggatttgatggcacaatgcatgcagaatcattagcatagaacatatacttgatatttctcaattcttcttgatttccccttcctgtctttctttcctcattttcaaacatatcaaaataaaactgaaaaagtataaagtatgtcacgggaaaatttagaataaaatatattttatttttttctcaacattagaaagttagtcaactaaaaaatgagcagctatcataccaatacatcgtttagtatagggtagtcagttgacccacacagtaatattaagtaaattcagctgtctttgaacaaaaggaaagagtaagcaagcaaaagaaagagagaaagaacaatttagtaattacagaggattcttcccaccattctaataatgaatggagtatgaatcacctagcaagcaagagatggcagacatgatttggctttccat

SEQ ID NO: 468319 - DNA, 583 bp, Homo sapiens
ggagcatgcaagcctccttaaggaatagctagtaagagcaaagcaaaaaagatttcagtaaaaaatagtgaagggattgcacctcacgtcaaccatgcgataaactggtaagctcctgtggcttctccctctccctttctatcttaraattgaaattctgaggtaagataattgtcacagggatgtgtgttaatacatttatttaaaacgaaaaatgaaagcagactttttgggatggaaaataaatctgatttgtctgatgagcttggcaaagaggaccagtgttacaaattgggttatgtgacagatattacactttccataaatcaaatgagtgaaatctcagactctaggattttgaaaaaaaaagtttttaagctcatgtgcattttaaattataactgtagcaacttttaaacatattactattgaaaaatgttgacataaacatacataagtggtacataactttgtccaattatttgagcaatattttttataattttaaattttattttagatagagggggcacatgttcagttttgttagctggatatattgtgtgatgctgaggtttgggat

SEQ ID NO: 468320 - DNA, 590 bp, Homo sapiens
acaccttgtcatccatggcaacatggatgagcctggcgaacatcatgttaagtgaaataagtcaggcacagaaagataaataccacatgttctcacatatctggaagctaaaaaacattgagttcgtagtagttagggagtagaattttgattatcagaggctgagaggggtagaggggtagataggaaagaagaggttggttaacagatacacaattatagctaaatagaaagagtaggttctattgttttataacactgtagggtaaataaggttaacaataatttattatatattttcaattgaggtgatggatatgctaactaccctgctttgattattctatatcatatatatggactgaratactaccctgtatcttataaatatgtacaattactaggtgtcaactaaaaataaaagtggggaaagtaaaccatattatcataaactagtaatattattaatacagtacttacatgacaggtacagttttgagtgctttatatcaatatattcattaaatcctcacagtaactctatgagactgatactataattaatccccattttacagatgagaaaactg

SEQ ID NO: 468321 - DNA, 586 bp, Homo sapiens
ttttggaggaagtctactctagcaatgaaattcatagtctttggaatcaggtagatcaagttcaaatcccagctctaccacttatgrgctgtgtgatcttgacactattactcaaactttctgagcttctttttctttatccataaaagaaggacaaagatatctacctcacagatttattatgaggattaaataggataacatagatatatatagctcctagtatctggtaaaatactgaataaatggtaactactttttattggcagactaagtagtttatatatccactattggtagaatgacctattgatcctgtaaatgattaaggaggcactcaaggaaaattaatctaagaaggaggaatgaaacgaagggaggagacacaagggaggagaggcagcttaacaagctattacagttgccctgacatgagctaagtgtctgaatctggtcactggcagcagaaataggaagaaaaactggaacaagattcatggttaaaacaatcttaaatgattttccctctttcgtattgggcttttattccagtctataagaacttgcatgagaaatatatgttaaa

SEQ ID NO: 468322 - DNA, 614 bp, Homo sapiens
aagttcactattgtaaattttaaacacaaataaaatcctacagtggtcacataatgtgacaatggtagtaactcaagttctttttctttgtctttacaatcactgaaccatcatatttgtctccaatctactgttcagatttggtactatgtagcatcacagggcttggagataaactgcactgcactcgaagcaagctggaatcattctaaatcatcacaaacttcccctcaaaacaaatggctgtagttgagtccacacattgttccttattgactatatactggagagttcctccaacttacttcggaatacaatacaatgtttgtaaaagaacataatgtttattaaacacatcaataagaaaaatgagctaatttgaaacttacatatatgttattagaacaaactagtaactgtttaattatttagagcttaggaaaaatgtttttcaaggaagatattttatgattgacttttttttagaattgcttgcatcctgtgaagacagacaagccaactttagtgagcttttttttaaaaaattattttctatagacagtgcayccccttattgcctacctctgggcagacagctcccaaaagcccatgcc

SEQ ID NO: 468323 - DNA, 581 bp, Homo sapiens
taaatgaataaactgcatctgtggcaccataagataagcttagaaaattcttccccacgaccaagcactaaaacccctctcctccagccagttgcctcaacagtagctctgccaggtctccattgaagacagaatctgagctccttctggaagatcatataaaaaatatagacttcaaagccacaaaggcaataaattctcacttcaaatctaatacgtgttttaagcaggctgcctgaaatataaatatctgtttcaaaaataaacttgggtccttgaaatataatcacattgctgtgtataggaaaagtgatggtgctttcttgataaagactgaactatgctcatctcttcttgggaactcatccttttaccaagttatctacatctctccacatgcagcattagctgaacttgaaagaaaaatattaaaccaagatgtcaggacaataaataagaaatttagggacaaatataaacccagatattgccattaattttttgtaccrcaagtgaatgttacctaaacctaatgtcctaccttaaaattgattatcaccatcctgaacttccccctcaaa

SEQ ID NO: 468324 - DNA, 466 bp, Homo sapiens
cgcaacctactacattgccccagacagagcatgaacattctgttgacttgaattgcacaatagattgattgcaacatcaacatatgaaatccattgtcttagaaaaggatatgttcactaggaaaaagaaaacaactacaacaattcccacagcatcagattttgttttgttttgttttgttttgttttgagatagggcctcactctgttgcccaggctgtggtgctgaacatggctcactgcagccttgacctccagggctcaagtgatcctcgyacctcaatcccctgagtagctgggactacaggcaagcaccaccatgcaagtaattgttgtatttttttgtagatagatagatattttttgtaaacttttgtagtttcaccatgttgccaaggctggtctcaaactcctgagctcaagcaatctgtccacctcagcctcccaaagtgctggaattacaagc

SEQ ID NO: 468325 - DNA, 629 bp, Homo sapiens
gctgttgtggtggtggtggttgcatgtatataygtgtttcaaaaccatctgacacagcctattcaatgctttcctctagttcatacctctgtactggtttactgtgtctgccacagaaattgccaccaaggtagcttaaagtaatggaaatctgctctctcattttttcgaggctacaaatctgcaatcaaggtgtcaacaggccatgctccctctgaaggctctgcggaagaatcctttcttgcttcttcctagttttgatggttgctgccaatccttggcattccctggcttgtggctgcaacactccaatctctgcctcaatcatcacatgaccttccttgtgtatctcctttgtgtctctgtgttcaaatatttcttccctttctcctgtagatataccagtcattggatttagggttctcttgatccagtatgatcttatctcaactggattatatcttcaaagaccttatttgaacgccttatttccataacggtcacatttccaagtaccaagggttaggacttaaacataccttcttgggggccacaatttaacctattatatcccactacacagtatatgccatgacagaacctctttcatgagaccaacatgaaatgta

SEQ ID NO: 468326 - DNA, 546 bp, Homo sapiens
ctttctcagttgtgagtttatgaacccaaggttcaagtttccaaagttttgttgcagtgtgaatggcaagcacagtctttctctaatgttctgagaatatccaatcttcaggttctagattgtgaaggggttgattgtccccagcgaaccataaaaagctttctttacctggtgaaaatatactgtgggatgataattaactgttataacataagacatgcattgaaactaacaattgaatgaaatctctttatgtttaaatgacccatcaggtagccaaatgtacgtaaaggtttgattgtcttcccaggaatatggaaccaaacactggttttaaactattttcacaatttataagtcaycacatcaatatattcaatttggattgttttatctgttccatgatgagtcatggaatgcagaacctttaataacaacacatttaaggactcaggaagggccaagtggctgtcctggttctccatgagtctatgcttaacatgggactttatgtcctcttgaataccagttgtttctccaatttag

SEQ ID NO: 468327 - DNA, 587 bp, Homo sapiens
caccattgtatttccctccctgcttgaatcagttttgttgctggtgcccattcttcagtagcttttttgcaaatgtcagtgaggcagaaactcttgttttatttaaatgtctggatatgtgtttaattatcttttttcttcaatggtagtttattatgtgtagaagtttaggttcagagttctttactttgggtacattgaagatatttccccatgatcctttagcattcatttttgcttatttttatgagtgctctgctacccacatgatagccatttctttacagttaatctgtcatttaaattttgaaattttgaaattttgtggatacataataggtgtatatatttatggagtacatgagatattttcatagaggcatataatgtataataattatatgagggtgaatgggttatccatcacctcaagcatttatcctttctttgtgttacaaacaatccaattatgctcttttattttaaaatgtataataaattgactgtaggcaccctgttttgctgtcaaatactagatcttatttactctacrtaactatatttttgtacccattaaccatccccat

SEQ ID NO: 468328 - DNA, 647 bp, Homo sapiens
gccctccaaaaagaccaggaataggattagagggttagaactttcagccacttgccctgtagggcgggaawgtttggagattgagttcagttatgtgaccaatgatttaatcaatcatgcctaagtaataaaactccaataaaaactctgctcatggagacttgggggagcttcctggccggagaatacatcaatgtgccgagagcgtgtcatagcctgactgtattgggagaagctcttgtcctggactctcccagactttgccctatgtgtatcctttaaaataaaactgtaataataagtatagcattttcttgagttctttgagtcattctagtaagttatcaaacctgaggagatagtgagaaccctgaatttgtagccagtttgtcagaaatgtcaggggctggggaccctacttgtaactgaattttaaaacctgtagagtttgatgctaagtctgggtggtttgtgtcagaattgaattctagttcacacctgtcttagtccattttgtgctattataaaaataccacagactgagcaatttatagtgagcacagatttattggttcatgggtctggtggctgggaagtccaagattatataccttgcacataaactgttttttcaatagtttcacatt

SEQ ID NO: 468329 - DNA, 647 bp, Homo sapiens
gccctccaaaaagaccaggaataggattagagggttagaactttcagccacttgccctgtagggcgggaaagtttggagattgagttcagttatgtgaccaatgatttaatcaatcatgcctaagtaataaaactccaataaaaactctgctcatggagacttgggggagcttcctggccggagaatacatcaatgtgccgagagcgtgtcatagcctgactgtattgggagaagctcttgtcctggactctcccagactttgccctatgtgtatcctttaaaataaaactgtaataatragtatagcattttcttgagttctttgagtcattctagtaagttatcaaacctgaggagatagtgagaaccctgaatttgtagccagtttgtcagaaatgtcaggggctggggaccctacttgtaactgaattttaaaacctgtagagtttgatgctaagtctgggtggtttgtgtcagaattgaattctagttcacacctgtcttagtccattttgtgctattataaaaataccacagactgagcaatttatagtgagcacagatttattggttcatgggtctggtggctgggaagtccaagattatataccttgcacataaactgttttttcaatagtttcacatt

SEQ ID NO: 468330 - DNA, 458 bp, Homo sapiens
  misc_feature (1)...(458): n = A,T,C or G
tacttaatttgttctgattttgtttgtttgtttgtttgttttagcaggcaggaagacattttcaaattccagaaatgctgacggacctccagcgtttccatgttcctccccacctgaagaatgttaagataagcttaatgtgattataacgagacttatatgcccaacaagcatagtttgggaaagagatttgctttgaatactgtgaaataagctttaatctgtcaggtttaaaaaaaaaaagttcctgtgaattaataatgcaaacagcactgtgctttctgagtgcgactataaaagaatttaatgacctcctattgtgtcaagctgtggattaacttcaattttcagaagatcccaggatgcaggagtcagggtttgaactcctgagaaaagtaaatrctaaaccctaaatggccactgagtaaagaatcctattgtccccgctgcatagcaan

SEQ ID NO: 468331 - DNA, 576 bp, Homo sapiens
cagggaagatcggaggagttgctcccaagaattgactgacccctacctcaagtctatagagggaatggggtgattgtctcaggtggcaggaggtacagagtataaagaatgcctgctgcctcttgccaccctcaagtactgtagayaacaggtagcactgctgttggaacatgaataagcaatagccaacacatgggtccacacacatggctcaatctcagggttggtagtggaatttttatggaccaaagacctgaactcattctgtgtccagtgtgagtgaaagttacacaaatccttatgccagtatcattctatctgcttgctttcccattatcctacaaaagaagaagcatgctggccaatgagagcaatctcttaacagacttccccactgaaacctaatgtgggcccagtacaacaccacagtctcaagtcccagagctcctcagggcttctgcctaaccccatgtataggttagagtcttggaaaagagaaagaatgatggagcccaggtggttgccagtccagggttatataccatttctggggggcataattgatcagtcccaggc

SEQ ID NO: 468332 - DNA, 576 bp, Homo sapiens
cagggaagatcggaggagttgctcccaagaattgactgacccctacctcaagtctatagagggaatggggtgattgtctcaggtggcaggaggtacagagtataaagaatgcctgctgcctcttgccaccctcaagtactgtagacaasaggtagcactgctgttggaacatgaataagcaatagccaacacatgggtccacacacatggctcaatctcagggttggtagtggaatttttatggaccaaagacctgaactcattctgtgtccagtgtgagtgaaagttacacaaatccttatgccagtatcattctatctgcttgctttcccattatcctacaaaagaagaagcatgctggccaatgagagcaatctcttaacagacttccccactgaaacctaatgtgggcccagtacaacaccacagtctcaagtcccagagctcctcagggcttctgcctaaccccatgtataggttagagtcttggaaaagagaaagaatgatggagcccaggtggttgccagtccagggttatataccatttctggggggcataattgatcagtcccaggc

SEQ ID NO: 468333 - DNA, 576 bp, Homo sapiens
cagggaagatcggaggagttgctcccaagaattgactgacccctacctcaagtctatagagggaatggggtgattgtctcaggtggcaggaggtacagagtataaagaatgcctgctgcctcttgccaccctcaagtactgtagacaacaggtagcactgctgttggaacatgaataagcaatagccaacacatgggtccacacacatggctcaatctcagggttggtagtggaatttttatggaccaaagacctgaactcattctgtgtccagtrtgagtgaaagttacacaaatccttatgccagtatcattctatctgcttgctttcccattatcctacaaaagaagaagcatgctggccaatgagagcaatctcttaacagacttccccactgaaacctaatgtgggcccagtacaacaccacagtctcaagtcccagagctcctcagggcttctgcctaaccccatgtataggttagagtcttggaaaagagaaagaatgatggagcccaggtggttgccagtccagggttatataccatttctggggggcataattgatcagtcccaggc

SEQ ID NO: 468334 - DNA, 459 bp, Homo sapiens
atagcatgcaatttaaaacttataaattgtttatgtctggaattttctataaaatatttttggaccatggttcacaacgggtaagtgaaatgagaccatcgataagtgggactactgtaatttatcaaagggacctgcagacttcaaaaggcttaaagccactgatctcagttcatttgtgctrtaataacaacataacacagactgggtaatttataaaaaacagaaatttatttctcacagttctaaaggctgacaagttcaaggtcaaggcactggcattctgtgtctggtgagagccttcttgctgcatcctctcatggtagacagtggaaggataaaaagagcctagttagttccctccagccctttcatgaggcactaatcccatccatgagggtggagcccttatggcctaatcatcttctgaaggccccacctcttaatacttttacatta

SEQ ID NO: 468335 - DNA, 544 bp, Homo sapiens
catcccattgagttagtgtgaaaacgtaggtattgtaacctggatacattttccattcaagaatgtaggcttaatcatttaaaaatattttgaaaagacatgaaataagatgaaaaaagtacaatattataaacacttgtattctgatcactagaatcaatcaagtcattttcaataaattcttctatccttgtcaaaagcctcataaatcagaaacttttgggaattgttgcttacagaaatttggatgytacctgttactatggatgagattctataacttagaatgggcaaaacaggtaaacagccttctcttacagaatgatgccttgatctaacaaaatttatttatttccagttatgatttttttaatggcgctcaggagttaggaagtaaaaaaaaaaatcatgaattctatcttatgtgttgtacagtaggaaaaagtctcaaaactttaaggcaggcatttaagaacagtgaggcccccgaaagccagcagaagcctgagcatgagtcttgtcttctacctctccctaaagagtc

SEQ ID NO: 468336 - DNA, 579 bp, Homo sapiens
accatgagagcaggaagagattggcgtacctgcatgcttctggccagtctcctctctttcttgttcagctcaggaaagatccaacaatatgagtgtatatgaatgactcccaggctaccactygtgaaggagcatttgctgtatcttagcatgtctaattctaatgatccccatagtctgtctctatttttctaaagaaatatgacaactttaaaaaaaagaaatcaaatcaaagtctactataccttgtagtattaaagactgcctttctaaacgtgaatttctgtagacgtggaagtgtcaatatgaactacggaaggatggttctggcacggagctccaagtgcctaagcagtgagcttctggaatactgatgcctcagtgttttctacctctaagtttgagaaatatatttttgttgttggttggtattcttttcccctgaggctagttatgcacaatccttaagtctagttttcttttttggaatttaatcaataaagtaaaatattaccagccattttttcaaaagataattcctgtcttccctgaaaattcaattttcttaaaaaataggca

SEQ ID NO: 468337 - DNA, 579 bp, Homo sapiens
accatgagagcaggaagagattggcgtacctgcatgcttctggccagtctcctctctttcttgttcagctcaggaaagatccaacaatatgagtgtatatgaatgactcccaggctaccacttgtgaaggagcatttgctgtatcttagcatgtctaattctaatgatccccatagtctgtctctatttttctaaagaaatatgacaactttaaaaaaaagaaatcaaatcaaagtctactataccttgtagtattaaagactgcctttctaaacgtgaatttctgtagacgtggaagtgtcaatatgaactacggaaggatggttctggcacrgagctccaagtgcctaagcagtgagcttctggaatactgatgcctcagtgttttctacctctaagtttgagaaatatatttttgttgttggttggtattcttttcccctgaggctagttatgcacaatccttaagtctagttttcttttttggaatttaatcaataaagtaaaatattaccagccattttttcaaaagataattcctgtcttccctgaaaattcaattttcttaaaaaataggca

SEQ ID NO: 468338 - DNA, 579 bp, Homo sapiens
accatgagagcaggaagagattggcgtacctgcatgcttctggccagtctcctctctttcttgttcagctcaggaaagatccaacaatatgagtgtatatgaatgactcccaggctaccacttgtgaaggagcatttgctgtatcttagcatgtctaattctaatgatccccatagtctgtctctatttttctaaagaaatatgacaactttaaaaaaaagaaatcaaatcaaagtctactataccttgtagtattaaagactgcctttctaaacgtgaatttctgtagacgtggaagtgtcaatatgaactacggaaggatggttctggcacggagctccamgtgcctaagcagtgagcttctggaatactgatgcctcagtgttttctacctctaagtttgagaaatatatttttgttgttggttggtattcttttcccctgaggctagttatgcacaatccttaagtctagttttcttttttggaatttaatcaataaagtaaaatattaccagccattttttcaaaagataattcctgtcttccctgaaaattcaattttcttaaaaaataggca

SEQ ID NO: 468339 - DNA, 542 bp, Homo sapiens
atgctgcacatagatccccagaacttgttcatcttatagcaaagtttatatcctttgaccaacatgtctccatttctcttacctcccagcctctggtaaccactgttctactttctacttctgagttcaatctttttagattccacacataagygatatcatacagtttaaaccaaaacagccctgtcttttatgacatcgacatttttgaataatatagtattttataaaataaaatgtttctcattttgggcttgtctgaagatttcttgtgattgtattcagattatgcattcttggctggaaaacagcataagtgatgtggtatcatattcagggcattacatcctgagctgaggtgggtgatgcccatcagcctcatattggtgaggttaattttaaacccagtcaaaacattgtccaattctctattttatagacaccatttttttctttgtaattaacaagcaacctgggaagacactttaagaacatctggatttaatttaaaaattacccttagatttagtgtccattgatga

SEQ ID NO: 468340 - DNA, 620 bp, Homo sapiens
gctgggctcataaacatatgtacaacatgagcgtgtctattaagtgtacaaagtacctggtggtatgaaggaggatgttaactctatgtgggggctgggaaactgtgggaggggaatccagggagaaatcacagaggaagcagttatcctgccaggcatgatttctgcctgccttctgcaatgtttagggactcagcccaggtttctcttcttgtcctgtccctaacgtgatattgctttccttcctgmcactacacctgggatttgatgcagattttccccctaagctaccaacctgaaatcttctggaatctcattcttgctgagctcctcagtggtcatcccctcctctctgtgtgacaggctcctgagccccttagatcctgccaccactctgaactcagggagtgcctgcaccagactcatctgagcctcagggtgaggcttcctgtgaggaattctttcctcttattgatacagtggtagacagtttgcagccgctctgctcccagaccttgccttttacctttgatagcattacatattttctgacttaaactgattagtatgtcttaagaaaagttcgtgaggtttttcatgtcttcaagagagtaagcttt

SEQ ID NO: 468341 - DNA, 620 bp, Homo sapiens
gctgggctcataaacatatgtacaacatgagcgtgtctattaagtgtacaaagtacctggtggtatgaaggaggatgttaactctatgtgggggctgggaaactgtgggaggggaatccagggagaaatcacagaggaagcagttatcctgccaggcatgatttctgcctgccttctgcaatgtttagggactcagcccaggtttctcttcttgtcctgtccctaacgtgatattgctttccttcctgccactacacctgggatttgatgcagattttccccctaagctaccaacctgaaatcttctggaatctcattcttgctgagctcctcagtggtcatcccctcctctctgtgtgacaggctcctgagccccttagatcctgccaccactctgaactcagggagtgcctgcaccagactcatctgagcctcagggtgaggcttcctgtgaggaattctttcctcttattgatacagtggtagacagtttgcagccgctctgctcccagaccttgccttttacctttgatagcattacatrttttctgacttaaactgattagtatgtcttaagaaaagttcgtgaggtttttcatgtcttcaagagagtaagcttt

SEQ ID NO: 468342 - DNA, 485 bp, Homo sapiens
gattagagttctttcctcttggagaagttgaatgtggtgcagatatccttgcatactttatcacaaatcctactgaagtcctgtgaagggtcatcaagtagaattatactaaagtataatcagtagtctgtatggtcaagtaagctcctaccagactgaccgtcccatagaaaacaactgtaaactctggaaaaaatacaaagatcaactacatgaaggcactggagatgaaacgaagacagattttggagggaagttagcatatgagcaaagctaatgatacagtgagagtttcctgtattttatgaattttagattgggggcagactccagccagtgatgcatgagatcaatgaaactcttatagaaaacttgcagtcctgttgcccagaagatgagtttcaggacaaccaaagccatttgaaagtgagcgtagaattgcagaaaggagagaagcragaaaggaagcacaaattctgtgtata

SEQ ID NO: 468343 - DNA, 577 bp, Homo sapiens
ttagtcatcctactcccataattaatctctttcttctttgtgctcacatgccatctattatcgtagttagggtagtctgcctagtattagtgccatttatgtgcatatgtaaatttctctaccctctcatgacatgaattccagagggagagactgtttctcattactcttcatagtttcaacctgtatttgtacatggaaacactaaatacacatttgttgaattaaatttcyatttttaatgcacttttcatagtatctatctactgcattctccaaggaaattttacccttttaatactgtgtcacgtaaaatttaaagtaaaaagcaaattttaaaatgttgggatataattcttttagattagttttttgatttcactttctgctgtctccattaaaaacaaaacaaaacaaaacgaaaactaatccctgaatatgtgggaaagattttcacttttcctgaaccgtagcagactatgctaactaccataatacttttcaagtaaattatttcttcaatcatccttctgggcagtagaaagccccatagccccagacaatgcttctgtttgct

SEQ ID NO: 468344 - DNA, 538 bp, Homo sapiens
caatcagtatgtcaaagagttatctgcactgccatgtttattgcagctttgtttacaaaagccaagatatgaaatcaacctaaatgtccatcagtggatgaatggattaagaaaatgtggcatatacacaatgawtaccatattcagccattaaaaaatgaaattctgtcatttgtgacaagatggatgtatctaaatgacattatattaagtgaaataagccaggcacagaaagataaacactgcatgatctcattcatgagtggaatctaaaaaagtcaatctcatagaagtagagagtacagtagtgggttatgagaggctggtggtgaggaggggggttagtccaagtatacataattacaggtagataggaggaatacattcaagagatctattgtacagcagggtaaccaaagtaatgatgataaattgtattcttgaaaaagacaaagagagtgaatgttgaatgttctcaccgcaaaattggtaactgtgtgaggtaatgtatttgttaattagcaagagttaagcattc

SEQ ID NO: 468345 - DNA, 538 bp, Homo sapiens
caatcagtatgtcaaagagttatctgcactgccatgtttattgcagctttgtttacaaaagccaagatatgaaatcaacctaaatgtccatcagtggatgaatggattaagaaaatgtggcatatacacaatgaataccatattcagccattaaaaaatgaaattctgtcatttgtgacaagatggatgtatctaaatgacattatattaagtgaaataagccaggcacagaaagataaacactgcmtgatctcattcatgagtggaatctaaaaaagtcaatctcatagaagtagagagtacagtagtgggttatgagaggctggtggtgaggaggggggttagtccaagtatacataattacaggtagataggaggaatacattcaagagatctattgtacagcagggtaaccaaagtaatgatgataaattgtattcttgaaaaagacaaagagagtgaatgttgaatgttctcaccgcaaaattggtaactgtgtgaggtaatgtatttgttaattagcaagagttaagcattc

SEQ ID NO: 468346 - DNA, 458 bp, Homo sapiens
aaaactcaatcagccagactgcctcttctcctccaaatgatagcaacatatctgcagcaagggcacagaactgggttgaggctgagatggatgarttgatcacagaagaaggcttcagaaggtgggtaataatgaacttggctgatctaaaggggtatgttctaacgcaatacaaagaagctaataaccatgacaaaacattacagaaggtgttaaccagaataaccagtttagagaggaacataaatgacctggtggagctgaaaaacacaacatgagaacttcaaaatgccatcacaagtatcaatatactaagtggagaaaagaatttcagagcttgaagactatcttgctgaaataagacaggcagacaagattagagaaaaaagaatgaaaaagaaagaaaaaaactccaaaagctatgggatcatgtaaaaagaccaaacctatgactgatt

SEQ ID NO: 468347 - DNA, 590 bp, Homo sapiens
ctagaagaaatattcagtagttggagcaaaccttatcttagtctgactctcctgcaagctgataaaattgtataggcagagcagctttagagaattggagcaaatgattgaggaccaagaagctcttaggaacttgagaatcccttctctgtcagcaccaccgttctttataaagctccttatgggtatgaagccaggtgatgctatcagygtgccaagacagaggcaaacacgtactcattttttttccaacatgtatctcatcacattcaacttatttataattgtggacagcagcctatgtagggatgatagtcagggcctccttctacatgaactcccactaaatccccaatattcccttatttataggcaaccacataaattattggcaaacgggagcaattaagagtgaaagaagatgcgacaattatgctgggaaaacaggtgtcaaccaggaggtatacagtcatcctgttaataactcctgggcctttaagtataatactgccattaaaagacagttttgataatttatctaacaattgttcactttgtatttgtttccaaatgtattagtatggagttgt

SEQ ID NO: 468348 - DNA, 608 bp, Homo sapiens
ttgtgtatagtatgaggaagtactgcataaccatatttttcatatggtaaatcaattgatccagtgctacttattggaaaagtcttccttcttaaccattgcaatgcactggcaatgttgttaccaagtgaccayatatgcatagatttgtttcttgagtctgttttgtaatatttctttacttatctattcatacacaaatgtcacttggctgtaattgctgtcattttgttataaatgttgatatctgatagtataagtcttccaacatatctcaagatactttggttattcttggtcctttggaattgtatcttattttagaatcaacttgtcaaatttctaaaacaaaaaacccccacaaaatctgcttggattctgatttacattttactattactatagatccatttggaggaattaattttttacaaccgtgaatcttccagttcatgaacatgatatatcactccttttatttaggtgtttaattttgtttagtaatatatttttagtttcctatgtagatatcttacacattcttaattagatttaaacctaggtatttacttttttgatacttgtaaaaaatatattttaaaaaatct

SEQ ID NO: 468349 - DNA, 608 bp, Homo sapiens
ttgtgtatagtatgaggaagtactgcataaccatatttttcatatggtaaatcaattgatccagtgctacttattggaaaagtcttccttcttaaccattgcaatgcactggcaatgttgttaccaagtgaccacatatgcatagatttgtttcttgagtctgttttgtaatatttctttacttatctattcatacacaaatgtcacttggctgtaattgctgtcattttgttataaatrttgatatctgatagtataagtcttccaacatatctcaagatactttggttattcttggtcctttggaattgtatcttattttagaatcaacttgtcaaatttctaaaacaaaaaacccccacaaaatctgcttggattctgatttacattttactattactatagatccatttggaggaattaattttttacaaccgtgaatcttccagttcatgaacatgatatatcactccttttatttaggtgtttaattttgtttagtaatatatttttagtttcctatgtagatatcttacacattcttaattagatttaaacctaggtatttacttttttgatacttgtaaaaaatatattttaaaaaatct

SEQ ID NO: 468350 - DNA, 641 bp, Homo sapiens
attgtgtagttacttgaagtgctgtttctactgaatgtgtatcgatcttgcaccattacacagtttagaaactgttaagtcaaaccatgtaagttggggactatttgcatacctaaggttcagattccaggaaaagattgggtggcagcaatgagaggaaaagacaactgagagattaagaattggtgtgggggttgtattagttagcttaggctgccataacagaataccatagcctgggtagcaaaaacaatgcaacatttattttctcatggttctggaggctggaagaccaagatcaaggttttggtagtgttggtttctggcaagaccactgtttcaggcttgcagaaggccamcttctcactttgtcctcacttagcttttactgctgggtatgtaaagaaggagaaatcattggtgtctcttccttttcttatatggacaccaatcttattggattagggccccatacttgtgacctcatttattattaattatttacacttatgacctcatttagccttatttccgtgaatataattcaagtgaacatagaagtgataaaactagacgtgagttgttgtacgttcacttgaagtaccgtttgtactgaaactactgaactacacaaccctgtt

SEQ ID NO: 468351 - DNA, 641 bp, Homo sapiens
attgtgtagttacttgaagtgctgtttctactgaatgtgtatcgatcttgcaccattacacagtttagaaactgttaagtcaaaccatgtaagttggggactatttgcatacctaaggttcagattccaggaaaagattgggtggcagcaatgagaggaaaagacaactgagagattaagaattggtgtgggggttgtattagttagcttaggctgccataacagaataccatagcctgggtagcaaaaacaatgcaacatttattttctcatggttctggaggctggaagaccaagatcaaggttttggtagtgttggtttctggcaagaccactgtttcaggcttgcagaaggccaacttctcactktgtcctcacttagcttttactgctgggtatgtaaagaaggagaaatcattggtgtctcttccttttcttatatggacaccaatcttattggattagggccccatacttgtgacctcatttattattaattatttacacttatgacctcatttagccttatttccgtgaatataattcaagtgaacatagaagtgataaaactagacgtgagttgttgtacgttcacttgaagtaccgtttgtactgaaactactgaactacacaaccctgtt

SEQ ID NO: 468352 - DNA, 340 bp, Homo sapiens
tatttttcacctttggcatttctagcacaaaatctaactcactgcacacattctttcaaaagagagtagacatagcaggaatgcagttgtggaaataagcactagatctctcctgcttccttaaagaatacatctataatctattttatttttaagaagaagcctgtcgactgtattttgaagagtgtttaaaaaamacctcttaggctaggggtggtggctcacacctctaatctcagtattttgggaggccgaggtgggaggatcacttcagctcaggagtttgggaccagcctggccaacatagcaaaacccagtctctaataaaaatacaaaaatt

SEQ ID NO: 468353 - DNA, 340 bp, Homo sapiens
tatttttcacctttggcatttctagcacaaaatctaactcactgcacacattctttcaaaagagagtagacatagcaggaatgcagttgtggaaataagcactagatctctcctgcttccttaaagaatacatctataatctattttatttttaagaagaagcctgtcgactgtattttgaagagtgtttaaaaaacacctcttaggctaggggtggtggctcacacctctaatctcagtattttgggaggccgaggtgggaggatcacttsagctcaggagtttgggaccagcctggccaacatagcaaaacccagtctctaataaaaatacaaaaatt

SEQ ID NO: 468354 - DNA, 544 bp, Homo sapiens
aaagaagaaacatctcaagagaagggtcagaagtcaaaaggaaaaaaagtaatgggacataggtagacactgacacatatatgaacaaaaataaataaattacaggaactatataacattcaccaatacattagatgccctagtttaaaacagcaattctgattgcaaattaactatataggaaaaagtattggagacagtttacaaatcagatagattcaaagagtgttcctactggggcttggcttagaataaatcctgcctgagtaccttgaaattccgagtttaaataatcaattgctattgatttttcacttttgttgtgccaacacttggttattccctgagtcacatagccttgccatttgagccaaagtcaataaagaatttattcattcattagtatctgtagaggtagaatataatgctgaaaaatcacatttaagattttccatagtaagtatcaaacattttgtgtgggattttaatgtccatgtcaaatytgtattaagaacaccagcaagaaaaacttagatcttgtgag

SEQ ID NO: 468355 - DNA, 514 bp, Homo sapiens
aaaactggctagccatatgtagaaaactgaaactggaccccttccttacaccttatacaaaaattagctcaagatggattaaagacttaaatgtaaggcctaaaaccrtaagaaccctagaagaaagcctcagcaataccattcaggacactgaatgttaagaaagtgaactgacagaaatatattgttagacaactgctgttaaagaggtaaattacaaccacttcagaaacaactgaacaacaggttttaactgtgcaggtcccctcctcatccttagctttcctccttagctttctcctcctcctccttagctttctcaatgtgaagatgataagaatgaagaacaatacaacaatccagttccacttaatgaatagtcaatacatattctcttcttataattttcttaataaaactttcttttctctagcttactttataataagatatactatataatacatataacatacataacatatgttcattgactgtctatgttttcagtaag

SEQ ID NO: 468356 - DNA, 565 bp, Homo sapiens
gaaacttaaaaaagagtttaaaaagacggagagactaccctcctattgccgttcaactaaacaaaaaggggcaagaaaaacaaaccaaggaacaaagaaaagagacgaaagaacgttttttcaaaaagacgatgtctttctccttgttgctttttagtaggtcgctacaggagtaagctgctgcatctctaactaagaacagaaataggggkgaggacgtcttaaaagggaggtggactggaccacagatttatagcaccgtatcaccaaccccttctctgcctccgcactgccgtgtgtgcagctgctctgccaggctcctatcccgggcagcacgcgcggaagtatacgccgaatcgcgccacaacgtaacttgctcatcgccccaggatcctgattggtccacacgcttccattgaggccgcccaggcggggccgcgtgagacgattggctatgggcttgtgtcactctcgagagctcaatggagtcccgtttcaaggtaagttgtgcggggaggtacactcttaacactggcggcgaagggaaatgcaagaagcaaaaaga

SEQ ID NO: 468357 - DNA, 558 bp, Homo sapiens
tttaagccagaaagtttatggtagtttgttagatcagcaatagacaatacagtaaaggttaaaacgaggcacagtgttcctccttggaccatgtttctggatgtgcataaatacagggtatcgcttaggaaaaacttaaagttgctgtcttgggccacttgttccctgtcaacaccttactgctccttctgggtagctttgcttcatagaaaccacagaattctatggcaagatggctgaataggaatagttccagtctgcagctcccagccatatcaatgcagaaggcaggtgatttctgcagttccaactgaggaacccggctcatctcattgggactggttagacagtgagtgtagcccacagagggtaagccaaagcagggtggggcattgcctcacctgtgaagcacagggggtcagggaactggctagccatgggaagccatgagggactgtgccgtgaggaatggtgcattcyggcccacatactatactttccccatagccttcacaacccacagaccaggagattccctcagtgcctacaccaacaggg

SEQ ID NO: 468358 - DNA, 595 bp, Homo sapiens
  misc_feature (1)...(595): n = A,T,C or G
ccctggggaagaagactagaaattaccttggtaccttggttgataagaaatgtcaaatgattgacatttgactgactgaggctgtggtgtattgccactctgcagagtacagactcttcatagcctgcattttgcagtcatcggcttatggaaaagatgtgaggaggggactctttttgtaatggctagtgctactaactagaattccttaggtactctatataccataaataccagattgcctatctgtaaatcttacttactaaggaaaacataktaaaccattttagctatgagcttatcttcagtaatcttgctgatgcctcaatttttaagattactgaaacactgaatcttgtaagtgccatgtccttttataaaataggtaatgtgattattttncccaaaaggtacaaaggttgaccactgagactcctttccatatgcatnccacaaagcatgtgctgtaaccagcttgtttatcctcttatttgcatgagagtgtataggtaggcttgtatgtatattcatgatatattatacacattggtctgcctcttggcttttttcacatactatattttgagttgatgta

SEQ ID NO: 468359 - DNA, 427 bp, Homo sapiens
cacaattttaaaagaaagaaaagaatgagatataagtaaatagatacagtattttcttcccatacctagtttcgcaaaacactataattagatccaaagaagtggatgacaacctatagttaggcacaggtctggagtagtgataatgcttggggctgtctagggagggtcccttcccccagttggcccaggctgctggctgcccctcaacccacaggagcygactaccatagcctctttcacccgccaccccgcccaggatgtcccagccaccacacaccccttcctggccatgggtagggggttgcgtcaggctgggcaccttcgcagccacctcaccctaccgtggaccattcctctgggcccctgacagcaggacttggaggctgactgtgagaaaggtactggtggggtgggccctggtcat

SEQ ID NO: 468360 - DNA, 619 bp, Homo sapiens
aggagtgcccagtgggcacagggcttagccagtgaggagtgcccggtccagcctggtttccttccttccctgatgaccacctccttaatagtggagaattccatgccagcccagacactccaacccctggaagtgccagccccagccctggatgcccacccactctatcagaatgttcctctagggctacacaagtccaggtgaagcccaggccctccccgcaggatagaagccagcctgtcgcgtgtgagaggtgccctggcccacttaccgggattagctaccagctgggtaactatttwcacaggctgccaggccggtggcacatcataattatatattatatgtattaatacttcacctttcgccagcaccgcatccgggcccatcaaaacatgtacaactttaatcaattaggctctcagcctcctgaccgaccacacttcttagcttcccgttcttgatcccgcagggatgggagcatggcgcaccccaggtcagcgcccaggcctcctggaaggcccagcctttgtctggccttcaacagagtggggtgctggcttgccctcttccagcccttcccggctcccctcaacactgcaccagcagttcatcacca

SEQ ID NO: 468361 - DNA, 583 bp, Homo sapiens
ctgggcttttgtcactcagaggtaggaccaagtcctggtgccgcccatactcagcaagtctgtttacctcctgcacctctgcccctctgtcttagcctgttttgtgctgccttaacaaaatatcacaacatgggtaatttataatgaacagaaakgtattggcccatggttctggaggctggaaagatggagaggctggcatctgacgaggcccctcttgctgtgtcatcccatgttggaaggcgcgcggaagggcaagaggggccagactcacccattgataacagcaccaatccgacccatgagtgtggagcccgcgtgacctaatcacctcttaacagtcccaccttttaatactgctacaatggcaattaaatttcaacatgagttttggaggagacagacattcaaatcacaacatatcctctgtgcatggggacaagatgcctaccatgaggggttgctgggtcgatacgagactgcacctgctgaggctgctttccatgatggctccctcctcaccagccccacagtgctggcctgtatgcctccacccactgaccccttctcagcctctgagtct

SEQ ID NO: 468362 - DNA, 637 bp, Homo sapiens
tacagtagggcccaccacgtggagttctgcaagaattaaataagaacaggtctagaattgcttccctggggcctggaatgctctttcctcgggtctccccagggccaaaggggacactgtcatgggccagctgagcttgcatcactggtgggagggaattaccagtgacagattcccagcaatggggtcagagtccagmgaaggccccatccagggaaggaatcagctacaaacatacgccctggccaggagacgccaacaccagggctgagccagacttttcctgctattttcttccctactcatctcataaggcacctcctcccagaagccttccttgaccacccaatctagagaagctgctctgctcctgagtccctcacaatcccacagccctgctttactcccctcacagaggttcacagccagaagtaggttatttatccatatgtttattcttgtctcatccaccagaatgtcagcccatgcagccaaagctcttgcctcctgttcagaaccacctcccaggcacacagtaggagaccaataaatattggataaacgagtagtaagttatccattagtattagctaacaacaataataataatatccaagagtatcactaatctcttccc

SEQ ID NO: 468363 - DNA, 602 bp, Homo sapiens
caaatgcacttcatctgtcccctgtgtcccctccagcctcacttcttacctgcaatacacatccttcacccctgcctcccgactctcccacgtgccccaggccctttccagcctataggcctttatccttgctgttgtatcctgctcagatccctccactcccttctttacttggcaaamtcctatgcatccttcaagacccagtcatgcatcaccccttctagtgatctgtgactctcctccacacctcaagcagattaagcattcccttttctgcactctccctaggacttggtacctatgtcaaccttagaatttccaatattatgccatgatttatttgtttgcctgcctatcagccccaagagactatgaattccttgaggacaggcactgggtcttatttgtctctggagccccagccctagtagaaggcccgagccagagcagatgcttggtgcagggctgctgactggagctggaataaggctctgtcctatgctcccaggaaatggagcatcccttgtcactggcacagctattctttgccagggttctctagaggcagatgcttcatcctagaggcaggaagctgggaaggc

SEQ ID NO: 468364 - DNA, 614 bp, Homo sapiens
cccttcccccatctgcaagggtgaaagtagcctctggcaggagtagctgaggcttggagagtacctgccttccatttggaaggagacagctttgagcctcttcataactgatgtggaccaggctgcacatgatrggagccagtggggatggtggaaagatgacctaaatggatctaaggagaaagaacgtctccgtgtgaaatagggtggaaaatagactggggaatgacgaataggtaagccctggggtgaagtaatcaatcagtgagatggactagggcacaggggagatgtggagatgtcgaagagaccagagtaggaaggacacactgcaaaggtcaataccagcctgtggagagcgctagtgcttccgctttgcaagctgcaatttgcctccaatgttgtctgccccttcaaattcacatgctgccgaaaagccagttccaccttgtaccctaaaaccccattctcatatgctacttcctagctcaggaaaaatctaccatggagcctgggactgcagagtaggcaccgttttgctgctgttgttataaatataaatagctaccaatcattagctatacatatgttgtctcattgcaccatcgccacaa

SEQ ID NO: 468365 - DNA, 264 bp, Homo sapiens
tgccagcgctaccgaaatgttaattgtgctaagacctgccatgttgatggctrcctatttgttcctcttaaaaggccaaggaggaaagtgtcagccttaagaagataaacacttcagcactatgtttcattcctttcctggcttttctaccatctctatttgctgcctctatttcctccacaggtgactcagaactgtcacattctctaggaggtaccaggaccagctcacaattgtgctgcctcactggggcagggtcaagcc

SEQ ID NO: 468366 - DNA, 410 bp, Homo sapiens
acactcataaatttcagcaagtatggaacagaagagtctcaaaactatggaactgttgagagaggcataaattagccatcaaaaagttytgacaaataccataaaatatgaaatgatgggttggagattgaataagaacctggaggcaggtatcatggttaagaactaagttcatgaaccttggaatcagaaagacctttctgttcagttcctgattctacctctgcacaacctttgtcacctgtaaaatgggtaataatactgtttaatggtgttgtaagaatcaagtgaaacgtatctatatataaatgtccacataatattgcctaaaacacactaggaactaagaatatcctgccccccccccgtagttattgtttatatattatcaataagcaataactgttagc

SEQ ID NO: 468367 - DNA, 517 bp, Homo sapiens
ttttccattcaaggagggagtttcactgggattttaagacaggcagttatctgtaaatccagagtctccattgtagacttgatgtattttttagaaaaaccagatagttgacgtgtttttcaagtttgaaacttccttatttgttttcatatgttcaaggagtactacaattaattggaaagtgtgtcaactctggatttagacaggcttggcttcaaatcctagcttcaaaacctgctctttctcagtgcaaccttgagcatcattttaaaggctcttttctcatctgtaaaatgtgactaatattatatgtctaggtgggtagctgtgaggattcatgagatcatgtgtattaaggtcctaccataatacttggcrcagttaagaaactgggggcaggttggctgtctccaaatctaggctgtgccacctgctagcagtgtgacatcagccagaatatgcaacgtttgtgtgtgtctgtttcctcatcagtaaagtgaagatagtagtattatca

SEQ ID NO: 468368 - DNA, 557 bp, Homo sapiens
tattgttactatgtgtttatgtctgaatcaaactgttctcctgagttcaaacccactatcagggtcaagaatgactttcatgttatccagtaaggtagtagtctattgggtcttaggaatgtagagggtcaggaataggccattactattcttataataagggacacatgtaagaaatctggttttgaaagaggaaaggaaactctaatttttgagttctcagtatgtgccaagcttcacataggttatatcatttaataaaacccctgttaaccaggtgtcattatctccatagatgaggaaactgaggctcctagagtcttcactacttaaagttgacaaactagtagatattgaaggcatgtttcttaaacctaactccaaaatttgcttcttcctctattcaygcacacacacacacacacacacacacacacacatatatatatttgagtaaaaggaaatatagctgagcatcagagtaaaaaccatatccaaagacataaaggtatcctagatattggcatcattcctttctatacaacacatctttccca

SEQ ID NO: 468369 - DNA, 557 bp, Homo sapiens
tattgttactatgtgtttatgtctgaatcaaactgttctcctgagttcaaacccactatcagggtcaagaatgactttcatgttatccagtaaggtagtagtctattgggtcttaggaatgtagagggtcaggaataggccattactattcttataataagggacacatgtaagaaatctggttttgaaagaggaaaggaaactctaatttttgagttctcagtatgtgccaagcttcacataggttatatcatttaataaaacccctgttaaccaggtgtcattatctccatagatgaggaaactgaggctcctagagtcttcactacttaaagttgacaaactagtagatattgaaggcatgtttcttaaacctaactccaaaatttgcttcttcctctattcatgcacacacacacacacacacacacacacacacayatatatatttgagtaaaaggaaatatagctgagcatcagagtaaaaaccatatccaaagacataaaggtatcctagatattggcatcattcctttctatacaacacatctttccca

SEQ ID NO: 468370 - DNA, 557 bp, Homo sapiens
tattgttactatgtgtttatgtctgaatcaaactgttctcctgagttcaaacccactatcagggtcaagaatgactttcatgttatccagtaaggtagtagtctattgggtcttaggaatgtagagggtcaggaataggccattactattcttataataagggacacatgtaagaaatctggttttgaaagaggaaaggaaactctaatttttgagttctcagtatgtgccaagcttcacataggttatatcatttaataaaacccctgttaaccaggtgtcattatctccatagatgaggaaactgaggctcctagagtcttcactacttaaagttgacaaactagtagatattgaaggcatgtttcttaaacctaactccaaaatttgcttcttcctctattcatgcacacacacacacacacacacacacacacacatayatatatttgagtaaaaggaaatatagctgagcatcagagtaaaaaccatatccaaagacataaaggtatcctagatattggcatcattcctttctatacaacacatctttccca

SEQ ID NO: 468371 - DNA, 557 bp, Homo sapiens
tattgttactatgtgtttatgtctgaatcaaactgttctcctgagttcaaacccactatcagggtcaagaatgactttcatgttatccagtaaggtagtagtctattgggtcttaggaatgtagagggtcaggaataggccattactattcttataataagggacacatgtaagaaatctggttttgaaagaggaaaggaaactctaatttttgagttctcagtatgtgccaagcttcacataggttatatcatttaataaaacccctgttaaccaggtgtcattatctccatagatgaggaaactgaggctcctagagtcttcactacttaaagttgacaaactagtagatattgaaggcatgtttcttaaacctaactccaaaatttgcttcttcctctattcatgcacacacacacacacacacacacacacacacatatatatatttgagtaaraggaaatatagctgagcatcagagtaaaaaccatatccaaagacataaaggtatcctagatattggcatcattcctttctatacaacacatctttccca

SEQ ID NO: 468372 - DNA, 588 bp, Homo sapiens
actatgcatccataaaaaagaatgaaatcatgttttctgcagcaacatggatgcagctggagaccataattctaagcaaattaatgcaggaacagaaaacmaaatactgtatgttctgacttataagtaggagcaaaacattgtgtagtcatcaacataaagaaggaaacaatagacaatgtggattactagagggaggagggaggaaggggggcatgggctgataaactaactattgggtactatgctcactacccaagtgaaaggaaacataacccaaacgacagcatcacacaatatacccatgtaacaaacctgtacttgtatcccatgtatctaaaataaaagttgaagttataaagaaaaataagtgttagagtttatttcttggctcacaattctactccattgttatatatgtttagctgtactgaggggtctccaagatcaccctcaagtttgatgactcactagaaaaactcaccagacctataaaaacgattatactcatggttacagcttaatacagttaggagatacagattaaagtcagcaaaggtaaaaggtgcacagagtgatgcctaggaa

SEQ ID NO: 468373 - DNA, 651 bp, Homo sapiens
gtggcattagattctcataggagtttgaaccttattgtgaactgcacatgcaaaggatctttgcgtgctccttatgagaatctaatgcctgatgatccaaagtggaacagtttcatcctgaaaccatcttcccatccctgccagtttatggaaaaattgactgcattaaaccrgtccctggtgccaaaaaggctggggaccactgatctaaatacaccaatgaaaaagaaaaagattgtaagattggattttaaaagacctgactctatactgaccacaaaaaaaaaccctcactttattctttattgcatatatttatggtgtacaacatgatgttttgatacatgttgtgaaatggttaatatagtcaggcaaatcaacacgttcatcatctcacatagtttccctttgtgtgtgtgtcgcaagagcacactacttttttaacaaaaattccaagtaaaatataatattatcatagacctcacgttgtacattagacctctagacttttttaatcttacgtatctgcaattttttatcctttgacctacatctctccatttccttcccctccaaccacacccctggtaacgaccacattattctctatctccttgtattcagctttccttttttttcttttaagattcc

SEQ ID NO: 468374 - DNA, 651 bp, Homo sapiens
gtggcattagattctcataggagtttgaaccttattgtgaactgcacatgcaaaggatctttgcgtgctccttatgagaatctaatgcctgatgatccaaagtggaacagtttcatcctgaaaccatcttcccatccctgccagtttatggaaaaattgactgcattaaaccggtccctggtgccaaaaaggctggggaccactgatctaaatacaccaatgaaaaagaaaaagattgtaagattggattttaaaagacctgactctatactgaccacaaaaaaaaaccctcactttattctttattgcatatatttatggtgtacaacatgatgttttgatacatgttgtgaaatggttamtatagtcaggcaaatcaacacgttcatcatctcacatagtttccctttgtgtgtgtgtcgcaagagcacactacttttttaacaaaaattccaagtaaaatataatattatcatagacctcacgttgtacattagacctctagacttttttaatcttacgtatctgcaattttttatcctttgacctacatctctccatttccttcccctccaaccacacccctggtaacgaccacattattctctatctccttgtattcagctttccttttttttcttttaagattcc

SEQ ID NO: 468375 - DNA, 651 bp, Homo sapiens
gtggcattagattctcataggagtttgaaccttattgtgaactgcacatgcaaaggatctttgcgtgctccttatgagaatctaatgcctgatgatccaaagtggaacagtttcatcctgaaaccatcttcccatccctgccagtttatggaaaaattgactgcattaaaccggtccctggtgccaaaaaggctggggaccactgatctaaatacaccaatgaaaaagaaaaagattgtaagattggattttaaaagacctgactctatactgaccacaaaaaaaaaccctcactttattctttattgcatatatttatggtgtacaacatgatgttttgatacatgttgtgaaatggttaatatagtcaggcaaatcaacacgttcatcatctcacatagtttccctttgtgtgtgtgtcgcaagagcacactacttttttaacaaaaattccaagtaaaatataatattatcatagacctcacgttgtacattagacctctagacttttttaatcttacgtatctgcaattttttatcctttgacctacatctctccatttccttcccctccaaccacacccctggtaaygaccacattattctctatctccttgtattcagctttccttttttttcttttaagattcc

SEQ ID NO: 468376 - DNA, 651 bp, Homo sapiens
gtggcattagattctcataggagtttgaaccttattgtgaactgcacatgcaaaggatctttgcgtgctccttatgagaatctaatgcctgatgatccaaagtggaacagtttcatcctgaaaccatcttcccatccctgccagtttatggaaaaattgactgcattaaaccggtccctggtgccaaaaaggctggggaccactgatctaaatacaccaatgaaaaagaaaaagattgtaagattggattttaaaagacctgactctatactgaccacaaaaaaaaaccctcactttattctttattgcatatatttatggtgtacaacatgatgttttgatacatgttgtgaaatggttaatatagtcaggcaaatcaacacgttcatcatctcacatagtttccctttgtgtgtgtgtcgcaagagcacactacttttttaacaaaaattccaagtaaaatataatattatcatagacctcacgttgtacattagacctctagacttttttaatcttacgtatctgcaattttttatcctttgacctacatctctccatttccttcccctccaaccacacccctggtaacgmccacattattctctatctccttgtattcagctttccttttttttcttttaagattcc

SEQ ID NO: 468377 - DNA, 579 bp, Homo sapiens
agaaacatttgtatctgttataaatgagatcatatactatttttctaattcacaatttttgtacattgtctcgatggaatgctagataattattagtaaaattaaaagagtttaataataagaaaaaaaatctaaatctcttggtgttgaaaaggagtatctccacatacttgcctgaaagtgtccagttacttcaaaataattacatctgttttttgtttggctttgtatcttcacaagataaatgcaaaggtaaaatttgcaaaaactctagaaaagaagagacaagcaagaaacttacaatatttttttctatttttttaactgatgaatcacccattcttttaaaaattcttgcaatacatttccttatagatgtaacttgactgtttgatttctgtctgtaatcaaaagtaccaaattatttcctagagtcattgaatgtaaaatrtctagcactttgttaagatgtttaaacaaagtagcctaaataaactctttaaatcattgcagcattatcaaaaggaaataataataatatatttgtatttgaaataaagttgcctttaggaaactagt

SEQ ID NO: 468378 - DNA, 579 bp, Homo sapiens
agaaacatttgtatctgttataaatgagatcatatactatttttctaattcacaatttttgtacattgtctcgatggaatgctagataattattagtaaaattaaaagagtttaataataagaaaaaaaatctaaatctcttggtgttgaaaaggagtatctccacatacttgcctgaaagtgtccagttacttcaaaataattacatctgttttttgtttggctttgtatcttcacaagataaatgcaaaggtaaaatttgcaaaaactctagaaaagaagagacaagcaagaaacttacaatatttttttctatttttttaactgatgaatcacccattcttttaaaaattcttgcaatacatttccttatagatgtaacttgactgtttgatttctgtctgtaatcaaaagtaccaaattatttcctagagtcattgaatgtaaaatgtctagcactttgttaagatgtttaaacaaagtagcctaaataaactctttaaatmattgcagcattatcaaaaggaaataataataatatatttgtatttgaaataaagttgcctttaggaaactagt

SEQ ID NO: 468379 - DNA, 602 bp, Homo sapiens
gtgtgttgtttaatctccataatgtcaatttttgcttcacatatttgatggtcagttattaggtgcataaatgtttataatagatatawtgttatatctattatgaaatatgttatattttcttgctggattaaatattatatacaatatctttccttatcctgtctttttttgatttaaagtatattttgcctgatattagtatagccatccttgctttcttttggttactatttgcatacaatattcttttctattttatcactttcagcgatatggatatccttatgtggatagcatatggttggatttttttttttattctgacaatctctgtctttttgattgtatagtttaatctatttacatttaaagtaattgctgatatgaggaacttctgtcattttgctactttttctttatggcttatagcatttttgtccctagtttcctgcattactatcttcttttgtgtttagttgaatttttgtagtgaaacatttaaattatttcttattttcttttttgtatgttgtttaaccattttctttatgattgccatgaggattacacttaaaatcctaaggttgtaatactttaat

SEQ ID NO: 468380 - DNA, 397 bp, Homo sapiens
gagccctgggccctgaacaaaatctggaggcattattaaacctggcaacgttggttttataatagggaccaagaggaacaggcacaaaaggaaaagcaagatcagagaaagaccccagcctttgtcatggccctcagacaaacaaaccttggtggttcagagaggacagtaaatggagcaggccaatcacaaggtggggcttgttaccagtgtggttttcaaggacaccttaaaaaagattgtccaacgagaaacaakctgccccctcgtccatgtctgctatgccgaggcaatcactggaaggcacactgccccagagagcacagtgtctctgggccagaagcccccaaccagatgatccaacaacaggactgaggatgcccggggcaagtgccag

SEQ ID NO: 468381 - DNA, 536 bp, Homo sapiens
gggaagctgaaatgggtggatcacttgagaccaggagtttgagatcatcctgggaacatgacaaaaccctgtctctaccaaaaatacaaaaattagcagggcatggtggcaggtgcctgtagtcccaactgctcaggaggctgaggcacgagaatcgctcagacctttggggtggagcttgcagtgagccgagatcggaccactacactccagcctgggcaacagaggaagagtgtcttgaaaataaacaataaaataaataaaataaaaaataaaataaamcaaaataaaaagaaaacagtatcttggcttggaaaaaatctctagttacgggtgtctgagatgaagggcgggagtgtctgatgctccttggtttctgaagttcgtgggggaagttcatgtgctgagattctttctcttggctgaccaaagtcctgaacacttgacaattttaatcttttaacattgaaacttgtatgatctcagcgtctgtgagctcaaggatcacagtttcttacaccgggaaaaacaccttg

SEQ ID NO: 468382 - DNA, 584 bp, Homo sapiens
tttcttttttctgtacgtcctgagattgctgcccattttgggagattttagaagaataaacactactagtaaggtatatactgctgtcgctgcttcctgtcaaaaatcaacaacacataattagaaaagacctgtccgactgatttgccaaactggctctcattcttcagactcttgcctcggacagtcctcctcctcagccagcccaaccatcatttccgggaaacttcctcctccctgtggacagcctcctggttctttggtcttcctgagatctctttttccattcctaatgagctatcactctcaaggctacacacattgtcctttatcatcacccataacygctccatctccaaaatcatcaacatctcagcttcactctctcatgggcttgttcaattatttcaactataaatgtgttaataacgtcttagtcttcctgtagtggagtcctcagttcatcattcagtaacacaccttgcaataccttagacttctttttccctctgacttttcataactgtcaaaatgccaactccaataaagccaattattgactttgttcttacctaaacccaagt

SEQ ID NO: 468383 - DNA, 506 bp, Homo sapiens
actgaggtcaggagtttgagaccagcctggccaacattgggaaaccccatctctactaaaaatacaaaaaaaaaaaaaaaaaaaaaaaaaaaattagccaggcacggkggtgggtacctgtattcccagctactcgggaggctgaggcaagagaatcgcttgaaccacggaagcagaggttgcagtgagccaagatcccaccattgcactccagcctgggcaacaggaacgaaactctgtctcaaataaataaataaataaaattatgtgaatgtggcctcttctctctctctctctctccaagtagcttatagtaccgtactgctggtaactgaaaccagggaaggtgagaccgtggataagaggggacggctgcgtatcaatataacctataaccgaatgtgactagtgataacaaggaacaaactgtcactgcatgcaacagcgtggatcaatcctaaaagcatcatgttgagtcaaagatatgagacactacccccaagtac

SEQ ID NO: 468384 - DNA, 506 bp, Homo sapiens
actgaggtcaggagtttgagaccagcctggccaacattgggaaaccccatctctactaaaaatacaaaaaaaaaaaaaaaaaaaaaaaaaaaattagccaggcacggtggkgggtacctgtattcccagctactcgggaggctgaggcaagagaatcgcttgaaccacggaagcagaggttgcagtgagccaagatcccaccattgcactccagcctgggcaacaggaacgaaactctgtctcaaataaataaataaataaaattatgtgaatgtggcctcttctctctctctctctctccaagtagcttatagtaccgtactgctggtaactgaaaccagggaaggtgagaccgtggataagaggggacggctgcgtatcaatataacctataaccgaatgtgactagtgataacaaggaacaaactgtcactgcatgcaacagcgtggatcaatcctaaaagcatcatgttgagtcaaagatatgagacactacccccaagtac

SEQ ID NO: 468385 - DNA, 525 bp, Homo sapiens
tccctcagcttttgattcaaaagtatcaagcagatgagccaagaatgctggctctggaagccagaacaactgggttcaactgtcasctctgaaaccacaggtcattcatttagtctctctgtgtctcagttttctcacctgttaagtgggggtgatcataataataaaaaacggaatttattatcattagttattctaataatgctgttatgttagtggttttttttttttttgggaactaacatcaaaccactactgtgtctttggtccctgataagtgctataaacatgtcatttctctgaatactcatataaagcatttggggtagatatattattagccccatttaaagatgagagattaggccgggtgtggtgacgtacgtctgaaatcccagcacattgggaggccaaggcaggtggatctctggagctcaggagtttgaggccagcctggacaacacagtgaaatcccatcttaactaaaaatacaaaaattagccaggcgaggtggtgtgcacctgt

SEQ ID NO: 468386 - DNA, 525 bp, Homo sapiens
tccctcagcttttgattcaaaagtatcaagcagatgagccaagaatgctggctctggaagccagaacaactgggttcaactgtcacctctgaaaccacaggtcattcatttagtctctctgtgtctcagttttctcacctgttaagtgggggtgatcataataataaaaaacggaatttattatcattagttattctaataatgctgttatgttagtggtttttttttttttkgggaactaacatcaaaccactactgtgtctttggtccctgataagtgctataaacatgtcatttctctgaatactcatataaagcatttggggtagatatattattagccccatttaaagatgagagattaggccgggtgtggtgacgtacgtctgaaatcccagcacattgggaggccaaggcaggtggatctctggagctcaggagtttgaggccagcctggacaacacagtgaaatcccatcttaactaaaaatacaaaaattagccaggcgaggtggtgtgcacctgt

SEQ ID NO: 468387 - DNA, 389 bp, Homo sapiens
ttatatttactgaaagtgctcttttagacttayagtgacaccaatttctataatatcttacccttgtgtataagtaaaaataaaatgtaagcaaaactaaaaaaaaaaaaagtaagaagcatactctgtcttgcaattaaaccagttgtgtatatgtccattttctctaaattgtcacctccttgagggtagagaacatgttattctgggtatctttctattgtttgcagaatggcttgcccacagtttgcaagagacagttgattattctcaaattcttcaactataaatccctaaatactgtactcagaaattgggttctaagttcactagagttatttactgttttaaaatcaactagggagaatattttcactgagatttgcaaa

SEQ ID NO: 468388 - DNA, 487 bp, Homo sapiens
tcacttttacaggaactgtcaacacacccccgaaattttttaactgaccaccctgaagaaaacaagcaggctttaacttgagcttgctcaccaaaatcactcaagtccttccagctgyatggccccagtctccaaaataaatccccttcctctgctggtctgaggctcacttcagcctccccacgtcctaggctttgaactcctgtgacttttaaccttggctttgtgcctgttgagctgttaatcagggtctccagcccataatcagcagctggtgagcagctgctccctcctttcctaaaacagatcctagccagaattttccctgaagggctcttcctgccagcttcctctcttctaggaagcagaggaagttttcttcctttggcttctccctctctggccattcctaatgaagacaaatagcaatggcaccattatttctcctgttttccttgttggggcctcccttctagaattcttcccc

SEQ ID NO: 468389 - DNA, 538 bp, Homo sapiens
caagcgtgggcaacatatcaaatccccatctctacacaaaatataaaaattagctgggcatggtggcatgtgcctgtattcccagctactggataggctgaggcaggaggatcacatgagcctgggaggccaaggctgcaatgagccatgttgtgccactgcataccagtttgggccatagagtaagtccctgactcaaaaaaaaaaaaaattctttagcacacactgagctcatgttgagcttgtagaaaacaaaaagcattcagttattttcatatagactgttcttatgcccagcgttcccatttttccagattaacaatgaattttaaccttttgtatatgggagcctcacatttatctctatttctgctcttcttggttttggtatattattacrtcctacaaagttctttgtgaattttgtttctgtcatctggtacatttattagcagtttctcaaactgtgtcttcatcccaagttgcccttgagtcagccagccacatggagaggcctgtgcccttcttaaataagccc

SEQ ID NO: 468390 - DNA, 545 bp, Homo sapiens
gattgcagaatgtttactcaggtacctttgctgatagtagactgtttcattttggtgatgtctgaaagrcaacaatataataataagaaaatgccaaggttcctatttctataaacattatatagtagaatatattctttctatgtagaataattgttttgctaaatatgcagatatgcccagaccagaaaccatttaccattaagttgtctcatgcattaagacaactgagccccctcctccaaatatctgctcctcagcagaaatttgagttgtctccagtcatagttcagttttgtgagcctccatcactggttatactgcaaatataataccaaactgtctgcccccaaatataataccaaactacatcatttagtatttgtccttagtaatagttgattgctccataccaccaattaaaagccagtttgctacacctgaaaccccatgagctaatatgagagacatatctcatcagatagtaagaggggaaaaaattaaaaggagtcaagacaatttctctgcaaagtcatgggaatgtg

SEQ ID NO: 468391 - DNA, 487 bp, Homo sapiens
tcacttttacaggaactgtcaacacacccccgaaattttttaactgaccaccctgaagaaaacaagcaggctttaacttgagcttgctcaccaaaatcactcaagtccttccagctgcatggccccagtctccaaaataaatccccttcctctgctggtctgaggctcacttcagcctccccacgtcctaggctttgaactcctgtgacttttaaccttggctttgtgcctgttgagctgttaatcagggtctccagcccataatcagcagctggtgagcagctgctccctcctttcctaaaacagatcctagccagaattttccctgaagggctcttcctgccagcttcctctcttctaggaagcagaggaagttytcttcctttggcttctccctctctggccattcctaatgaagacaaatagcaatggcaccattatttctcctgttttccttgttggggcctcccttctagaattcttcccc

SEQ ID NO: 468392 - DNA, 526 bp, Homo sapiens
gtgtcactcttctgcccaggcaggagagcagtggcctgatgacagttcactgaagccttgacctcccaggctcaattgattctcctgcctcagcctcctcaacagctgggattacaggtgcatgccaccatgccctgctaatttttgtattttttgtagagacagggctttgttatgttgtccaggttggtctcaaacccctgggctcaaatgatccacccacctcagccttctgaagggctgagattacaggtgtgaaccactgtgcccaacctcagagtttcttttttagatttttgctttgatgtgatccatatgtaatgctgacagtggggtgttgaagtctcccactattgtcgtgtggttgtgtaagtatttttgtaggtctaaaagaacttgttttatgaatctgggtgctccaatattggasgtgtatatatttaggatagttaaactttttgttggagtgtatcctttatcattatgtaagccctttacggtctgtaatttttattagtttaaagtc

SEQ ID NO: 468393 - DNA, 577 bp, Homo sapiens
ggcaataattttttggataagaactcaaaatcacaggcaaaagcaaaaatagacaaatgggttcatatactaaaaagcttctgcacagcaaagaaaaaaatcarcagagtgaagagacaatctatagaatgagagaaaatatttgcaaagcaggtcagtaactaaaaaacaaaaaatcttattacacatgggcaaaagatctgaataaatatttctcaaaagaagcacacaaattgctaataggtttattttttacgtgttcaacatcactatcatcagagaaatgcaaaacaaaataaaaagtcacagtgagtgtcacctcacctcacttagaatggctaaccaaaaaaacccaccaaatgctggcaaggatgtggagaaaggacgcaccgttggtggaaacataaattagtacagccattatgaaccatagtatggaaattcctaaatattagaaatcaaactaccatatgatccagcaatcccacttctgagtcattccttctgagtatatatccagaggaaatgaaatcagtatgtcaaaaaaaaaaatctgtaatcccttgtttagtgtagc

SEQ ID NO: 468394 - DNA, 577 bp, Homo sapiens
ggcaataattttttggataagaactcaaaatcacaggcaaaagcaaaaatagacaaatgggttcatatactaaaaagcttctgcacagcaaagaaaaaaatcagcagagtgaagagacaatctatagaatgagagaaaatatttgcaaagcargtcagtaactaaaaaacaaaaaatcttattacacatgggcaaaagatctgaataaatatttctcaaaagaagcacacaaattgctaataggtttattttttacgtgttcaacatcactatcatcagagaaatgcaaaacaaaataaaaagtcacagtgagtgtcacctcacctcacttagaatggctaaccaaaaaaacccaccaaatgctggcaaggatgtggagaaaggacgcaccgttggtggaaacataaattagtacagccattatgaaccatagtatggaaattcctaaatattagaaatcaaactaccatatgatccagcaatcccacttctgagtcattccttctgagtatatatccagaggaaatgaaatcagtatgtcaaaaaaaaaaatctgtaatcccttgtttagtgtagc

SEQ ID NO: 468395 - DNA, 577 bp, Homo sapiens
ggcaataattttttggataagaactcaaaatcacaggcaaaagcaaaaatagacaaatgggttcatatactaaaaagcttctgcacagcaaagaaaaaaatcagcagagtgaagagacaatctatagaatgagagaaaatatttgcaaagcaggtcagtaactaaaaaacaaaaaatcttattacacatgggcaaaagatctgaataaatatttctcaaaagaagcacacaaattgctaataggyttattttttacgtgttcaacatcactatcatcagagaaatgcaaaacaaaataaaaagtcacagtgagtgtcacctcacctcacttagaatggctaaccaaaaaaacccaccaaatgctggcaaggatgtggagaaaggacgcaccgttggtggaaacataaattagtacagccattatgaaccatagtatggaaattcctaaatattagaaatcaaactaccatatgatccagcaatcccacttctgagtcattccttctgagtatatatccagaggaaatgaaatcagtatgtcaaaaaaaaaaatctgtaatcccttgtttagtgtagc

SEQ ID NO: 468396 - DNA, 577 bp, Homo sapiens
ggcaataattttttggataagaactcaaaatcacaggcaaaagcaaaaatagacaaatgggttcatatactaaaaagcttctgcacagcaaagaaaaaaatcagcagagtgaagagacaatctatagaatgagagaaaatatttgcaaagcaggtcagtaactaaaaaacaaaaaatcttattacacatgggcaaaagatctgaataaatatttctcaaaagaagcacacaaattgctaataggtttattttttacgtgttcaacatcactatcatcagagaaatgcaaaacaaaataaaaagtcacagtgagtgtcacctcacctcacttagaatggctaaccaaaaaaacccaccaaatgctggcaaggatgtggagaaaggacgcaccgttggtggaaacataaattartacagccattatgaaccatagtatggaaattcctaaatattagaaatcaaactaccatatgatccagcaatcccacttctgagtcattccttctgagtatatatccagaggaaatgaaatcagtatgtcaaaaaaaaaaatctgtaatcccttgtttagtgtagc

SEQ ID NO: 468397 - DNA, 586 bp, Homo sapiens
gctgttcccctacatgacaccccttttcagcaggaagtagccagaaagaatcatcatccaacaccccctaaaagcgattaggtttscttctcttgagggagggaataagacaggagtaattacgaaataatttttaggcagctagaaagggcaaagattcttggtggaaattttcctgtaataagaagcaacctccgaaccatttcgtttctaacagaaaggtggcttaaagagctaggctggcaagccttgatatgcaaatgctgaccattaaaaactgggttcacccaatatggccattcctgccttcttcttcttgtcaccaggtgtgccaagtgtcatggccacctccagataacactatgtgttcaaaacatcatggccccctgcgtttgcatattaaaaggctaaggtgggagggccaggtttttcacaggctacgtaaatgacacacctagtcaaaccaatcccctgggcactatgcaaatcagacactgcctcctgaagcctccaatataaccgacaattttccacccctccttctgtctctatacaggggagctgctttattctatcttgcctgtta

SEQ ID NO: 468398 - DNA, 586 bp, Homo sapiens
gctgttcccctacatgacaccccttttcagcaggaagtagccagaaagaatcatcatccaacaccccctaaaagcgattaggtttccttctcttgagggagggaataagacaggagtaattacgaaataatttttaggcagctagaaagggcaaagattcttggtggaaatkttcctgtaataagaagcaacctccgaaccatttcgtttctaacagaaaggtggcttaaagagctaggctggcaagccttgatatgcaaatgctgaccattaaaaactgggttcacccaatatggccattcctgccttcttcttcttgtcaccaggtgtgccaagtgtcatggccacctccagataacactatgtgttcaaaacatcatggccccctgcgtttgcatattaaaaggctaaggtgggagggccaggtttttcacaggctacgtaaatgacacacctagtcaaaccaatcccctgggcactatgcaaatcagacactgcctcctgaagcctccaatataaccgacaattttccacccctccttctgtctctatacaggggagctgctttattctatcttgcctgtta

SEQ ID NO: 468399 - DNA, 586 bp, Homo sapiens
gctgttcccctacatgacaccccttttcagcaggaagtagccagaaagaatcatcatccaacaccccctaaaagcgattaggtttccttctcttgagggagggaataagacaggagtaattacgaaataatttttaggcagctagaaagggcaaagattcttggtggaaattttcctgtaataagaagcaacctccgaaccatttcrtttctaacagaaaggtggcttaaagagctaggctggcaagccttgatatgcaaatgctgaccattaaaaactgggttcacccaatatggccattcctgccttcttcttcttgtcaccaggtgtgccaagtgtcatggccacctccagataacactatgtgttcaaaacatcatggccccctgcgtttgcatattaaaaggctaaggtgggagggccaggtttttcacaggctacgtaaatgacacacctagtcaaaccaatcccctgggcactatgcaaatcagacactgcctcctgaagcctccaatataaccgacaattttccacccctccttctgtctctatacaggggagctgctttattctatcttgcctgtta

SEQ ID NO: 468400 - DNA, 565 bp, Homo sapiens
gtatatacatatatgttatatatatgcacatatatagctatatagttgaaagtgcacatggacacacccactataatttaatggacttggtggtccaataataacattataatttatttcaattattgacacaaaacaggagcaaacaccaaaagatcaatagctcagagttcacgtttagagagaactagagtggtccatttccccaaaattaaacagtaatgctataaaaacacactgtgaggatgcgggtggttcacaggcrtaacaatctatgtctatgaaatggagaggcttgggagagaggaaaggcctggagcagagcagctgaggaagggagcaggctctggggactagccccatatcccttccccatcctgcccactctcccttcatccagctccctgttcttccagcccccgagctgttgtttcaccggtgatctctaaggaaaatgtaaaataaaaattgcttttaaatggtaaaggaactacaaatgaaattgcctttgcaaacattgtaacagtgagaaaattatgacagcgaaagagatttgatctgacca

SEQ ID NO: 468401 - DNA, 546 bp, Homo sapiens
atttttgtcctatctcaatcatttatcagttgtgtatcttcaggtgagtcactcattctctctgagactcagtattttaatttataaatttgatcataaattttacctcttagctttgcataatgattaaatagaggaatgtatattattacatattattataatgtaatatatattacatattataatgtaatatwtattacatattattatgtaatatattactacatattataatgtaatatattattacatattattattatttaatatattattgtttagccaaacatgttgcaaaaatgaagtaaaacaccacatactgtataatattaggaatattttggatgcaaatgacagaaaattccaccagccctggctcaaattagataaaggaatatcttggaaagtctgtgagcagatttggcttcagacacagcttgacccaggctcagataatatgtccgggatctaaatcttgactcagctcttcgggtaatggccccattctcagactcacaatgtaggctcctcatcgccccagca

SEQ ID NO: 468402 - DNA, 633 bp, Homo sapiens
tacatatacatctgtttagaatagtggctggcatatttatccaataatcaatatttaccatgtgccaggcactgctctaattgctaaaaatagagcaatgaatgaaaacaacaagtaaaattccaygtcctcatggagctaataatctagtcaccctaaacaaatatcagtggtccttataattattttatttttattattgctatagcatcaggatttgtctcctccactggcctgtatctcccgggctggcaaagttccaggctcactatgggcattcagtaaacagcttttgaataggcaacaaatagatgaatccgtaattgtaacattgccatttttcctgtcaatctcaaaattatattaagcaatgtgtattggtctaggaggttgaatgttcagactcaattaatcttcacaataagcccacaggcaggtactagtattatccccatcatgcagatgaggaaactaagacaggcagaagttagagaccttgctcaggaccacttggctggggttcatgcccctattcctcatgtcatcctgcctctcagcagaacagagtaggccagatttttttcttttttgagatggagtctcactctgtcacccaggctggagtaatggagg

SEQ ID NO: 468403 - DNA, 580 bp, Homo sapiens
tttgaaatcagcaagtagatgtttttgttctctaataaatttttgcttacattaaaattacaaagatattctcttagatttccctctagaaactagagattttggcttttaatttagctctatgatccatcttcaattaattgttgtgtagagaggatgttttctctatttctarttagccaagagagttaaaaaaaatcataaataggtgttgaattctgtcaaacgctttttctgcttctactgtgataatcatatagcttttgtcctttatcctgttgatgtggtaaattacattttttgaattttgaaaattcaaccttgcattcctggagtaaaccccacttagtcaagatgtattattcttttaatatattgttgaattctattttactcttaatggaactttattgtattatggccaggaaccattgagtgcccaaaaccttcttggtcctggacatctatcctcccatgagtagagtggccaatgggaattcaaaataccattttactttggttctcttggttttacctaaaaaaatgcagcatttttctggtaagtggagatagagctgta

SEQ ID NO: 468404 - DNA, 542 bp, Homo sapiens
atcatttttgaatttgtgtaatatttcttatttttaccttagcaactaataaccacaatatctaaaatagtaagatttgttaatattaaaatgtatattatgtggactatataatgtacttattaagtatttcttctatatccatagttaagtatgtaaataaaattttgtrtgttgtatttattacttagatcccattgaaagggagtttgttagagcacaatgaatcatcaagttgttcagttttcactaattttctatattatagattttttcttccaaaagcatttaaaaatattagctgtgcattcaaagtatacacacaaaaactaattgaaattatttaatgcatttaaaactgccataccttttaactaaatctgggaacagttagtataaataatcacaaaaataagattctttaaattcattcaacaaaacatagtcactctatggtaaagagttaaactgattccatttcagatagatgtgaatgttgtatttctctctctctctatttttgatagtattatcaagctcac

SEQ ID NO: 468405 - DNA, 563 bp, Homo sapiens
agaaactcccctgcacaagctctcttgcctgccaccatgtaagacgtgactttgctcctcattcaccttccaccattattgtgaggcctccccagccatgtggaactatgccattaaacctcttttataaattatccagtcttggktgtgtctttattagcagtgtaacagcagactaatacagatggcatatgtaaaatatcttaaaagatggatggaaacattatatgatatttggagtataaaattatataagtacttactgcaaagactatataattaagaataaatgattaattttctgaaaattgaattatatatttagcatatgatgaaataaaacagagaaaacattaacataagatgacatacaacagagaaaacataaagctaaaattggattcttgtgcagccagaattgattacattcatattaagtcctcttcatctgtcttaataatgtatcacaaagagcaaaagaaaaaaaaaaaaactgacaagattatatgttatttgtcaaccaataagtaatttcaaaatggggcttacaaaggtaaaaaagt

SEQ ID NO: 468406 - DNA, 554 bp, Homo sapiens
atggaataaaaatattatgccattgggataaggtgtcctggctttgagacaaaaagtagagtcagactgagcacagtggcttatgcctgtaattccagccttctgggaggtgaggcagaaggattgcttgagaccaacgggagacatagcaagacgctgtctgaacgataagtaaatattatctgggcatggtggtgtatgcctgtagtcctagctactcargaagctgaggtgggaggatcatttaagcccaggaattcgaggttacagtgagctataatcacaccactgcactccagcctgggcgacagagagagaccttgtgaagaaaaaaaaaaaaaaaaaaaaaaaagtagagtcaacgtatcctgactcccataataaaaaattgcagttcaaagggaggagggcttcacggatgacttgcatatttcctaagctcctaaaacattctttagaggcaagtatttatcaccaacctttctatttgacagcatattaaagatattcctacagttttggtgtttctgtaagagcaactaaggaataaccct

SEQ ID NO: 468407 - DNA, 378 bp, Homo sapiens
ctctctctctctctctcctctctctctctttctctctctctctctctgtcaaagcaactaaaaatttgagatataaagcttaaagaatatcttaaaagcactataaaattgacaaaatagtggaaaaatatcaggccaaaatacaggaaaagggagaatccagagaaagaaagacagtactaaagctattatagcctcaaagatatttatcaacttagcaaattccatgagcaagggggccagaagacataacytagaggctgttcaagatgagggctcaaatagactgtccctccatacagttggaactttagagagctatccctcagattaaatccaccatagccttaagaatggtggcactaagcgaaaagatga

SEQ ID NO: 468408 - DNA, 561 bp, Homo sapiens
tagtttgggcagtaagccagataattttcatgtttttcccttttctgttaataataataaaaaacaatgaaaactatttttctttgaatttgttcctccaaatgctcaaaggctttctttatttcttattaccttttgcactccagcctgggcsacagagcaagactccgtctcaaaaaaaagatgttatttcttgcaaaatcaaggtagtacttaatgatattcacataatttttaaaggaagttttctcctgagtcactaaatttgatactttggagcataaacttcaatatgtaaatattccaaatctgattcaatacagtttccctttactgtaccctccactggttgaatttcctgcccttgcaggagaaattttgaaaaggagggaatgaagtttttaaaatcaagcagaatattttgaattaagtagttttttatttcagagacttctagaggggattagtacagctttgagccacttttctctatctctaaatctaaagttcccaggatactatttctaagatgaggactctgagatcttataagctgcttag

SEQ ID NO: 468409 - DNA, 561 bp, Homo sapiens
tagtttgggcagtaagccagataattttcatgtttttcccttttctgttaataataataaaaaacaatgaaaactatttttctttgaatttgttcctccaaatgctcaaaggctttctttatttcttattaccttttgcactccagcctgggccacagagcaagactccgtctcaaaaaaaagatgttatttcttgcaaaatcaaggtagtacttaatgatattcacataatttttaaaggaagttttctcctgagtcactaaatttgatactttrgagcataaacttcaatatgtaaatattccaaatctgattcaatacagtttccctttactgtaccctccactggttgaatttcctgcccttgcaggagaaattttgaaaaggagggaatgaagtttttaaaatcaagcagaatattttgaattaagtagttttttatttcagagacttctagaggggattagtacagctttgagccacttttctctatctctaaatctaaagttcccaggatactatttctaagatgaggactctgagatcttataagctgcttag

SEQ ID NO: 468410 - DNA, 561 bp, Homo sapiens
tagtttgggcagtaagccagataattttcatgtttttcccttttctgttaataataataaaaaacaatgaaaactatttttctttgaatttgttcctccaaatgctcaaaggctttctttatttcttattaccttttgcactccagcctgggccacagagcaagactccgtctcaaaaaaaagatgttatttcttgcaaaatcaaggtagtacttaatgatattcacataatttttaaaggaagttttctcctgagtcactaaatttgatactttggagcataaacttcaatatgtaaatattccaaatctgattcaatacagtttccctttactgtaccctccactggttgaatttcctgcccttgcaggagaaattttgaaaaggagggaatgaagtttttaaaatcaagcagaatatwttgaattaagtagttttttatttcagagacttctagaggggattagtacagctttgagccacttttctctatctctaaatctaaagttcccaggatactatttctaagatgaggactctgagatcttataagctgcttag

SEQ ID NO: 468411 - DNA, 481 bp, Homo sapiens
tgtaatccagctactagggaggctgaggcaggaaaatagcttgaacccgcgaggcggaggttgcagtgaactgagattgcaccactgcactccagcctgggcaacagagtgagactccatctcaaaaaaaaaaaaaagttcactgaggtggaacaacggagggagaaacaagtggaagtaaatgtggttggagaaaaatcaggaccacattccttgtagcatgtgtcaaamcctgaggatacaaagactaagacacagtccttaccctcaataagtttacaatcttgtaaatgagcccagcacataaacagagaatttcaatattgtatgataagctaagtcatagtgaatgacactaacttaccccagaagtcaggaaagatgaatcctagccaagccttaaagaatgagaacaagataaccagaggatggtgaaacagaagttagaaaaagtatttccagtaaatatttttacaagtgc

SEQ ID NO: 468412 - DNA, 481 bp, Homo sapiens
tgtaatccagctactagggaggctgaggcaggaaaatagcttgaacccgcgaggcggaggttgcagtgaactgagattgcaccactgcactccagcctgggcaacagagtgagactccatctcaaaaaaaaaaaaaagttcactgaggtggaacaacggagggagaaacaagtggaagtaaatgtggttggagaaaaatcaggaccacattccttgtagcatgtgtcaaacmctgaggatacaaagactaagacacagtccttaccctcaataagtttacaatcttgtaaatgagcccagcacataaacagagaatttcaatattgtatgataagctaagtcatagtgaatgacactaacttaccccagaagtcaggaaagatgaatcctagccaagccttaaagaatgagaacaagataaccagaggatggtgaaacagaagttagaaaaagtatttccagtaaatatttttacaagtgc

SEQ ID NO: 468413 - DNA, 562 bp, Homo sapiens
tgtatattaggagattttgacatgctttaattattgccaggtcaaggacacaaaaccacaagtaatgtataagtgatttgaacaactcaattagcaagtttgaagatgtgtgtccatatattcctacatatatttctatacctaaaatgggtgaacacatattcttcttttataagaatgatcatttaactaatttcttggttgagygataatgtgccaaagaatattacagacacttgacaggcattaactaattcagttaattctcataaaactgccaagagatagctttgtaaggacaaagtttaaatctgaccctttgtaattcggctctagtgcccatgtgtttaacccatataaaacattttctgaaggaatattttcacaacataatacttagaaattttcacaaatttaacaaatttatagctgctaaaggaaaaaaaataatgaaccttgttaaagatggtaaaggaagactattcaggagactactgcaatcgggctttgcggtagggaaaagagattgaactcaactccctgacaaaaagtgtcttcttaa

SEQ ID NO: 468414 - DNA, 602 bp, Homo sapiens
aattgggaccagggggccatcgtgagtgtggaggctgcaaaggccccaagctctgggagcccacgctttttattggtgctcaaacaaagaaacaggtagtgaggatgtgggggttgaaaggaaacagtgtatcaagtgaatgagaaacatatggctgcttgagataatgggagtgctagaagctgggagccagcaagtctatgrgatatgtaagccctgcctcagcttctctcccaacacagcttttctcccaatacttccagatattttaattcaagtattccaccaatcaagaagtttggggaatgattggaaatgaaataacctgaattatctgcagaatgcctagaacacccacctgcacacagctttaaagggttcagcctcagtcctctaagagactttcctgtggcactaggatgatcaagggaatttatggttagagaaacagacatctatagtgattccacacatataacctgtatatgttctttagaaatagaaactttgttctaaaatccctctgctaacttatatttggattctaaaacatttcattcatttaaaaaatcagtagtgagtgaaaggtcatgtgttaattt

SEQ ID NO: 468415 - DNA, 542 bp, Homo sapiens
agacagtgattactttagcaaagaagtaactgtttagtatcctattgtacgactatgtcattatttgtcttctctacttttcaaaaacgttagattgttttaaatttttggctattacaaatgctgctgccatgaaccgtattatccatgtatcttaatgcacatacacgtagtatggggtatatatttaggactgaaattgttcttttatagggtcagatcatgccaaactttttgaaaacacttctaccaatttttattctcactagcagtgtataagactccayatctttgtcaagacatcatattatcaagcttttcaatttttatgcatctttggggggtatataataatttctctgtggttttaatgtatatcttcctaattgctaatgagattgaatatgatttcattatttattgaccatttggattttcttctctgaagttcctatccaagtctcttgctcatgtttttataaagttttgtctttaaaaaaaaaacaaaaaacagaagttctccaatgagaacacatggacac

SEQ ID NO: 468416 - DNA, 542 bp, Homo sapiens
agacagtgattactttagcaaagaagtaactgtttagtatcctattgtacgactatgtcattatttgtcttctctacttttcaaaaacgttagattgttttaaatttttggctattacaaatgctgctgccatgaaccgtattatccatgtatcttaatgcacatacacgtagtatggggtatatatttaggactgaaattgttcttttatagggtcagatcatgccaaactttttgaaaacacttctaccaatttttattctcactagcagtgtataagactccatatctttgtcaagacatcatattatcaagcttttcaatttttatgcatctttggggggtatataataatttctctgtggttttaatgtatatcttcctaattgctaatgagattgaatatgatttcattatttattgaccatttggattttcttctctgaagttcctatccaagtctcttgctcatgtttttataaagttttgtctttaaaaaaaamacaaaaaacagaagttctccaatgagaacacatggacac

SEQ ID NO: 468417 - DNA, 572 bp, Homo sapiens
acagccacatggaactgtaagtccaaataaacttctttcttttgtaaattacccagtctcagatatgtctttatcagcagtgtgaaaacagactaatacagaatttaaccacagtttatggggaggggaaagagaagttcatgatgatgtttatgtttatggactaaataactatgtctaatcaaatggttgtgccagccactggcaaaagaaacagaagtcatggaatgagtttggaagactgatgattaatttatttctggacataggtgagatctccagatgaaagtgtcctgtgtcatgttgacgttggatacatgggtctggaatccagaggaawcatcaggattaaaaacatacgtttgaaagacaatctacaggcaagggtaagaatggctaaagaaagagttctaacaagaagggcagagagccaaagagccaaggctaaaatcttaaatccatactgaaaaggatgggaggaaggttatgaaccaacaaaggagactaagaggcatgtggaaaactgttgtgcatttctcaaaatcagcaatcagaatgttttgtagtaacta

SEQ ID NO: 468418 - DNA, 572 bp, Homo sapiens
acagccacatggaactgtaagtccaaataaacttctttcttttgtaaattacccagtctcagatatgtctttatcagcagtgtgaaaacagactaatacagaatttaaccacagtttatggggaggggaaagagaagttcatgatgatgtttatgtttatggactaaataactatgtctaatcaaatggttgtgccagccactggcaaaagaaacagaagtcatggaatgagtttggaagactgatgattaatttatttctggacataggtgagatctccagatgaaagtgtcctgtgtcatgttgacgttggatacatgggtctggaatccagaggaatcatcaggattaaaaacatacgtttgaaagacaatctacaggcaagrgtaagaatggctaaagaaagagttctaacaagaagggcagagagccaaagagccaaggctaaaatcttaaatccatactgaaaaggatgggaggaaggttatgaaccaacaaaggagactaagaggcatgtggaaaactgttgtgcatttctcaaaatcagcaatcagaatgttttgtagtaacta

SEQ ID NO: 468419 - DNA, 596 bp, Homo sapiens
cttgtatcttgctcttccattacagaattcttttcctcaccttactctctctcagcagcatttagcatgctcagccactctacttttttaaactttcctcttctgcttccawgataccacactctcctgggtttcctcctgactctctgatctctccttctctggccagtcgctcacacttaaagtctgggtgttggagagcccccaggatgcattttctctgacttttctaggtaattgtatctgatcccatagttttaaataccatgaatgtgctgttaagtcctagatttacatctctagccctgattgctctttcttgccctggacttatttatttgactttataccccaccaaatctgctcttgtgtctaccttcctttctctaataagggcatcaccactcaccatctccactaaattgcttcattcaaacaactgttatttctcagttagatacctaccattacctcctaactcatttttatctgcagctattaccctactctggtctattctccacaaaataatcagacaaatctgtttataattacagttcctattttcaaaatcaagttgtgaagtgagcaaataa

SEQ ID NO: 468420 - DNA, 439 bp, Homo sapiens
ttcagcttccctgtcttgcagctgcctaaagcttagtcttagttagttgtgatgaggtcagcaattgtttgccttgcacataccccacttcctcttctcatttagtactgcacagtgctccctacttaggtttcagctcctggatttgttctatgttgtgcygtgttttggtggtggttatagagatgcttggatattgttcttagtttctgcaaacccagcagttctttaaagcagaatgttttattcatgatatacttggtttattgcagaagggtctctttcagaaactctagtttgccatttctggaaaccgtcattctgtctgaaaaccactccaatcaggctttcttccccatgatttcatgtcgtaaaactacacttgtcaaggtcatcaataacttccagattgctgaatccaatgactagccttcatttc

SEQ ID NO: 468421 - DNA, 623 bp, Homo sapiens
tgatgccccataggcccttcttcaccttggacaactctgttatttcattaacaataactgaagccactcttcatgaaattctacaattcccacaaagacaagttcttccagtaaatactgttaaagactaaatacagacatcagaattcaggataaaattttgtttgtcttataagtcctttaagtcaggatagaggcaaatgatgtcactggctcattctttatatgaaaagtgaggagctgcatgtacagtcatgtgctgcataatgatatttcagttaatgaaagactgcatatacagtgatagycccataatattacaaaagaactgaaaaattcctatcacctagtgatatcatagccattgtaatattgtagttgagttgatgctattgtaaacaaaacgattgccctgtcagctgtataaaaatatagcacatacaactatggacagtacagaatacttgataatggtaataaatgactgtgtaactgatttatgtatttatatatttcctatactatacttttcattattattttagagtgtacttattctacttattttttaaaaaagtaaactgtaaaacagcctcaggcaggtcctttaggaggtattccag

SEQ ID NO: 468422 - DNA, 518 bp, Homo sapiens
gtgttaacttttgaacaacttgtgcttaaagagctacaataaatgaagataacattttaacaacctggaaaaagaaggtgaaatatttattttttaaatgaacctaatggagcagtgctattattttaaatgcttcctaccaccaaagtgttcctattgttgggaaatrtatttagtattttttctgaattgcttgaacttttcaaatgaattgtttgtatatgtttttgttatttgatgagttggggaatacagttggctcactaaattcttcacttttcatgttctttataagaagaaattatattgagatactgtaacgtaaatcctgttccttgcaatttgattgcagagaatgcattgtttgaaaaaaaaactcttgacattttgatatttcatctttcatcttcttaggtgtccaatcccaaagcaaacctcacaaaatcagacatcattttttggctgacttgtcatttcactattattagaactcttgctcttacaagggactttattat

SEQ ID NO: 468423 - DNA, 547 bp, Homo sapiens
tatacatactaacagtatgtataaaattgttcccatttttcaagctattttatggtaaataattgttgtgctttgaaagggcaaaatttgaagtggaccatattataatatatttgaaaacaatcctgtgagaaagacacaactatttccccctctgaaacagtagttatattatattccaaagagattatttcctaggtgtctaaatgcttgctattttcatttttgtgacatctgtgttctaatggctatttattctatagccattatcaagtatggaagtatcaggaaagaaacttctaaggccttggtattttgagagatactcttaactgtgggacataaacgttttcacttgasagagagtaatagatgaaagtaaagtaattttggcctttgatatgaaaattttttttataaaccagtctctacaattattgagttatcgtaattattaagaaaataatgtggtcaatgtatcaacaaaaaagtatttctcttattgagtgaagaaaactttacattccacaataatctgaaaacatat

SEQ ID NO: 468424 - DNA, 449 bp, Homo sapiens
aatttgctttaattatgatgttagggggttaagagattggttctgggaatagcttaatagagacaaaacttgcakccaaattaattgaaagtttcttgctatgagggaaagattgccaaacatatggaatactgttacagagtgagacattagaaaaatacattgtagagatttagcaatgattaaatgtgaaaatggagtggaaatagatgtgtctacaacatttccatacacaaacatggatttgtttaatgtaattttctgttttatttgcaattactgagatatatgatatcctactgaagaatactaattacgtgacaatatatcacctaggagataatccctgcaaatacatatttacattgtgtatttcatttgttactcgactccttatgttaaaatatccaaattacagccttaaaatgataacatcgaaattatctcca

SEQ ID NO: 468425 - DNA, 449 bp, Homo sapiens
aatttgctttaattatgatgttagggggttaagagattggttctgggaatagcttaatagagacaaaacttgcatccaaattaattgaaagtttcttgctatgagggaaagattgccaaacatatggaatactgttacagagtgagacattagaaaaatacattgtagagatttagcaatgattaaatgtgaaaatggagtggaaatagaygtgtctacaacatttccatacacaaacatggatttgtttaatgtaattttctgttttatttgcaattactgagatatatgatatcctactgaagaatactaattacgtgacaatatatcacctaggagataatccctgcaaatacatatttacattgtgtatttcatttgttactcgactccttatgttaaaatatccaaattacagccttaaaatgataacatcgaaattatctcca

SEQ ID NO: 468426 - DNA, 449 bp, Homo sapiens
aatttgctttaattatgatgttagggggttaagagattggttctgggaatagcttaatagagacaaaacttgcatccaaattaattgaaagtttcttgctatgagggaaagattgccaaacatatggaatactgttacagagtgagacattagaaaaatacattgtagagatttagcaatgattaaatgtgaaaatggagtggaaatagatgtgtctacaacatttccatacacaaacatggatttgyttaatgtaattttctgttttatttgcaattactgagatatatgatatcctactgaagaatactaattacgtgacaatatatcacctaggagataatccctgcaaatacatatttacattgtgtatttcatttgttactcgactccttatgttaaaatatccaaattacagccttaaaatgataacatcgaaattatctcca

SEQ ID NO: 468427 - DNA, 539 bp, Homo sapiens
atttagaataagtgaaaatataaaaacgagaactataaacggttcaacaaaaatgaatgttctttaatgacaaagagccagggttggggggcggcacacaccagatttgtcatggaaaactgagtcgtgggcctcaggttttccctgcgtggggactgcatggatgaatcaggccttcttcctttggtcacaattaccaggtgatttaaaaggggaattgtgaccagaaaacaggattttatcatcagcggtgatggtggctactttgaaatggaaagttttatttttgaaatatttrtccagtaatagacctcttagttaatttaattttaatgtaactatacctccgttataaatctttgacctggacatttcagaactcaggtatgtgtttaggcaggtgtgccacagcttggtatatcctgtagcttcaccttgttgatgcattttagaattagttattccccgactaaatcaatgagccccccactgacagtatttcccaagcctgcctttagaaaaccatcttccttctttct

SEQ ID NO: 468428 - DNA, 590 bp, Homo sapiens
aaaatctcaggttcatcatgatttaattgaatagaaacttctagagccaccatcaaacaatccaaagtgaggtaaagcaatgtggcctaacaggttccaatgtagtatacttagtaacctttccagatgccccactactctgccttttgataataccactgccctcactaatagtcttttccagcttggagcaggtcatcaccttttgccaaaagcytaaggactcttcattgggaatagcattgtttctgaggctcaccatgcttggaatctgttccacatttccagccctctctctttccatgtatcctacctttgagccacaccagagggattcttgcactttcatttctctatgtttttgcttacactttcctctgtcctgaaatttctttccctcctttcccccaatcaaaatcctattctcacttgcctgatacaggaaccattctccaagaagccacccttgaactatcccatggaaattactagtttcttcattagcacttccataaaactttccttgtaactctgtttagcactgctattgtttttttctcctaagcacacagtcgtttttgtttgtttgt

SEQ ID NO: 468429 - DNA, 590 bp, Homo sapiens
aaaatctcaggttcatcatgatttaattgaatagaaacttctagagccaccatcaaacaatccaaagtgaggtaaagcaatgtggcctaacaggttccaatgtagtatacttagtaacctttccagatgccccactactctgccttttgataataccactgccctcactaatagtcttttccagcttggagcaggtcatcaccttttgccaaaagcctaaggactcttcattgggaatagcattgtttctgaggctcaccatgcttggaatctgttccacatttccagccctctctctttccatgtatcctacctttgagccacaccagagggattcttgcactttcatttctctatgtttttgcttacactttcctctgtcctgaaatttctttccctcctttcccccaatcaaaatcctattctcacttgcctgatacaggaaccattctccaagamgccacccttgaactatcccatggaaattactagtttcttcattagcacttccataaaactttccttgtaactctgtttagcactgctattgtttttttctcctaagcacacagtcgtttttgtttgtttgt

SEQ ID NO: 468430 - DNA, 587 bp, Homo sapiens
catgcttggaatctgttccacatttccagccctctctctttccatgtatcctacctttgagccacaccagagggattcttgcactttcatttctctatgtttttgcttacactttcctctgtcctgaaatttctttccctcctttcccccaatcaaaatcctattctcacttgcctgatacaggaaccattctccaagaagccacccttgaactatcccatggaaattactagtttcttcattagcacttccataaaactttccttgtaactctgtttagcactgctattgtttttttctcctaagcacacagtcrtttttgtttgtttgttttgcagttttccttgatatttggggaaaaatgtttattttacctactctctacattctagggatatttcttagcctgaagttcctggcttcgctgtgatcctttggaggcataggaaggtggggcaacttgtgaaacttcatatatataaatttcatatatataaatatatatgttcctgtatgtgtgtgtgtatatatgtgtgtgtgtgtgtgtgtgtgtgtgtatttgtgtatatgtgtactttgctggggtc

SEQ ID NO: 468431 - DNA, 595 bp, Homo sapiens
gattagattcttctaccagaatctatcgttattttgtgatttgtggtcaaggaagtgtgtgatgaagtccaaatactggacatataatgcttatttgattttatgggaagtataatgcttatttgattttatgggaagtgggtggttttaaaagactctcagatataattgtaatcaaatgcaaattctgaggggatgggtgggatatgaaagcacagaatcaaatggagttgaatttcttttttgttatttctaaatttaagacgtttgtmattggcatttccacagttagaatatttagttgcttatcgtttttttctttgtgagaaatcattgtttgttaaaccatgaataggttctcatggagaactgttattgaagagagatccatttggtgggatataattaaaaaaaatgaatcaaaagaaaatctctaaatgcagattccagaaaaattacagcacatctcagtgaatttgcaagtggtaagtttgcttttgattttacatggtgatatattttggaattatgggccatagtatccttggagtcttatgcttagatgcacttaattgtcagttagcaaatgtagtta

SEQ ID NO: 468432 - DNA, 583 bp, Homo sapiens
gtgtgtcaagtgcagtggccattctggcaagatagcacatttgtctgatgaactttgtgaagtcaacccaaagctaacttgaggcttatttgggttgtctcataagacctgctgcttgctcccccaaaatcttccccattggtctgtcacaatatctgaaacttgtcccactgtacttgagagagagacaactaggtctagaatcttctgttaaaatgcaaaatatagatgatagtttggaaatactgttaattatcttaggagtgattatagtattctwattatataggacgatattcttattcttaggagatgcatgctggagtattaaagtggaagtgtcagccaggcgcagtggctcatgcctgtaatcccatcactttgggaggctgaggcaggcggatcatgacgtcaggagttcgaaaacagcctggtcaacatagtgaaacccccatctctactaaaaaaaatacaaaaaattatactgggcatggtggcaagtgcctgtaatcccagctactcatgatgctgaggcagaagaatcgcttgaacccgggaggcggaggttgcagtgagccaagat

SEQ ID NO: 468433 - DNA, 583 bp, Homo sapiens
gtgtgtcaagtgcagtggccattctggcaagatagcacatttgtctgatgaactttgtgaagtcaacccaaagctaacttgaggcttatttgggttgtctcataagacctgctgcttgctcccccaaaatcttccccattggtctgtcacaatatctgaaacttgtcccactgtacttgagagagagacaactaggtctagaatcttctgttaaaatgcaaaatatagatgatagtttggaaatactgttaattatcttaggagtgattatagtattctaattatataggacgatattcttattcttaggagatgcatgctggagtattaaagtggaagtgtcagccaggcgcagtggctcatgcctgtaatcccatcactttgggaggctgaggcaggcggatcatgacgtcaggagttcgaaaacagcctggtcaacatagtgaaacccccatctctactaaaaaaaatacaaaaaattatactgggcatggtggcawgtgcctgtaatcccagctactcatgatgctgaggcagaagaatcgcttgaacccgggaggcggaggttgcagtgagccaagat

SEQ ID NO: 468434 - DNA, 519 bp, Homo sapiens
atcaggtcatttaaggtcttctctacactgtttattctagttagccatttgtctaatcttttttcaaggtttttagcttcttgcaatgggttcgaacatcctcctttagcttggagaagttgttattaccgaccttctgaagcttacttctgccaactcatcaaagtcattctccrtccagctttgttcagttgctggcgaggagctgcgatcctttggaggagaagaggcactctgaattttagaatttccagcttttgtgctctggtttctccccatctttgtggttctatctaccttcagtctttgatgacggtgacctacagatggggtttggtgtagatgacatttttgttgattgatattgctgctattcctttctgtttgttcgttttccttctaagagtcaggtccctgagctgcgggtctgttggagtttgctggagttccactccagaccttgtttgcctgggtatcaccagtggatgctcagttggaaatgcagaaatcacctgtctt

SEQ ID NO: 468435 - DNA, 617 bp, Homo sapiens
aattttaacctgcaaaagaatcacctggagagctgttgacactgattcctgggcccctctctcatacattctgtatcagtagatctagggtggagcctgagaatgtgaaktcccaacaatcccacaggtggtattgatgcccatgctaccagtccacagaccacaccttgaatggcatgcacttgtatcccatgcactacaatgaaaataatttttctggtgtcttcctgcatagaatattagaagcagtaaattagagagctgtgacaagaaaagaaactattctcactaataacagcaagaagtgactgcaaaaatggaggagagagagaactgtctagggctgtttaggctagtaacaacaagtactaccattttttgagcacctgttatatgttgagctctatgctaggtgcatcacaaatataatctcaatctttaaagccaccctgcaaagtagatattctgaaccctcattttacatttgtagaaactgtagtacaattaagtgatttaccttggaccacttcactatcatttgaatccaattatatctagttgcaaagcccacactctttccactacatcctggtaactgctagcctgaggtaaattga

SEQ ID NO: 468436 - DNA, 617 bp, Homo sapiens
aattttaacctgcaaaagaatcacctggagagctgttgacactgattcctgggcccctctctcatacattctgtatcagtagatctagggtggagcctgagaatgtgaagtcccaacaatcccacaggtggtattgatgcccatgctaccagtccacagaccacaccttgaatggcatgcacttgtatcccatgcactacaatgaaaataatttttctggtgtcttcctgcatagaatattagaagcagtaaattagagagctgtgacaagaaaagaaactattctcactaataacagcaagaagtgactgcaaaaatggaggagagagagaactgtctagggctgtttaggctagtaacaacaagtactaccattttttgagcacctgttatatgttgagctctatgctaggtgcatcacaaatataatctcaatctttaaagccaccctgcaaagtagatattctgaaccctcattttacatttgtagaaactgtagtacaattaagtgatttaccttggaccacytcactatcatttgaatccaattatatctagttgcaaagcccacactctttccactacatcctggtaactgctagcctgaggtaaattga

SEQ ID NO: 468437 - DNA, 540 bp, Homo sapiens
aaaaaaaaactcctctaaaattcttatcattaaccagtggctcgctaaaaagaaaaaaaaaaaacctcagactattttaattgtcttagagttctcatatttgtacctatctaagaaacagtttatcacaatgtaaatactaaggaaatgtttaggtggttttgtacttttaatttcaaaatctatagaaaattctctttttcccagagataccattcttarccacttaaacaaaatataaaatactatttagcaatattccctgctgaatacttttaaacaagatagggctaggctgatttaaattataagttgaagtctaggaaaaacaaagtctatataatacaaaacgttggaatcaagtaatattacttgtttaagccaaatatattcatatttaaataacaattaaatagcaagagattaaataccaaccattcttaatcacagtttaagtctgataacaaaatcaaaactttaatgccatacaaaatacatctcacaaactaaccaatgcaaagctctaagctttaaactttt

SEQ ID NO: 468438 - DNA, 581 bp, Homo sapiens
gtaacttgcttcttgcccacttaaaaatattcattatttattgggtaaatggagccaagctttctttcttagaaggccttcttataggacatattttaaaatgaactttgaactaattttactcattctagctttaaataaaatttataagagataggtaaaacctatgttcttgaaatgaaattttattctattgtttggtaccacataatgaagttaatctttttctccaaaacagtaaacttttagtaaggagataggttttattttattttctaatcatttaatcttacactagaatcgatagctaaagcttttttccccaataaattaacagtttacagtagtaccttagatatagattgggaggtatgctggtgttattaaaaaatcagatgaactctataaacacccatttggaaaaatagctattttgacatctttmttttctttactttttggctttctcagttttgaagctacccaatgtattttgagtttaaattacatatattggtgaaaaaaaaaagttaacagtatgtagtccattggtgattttccaaatccaaaaattgatttac

SEQ ID NO: 468439 - DNA, 452 bp, Homo sapiens
gaatacattcacatttttagtctacctcacattcaggttttaaagtaacaggagtgtaaaaagatatcaataatataaataaataaaaatctagaatcatttctagaaaaattattgctgaagtgagcttttgtctaaagtctactattctttccaaaagcagagggggttaaaataacaaaaaccaraaacaaataaagcctactgaatctaaattaactaaagtattagatattattagattctgagcattattataagttattctgtaccttaagagaaaatcctgcctcttgcatgtgcctgggtagaccctaaatagtcagtcactgaaattattgtcctagacctacatttctttcccgctgcctcactgtcgctctttctcagactgaaaaactaagcaacacttaccaagcagggttttgagagtgtgtttttccatgtgagga

SEQ ID NO: 468440 - DNA, 607 bp, Homo sapiens
aacactccaggacattgtctgggcaaagatttattgagtattatcccataagcccaggcaaccaaagcaaaatgtaaaagtgggataatatcaagctaaaagcttctgtacagcaaaggaaacaatcaactaagtgaagaaacaatacacagaatggaaaaaagtatttgcaaactacccatctgacaaggaattaatakccagaatatataaggagctcaaataacaggaaaaaatcaaataatcaaattaaaaattaggcagatgatctgaacagacatttctaaaaacaagacatataaatggccaacaggtgtataaaaaatgttcaacatcatcagagaaatgtaaatcaaaaccacaatgagatattatctcacctcagttaaaattgcttttatccaaaagacaggcaataacaaatgctgatgaggatgtgaggaaagggtaacccacaagcactctcaggaggaatatgaattagtacagccactgtggataacaatctgcaagttcctcaagaaagtaaaaataaatctaccatatgatccagcaatcctgtgctagataaatattaaaaggaaaaaaatcaatatatcagagtgat

SEQ ID NO: 468441 - DNA, 514 bp, Homo sapiens
gacacttgttctaaagtcactcagattcaaaaggtagaatcagatggcttagtgattggatgtgtcagggacaggggactgtgaggaggagaaggggtctaaaatacttcctagttttctgatttgggtggcctgttgaaatgttaatggtgctttacccagggtagggacactctgactcctaraaatagttccagcctctaattagtgtcgagatcattttttaggttaaaaatgagctttgggctagagttacaggaattcttatttcaatctttcacttggttttgcctgtaatagactggctaaactgtaagaggcctcctattaattttaaactgtcttgaactcaaaatagtcaaagtattaagctaatgaaagagcagtgttcttgttgttgagtaatccacttatttattctatagcttcctctcccatgctctttgttccctttgatcataattttaatgggttttggaaaaaatagaaacccatgcactacattggctatatt

SEQ ID NO: 468442 - DNA, 642 bp, Homo sapiens
ctggctaaactgtaagaggcctcctattaattttaaactgtcttgaactcaaaatagtcaaagtattaagctaatgaaagagcagtgttcttgttgttgagtaatccacttatttattctatagcttcctctcccatgctctttgttccctttgatcataattttaatgggttttggaaaaaatagaaacccatgcactacattggctatatttaacaggagtacctataaaatatcattttgtctaatgtactgtaaatawttttttccagatgcttgaatgtttttggagtgtatacctttataaattatacatttttatataacacctgtatctgtttttcctttaattgcttctcaatcttgtgtcacgtttagaaaagccccctcttttaagatatacaaatattcactctcattgtcttttagaaagcgatagatttatttcataaatgaattatctgataaatttttaaatggtgtaatttttttctaccattgattagaaatgctatgtatattaaaataaattcatatagataagtacatatatttatatataagatatacatatgcatatgactcatatatatgagtcactgtctgcctcattagaatgtttgatttaacaccccagaacat

SEQ ID NO: 468443 - DNA, 642 bp, Homo sapiens
ctggctaaactgtaagaggcctcctattaattttaaactgtcttgaactcaaaatagtcaaagtattaagctaatgaaagagcagtgttcttgttgttgagtaatccacttatttattctatagcttcctctcccatgctctttgttccctttgatcataattttaatgggttttggaaaaaatagaaacccatgcactacattggctatatttaacaggagtacctataaaatatcattttgtctaatgtactgtaaataattttttccagatgcttgaatgtttttggagtgtatacctttataaattatacatttttatataacacctgtatctgtttttcctttaattgcttctcaatcttgtgtcacgtttagaaaagccccctcttttaagatatacaaatattcactctcattgtcttttagaaagcgatagatttatttcataaatgaattatctgataaatttttaaatggtgtawtttttttctaccattgattagaaatgctatgtatattaaaataaattcatatagataagtacatatatttatatataagatatacatatgcatatgactcatatatatgagtcactgtctgcctcattagaatgtttgatttaacaccccagaacat

SEQ ID NO: 468444 - DNA, 366 bp, Homo sapiens
tttcttgaagcctttgtggatttgctttctattactactgtaatgaaacactacagatgcagtggcataaaacaacatttattctctaacatttccggaggtcggaaatctggaatcagtcttattaatgtaaagtcaaggtgtcagcaagactggattcttctgcaggttctgagggggaaatctgtttctttatctttttctcagcttctattggtagcctatattatttggcttgtaccttccttccttcrgctttaaaaaataacactccaatctctgctttgttatcatatcaccttctctgtctctgattctgtatgcaactttttaataaggacctctgtgattatatcaggccccatc

SEQ ID NO: 468445 - DNA, 591 bp, Homo sapiens
aaattgctattttttaaattagaagaattcacagggatctagtaagagtctgcattcagtctgttttcttagtgtctttaaacaccctattgtaaagaaacaaagccaggaaattatagaaaatrtaggggaatttccaatccacagatccgaattcaaagcaaaagccttggtcttacatcaaaagactggtaaattgccattcatgtatgcattttatgttaacctatttaaggcaagtatagatcattccatgacagccaaattgaaccagcttttttcatttattggtcccagtggctcagagaaaagagcttccactacatttatttttaaactctgtgaatacatgtgttccctccaccccaccaacaacttttaatcttcaaaatgcacaatggtgctggtaaatttcttcgtgttttatgcatagaatggaattttactcatctgaccatgtgctgaggaatctttttgtccttatggtgaaatgtgttcttcttttgttgacagtcctgaaagtggagctactcctgtgttttttgcacaggtgggattctattttaacaatggcttcatgcccttttgtca

SEQ ID NO: 468446 - DNA, 591 bp, Homo sapiens
aaattgctattttttaaattagaagaattcacagggatctagtaagagtctgcattcagtctgttttcttagtgtctttaaacaccctattgtaaagaaacaaagccaggaaattatagaaaatataggggaatttccaatccacagatccgaattcaaagcaaaagccttggtcttacatcaaaagactggtaaattgccattcatgtatgcattttatgttaacctatttaaggcaagtatagatcattccatgacagccaaattgaaccagcttttttcatttattggtcccagtggctcagagaaaagagcttccactacatttatttttaaactctgtgaatacatgtgttccctccaccccaccaacaacttttaatcttcaaaatgcacaatggtgctggtaaatttcttygtgttttatgcatagaatggaattttactcatctgaccatgtgctgaggaatctttttgtccttatggtgaaatgtgttcttcttttgttgacagtcctgaaagtggagctactcctgtgttttttgcacaggtgggattctattttaacaatggcttcatgcccttttgtca

SEQ ID NO: 468447 - DNA, 585 bp, Homo sapiens
tctctgtgtcacattttggtaattctcacaatatttcaaagttttttattattatatctgttatagtgatctgtggtccatgatctttggtgttactattgtaattggtttggggcaccataaatgacacccacataagactacaaactgtctgttcagactgctccaccaaccagccatcttctcatctctctccctctctccttgagcctccctttccccgagacacaataatattgaaataggccaatttgtartcctgcaattgtctctaagttcaagtgaaaggaagagttgcacgtctctcacttgaaatcaaaagctaaaaatgattaagctgactgaggttagcatgtcaaaaaccaaaagaaattgaaagctaggtctcttgtaccaaacagttgcccaagttgtgaatgcaaaagaatagttattgaaggaaattaaaagtgctgtttcagtgatagcacacaaatgataggaaagcaaaacagccttatttctgatatggagaaagctgtagtgatttctgtagaaaatcaaaccagccacactatttccttaagccaaagcctaatgcagaga

SEQ ID NO: 468448 - DNA, 516 bp, Homo sapiens
gaagttatggaaaagataaagtcacatttctagcatccctgaggatgtggtttgaagatatcagtttkgctactcgtgtatggctgacagtggcaacaatattgaggctcggaatatgttcaaattggtctaaaatatctctctcaggagtggcatttgcaaagaaattccgaccactaattaatcggtaaggctggtgtcttaatgaaagtaatattttctctagacaagtgcattactttgctaggactgccctaacaaagtaccacagactagattaaacaacagacatttattttctcacagttctggaggctaaaagaccaaaatcaaggcatcagttggattggttccttctaagggccatggggggtggatctgtttttccaggtctctctccttggcttctagatggctatcttctccctctgtcttcacatcatcttccctttgttcaggtctgtgtctaaatttcctcttcctacaaaaataaaagttacatcatattagggccca

SEQ ID NO: 468449 - DNA, 560 bp, Homo sapiens
atactacataatgccacttctataaggactctgaaagagtcaacgcataggagcagagtaggatggtggttgccaggggctggggggaaggggaaacaggcaggtattagtcaaagggtatgaagttttggtcacataagatgaataagttctgaagatctactgcatggcatagtgcccacagatactaatattatattgtatacttaaaattttgctaaaagggtagatcttatgttgtgttcttatcataaaataataagagcaatgagtaatgagggcaggagaaaagttctggaggaatggacaagtttatggcatggatcatggtgatggtttcatggatgtatacttacctccaaagtcatcaagttgtagacagcctttggtatgccaataatacctcaatagcatggttttgtcaaaggaatgttgrgttttattctaagtacaaaggaaatcactggatgtgttaagcagggagtgacaaaatctggcatattagttataagaaaatcactctggccaccctgtgggaaacagactagagaagaagcaag

SEQ ID NO: 468450 - DNA, 608 bp, Homo sapiens
tatattcatccttgtaggtgtgaagtggaatttgcatttccctaatgactaatgatgtggagtagcttttaatgtgtttattagccatttattggtatatgttctttggagaaatgtctactcatgtcttttgcccatttttaaattgggttgcttgacttttggttgaattgtaacagttctttacrctctggatactagatccttatcatatacatatatatgagaagataataagagaaaatatatttactcttattctgtaggttgtcttctcactttatctataatgtgccttgatgcccgaatgctttttacttttgatgaagcccagtttatcttatttttctttcattgctaatgcttttgtgtcatatctaagattccattgacaaatacaagataataaatatttgttcttatgttttcttctatgagttcagggttcagttttaaattttccagtaaagatttgcactgggtctctgtattcaaccaaggttttcctttggttaaattccttagtcctggaacccatgaattgaggagcttggggattggtgttcagaatgaaatttaagaagatcattttctgttatttctagcca

SEQ ID NO: 468451 - DNA, 630 bp, Homo sapiens
acttttagtttgcattctcttggatacacatttgtttaatatattttctcttgttttggccgttcaagatggcctcttttgttcaatcctaatttcttctttccattttttgttcaatcctgtttcctcttttttgttcaaacccaattaatgtttattttgccctttttgggcagttgcatttattcaataaatttgtagccattttatgtatttggtatacgaattttttattagtaatacctgtttcaaatattttctaccaggttggaatctctctttttagtctcattatggtctctttcgatgaacagaaatttaaagttgatatagtcaaatttattaatcttttgttttatggtttgtgctttttctcactttttaaggaccactccactaaccmattgttagctcatgtgttcttctaaaagttttggttcttttttttccattcaaggtcttaatgcatttcagaatggtcttactatgtagcataaagtaaggattcatgttcgtgtttctttttgttccatagagaaaacgaattgttttagtaacatactgtattctgagtagacatcctttctgcataatctacaatcgcaccttcattgatgaaatgcagagttt

SEQ ID NO: 468452 - DNA, 546 bp, Homo sapiens
  misc_feature (1)...(546): n = A,T,C or G
cacatgtttacctacgcaacaaacctgcacaacctgcacatngtatccctcagaacttaaaataaaataaaataataaaaaatgaaataaatctaatttgatgtctcacactctaaatggaaacgcaggcccattaaccaattgaactgaatttcaattcattttaagttttgtttctccaagaagccagaaggcaaaaaataggtgctctgaggccactattkgttaagtgtcttccacaagttgttcatcagaacactaggtcacccatttattcattccagaaaaattgaaggtgcacaaactcagtgagtctgtgagaacagggaagacgtatgtcaacaagcatcaatggaacatatgggtagtgctacagggccatgaatgtagtgcccaactgaagactggtagatggagagagaggcttcccagaggaaggtggctgtaagctgacatttgaaggatgagccagactgagcgcaatgaagaggaagaagagatttgctctcagggaacagcatgtgccaggcctgggagagagacatc

SEQ ID NO: 468453 - DNA, 546 bp, Homo sapiens
  misc_feature (1)...(546): n = A,T,C or G
cacatgtttacctacgcaacaaacctgcacaacctgcacatngtatccctcagaacttaaaataaaataaaataataaaaaatgaaataaatctaatttgatgtctcacactctaaatggaaacgcaggcccattaaccaattgaactgaatttcaattcattttaagttttgtttctccaagaagccagaaggcaaaaaataggtgctctgaggccactattggttaagtgtcttccacaagttgttcatcagaacactaggtcacccatttattcattccagaaaaattgaaggtgcacaaactcagtgagtctgtgagaacagggaagacgtatgycaacaagcatcaatggaacatatgggtagtgctacagggccatgaatgtagtgcccaactgaagactggtagatggagagagaggcttcccagaggaaggtggctgtaagctgacatttgaaggatgagccagactgagcgcaatgaagaggaagaagagatttgctctcagggaacagcatgtgccaggcctgggagagagacatc

SEQ ID NO: 468454 - DNA, 546 bp, Homo sapiens
  misc_feature (1)...(546): n = A,T,C or G
cacatgtttacctacgcaacaaacctgcacaacctgcacatngtatccctcagaacttaaaataaaataaaataataaaaaatgaaataaatctaatttgatgtctcacactctaaatggaaacgcaggcccattaaccaattgaactgaatttcaattcattttaagttttgtttctccaagaagccagaaggcaaaaaataggtgctctgaggccactattggttaagtgtcttccacaagttgttcatcagaacactaggtcacccatttattcattccagaaaaattgaaggtgcacaaactcagtgagtctgtgagaacagggaagacgtatgtcaacaagcatcaatggaacatatgggtagtgctacagggccatgaatgtagtgcccaactgaagactggtagatggagagagaggcttcccagaggaaggtggctgtaagctgacatttgaaggatgagccagactgagcgcaatgaagagraagaagagatttgctctcagggaacagcatgtgccaggcctgggagagagacatc

SEQ ID NO: 468455 - DNA, 318 bp, Homo sapiens
taggatgactgcagtcaataataacttaattgtatattttttaaataacttaaataatataattggattgtttgtaactcaaaggataaatgcttgaggggatggaaamcccattctccatgatgtgcttatttcacattgtatgcctgtatcaaaacatctcgtgtgccccataaacatatacacctactatgtaccaatagaaatttttcaaaataaaaaaattaaagagaaaaataacttaatgtgtgccttttttcttctcagtttggagaattaggtggatttgcagcaatccaagccaagctccattcagaa

SEQ ID NO: 468456 - DNA, 337 bp, Homo sapiens
gcttgtggttcgtgagtctcttctgtcttctgtgcagtgattcagagagtcaggctccttccatctgtggttctgccatcttaaacacatggctcttctatgttacctgggtgttgtctccattccattcagctggaaagggagaagcacatggaagagaagcacattaaaatggaacaggtctggaaatgattcacacatgccmttggtcacacatcagtcacatgaccattcctaaccacatgtgggctgggaaatatactctactgtttgtccagttaggaaaggggcatgaagatttgccaccttgctattgtgagcaccttgaggactagga

SEQ ID NO: 468457 - DNA, 337 bp, Homo sapiens
gcttgtggttcgtgagtctcttctgtcttctgtgcagtgattcagagagtcaggctccttccatctgtggttctgccatcttaaacacatggctcttctatgttacctgggtgttgtctccattccattcagctggaaagggagaagcacatggaagagaagcacattaaaatggaacaggtctggaaatgattcacacatgcccttggtcacacatcagtcacatgaccattcctaaccacatgtgggctgggaaatatactctactgtttgtccagttaggaaaggggcatgaagatttgccacmttgctattgtgagcaccttgaggactagga

SEQ ID NO: 468458 - DNA, 427 bp, Homo sapiens
gtctggcattaaataaaagtccaggacytgatgacttcactgctgaagaaaaacttacaccaattatactgaaactatttaatattgcaaaaaattgaagagaaaagaatgtttccaaactcattctacaagaccagcattatcccaatacccaaaccagacaaagacacaacaacagcaaaaagaaaactacaggccaacttcgctgatgaatatagatgcaaaaatcctcaacaaagtactagcaaactaaattcaacaacacattaaaatgagtatttgtcatgcccaagggggattcatcctaggaacacaaagatagttcaacatatggaaatcaataaatgtgatacaccacattaacagaaggaaagacaaaaaccatatatttatttcaataaatgtcaagaaagcattgaataaaatt

SEQ ID NO: 468459 - DNA, 427 bp, Homo sapiens
gtctggcattaaataaaagtccaggacctgatgacttcactgctgaagaaaaacttacaccaattatactgaaactatttaatattgcaaaaaattgaagagaaaagaatgtttccaaactcattctacaagaccagcattatcccaatacccaaaccagacaaagacacaacaacagcaaaaagaaaactacaggccaacttcgctgatgaatatagatgcaaaaatcytcaacaaagtactagcaaactaaattcaacaacacattaaaatgagtatttgtcatgcccaagggggattcatcctaggaacacaaagatagttcaacatatggaaatcaataaatgtgatacaccacattaacagaaggaaagacaaaaaccatatatttatttcaataaatgtcaagaaagcattgaataaaatt

SEQ ID NO: 468460 - DNA, 519 bp, Homo sapiens
ttctcgtgcctcagcctcccgagtagctggggctatgggtacacaccaccgtgcccagctaattttttgtatttttagtggggactgggtttcgccatgttggcgaggctggtttcaaattccggagcttaagtggtccacccacctcagcctcccaaagtgctagaattacagrcatgagccacagcacccggctgtgattttgatttaaatgcctgacttccccaccactgctctgtgagttcattggctcaccaggggcaagaatattatatattattcatctttataagcattatatgttttttattaaactttttattttgagataattataaatttatatgcaatcctaagaaataatgtaaagagatcccaaatgccctttacctaatttcccccaatgataacaccttcaaactatagtagaatattacaaccaggatattgacattgatatatttaagattcaaaatgtttacatcaccacgagaatccatcccattgttactttatagc

SEQ ID NO: 468461 - DNA, 603 bp, Homo sapiens
aacaaccgatctgctttctatcactgtagattggcttgcattttttagagttttgtgtaaaaggaatcataaagcatgtggtctttgttctctggcttctttcactcagtataattattttgagattcttccatattgctgcttgtattgatagtttattcctttatattgttgagtaatattctattgaatgactataccacagtttatctattcacaagttaaagtagaattgagttattatttggctattaccactgaagctactttgaacactcatttgccaatctttgtatagacatgtgctttcatttctcttgggtatggaatggaatggatgactgggtcatatgataagcataatatggtcagggtatgtttaacttttgaagaactgccaaactgctttccmaagtgtaccattttacattcgtatgagcagtttatgagagttccaagttgttccacatctttacccaatgagtgtcttaaatttaggtattctaatattctaataagtatgtggtagcatctcattgtggcttgaatttgcatttccgtagtgattttcatttgtttctttgccttccatataccttcttt

SEQ ID NO: 468462 - DNA, 603 bp, Homo sapiens
aacaaccgatctgctttctatcactgtagattggcttgcattttttagagttttgtgtaaaaggaatcataaagcatgtggtctttgttctctggcttctttcactcagtataattattttgagattcttccatattgctgcttgtattgatagtttattcctttatattgttgagtaatattctattgaatgactataccacagtttatctattcacaagttaaagtagaattgagttattatttggctattaccactgaagctactttgaacactcatttgccaatctttgtatagacatgtgctttcatttctcttgggtatggaatggaatggatgactgggtcatatgataagcataatatggtcagggtatgtttaacttttgaagaactgccaaactgctttcccaagtgtaccattttacattcgtatgagcagtttatgagagttccaagttgttccacatctttaccmaatgagtgtcttaaatttaggtattctaatattctaataagtatgtggtagcatctcattgtggcttgaatttgcatttccgtagtgattttcatttgtttctttgccttccatataccttcttt

SEQ ID NO: 468463 - DNA, 561 bp, Homo sapiens
gcttttaatcctaattgtagatcagaattacctaagaaagattgttttttaagctttgatgatcaggtcctttccttggggatgctaatttaatatatttggatgcatattggatatcatttttttgaaaatttcactagtgtttctgatgtacctaacatttagagcactcaatgccttaaagggtcttaaataacatactgtatgttgaaggaagccaggctatttcacccccaagcatgcctctgtgacagatayatttttaatctagaggcaattgggaagcagcagttacagaaacggctatctgagctgtcctttctcacctatggcaggccataaaaatttctgtgaaaaaaatgcaggggggcttctgtctttcttctgcttgcctaaagacagaatataaatcctcctttgctggagacagctgttatctgttcaaagttgacaccagcatggctagaggaatctgggagcaaactctgctgccttccatagacttcctgctttggggagtctgaagctactccctcctttgtcttattactgctcgaaaat

SEQ ID NO: 468464 - DNA, 542 bp, Homo sapiens
gcttagcttccacttataagtgagaacataagatatttggttttccattcctgaattacttcacttagaataatggcctccagctccatccaagttgctgcaaaaaccattattttattccgttttatggctgagtagtatttcatgttgtataaatatcacattttctttattgttggttgatgggcatttaggttagttccatatttttgcaattgcgagttatgctgctataaacatgtgtgtgcaagtgtctttttcatataatgacttattttcctttgggtaggtacccagtagtgagattgctggatccaatagtagctctacttttagttctttaagaaatctccatactgttttccatagtggttgtactagtttacattcccaccaacagtgtaaaagtgtcccttttcaccatatccacaccaatatctattattttytgactttttaattatggccagttttgcaggagtcgggtattacctcattgtggttttaatttgccttttcctgataattagtagtatggtgaa

SEQ ID NO: 468465 - DNA, 557 bp, Homo sapiens
accttaggatgtgccccacagttggctttcctgaaccctgatcccagaatgcaagaagtcaacccaatacaaatccatgctttctgacaatggcagaaaattttttggccattgtccattgactgactcacaagctgtgacaatgtcccaccattacactccaccgactcccccgcaaggctgtcacctgtctttacctgcagcagctgcatgtatgcacacatttaataacacttagtgggggcatgttctgttctagaaacggtgcctgctccaaagatacggtggtgaacaaaataaaaatgctccctgtctctatggaactcagagtctagcagaagacaaagacacaatgtgaaatacacatttcaataagtgctatgaaagataggttgtacagtgatatgaaagggaataacaaagggatgcaaaagasttatgaaaggcctctctgaggaagtcatgtttaagctgaaaggtgaaggttgcctagaagaaggtcaggcaaaagacagggtgtgtgagtggggaaacattctaggcagaggtaacagcat

SEQ ID NO: 468466 - DNA, 301 bp, Homo sapiens
tccccaaggggctggtaaaccaatactcaggcctattcccactggcrccatgccaaggccttaccttgctcacacagtggcctgatgttgggaggtgcagttgtggttactccgtttatccccatcgatcccaaggcacattcacctgtgaatcacacattggctctgcaggaataggcctgagccaacagaggaaaagtataaggaaagcaggcagtggaccacaagaggttattagggtggcctcgagggataacaattccaagaggagcccaaattcgaatgtccctggtgtcattga

SEQ ID NO: 468467 - DNA, 301 bp, Homo sapiens
tccccaaggggctggtaaaccaatactcaggcctattcccactggcgccatgccaaggccttaccttgctcasacagtggcctgatgttgggaggtgcagttgtggttactccgtttatccccatcgatcccaaggcacattcacctgtgaatcacacattggctctgcaggaataggcctgagccaacagaggaaaagtataaggaaagcaggcagtggaccacaagaggttattagggtggcctcgagggataacaattccaagaggagcccaaattcgaatgtccctggtgtcattga

SEQ ID NO: 468468 - DNA, 301 bp, Homo sapiens
tccccaaggggctggtaaaccaatactcaggcctattcccactggcgccatgccaaggccttaccttgctcacacagtggcctgatgttgggaggtgcagttgtggttactccgtttatccccatcgatcccaaggcacattcacctgtgaatcacacattggctctgcaggaataggcctgagccaacagaggaaaagtataaggaaagcaggcagtggaccacargaggttattagggtggcctcgagggataacaattccaagaggagcccaaattcgaatgtccctggtgtcattga

SEQ ID NO: 468469 - DNA, 301 bp, Homo sapiens
tccccaaggggctggtaaaccaatactcaggcctattcccactggcgccatgccaaggccttaccttgctcacacagtggcctgatgttgggaggtgcagttgtggttactccgtttatccccatcgatcccaaggcacattcacctgtgaatcacacattggctctgcaggaataggcctgagccaacagaggaaaagtataaggaaagcaggcagtggaccacaagaggttattagggtggcctcgagggawaacaattccaagaggagcccaaattcgaatgtccctggtgtcattga

SEQ ID NO: 468470 - DNA, 396 bp, Homo sapiens
acccccagcctctggtttactaatgacaaatacaratatgccacagataaccagaggcacagaagtgattaagcccccaggagcaaaggcagaagaaacaaagtctccaagttagactcccaaggaattcccataggaatgattggaggcaaatgtaaacatacagccttgaaaagcaggaaaaaatcaggtcacttccacttctacatgggatgcagtaggttgtggctgctcagaatgtgacaaccaggcaaatcaatccacagagttaaaagtcacatttgaaaggcccttggacagatgtggaagcaccaaggcctgcatgaactgaaattccgcagagggcgagcccttccagggtacctttgtcattgcaaatacatttgtcactttggg

SEQ ID NO: 468471 - DNA, 396 bp, Homo sapiens
acccccagcctctggtttactaatgacaaatacagatrtgccacagataaccagaggcacagaagtgattaagcccccaggagcaaaggcagaagaaacaaagtctccaagttagactcccaaggaattcccataggaatgattggaggcaaatgtaaacatacagccttgaaaagcaggaaaaaatcaggtcacttccacttctacatgggatgcagtaggttgtggctgctcagaatgtgacaaccaggcaaatcaatccacagagttaaaagtcacatttgaaaggcccttggacagatgtggaagcaccaaggcctgcatgaactgaaattccgcagagggcgagcccttccagggtacctttgtcattgcaaatacatttgtcactttggg

SEQ ID NO: 468472 - DNA, 556 bp, Homo sapiens
gcccatagaatcatcagtcaggctggagttagaacgtatatgactatgtgatcgtaaaccccagacacaaaaaccacttgcaagtggtcatgagtcatcctcaccctgggaagcgaacagaaaccatcactggagggggacataccctccactcagacccccagcctctggtttactaatgacaaatacagatatgccacagataaccagaggcacagaagtgattaagcccccaggagcaaaggcagaagaaacaaagtctccaagttagactcccaaggaattcccataggaatgattggaggcaaatgtaaacatacagccttgaaaagcaggaaaaaatcaggtcacttccacttctacatgggatgcagtaggttgtggctgctcagaatgtgacaaccrggcaaatcaatccacagagttaaaagtcacatttgaaaggcccttggacagatgtggaagcaccaaggcctgcatgaactgaaattccgcagagggcgagcccttccagggtacctttgtcattgcaaatacatttgtcactttgggcacc

SEQ ID NO: 468473 - DNA, 556 bp, Homo sapiens
gcccatagaatcatcagtcaggctggagttagaacgtatatgactatgtgatcgtaaaccccagacacaaaaaccacttgcaagtggtcatgagtcatcctcaccctgggaagcgaacagaaaccatcactggagggggacataccctccactcagacccccagcctctggtttactaatgacaaatacagatatgccacagataaccagaggcacagaagtgattaagcccccaggagcaaaggcagaagaaacaaagtctccaagttagactcccaaggaattcccataggaatgattggaggcaaatgtaaacatacagccttgaaaagcaggaaaaaatcaggtcacttccacttctacatgggatgcagtaggttgtggctgctcagaatgtgacaaccaggcaaatcaatccacagagttaaaagtcacatttgaaaggcccttggacagatgtggaagcaccaaggcctgcatgaactgaaattccgcagagggcgagcccttccagggtacctttgtcattgcaratacatttgtcactttgggcacc

SEQ ID NO: 468474 - DNA, 522 bp, Homo sapiens
cgtcagctgcttgggccgccaggacgccgccgggggtgcgccgcgcttccctggatggggtgcccccactcccctcggagccccagggagaccccccgaactcagctcctctcaggggtgccagggggacccctcaaactccactccccgcaggttcctggggagacgccccctgctcsattcccctcagggtcccagggagaccccctaattcagctcctctcaggggtactgggggacctctcgagctccactcccatcagggtcccagggagaccccccaactatgctcaggggtcccagggagatgccagcaccccaactccgcttccctggggcccccctccccttacagctcaacttccctcgagagtctggggctggggctccgttcagttcttgagtccccttccctcggggtgtcccggggccgcccacccccacactgtctgtgattccccaaggcgcgggtctcgggccgcagcctgttccacgttctgctgctcgttcttttctggctcc

SEQ ID NO: 468475 - DNA, 522 bp, Homo sapiens
cgtcagctgcttgggccgccaggacgccgccgggggtgcgccgcgcttccctggatggggtgcccccactcccctcggagccccagggagaccccccgaactcagctcctctcaggggtgccagggggacccctcaaactccactccccgcaggttcctggggagacgccccctgctcgattcccctcagggtcccagggagaccccctaattcagctcctctcaggggtactgggggacctctcgagctccactcccatcagggtcccagggagaccccccarctatgctcaggggtcccagggagatgccagcaccccaactccgcttccctggggcccccctccccttacagctcaacttccctcgagagtctggggctggggctccgttcagttcttgagtccccttccctcggggtgtcccggggccgcccacccccacactgtctgtgattccccaaggcgcgggtctcgggccgcagcctgttccacgttctgctgctcgttcttttctggctcc

SEQ ID NO: 468476 - DNA, 519 bp, Homo sapiens
aaaatcacaagcttttttttgctggctcacacctkcctccttcatccagctgactgatgtatttgctgaagtcttgccatgttctgcactgggtactgagcattggagtctaaacaggaacagatccctgtgatgcactcacatggggccctttactgtcccgtccctggctgtgagacatcctcatctccctgaggctcttctttctggttactgggagaagttcccggcccgcctccctactgacacctgagagactccaacatcctggaacatcactatcttcgaatcgagcactgattttcagcatttatcctgtgtccaccacttgagtactaaatacccttttgatgattttctcatttagaagctgctagagaaggatgtggttgtaacttcaggcatgttgtttaagagaaatctaaaaattaggaaaattcatggaaagggccttttctgcttactttcagaacacttcttgttcatcttctcattgagtttgattgctggaaaagtggc

SEQ ID NO: 468477 - DNA, 592 bp, Homo sapiens
atgcatcgccctctggcttctcagatgctgggactcctctcctccatgaccttctcctctctctgcctgaatctcatgcccttgtcatataagcattatttcgtaggagagctgctatcatcccgccatggccatggtctgtccctgacaccaggatcctgttgctttgttgttgttctcccctaaagagtcctaggtctcatcatggccaagaaccccagcccttccatactctctatctcacactttccattctctgaccatctttccactcatccccttgcacggaggccacaggctctgaggatacttatactatcattttatcatatgctgtgacgtaatatcagtgaaccactcattgcctatgtgcctgctttccaggcttggagtctkccctgtagtacatcaattccaacaatccttccacccactctgggattcccaatccagtgatcctgccatctactcactgtccctcacccttgatgtcctctcctccctcttcagccattttgaattctattgtaaataatttccatccctcccttgcccctcccttgcgttgccatacttgtttggcaaaactaca

SEQ ID NO: 468478 - DNA, 520 bp, Homo sapiens
acaccattcttgaattagttacttcatttgtcactgaagacaagcttacttcaccaagaatttgaaccaataaggtaacctgcagtgtatttactaaccagattctttgagcagggaggcagaatacaatagagaatgagagatgtttgcatcctggctgtaacctcaccagccgtactgcttgagatatgttgctttgcttcgcttctgtcaataagatgagaataacggtacctactccttagtattaaatgattaagtatgytaacagggagagggccaaacgtttgttgttttattacacagcaggacatcaggtcttacttttgtggctccccatctcaaagacggggatagcaaatgtttcattcaggaaaaaaatccaggttgaacaatggggctgttggggcggggccaagaacattctgctcgaattaacagtattaatgggccgggcgcggtggctcacgcctgtaatcccagcactctgggaggccgaagtgggtggatcacctgaggt

SEQ ID NO: 468479 - DNA, 628 bp, Homo sapiens
ggccggctggactccagtgggaggagggtgctttgccaagggcagcggagttggagggtggccagaacaggtccaagtgggtcagtgcccacaagtgagtcagtgcccgcgggtgggtcagtgcccgtgagtccgtgcccgtcagtgcccgcggggacttgggggtgttgtgctggagtcaagacttgaayggggactggaggaagaggaagggatgatgggccccccaaccccgccctggggaagggaggttccaggcagctccaggaagacagtgtgcctgctaggcggggactgcgggctgtcagcgcgaaacatgtgaagggagggcctgctgcattggcagccagtgctccctgtcacttgttcaggagggacggggtccagaaaggagagggaaggaccagggctgagctacaacgtgacttggggaggttttgagggcgggggtgccatcagggtcaccttcgtctgctgatggggaccgagggttccttagaggaggaagcagcaggggatgatgggattcgggtgtgcctggcggccatgccgcgcctcccgcacctcctctgcctcccatgggcactgctgtctctgggtgcaccactagctctgctgtggggccagc

SEQ ID NO: 468480 - DNA, 563 bp, Homo sapiens
atgtcaagaacacaagcactcaagaatggaaataactcaaacgtccttcagctcgagagcggttaaactggcacatctgattcctcctcagcagtgaaacagaagggactgttgacacacgcagtgctgtggttggatctcaagggcattatactaagagaaaaacgccagtcctataaggaggtgtactgtgtgattccatttctaaatgacatcctcaaaatgccagcctcagaaggagagcgggtcagtgttccacggagcagtgggaggcagcaggaggccgtcctctgtggtaatggagagttctgggccagggccgctgtggttgttacacgaatctacacatgtgacaaatgccatagaattagacccaaagaatgcctgcgaaagctgctgaaatccagtggggtctgcagcctggttcactctgtagtgaaatccagtggggtctgcagcctggttctatctgtattgaaatccagtggggtctgcagcctggtccactctgtaktgaaatccagtgtggtctgcagcctggttctatctgtattgaaatccag

SEQ ID NO: 468481 - DNA, 288 bp, Homo sapiens
ataaaggatgcgggccttcaggggcagcattattctgcaggtctcctgcttcctgatggcacaaggactccacatcacccagtcctaccttaaatccaatcggacaccagtccacaaactggttggtgtgcttgctcttgatggtggcgacagccgcactgacatctttcaggaccacatcccctctgtacaacatgcagcagsccatgtacttgccatggtgagggtcacactagaccatctgattggctggctcgaagcgggcactggcgatcttggccacggaca

SEQ ID NO: 468482 - DNA, 466 bp, Homo sapiens
aaacaaacctctggctataaattgcaaagaagcttgctaacatgaatcatgaccataaattcaggtgcataagaaatgtcactttatgctcagaacaaattaatttctatttgaggatgccatcctactggcttagtggaaatttaaccccagtccttcttggagtcccctttccctgccctgctactttccacacaaagttgggccacagttctaggatctcacaccatgccaagctgtccaggtggtaggaagcaggatagtgactatccctcagccagggtgactgttggaccaatgatcatcatcatgagtgatagccatcctgctcagggawagtcacaaccctgttcacatcactctttcagtctgatttatctgctacttctgtagaaaactgggggtgcaggaatgtctgtacactagccatggacatgactgccaaggtatggcatatggctgctct

SEQ ID NO: 468483 - DNA, 620 bp, Homo sapiens
ccttcaattttattttctttttaaagatagtttagttactctaggccagcttgtcttgagtctttagggtcagcttgtcaattcccagggggtgaggtatggggggggaaagcagccagaattgtgattaaaattgtgttgactgtggattaatttagggagtattaccatcttatcaatactcagtcttgatccatgaacatggaatgtctattaatttattaagtcttctttaatttctttcaacaatattttgtagttctcagagtataagttttatactactttgattaaatttattcctaagtattttattctttttgatgctattgtaaatggaattgtttgtaaattttatttaaaaattaacggctagcgtatagaayattgctgattttcaaaataccttgtatcctttgaaggttttaatagtttcatttgtagatatcttagggtgtcctatatacaagattgtgtcatctgtgaatagagacagttatctttttcctttacaaactggataccttttatgtcattttcccgttcagttgcctccatgtagaaatggaggttttagccaaggaaactgcttgtctggttcctgcttttagggggaaaac

SEQ ID NO: 468484 - DNA, 469 bp, Homo sapiens
ctcaagggaggaagtgaacaattacctaatgagcttgctgtgccttaagaagagggagcggtaactggcactgagatctggggcttgacgttgactcctagccctcccactcagtacatgtgttcctttctgtctccatttccacgttcactcattgagtggtcatccactatatgtaagttttgctgagcatgtgacacttaattgacacatggtctttttctcaaaaagctcccatttcagtatgggagataaattggggaaaaatggcagtagtatggtaaatactctatttgggtggtgggaatcaggcacatggttacagactggagtctytagatgagaaggaatattctatggggaagaggggaccggcattcctgcagcagagatgtgtcctctttgtacccattgtgtgtacacactgtactagcacagtggtgccgcgctgagcaagaggagcactgca

SEQ ID NO: 468485 - DNA, 598 bp, Homo sapiens
tgcccctcagcaggggcttcagctccatcacagccatgtggactctggctcagcctgggtggacaaggaggtgtatacagttagcacagccagagcaagccagccctgcccactgaggtgcacagagcaccaatccgctggccctccctccctctttcacctgttctgtgcccatttattggctgmctcctgtaccggggtcttgctttggcaccgaggaaactgcagtcaaggccggaggctcctgccttgaagatcccaagaccgggatggagactgatgagccggatgtgtcccagcgtgtaatgcagggtgggctgagtgcgccccccgacgtctgtgtgggaatcctcaccagcaaggccatggtgttaggagggggtgcctgtgggagccggtgaggttgtgaggatggaggctcacgggtgggattagtgcctttgtaaggggggccctgggagctcgcaagccccttccgccctgagaagacgtagcggccagggagggggcctggaccaggaatggaactggccggcacctcgatcctggacttccagcctccagaatcatgaggagtgggcagagtgaggccacacgg

SEQ ID NO: 468486 - DNA, 598 bp, Homo sapiens
tgcccctcagcaggggcttcagctccatcacagccatgtggactctggctcagcctgggtggacaaggaggtgtatacagttagcacagccagagcaagccagccctgcccactgaggtgcacagagcaccaatccgctggccctccctccctctttcacctgttctgtgcccatttattggctgactcctgtaccggggtcttgctttggcaccgaggaaactgcagtcaaggcyggaggctcctgccttgaagatcccaagaccgggatggagactgatgagccggatgtgtcccagcgtgtaatgcagggtgggctgagtgcgccccccgacgtctgtgtgggaatcctcaccagcaaggccatggtgttaggagggggtgcctgtgggagccggtgaggttgtgaggatggaggctcacgggtgggattagtgcctttgtaaggggggccctgggagctcgcaagccccttccgccctgagaagacgtagcggccagggagggggcctggaccaggaatggaactggccggcacctcgatcctggacttccagcctccagaatcatgaggagtgggcagagtgaggccacacgg

SEQ ID NO: 468487 - DNA, 598 bp, Homo sapiens
tgcccctcagcaggggcttcagctccatcacagccatgtggactctggctcagcctgggtggacaaggaggtgtatacagttagcacagccagagcaagccagccctgcccactgaggtgcacagagcaccaatccgctggccctccctccctctttcacctgttctgtgcccatttattggctgactcctgtaccggggtcttgctttggcaccgaggaaactgcagtcaaggccggaggctcctgccttgaagatcccaagaccgggatggagactgatgagccggatgtgtcccagcgtgtaatgcagggtgggctgagtgcgccccccgacgtctgtgtgggaatcctcaccagcaaggccatggtgttaggagggggtgcctgtgggagccggtgaggttgtgaggatggaggctcacgggtgggattagtgcctttgtaaggggggccctgggagctcgcaagccccttcygccctgagaagacgtagcggccagggagggggcctggaccaggaatggaactggccggcacctcgatcctggacttccagcctccagaatcatgaggagtgggcagagtgaggccacacgg

SEQ ID NO: 468488 - DNA, 463 bp, Homo sapiens
gatgagtctccagccccagcacgttgggacccgggaaggacatggcatcggagctggagactatattgggttacaaggatttctggaatcagactgggctgagcatttgtccccaatccatcgggaacccgagggcggttcctccgccactacccggacctccaggacccaggcatctgaacctataycctattggatcctggagggcggcccctccccagccttgagagtccaggattctggccccacccgaaccctgagagtccaggaccctggcatccggcctcttcttcccatttgcaacctaagcagacaggacctgctgtctatatcccttaatcctggccccctgccatctccaatccctgcttaaaggtccttgattctggactcaaatctaatttctggtcttgtcgattgtccatgacggtcgcccaccaggagaggctccccagcgcgaaac

SEQ ID NO: 468489 - DNA, 564 bp, Homo sapiens
cctctcagtgtttttggaatgaggccttggactcctgagtccctgaaatttgttctgctgcttccagagaggaagatccctcctccccggaatcccctagatgagtctccagccccagcacgttgggacccgggaaggacatggcatcggagctggagactatattgggttacaaggatttctggaatcagactgggctgagcatttgtccccaatccatcgggaacccgagggcggttcctccgccactacccggacctccaggacccaggcatctgaacctataccctattggatcctggagggcggcccctccccagccttgagagtccaggattctggccccacccgaaccctgagagtccaggaccctggcatccggcctcttcttcccatttgcaacctaagcagacaggacctgctgtctatatcccttaatcctggccccctgccatctccaatccctgcttaaaggtccttgattctggactcaaatctaatttctggtcttgtcgattgtccatsacggtcgcccaccaggagaggctccccagcgcgaaacgt

SEQ ID NO: 468490 - DNA, 550 bp, Homo sapiens
agcctcaaatagctttctgtatgtcatgctgatcagagcagtcccaggatatccaggtctgtctgactcgaagacccaggtcctttaaataaatacatactattttggctttacaaggaatgggcagtkttttgcacatgtgccatattccgcttcctgtgctggtgttttgcattcattatttcatatcatccttatctagcccacactatgctccactaggctggatggacttacagcatcagtggattcccattttggaccatgcagatgatgtgaatttcagctgcagatctttgtgaaaaggaccggttttcttattcatccctacccagataagctgtgtgtgtgtttgtgtgtgtagcttaatgtagatctccaattaaaggcagtagagagtggaataatcactggctgatcaagaatatactcacagtccacagcatgatttacctatctctgtactgttttgctcccactaactgtagcaagtgctggatgctcctcacatggccaacaaggtgttcttcttccctaagtctgcagccct

SEQ ID NO: 468491 - DNA, 519 bp, Homo sapiens
gctgccactgtgtccctcaatactgaagggcatgtcctggccaggtttttctggcattgaacaggtactggctacttctgggttcccctcacttgcctgccacctcctggtctccctgagtcactgacaactatgmcctgtagatgccactctgtggagcccaagatcaaaagacactgtgaagactacaaaagggaaaaggccagcactttgggagggtgaggagggtggatcaggaggtcaggagatcgagaccatcctggccagcatggtgaaaccccgtctccactaaaaatacaaaattagatgggctactcaggaggctgaggcagaagaatcacttgaacctgggaggcagaggttgcagtgagccaagatcatgccactgcactccagcctggcaacagagcaagactttgtataaaaaaaaaaaaaaaaagagagagagagtgagagaaagaagttcatgtcgcctggactagctccatccagcagtgcaagggaaagatgccgtgttga

SEQ ID NO: 468492 - DNA, 621 bp, Homo sapiens
gtattgcaaaagtcagagagaaattttagggcacttctcaccattgctctttttcaggctagaggacaactgatcacacatactgtgtgcccctgcatatgcagctctgagaatacaaagtgagtagtaggagcttacgatctctacctagggagtatctcatcctctgccgcttctccctttttacccacactgacatcgtgtgtctgcttccccaccttgtactcctgtgtagcatcgtccagtggcacaacggtgtgrgcccggtgggtgtgggaaattgcacatatcaagcatacagcctcctggtcctcataacagaaaaggctgagggcctcatggtgttgggggcagaggctctcatcccggatcttccgcttgacggcctggagctgcttggcaatttccaccatactgcctagttgccgattaggtcggagactgcggtagcgggatgtctttcgacagacaggacaagggaagtccctctctaggtcctcccaccagcgggtgatgcaagctttgcagaagttgtgcccacactcaatgatgacaggttccttcagatactccaggcacacagagcagctcgcctccacctgtaagttctccaaagccgca

SEQ ID NO: 468493 - DNA, 539 bp, Homo sapiens
tagacttctgattatctattgcagaagctttatcagagagttcaactgaacatccctaaaatgtttgttgagaagctgagtgaatctatatgaccttgacattttttataaggcaaataatacatgtatctggtaaaacttctttttatgtgmaaaaggtatacagtgtatattcagtgagaggttttcccttcacatgacctcatttgggctctcctactccttccttctctcagggatggcctttattaccagtttttggtgtgtcctttggagattgtacgtgtacgtgtgtgttttctcttttttctttttgctacatacatgatagcatgctgctcaacaaattggtcttttgacttgacaacatgtaatattttagagattgtatcctatctatacatgatagatcgtcttatttatagtggttgcatggtattctgtccaatgaatgtgcacagtttattcaaccagtcctctactaatatcaaggttgtttacagtcttttcatactacaaacaatgctgtgggaaatatc

SEQ ID NO: 468494 - DNA, 472 bp, Homo sapiens
gctagctcaaaaccagcagatgtggttcactttgtagatttgtcaagtaatcatgacagcatcttataaatatatgaacatgagcmaagagcaagtcaagaaatcactttttttttttttttcagattgttcctgtagagacaatagatgctgtaatgcagaaattgagagacggtatcaatagatattatgggaactcactaaattcagactgtacaggaaaagaatgtttcagaagagtaaaagactattttggaatgaattatagagtattttttaaagaaatgtaattttcttcctgtttccttcctgtttatccacatttacagaaaatgtttacaggtaatttaagagactcattatcatttgaaaaattttctgatcctcttagcacccaacatacactagtatttttcaatatatagccacacatttcccatcaggatttttacaaagtggaattaaatagacc

SEQ ID NO: 468495 - DNA, 639 bp, Homo sapiens
atcttatatctcaatgctgtgctgcaggaagccatgaaaaattaatcgggactggtatcccaggtggagcttgtgtgaacctggtaacttaatccctgccatgtactaggagaacccaggttatgtaaaatcatgccattgcataagtttgtcttttctgtcctggtcactggccattttgccttcttcccatgttgctcacacacttaaatgttagggcttttctgtgctctcaaggccacattcctcaaccaaataagaaagaactcacatgtttctgatcatttattgactaattatagataactatagatagttcttaaaggggtcagttggtggtactgtcaatgtttccttcctcccaaatgtttctttgattttcctaaggatgaattagctgccctgcttccaagcataacaagaaatktaagtgcatttctactaaaagtaaatctttctctcacagtgtccagcattgtgggatctctgttaatcgctgtttatatgtgagcctttaaagaatgaacataatgtcagttttgcctggggtaaattcttttattccttattcagttttcttacccagaagatttcccatctgaatcacttttacctggtttgtttgactggcacgtggat

SEQ ID NO: 468496 - DNA, 599 bp, Homo sapiens
attttgaattctttttctggtatttcatatatttccttataattaggttctgttactagaggattattacttccctttggaggttacatatttccctgctttttcatggttgctgtgtccctaacattgactcctatacatctggtgaaaaaattgtctcttccaattttatggagtaggtttcaggaggaaagacttagggtgcatggttctagatggacacagcaatgtagtctccatattgttcctttagctgtcatacacactagtggtgtttgtgagtttctcagtggcctacagtgagggagtctgtggtaacagtgatgcggcttttccaagggtaggctctcaggctatatctygggttcgggatacacacatgcacacggtaggtcacccaacatggggtctggcttattggagttggagccacatggctgttcctccggccagaagcatgggcacacagttgcttagctgacctgggagtgtgcctgccaggagtgacttgtagggttgtttctctgatccaggacaccgacacaaggctgctcgagctcgtctggggtgtgtctgctggggccaattcaaggggctgt

SEQ ID NO: 468497 - DNA, 599 bp, Homo sapiens
attttgaattctttttctggtatttcatatatttccttataattaggttctgttactagaggattattacttccctttggaggttacatatttccctgctttttcatggttgctgtgtccctaacattgactcctatacatctggtgaaaaaattgtctcttccaattttatggagtaggtttcaggaggaaagacttagggtgcatggttctagatggacacagcaatgtagtctccatattgttcctttagctgtcatacacactagtggtgtttgtgagtttctcagtggcctacagtgagggagtctgtggtaacagtgatgcggcttttccaagggtaggctctcaggctatatctcgggttcgggatacacacatgcacacggtaggtcacccaacatggggtctggctyattggagttggagccacatggctgttcctccggccagaagcatgggcacacagttgcttagctgacctgggagtgtgcctgccaggagtgacttgtagggttgtttctctgatccaggacaccgacacaaggctgctcgagctcgtctggggtgtgtctgctggggccaattcaaggggctgt

SEQ ID NO: 468498 - DNA, 669 bp, Homo sapiens
cagagcatgggacctgctaagataagaccctccagccttctccttccctcttctctggtcgttggctgatatggtttggctgtccccacccaaatctcatcttgacttgtagttcccataatccccatgtgtcgtgggagggacctggtgggaggtaattkaatcatggggcagttacctccatgcttttctcatgataatgagtgagttttcatgagatctgatggttttatgaggggctttccccctcttcactctgcacttctctttgctgctgccatgtgaagaaggacacgtttgcttccccttccatcaagatcgtaagttttctgaggcctccccagccatgcggaactgtgagtcaattaagcctctttccttataaattacccagtgttggggatgtcttcattagcagtgtgagaatagactcaaatgctggctttgccaggcctggtcccagatgaggacaatgcagccccagaggactcacgggtcgtccctaagggacacttggaatgagcaggaaccaagacaccaggctgctggattctgcagcatccaacaggatagtgaggcctgtcctataaactggtcagcacagcctctcctgtggtctgtcctgcaaatgtgcacactctgtgccggatgctgttctgaaacctgcag

SEQ ID NO: 468499 - DNA, 593 bp, Homo sapiens
tgggcctgtgccagcattttgaaaagcgtcagttgggaggaatccccagaagatgactttgtagctagggtccctcctgtcctgagtcgtgggtcaccraggaggacaccctccctagtcacttgctgtttgtgcttcccattctgtgcacccactggaggtttttcttgaagcaggctctgcattgccttctccttctcttcagcctgaatcttggcactcctggagactcttggttcaaatgatgtatttattttcttaacgaaagggaaagatttaagagtgggtgtgaaatgcatcctcctccctcctctgaccctcccacgtacttcctccggcaacctgaggcccagctcagcagacacttgggaagtcaacagaaacaaacatggagtgggcattgcagagcacgtgagtggatgagagatttttatgagtgaaatttgctcacaagcttctttaataatgttattcatctttctgtcaaagtcatcacattaatgtagctggagagatttagaggagatgaattaagacttaaatacacaaaatgacttggggaatatttaaatacaatacatttgattctggtg

SEQ ID NO: 468500 - DNA, 541 bp, Homo sapiens
cagtgtaggaggaattttctataggctaggcattaggaagaagggaaaattcttccttattaggaagttattgttatagtgttatagtgttattggaatagtggatatggagtgggctttcatctcgatcaatctgcacctgctggtattttccaatgctacattcacctgcaagagcccaatgaagaaagaaggcactcccaaatcttttgcaagtttttgtattcactgtgggtccactgcttaagtgcatctggagcttcagagaaggggctctgtcctgtgtcatagaacccttgctttgagtctcacggcagagttcaatctgtttagtaaagttgatcaattatttcaaragatggtgtcaccagcatatggtgtcactgagggagtattctacactagcacacagccatttcacgctgggctagagaagctggggggaaatgctttgtgagccccaacaggaacctccttgcaaggcaagggctgggcgggagggggcactcaggagccactcagcacgggttccagccctgca

SEQ ID NO: 468501 - DNA, 541 bp, Homo sapiens
cagtgtaggaggaattttctataggctaggcattaggaagaagggaaaattcttccttattaggaagttattgttatagtgttatagtgttattggaatagtggatatggagtgggctttcatctcgatcaatctgcacctgctggtattttccaatgctacattcacctgcaagagcccaatgaagaaagaaggcactcccaaatcttttgcaagtttttgtattcactgtgggtccactgcttaagtgcatctggagcttcagagaaggggctctgtcctgtgtcatagaacccttgctttgagtctcacggcagagttcaatctgtttagtaaagttgatcaattatttcaagagatggtgtcaccagcatatggtgtcactgagggagtrttctacactagcacacagccatttcacgctgggctagagaagctggggggaaatgctttgtgagccccaacaggaacctccttgcaaggcaagggctgggcgggagggggcactcaggagccactcagcacgggttccagccctgca

SEQ ID NO: 468502 - DNA, 541 bp, Homo sapiens
cagtgtaggaggaattttctataggctaggcattaggaagaagggaaaattcttccttattaggaagttattgttatagtgttatagtgttattggaatagtggatatggagtgggctttcatctcgatcaatctgcacctgctggtattttccaatgctacattcacctgcaagagcccaatgaagaaagaaggcactcccaaatcttttgcaagtttttgtattcactgtgggtccactgcttaagtgcatctggagcttcagagaaggggctctgtcctgtgtcatagaacccttgctttgagtctcacggcagagttcaatctgtttagtaaagttgatcaattatttcaagagatggtgtcaccagcatatggtgtcactgagggagtattctacactagcacacagccatttcacgctgggctagagaagctggggggaaatgctttgtgakccccaacaggaacctccttgcaaggcaagggctgggcgggagggggcactcaggagccactcagcacgggttccagccctgca

SEQ ID NO: 468503 - DNA, 541 bp, Homo sapiens
cagtgtaggaggaattttctataggctaggcattaggaagaagggaaaattcttccttattaggaagttattgttatagtgttatagtgttattggaatagtggatatggagtgggctttcatctcgatcaatctgcacctgctggtattttccaatgctacattcacctgcaagagcccaatgaagaaagaaggcactcccaaatcttttgcaagtttttgtattcactgtgggtccactgcttaagtgcatctggagcttcagagaaggggctctgtcctgtgtcatagaacccttgctttgagtctcacggcagagttcaatctgtttagtaaagttgatcaattatttcaagagatggtgtcaccagcatatggtgtcactgagggagtattctacactagcacacagccatttcacgctgggctagagaagctggggggaaatgctttgtgagccccaacaggaacctccttgcaaggcargggctgggcgggagggggcactcaggagccactcagcacgggttccagccctgca

SEQ ID NO: 468504 - DNA, 430 bp, Homo sapiens
tgttagtagaatattacccataaaatgaataatcttgtagccaggaaactttttcctactagggagcaaagcttgcttttaattgctccctaactaacttaggggctttttgtaatgtctctccctttagaggttactgttttacttaaactggatttggagtcatgttaggaataagagagagataacagtggccattattagaaagaggtttctcaaattcttaaattttacttaactcttatcatagaattataatctgggatgtcgcttgtatacaaagaacataacaaattttgctttgggccgcctgcggagccagagagcggagcaggygggtcccagggcggctgcggctttgtgcttgcttagaagccacttttcgccaccgcgtttcctctgtgccagctccctccccacactgctcagc

SEQ ID NO: 468505 - DNA, 430 bp, Homo sapiens
tgttagtagaatattacccataaaatgaataatcttgtagccaggaaactttttcctactagggagcaaagcttgcttttaattgctccctaactaacttaggggctttttgtaatgtctctccctttagaggttactgttttacttaaactggatttggagtcatgttaggaataagagagagataacagtggccattattagaaagaggtttctcaaattcttaaattttacttaactcttatcatagaattataatctgggatgtcgcttgtatacaaagaacataacaaattttgctttgggccgcctgcggagccagagagcggagcaggtgggtcccagggcggctgcsgctttgtgcttgcttagaagccacttttcgccaccgcgtttcctctgtgccagctccctccccacactgctcagc

SEQ ID NO: 468506 - DNA, 303 bp, Homo sapiens
ctcctgtgcagcctctgggttcaccgtcagtagcaactacatgagctgggtccgccaggctccagggaaggggctggagtgggtctcagttatttatagckgtggtagcacatactacgcagactccgtgaagggccgattcaccatctccagagacaattccaagaacacgctgtatcttcaaatgaacagcctgagagctgaggacacggctgtgtattactgtgcgagagacacagtgaggggaggccattgtgcgcccagacacaaacctccctgcaggaacgttgggggaatcagcgg

SEQ ID NO: 468507 - DNA, 618 bp, Homo sapiens
tgtcctggggttgattcagggaacaggtgtgtcctgtggttaggagaagtggcarcaagctcacagcatctgttctagttgacaccataaaaaggccaagagatcacaaccaaaatgtagtgtggatgtcacatctgtgagtgccgcacactcccccatgtgaatacgaaaaggttgattacctcttgaggtgtctgctgagagtagagctggtctctcaggaatgtccaaaatggctcgatagagcaagaaaggagactggctcaggttgctataccagtttggtggtggaggcagagtgagggttctcactcacagaaatgggtttgtggggtttgaacctccaaatggcatcaaatgagggagttcttgtgattcctaactagatccacctcgtgtcggaaagaaaggagatgatggaggaatgagccttaagttatcagcagtcagacatcaaaacaagtctgatgacttattctatgtagcaactataaataaatgaataaaaatagatcataatgaattattcataataaatgaataaaaatatgaataaaaatagatcagtgtccaatatgggtggacaaaaaccagtctacacaaaacaagaagactgct

SEQ ID NO: 468508 - DNA, 607 bp, Homo sapiens
aactttggcaaaattaattttaatttgattgagatctgtctcggaaacctttggtttacactaggaaagatcccaaattasgagtcaattactataaagctcagccttcccactgtgtatgtgtgtgtgcatgtgtgtgtgtgtgtgtgtacacgtgtgttttaatttttgtgggctttgagccatgtagttctctctgtggacatactatttggcgtgatctttgaatagagaattctgaaagaaataagaggctcctatgagttctctgaaagtttctggactcaccatggatcttgactgtgtcattgcatctgacagtcccagggaacagactctctggtggtttcaaagaatctgtgcttgggctccccctgcagtttactgggtacagtaatgttaaatcactgtttcgagagacaatttcgaaagcattagatgctgctgagagaggattgtgaaccaggggacagccccttcattctgggggagcgacattgggagaatatgctctgtgagcccaaacagcatcctcccctgccgggtgagggcagagctgcaggacaggcccagaaaccactcaacacagatgtcagccctggagcag

SEQ ID NO: 468509 - DNA, 607 bp, Homo sapiens
aactttggcaaaattaattttaatttgattgagatctgtctcggaaacctttggtttacactaggaaagatcccaaattacgagtcaattactataaagctcagccwtcccactgtgtatgtgtgtgtgcatgtgtgtgtgtgtgtgtgtacacgtgtgttttaatttttgtgggctttgagccatgtagttctctctgtggacatactatttggcgtgatctttgaatagagaattctgaaagaaataagaggctcctatgagttctctgaaagtttctggactcaccatggatcttgactgtgtcattgcatctgacagtcccagggaacagactctctggtggtttcaaagaatctgtgcttgggctccccctgcagtttactgggtacagtaatgttaaatcactgtttcgagagacaatttcgaaagcattagatgctgctgagagaggattgtgaaccaggggacagccccttcattctgggggagcgacattgggagaatatgctctgtgagcccaaacagcatcctcccctgccgggtgagggcagagctgcaggacaggcccagaaaccactcaacacagatgtcagccctggagcag

SEQ ID NO: 468510 - DNA, 607 bp, Homo sapiens
aactttggcaaaattaattttaatttgattgagatctgtctcggaaacctttggtttacactaggaaagatcccaaattacgagtcaattactataaagctcagccttcccactgtgtatgtgtgtgtgcatgtgtgtgtgtgtgtgtgtacacgtgtgttttaatttttgtgkgctttgagccatgtagttctctctgtggacatactatttggcgtgatctttgaatagagaattctgaaagaaataagaggctcctatgagttctctgaaagtttctggactcaccatggatcttgactgtgtcattgcatctgacagtcccagggaacagactctctggtggtttcaaagaatctgtgcttgggctccccctgcagtttactgggtacagtaatgttaaatcactgtttcgagagacaatttcgaaagcattagatgctgctgagagaggattgtgaaccaggggacagccccttcattctgggggagcgacattgggagaatatgctctgtgagcccaaacagcatcctcccctgccgggtgagggcagagctgcaggacaggcccagaaaccactcaacacagatgtcagccctggagcag

SEQ ID NO: 468511 - DNA, 607 bp, Homo sapiens
aactttggcaaaattaattttaatttgattgagatctgtctcggaaacctttggtttacactaggaaagatcccaaattacgagtcaattactataaagctcagccttcccactgtgtatgtgtgtgtgcatgtgtgtgtgtgtgtgtgtacacgtgtgttttaatttttgtgggctttgagccatgtagttctctctgtggacatactatttggcgtgatctttgaatagagaattctgaaagaaataagaggctcctatgagttctctgaaagtttctggactcaccatggatcttgactgtgtcattgcatctgacagtcccagggaacagactctctggtggtttcaaagaatctgtgcttgggctccccctgcagtttactgggtacagtaatgttaaatcactgtttcgagagacaatttcgaaagcattagatgctgctgagagaggattgtgaaccaggggacagmcccttcattctgggggagcgacattgggagaatatgctctgtgagcccaaacagcatcctcccctgccgggtgagggcagagctgcaggacaggcccagaaaccactcaacacagatgtcagccctggagcag

SEQ ID NO: 468512 - DNA, 359 bp, Homo sapiens
agatactgtgagtaaagagctcgcttggggtctgcaatgtagtmtggcttagtcagtgtgttagtgctctgtcctcttctttctgaaatcacagttcaccatcacctccttattttctagaaacacctggaaatagtgaaacttttttacttcccttatatttcatattagtgctatacccagggatcatcagttaaccacaatgacagtgacaaaaagctgccttcatattttctcccaggagaattttggctccaagaatcaaggctttaataggattcaggagaagtcagtgatcacagggcagatgcctcaggtttaaagtcacatcaaaccgagtgtgaaccttctgtaactcg

SEQ ID NO: 468513 - DNA, 297 bp, Homo sapiens
tatggcttagtcagtgtgttagtgctctgtcctcttctttctgaaatcacagttcaccatcacctccttattttctagaaacacctggaaatagtgaaacttttttacttcccttatatttcatattagtgctatacccagggatcatcarttaaccacaatgacagtgacaaaaagctgccttcatattttctcccaggagaattttggctccaagaatcaaggctttaataggattcaggagaagtcagtgatcacagggcagatgcctcaggtttaaagtcacatcaaaccgag

SEQ ID NO: 468514 - DNA, 663 bp, Homo sapiens
tttttctttcatcagctgaaagtggaatggaaattaaacaccactttaaaggctcttgttctccactttggttggctcctggtgtcctgtttttcagactatttctccatcttcccttttactttaaaagtcttttatcttcctcagtcwccatgcaggaaataaaaattccctttactttctgtcctccaagtctggtgaacagtttccttctcttcataataactgaagccaaccaagtttaggaggataacagttctccttagaatatgctcatctacctgcagactctctgccctcctcacccttttctaaggtcctgcagacatcaccctcattccattccctcccttccctaagtacgacagagtgggctctgcagctcctgctgccttctgtgtgctcagccctggggctccctagtgcttttgttgcaggacgatcaaagatgggagagaccaaacagagttcaggagagtcctttattaaaaggtgatcacctggctcagttggactagcatccaggaaagtctgagccctggacaaagaaagcagccaccttttacacagtcagtggctgggagctacatgatgcaggaagcgtaattacagaacagagaacaaaggcagttatttgttacttcatgtcttacatccttggga

SEQ ID NO: 468515 - DNA, 663 bp, Homo sapiens
tttttctttcatcagctgaaagtggaatggaaattaaacaccactttaaaggctcttgttctccactttggttggctcctggtgtcctgtttttcagactatttctccatcttcccttttactttaaaagtcttttatcttcctcagtctccatgcaggaaataaaaattccctttactttctgtcctccaagtctggtgaacagtttccttctcttcataataactgaagccaaccaagtttaggaggataacagttctccttagaatatgctcatctacctgcagactctctgccctcctcacccttttctaaggtcctgcagacatcaccctcattccattccctcccttccctaagtacgacagagtgggctctgmagctcctgctgccttctgtgtgctcagccctggggctccctagtgcttttgttgcaggacgatcaaagatgggagagaccaaacagagttcaggagagtcctttattaaaaggtgatcacctggctcagttggactagcatccaggaaagtctgagccctggacaaagaaagcagccaccttttacacagtcagtggctgggagctacatgatgcaggaagcgtaattacagaacagagaacaaaggcagttatttgttacttcatgtcttacatccttggga

SEQ ID NO: 468516 - DNA, 584 bp, Homo sapiens
gaaaaccagcccagccctgactctgcagctctgggagacaagccccagccgtgcagtaccaaggtgcttccattcagtgattagcactgaacactgaagacatcccatggagttaggaatgcgctgggttttctttgttgttgttctaaaaggcaatcaagaagaactagaaatattgtctgtgagtgatatgagtgagagaaacagtggatctgtgtggcagtttctgacaagaatgtctctgtgtttgcaggtgtccaatgtgaagtgtagctggtagagtctgggggaggcttggtacagcttggggggtccatgtgactctcctgtgcagcctctggatacactttcagtaactatggcatgcactaggtggaccaagctccagggaagggactggagtgggtcttacattaatgctagtggtggaggcayatactactcagactctgtgaagggccggttgaccatctccagagaaaacaccaagaactcactgtatctgcaaataaacagtttcattgctgacaccatggccgtctattactgtaagagacacagtgaggagaagtcagtgtgagccc

SEQ ID NO: 468517 - DNA, 584 bp, Homo sapiens
gaaaaccagcccagccctgactctgcagctctgggagacaagccccagccgtgcagtaccaaggtgcttccattcagtgattagcactgaacactgaagacatcccatggagttaggaatgcgctgggttttctttgttgttgttctaaaaggcaatcaagaagaactagaaatattgtctgtgagtgatatgagtgagagaaacagtggatctgtgtggcagtttctgacaagaatgtctctgtgtttgcaggtgtccaatgtgaagtgtagctggtagagtctgggggaggcttggtacagcttggggggtccatgtgactctcctgtgcagcctctggatacactttcagtaactatggcatgcactaggtggaccaagctccagggaagggactggagtgggtcttacattaatgctagtggtggaggcatatactactcagactctgtgaagggccggttgaccatctccagagaaaacaccaagaactcactgtatctgcaaataaacagtttcattgctgacaccatgrccgtctattactgtaagagacacagtgaggagaagtcagtgtgagccc

SEQ ID NO: 468518 - DNA, 595 bp, Homo sapiens
caaacctctctgcagaaacacatgaagtaaatcagctacgggggcgctcaggacccactgatcagattcaacctcagaggcagatgcagatacagggtaggagctggttttctcatagtgtttgtaacttccctctccaactgacagtttcccagagaacctcactaatttagagttctgtgcctaccaaaaaaatctccaaatatacaccttttaaaaggtagtaatataaaggcctagtctcacatgcacaaaatgcagatcaccacttccaggcatgagaagttctcaaccacggtcaccaagatcagagtcctgaggaagctcaggggtgccttgtgggtcttctccaatcacattcgggacaggaaactaagtttaattccctgattaaaaaaggctataattccctgatttaaaacgtttmattccctgattaaaaaaggctggaatttttctgattccagccaagaaagaggctgggccagagtcagtgtcacgtacaagctcacaggtttcacgtctgccccttctcctgatatgagactatgcaaagcagtatcagcactcatctgctgcactttttgctgtcaat

SEQ ID NO: 468519 - DNA, 569 bp, Homo sapiens
ggcgctcaggacccactgatcagattcaacctcagaggcagatgcagatacagggtaggagctggttttctcatagtgtttgtaacttccctctccaactgacagtttcccagagaacctcactaatttagagttctgtgcctaccaaaaaaatctccaaatatacaccttttaaaaggtagtaatataaaggcctagtctcacatgcacaaaatgcagatcaccacttccaggcatgagaagttctcaaccacggtcaccaagatcagagtcctgaggaagctcaggggtgccttgtgggtcttctccaatcacattcgggacaggaaactaagtttaattccctgattaaaaaaggctataattccctgatttaaaacgtttcattccctgattaaaaaaggctggaatttttctgattccagccaagaaagaggctgggccagagtcagtgtcacgtacargctcacaggtttcacgtctgccccttctcctgatatgagactatgcaaagcagtatcagcactcatctgctgcactttttgctgtcaatccattttctttctttt

SEQ ID NO: 468520 - DNA, 606 bp, Homo sapiens
gagtaaccagtgagctgtgctggtgcctgatgggactaggatggggtcaaggcaccttctcagtgtcatggagagtgattgttccagaaatcatccaggtggtctctacgctaatcaaatatgggttcacagggaggaacatgtgctctgggtgcttggtcttcagtgaaaggacgtctggccaccaaaagtttgtaaatggagcagggcatgcatttcctcaaggaggattagggcttggagcatcagcatcccactcttgtaaggctgatgtgtcatttaccttccctttcttatcccaaatcagggtcttcagctatgaaatgctctgactcatgaatatgcaaataacctgagatgcactgaggtaaatatggatatttgtcagccctgagagcatcatccagaaaccacatccctccgctagagaagcccctgacggcacagttcctcactatggactggatttggaggrtcctcttcttggtgggagcagcgacaggcaaggagatgccaagtcccagtgatgaggaggggattgagtccagtcaaggtggctttcatccactcctgtgttctctccacaggtgcccactcccaaatgca

SEQ ID NO: 468521 - DNA, 618 bp, Homo sapiens
acatatgaaggtgttgagggtgtgtgtgagtctgtgagcatgttttcattacctatgactctacatatgaaggtgttgagggtgtgtgtgagtctgtgagcatgtttatgtgcatgtgaaatgttgttatgtatgctttgaaagacttgtctcttgacctcaatatcatttgtctgaaaataccaggtatgtttaagcccttagaatctaaggaatagtttgttgtttaggataaatcctcaataagattaacaactgatttctcaccaaaaatcaggaaggccaaagctcactggagtggcatatcaaaagtgctaaaatacactatcaatcaaaaattccatactagcaagaacaccttcaaaagtgaaggagaaatcaagataatagaaataaacaaaagctatggagtccatcaaaaccacaaattcctaatgagaaatactaaatagagtcctgcaggctscaatgaaaacagagtggagaatatttaaaaatcttacacctaaaagaacaacaacaacaagtatcccagtaatcacatttgtgtaatgaaaaccaatattgttttatttttgccttgagtctcatgttctattccttttttaaaaaaaaaat

SEQ ID NO: 468522 - DNA, 618 bp, Homo sapiens
acatatgaaggtgttgagggtgtgtgtgagtctgtgagcatgttttcattacctatgactctacatatgaaggtgttgagggtgtgtgtgagtctgtgagcatgtttatgtgcatgtgaaatgttgttatgtatgctttgaaagacttgtctcttgacctcaatatcatttgtctgaaaataccaggtatgtttaagcccttagaatctaaggaatagtttgttgtttaggataaatcctcaataagattaacaactgatttctcaccaaaaatcaggaaggccaaagctcactggagtggcatatcaaaagtgctaaaatacactatcaatcaaaaattccatactagcaagaacaccttcaaaagtgaaggagaaatcaagataatagaaataaacaaaagctatggagtccatcaaaaccacaaattcctaatgagaaatactaaatagagtcctgcaggctcmaatgaaaacagagtggagaatatttaaaaatcttacacctaaaagaacaacaacaacaagtatcccagtaatcacatttgtgtaatgaaaaccaatattgttttatttttgccttgagtctcatgttctattccttttttaaaaaaaaaat

SEQ ID NO: 468523 - DNA, 582 bp, Homo sapiens
atattgtttcaagatgggtagaagcatatctcaccaagtcccaaagagccacatgactggctaaggcataattcaaggaaatcgttgccaggtttggactcccatgcactatacacagtgacaatgatctttcttttatttcagagtttactcaaaaggtaagtcaagcactgcaaatcgaatggaaaccacagtcatcatggagaccacagtcagcagtaaagaaataaaagataacaccttgaagaagacaatagccaaactcaggcaggaaattgacctgcgttgggatagattttttcttattgccttgttctggggcagaacggtgccctgaagtgggcttgggaaaagtctctttgaaattatatataggaggcccttccagacctcttgccagtaacagcacctttagagctggtaaaagagcccagagttaaacmatatgtgcagattggtgcagaccttgctaactgcacatcagcttgctatttccaggcctgtttattccacagtgagcctcttcaccccttccatccaagagacaagatgccactacagtcttgtaaaagtcaaaaacaa

SEQ ID NO: 468524 - DNA, 574 bp, Homo sapiens
accttaattttgtttcctgcttggctttggkcttcagtcttgtgctatccagagagactctgtcttacaaatcccccaggtcattctaaagccacatggaccggacaattgtcaatgtggtgggaagggtcgcactgaacggtcactctctgtccttctgagggagccatactgcaggcagacatggcagtcctggctcaggttgtgtccttccaagtatccctgccctcctgcaggtgtgatgctgatccatgcatcttcctcccattcctgggtagagggtctccttgttttttcccagatcttcttccagcagccactatgtcttcccactgatgtcttcagcttcctcttttctgcccttcccagcaggatgaggcttttattcctgaagaaagagagaggaggtgggagatgaggctgttattcctgagagaatgaacagggctttggagcttttctttcttctatcccagtttctatgagttcctccagtaccagtaacacaaaggtgttactggctttgcccctgcatgttaattctctagcaatgtagtggtgacagtggaggtgg

SEQ ID NO: 468525 - DNA, 574 bp, Homo sapiens
accttaattttgtttcctgcttggctttggtcttcagtcttgtgctatccagagagactctgtcttwcaaatcccccaggtcattctaaagccacatggaccggacaattgtcaatgtggtgggaagggtcgcactgaacggtcactctctgtccttctgagggagccatactgcaggcagacatggcagtcctggctcaggttgtgtccttccaagtatccctgccctcctgcaggtgtgatgctgatccatgcatcttcctcccattcctgggtagagggtctccttgttttttcccagatcttcttccagcagccactatgtcttcccactgatgtcttcagcttcctcttttctgcccttcccagcaggatgaggcttttattcctgaagaaagagagaggaggtgggagatgaggctgttattcctgagagaatgaacagggctttggagcttttctttcttctatcccagtttctatgagttcctccagtaccagtaacacaaaggtgttactggctttgcccctgcatgttaattctctagcaatgtagtggtgacagtggaggtgg

SEQ ID NO: 468526 - DNA, 574 bp, Homo sapiens
accttaattttgtttcctgcttggctttggtcttcagtcttgtgctatccagagagactctgtcttacaaatcccccaggtcattctaaagccacatggaccggacaattgtcaatgtggtgggaagggtcgcactgaacggkcactctctgtccttctgagggagccatactgcaggcagacatggcagtcctggctcaggttgtgtccttccaagtatccctgccctcctgcaggtgtgatgctgatccatgcatcttcctcccattcctgggtagagggtctccttgttttttcccagatcttcttccagcagccactatgtcttcccactgatgtcttcagcttcctcttttctgcccttcccagcaggatgaggcttttattcctgaagaaagagagaggaggtgggagatgaggctgttattcctgagagaatgaacagggctttggagcttttctttcttctatcccagtttctatgagttcctccagtaccagtaacacaaaggtgttactggctttgcccctgcatgttaattctctagcaatgtagtggtgacagtggaggtgg

SEQ ID NO: 468527 - DNA, 411 bp, Homo sapiens
gagccatactgcaggcagacatggcagtcctggctcaggttgtgtccttccaagtatccctgccctcctgcaggtgtgatgctgatccatgcatcttcctcccattcctgggtagagggtctccttgttttttcccagatcttcttccagcagccactatgtcttcccactgatgtcttcagcttcctcttttctgcccttcccagcaggatgaggcttttattcctgaagaaagagagaggaggtgggagatgaggctgttattcctgagagaatgaacagggctttggagcttttctttcttctatcccagtttctatgagttcctccagtaccagtaacacaaaggtgttastggctttgcccctgcatgttaattctctagcaatgtagtggtgacagtggaggtgg

SEQ ID NO: 468528 - DNA, 411 bp, Homo sapiens
gagccatactgcaggcagacatggcagtcctggctcaggttgtgtccttccaagtatccctgccctcctgcaggtgtgatgctgatccatgcatcttcctcccattcctgggtagagggtctccttgttttttcccagatcttcttccagcagccactatgtcttcccactgatgtcttcagcttcctcttttctgcccttcccagcaggatgaggcttttattcctgaagaaagagagaggaggtgggagatgaggctgttattcctgagagaatgaacagggctttggagcttttctttcttctatcccagtttctatgagttcctccagtaccagtaacacaaaggtgttactggctttgcccctgcatgttaattctytagcaatgtagtggtgacagtggaggtgg

SEQ ID NO: 468529 - DNA, 298 bp, Homo sapiens
cctgtgcagcctctgggttcaccgtcagtagcaactacatgagctgggtccgccaggctccagggaaggggctggagtgggtctcagttatttatagcggtggtagcacatactacgcagactccgtgaagggccgattcaccatctccagagacaattccaagaacacgctgtatcttcaaatgaacagcctgagagcygaggacacggccgtgtattactgtgcgagagacacagtgaggggaagtcattgtgcgcccagacacaaacctccctgcaggaacgctggggggaaatc

SEQ ID NO: 468530 - DNA, 298 bp, Homo sapiens
cctgtgcagcctctgggttcaccgtcagtagcaactacatgagctgggtccgccaggctccagggaaggggctggagtgggtctcagttatttatagcggtggtagcacatactacgcagactccgtgaagggccgattcaccatctccagagacaattccaagaacacgctgtatcttcaaatgaacagcctgagagccgaggacacggccgtgtattactgtgcgagagacacagtgaggggargtcattgtgcgcccagacacaaacctccctgcaggaacgctggggggaaatc

SEQ ID NO: 468531 - DNA, 298 bp, Homo sapiens
cctgtgcagcctctgggttcaccgtcagtagcaactacatgagctgggtccgccaggctccagggaaggggctggagtgggtctcagttatttatagcggtggtagcacatactacgcagactccgtgaagggccgattcaccatctccagagacaattccaagaacacgctgtatcttcaaatgaacagcctgagagccgaggacacggccgtgtattactgtgcgagagacacagtgaggggaagycattgtgcgcccagacacaaacctccctgcaggaacgctggggggaaatc

SEQ ID NO: 468532 - DNA, 346 bp, Homo sapiens
acaattccaagaacacgctgtatctgcaaatgaacagcctgagagccgaggacacggctgtgtattactgtgcgagagacacagtgaggggargtcattgtgcgcccagacacaaacctccctgcaggaacgctggcgggaaatcagctgcagggggcgctcaggagccactgatcagagtcagccctggaggcaggtgcagatggaggctgtttcctgtcaggatgtgggactttgtcttcttctgacagttccccagggaacctcttaaatttagaaaactgtgcctaacaatgtcttctctatgcatatgaggaccttttctccctggcacaaaatgcagatt

SEQ ID NO: 468533 - DNA, 346 bp, Homo sapiens
acaattccaagaacacgctgtatctgcaaatgaacagcctgagagccgaggacacggctgtgtattactgtgcgagagacacagtgaggggaggtcattgtgcgcccagacacaaacctccctgcaggaacgctggcgggaaatcagctgcagggggcgctcaggagccactgatcagagtcagcccyggaggcaggtgcagatggaggctgtttcctgtcaggatgtgggactttgtcttcttctgacagttccccagggaacctcttaaatttagaaaactgtgcctaacaatgtcttctctatgcatatgaggaccttttctccctggcacaaaatgcagatt

SEQ ID NO: 468534 - DNA, 572 bp, Homo sapiens
aacatttcctgcaaaaagaagaaaggagtctgggccgaaggggacactcagcactcacaaaacaggtgcagccccaaggcaggtgcagatggagggagggtaagggctgctttccttcagggtctgtggtttcctctgcttctaatatttcccctctgaacctctgtatatttatgttttgtgcccaccatgaggtccctggattagaaaactaatttaaaagaggaaatattctcatatgtcccamaaacagatgtaagttttggaggcataaaaatgcataggagccgcgtgagtctgtagacactgccaccccacaatgccagacccaaaactagtgctggagaagggtgggagtttgatggagcttccctgatgaccccgtggtccaagctaagtccagcaaggccattggtgcctcgctgagcacagttgtccatcagggatcctcccatgtgtcccagcagcagccatgcctcagtatctccactgtgcacagccatcgtctgggaggagctcccaggatgggtgtctttggcacacacaggtgatgggtgttagagtgcagtgca

SEQ ID NO: 468535 - DNA, 608 bp, Homo sapiens
tgcctggtctattgggctcctggatattggagggattggaggtgcattctcaaggccagcacgctgtttgttaatttttgtataaaaaccatgtgatttaattcattttctcagatgacatagataattaataacacaatctgcaaacaattgtaattttcaactttaccccaagttcattgtttcttaattctgtgcaggatccagacatggtattgcccttctcatgagaaattgttcgacctaaactgaaaccagttgtttctcatatactttggttctccccacatgcagagatcttgattagagcaagtttggtactttccacgcactcaccctcacctccccagataaagagcagaagttctccttagactgagtctgagggaggagctgttcctgtaccactcagggcctgcggagacccccaggtgcagcttcactgagtcaggtgtttcactccctgtgattgctgctcaggtctaattgtgggctcagaattaggacagtcttcaggttatcacagatcaatcatattctaaaaatcatcattatcacacaccrtggtaataattcaatgttcatttttctaaacagcagtttctctt

SEQ ID NO: 468536 - DNA, 654 bp, Homo sapiens
ggcagggggcgctcaggagccactgatcagagtcagccctggaggcaggtgcagatggaggctgtttcctgtcaggatgtgggactttgtcttcttctgacagttccccagggaacctcttaaatttagaaaactgtgcctaacaatgtcttctctatgcatatgaggaccttttctccctggcacaaaatgcagattgacgctgacacggatgaaaattcctcaaccatggtcacaaggatcagagtcctgagtaacctcagggcttcctggtgaktcttctccaatcagacccaggacagggacctccgtgagattccctgactggaacagtctttatggatcctggtcacagacaatagagaggctgaaccagggtcagcgtcatgtagaacctcacagatttcacgtctgatccttctcctgacacgaaagtatgcaaatcagtatcagcaccgatctggtgcttcttttgttcctaatccatttactttcttttttcgtcgtttttctcctttttccatttgtttttcctgctttttgcaaaaggaagatgttttccctgtgagatgcaggggatgacaattttgggagatggctggaacatccaatatcctcagggccggccatcagtaagtgcaggctggaagtctc

SEQ ID NO: 468537 - DNA, 654 bp, Homo sapiens
ggcagggggcgctcaggagccactgatcagagtcagccctggaggcaggtgcagatggaggctgtttcctgtcaggatgtgggactttgtcttcttctgacagttccccagggaacctcttaaatttagaaaactgtgcctaacaatgtcttctctatgcatatgaggaccttttctccctggcacaaaatgcagattgacgctgacacggatgaaaattcctcaaccatggtcacaaggatcagagtcctgagtaacctcagggcttcctggtgagtcttctccaatcagacccaggacagggacctccgtgagattccctgactggaacagtctttatggatcctggtcacagacaatagagaggctgaaccagggtcagcgtcatgtagaacstcacagatttcacgtctgatccttctcctgacacgaaagtatgcaaatcagtatcagcaccgatctggtgcttcttttgttcctaatccatttactttcttttttcgtcgtttttctcctttttccatttgtttttcctgctttttgcaaaaggaagatgttttccctgtgagatgcaggggatgacaattttgggagatggctggaacatccaatatcctcagggccggccatcagtaagtgcaggctggaagtctc

SEQ ID NO: 468538 - DNA, 576 bp, Homo sapiens
tccaagcgttcctgttccttcccttccccaagtcagagtgtctctttctagccacagtggtcttccatcagtgtcctcagcttctgacccactgtccttactccacagactcaggatttcattcctcaggaaagagacgggaggtgtttctgggtagagtctccttrgtgtcctctgtttccttctgttctagttgattctaccagtgcctgaaggacacaagatttaataaatgtctcccacatatcgtgaagagggattcagcattgaacggagctactgttcttcctccccagtcaacatcacaggacagcaggtggctgagttgtctggggatttctccaattctgtaggaaaagcccgcaagtgccaggagtttcacactctcacagcattagcacacacatcctcaacaactcatgaaacatttccaggttagctttttcctatcttcaataccatacaatgagtggcacctgccccaggtactctaataaatggacctagttttctctgcaggctccccattttctcagatttcaggggtttttttctctgcaacatcaactcagatat

SEQ ID NO: 468539 - DNA, 449 bp, Homo sapiens
cggctgctccacatggggccgttcttccatttcctctgtgtttgcagaagtcctgtgtgaaatttactgatagagtcaggggggaaaattgtacagcccagtggttcactgagactctcatgcaaagcctctgatttcacctttactggctacagcatgagcttggtccagcaggcttcatgacagggattggtgtgggtggaaacagtgagtgatcaagtgggagttctcagagttactctccatgagtacaaataaattaacagtcccaagygacaccttttcatgtgcagtctaccttaaagggaccaaactgaaagtcaaggacaaggccttgtaatactgtgagagacacaggagagggaatatctgcgtgagcccagacagaaaaatctctgcaggaagacaggagggagctgcatggtagatgctcctcagaaccaccaggg

SEQ ID NO: 468540 - DNA, 571 bp, Homo sapiens
atgtatgtgtgtttgtagaaccatgaagttttcaaatacatcattaaatgacatagttatattaatcttggccaggcatggtggctcaagcctgtaatcccagcactttgggaatcttaggcaggcagatcacctggggtcaagggtttgagaccagcctggtcaacagggtaaaaccccgtctctactaaaaatacaaaaattagccaggtattgtggcacaagcctttagtcccagtgtggcagggaaatgtggggtcggaaatcccacacagagtttctactggtrtaccacctagtggagctgtaagaagaaagccactgccctccagaacccagaatggtagatccactgacagcttgcaccatgtttctggaaaaaccacataccctcaatgccagctcgtgaaagcagccaggagggagactgtgccctgcaaaagttttttaaaacttttcatttgaaaagttttaaaaaagttctgtcacaggggcagaacttcccaagaccatgtgaacccacttgttacatcaggtaacctggatttgagacatggagtcaaagaagatt

SEQ ID NO: 468541 - DNA, 571 bp, Homo sapiens
atgtatgtgtgtttgtagaaccatgaagttttcaaatacatcattaaatgacatagttatattaatcttggccaggcatggtggctcaagcctgtaatcccagcactttgggaatcttaggcaggcagatcacctggggtcaagggtttgagaccagcctggtcaacagggtaaaaccccgtctctactaaaaatacaaaaattagccaggtattgtggcacaagcctttagtcccagtgtggcagggaaatgtggggtcggaaatcccacacagagtttctactggtataccacctagtggagctgtaagaagaaagccactgccctccagaacccagaatggtagatccactgacagcttgcaccatgtttctggaaaaaccacataccctcaatgccagctcgtgaaagcagccaggagggagactgtgccctgcaaaagttttttaaaacttwtcatttgaaaagttttaaaaaagttctgtcacaggggcagaacttcccaagaccatgtgaacccacttgttacatcaggtaacctggatttgagacatggagtcaaagaagatt

SEQ ID NO: 468542 - DNA, 596 bp, Homo sapiens
tcctttgacattgctagcaggttaactaatagaatggaaacttcagctatggggaaagatcctgggatattagaaccggagagcaccccatctttgtacagaaaactaagcctcagactgatgaaggcactttctagttacacagctagtgaggaagtcattaacaggagagaccctcccgatctagtatcttaacagacactgccttaacaatcattctcttgtttcttttaaccccttctcttcccaggcactgccggaggtattctgaaacacgtccgtctgtgttcccacccatatcttctttcgctttcccatttcctctttcctaaagtcgataccaagatacttgctttcasgttgcacaatttccaaagaggagcttggctgaagaactaggcatgctcagtagccgggtggtcttcctcctcccccacccctccccccctttccttttcttttctcacccacatagaacttaggagctgagggaacctcagacaggtgagccctacaggtagcgaatgtgcccacggaaagttaatctgctacctcttcaggtgaacatttgcaagtctctaggtagacacgtaaat

SEQ ID NO: 468543 - DNA, 515 bp, Homo sapiens
cccaggcactgccggaggtattctgaaacacgtccgtctgtgttcccacccatatcttctttcgctttcccatttcctctttcctaaagtcgataccaagatacttgctttcaggttgcacaatttccaaagaggagcttggctgaagaactaggcatgctcagtagccgggtggtcttcctcctcccccacccctccccccctttccttttcttttctcacccacatagaacttaggagctsagggaacctcagacaggtgagccctacaggtagcgaatgtgcccacggaaagttaatctgctacctcttcaggtgaacatttgcaagtctctaggtagacacgtaaatgctcgcaatccatgcccagagcagccccgggtgcataatcagctgcataactgtggggcatgtttaaagaagcccggcgcttcctgttattaatttttgtaaagtggacggcatgggggaaaatgagaaaggaaatcggagagaaacatacagggatttttttt

SEQ ID NO: 468544 - DNA, 515 bp, Homo sapiens
cccaggcactgccggaggtattctgaaacacgtccgtctgtgttcccacccatatcttctttcgctttcccatttcctctttcctaaagtcgataccaagatacttgctttcaggttgcacaatttccaaagaggagcttggctgaagaactaggcatgctcagtagccgggtggtcttcctcctcccccacccctccccccctttccttttcttttctcacccacatagaacttaggagctgagggaacctcagacaggtgagccctacaggtagcgaatgtgcccacggaaagttaatctgctacctcttcaggtgaacatttgcargtctctaggtagacacgtaaatgctcgcaatccatgcccagagcagccccgggtgcataatcagctgcataactgtggggcatgtttaaagaagcccggcgcttcctgttattaatttttgtaaagtggacggcatgggggaaaatgagaaaggaaatcggagagaaacatacagggatttttttt

SEQ ID NO: 468545 - DNA, 358 bp, Homo sapiens
catgccctcacaaaaaccattcctgcacttggccaaagccagmcagcaacttcgaggaggtgcagtcgaggcccctctttggggttgtccttgggacagcggtgatgctgttcagctgcggccgtgcaaccgtctttgatgtgagctttgcagtgataaatcgcctctaaaaggagcccaacttggcagggatatagaagaagaggaagggaggagggagggaaggcggggagggagagaaagagaaggagggcattggtaggaggaggaaagagaaaaggagaattggactccttgggagcctgcagtggacaggtgcaaagaaaggtaagcaagggagaaggaaaaagggcgttac

SEQ ID NO: 468546 - DNA, 418 bp, Homo sapiens
tcagatcactgcagcctctacgtctcaggttcaagtgattctcctgcctcagctccccaagtagctgagattacaggcactcgccaccacacctggctaatttttctgtatttttagcagagatggggtttcaccatgttggccaggctggtctcgaactcctgaccgcaggtgatccacccgcctcggsctccaaaagtaccctattgacttttgacatattacacttagcgacaagtttttactgcattggcaatttgtgatgccaaaagtaccatttactgaaataatacatagtaatgaaagatgttttggttgattttagtaggatttttaaattggaaattaacctttaaaagatatattgaatctaggtaagcaaaaaaggtatttaaaatgaagtagctcagccagtgaa

SEQ ID NO: 468547 - DNA, 597 bp, Homo sapiens
gaatttagtgctgacacgacagtgtttacaaaatacttttacctrttattctaatagcaggcagcactacccagtgaaagtaagtctgagtgaattttacattccagttggagaacaacgtcaaaatgtgccctggaaatgtttacttacaagatacattgcaaatgcttaatctgtttttttctcttatgtgtagatcctgattttaataaatttggcaatactaaatgtattttcatttcctttcccaatatagggcatcacatttgatgaattcaggtcatttttccagtttttaaacaacctagaagactttgcaatagccctgaatatgtataactttgcaagtcgttctatagggcaaggtaagtaatcatctacaaaaattaaaagcaagaagtaatactacattgtttctatagattttggcaaccaattaattaaatatgacatatcacccatcaacttgtgtgaaagtccggtgtatactttcagtgacaagtcagttctggtacttgtcagaaaacagccatgagggaagaaacctcatggccactgggtgacattgagggacttgtgtgtacctatggaggaagc

SEQ ID NO: 468548 - DNA, 455 bp, Homo sapiens
atattttctattacatggaagtggattttgattttctcaraattataatggaggaaggaatattaagatggtaaaaatgctcatgataccaaagatgtcacccacatagtgataaactcttaagagaatttgatgtttaaagagttatgatgtctgatctgatttcttgagtttcatcaataagaatgagggactcaacaaccaaattccaaagaggtttgcattaaaaagggtgtaactccagcagaatgtaaatgtatgtaaaatagataatagcaagatgttataatgtttttattttgaatgaggcagaagctgtttcggaaaaaaagaaatagaggtttaaagaacacagaacataccttcaaccgtcatggcagggtggtggaccacgaggaaatgactgtgacaagtcagctaatcttggaacaaattagggaaggaaatgatgaaca

SEQ ID NO: 468549 - DNA, 585 bp, Homo sapiens
gccgcggcgcccccagcgcagcgcagcccaccccgactgtcccgggacgctcagccgctcctccgctctcgccccccggatgcgccccgggcgctgccaacctgccgcgtcccgccggctccgccgctaaaagcagcctcggggcagctttttccacgcgcacgcccctcgccctcccctcccaactctcgggttaaggtggcgcctmcgccccgcactcgccgccgagcctcccgccgccttccgctcaccgccgccgccccggccacaccccctagaggggcggaaggtccccgggaccgctgtggagaggggaggccgaggccggcgaggcgcgccgggggctgaagggctgagctgggcccggccccgagctgcgccagacccgcgcgggggtgctgggccttggcggcggagctggatcccttgctggttggcgtcaatgcacttgttaaaaatttgtgacagcgctcaggggcgtttttgctgcctttatgatttgaggattgccagttggacacttttctagttaaaaaggatgtggaggaggtgagctactagaaagtatttttgaggacatgtgca

SEQ ID NO: 468550 - DNA, 585 bp, Homo sapiens
gccgcggcgcccccagcgcagcgcagcccaccccgactgtcccgggacgctcagccgctcctccgctctcgccccccggatgcgccccgggcgctgccaacctgccgcgtcccgccggctccgccgctaaaagcagcctcggggcagctttttccacgcgcacgcccctcgccctcccctcccaactctcgggttaaggtggcgcctacgccccgcactcgccgccgagcctcccgccgccttccgctcaccgccgccgccycggccacaccccctagaggggcggaaggtccccgggaccgctgtggagaggggaggccgaggccggcgaggcgcgccgggggctgaagggctgagctgggcccggccccgagctgcgccagacccgcgcgggggtgctgggccttggcggcggagctggatcccttgctggttggcgtcaatgcacttgttaaaaatttgtgacagcgctcaggggcgtttttgctgcctttatgatttgaggattgccagttggacacttttctagttaaaaaggatgtggaggaggtgagctactagaaagtatttttgaggacatgtgca

SEQ ID NO: 468551 - DNA, 608 bp, Homo sapiens
acaccatgttattatgtaagggacttctgcgtgtgtggatttgagaatctatgggggctggggtgggggtgctggaaacaattctccttggatactgagggatgactctactgccaaattgctcttgaaaagggctgcagtggtttatgctctcaccagtaggttgggaaagttccttttcccatatcccaactaatacttggtaatgctgatgctttmagttttgccaatcttataatatttctctaagaatattaatggcagtttttgttttcttctctgaatgttgttttccagactttttagaatttgcttgcttatatgtgtgtgtgttgtgggggtgtggtctctgtcctgcatgttgagctttcctcagttttctgctaatttttgcctatccattcacatgtaagagcaagacacaggatgctggctggcagtgccgtgtgccgtgtgcatgggcaggctttcttagctgccaagctttgctatgggggatttggccaatgtaacatctgcgagtcctttgtcttcgatgtttgtaggccccggcatggaatcttctgaacacctgagtgcatcacgttggatgccagtgtcctaagagg

SEQ ID NO: 468552 - DNA, 481 bp, Homo sapiens
gtttagatagggtctaagttatgatattcaaaaccatttaaataatctactttccttttcactgatattgcttcattttcctgctgaaagaaaaaatacaaaataaataaccgttctcaaatgcataggatacgattaatggtgacattaataaaatagaaattattttttaatgytttccaacctttttttttttttaaactagcccatctagaaacatcacaaataccaaaaaccaattctaattctaaacgggaaactttcacagtgacaagagcccaggttgctgctaggtttgaaaccgaaggacagcaggcacatacctgtgctgactcaagtctacttagaacaagggggatttttttttggaatcaatctgcattctctgccccaagtcccgtaccctgcaattctgacagagtagattgcactgtcagatgacatctagaagagcagaaacatttccctgagttatgagtag

SEQ ID NO: 468553 - DNA, 481 bp, Homo sapiens
gtttagatagggtctaagttatgatattcaaaaccatttaaataatctactttccttttcactgatattgcttcattttcctgctgaaagaaaaaatacaaaataaataaccgttctcaaatgcataggatacgattaatggtgacattaataaaatagaaattattttttaatgttttccaacctttttttttttttaaactagcccatctagaaacatcacaaataccaaaaaccaattctaattctaaacgggaaactttcacrgtgacaagagcccaggttgctgctaggtttgaaaccgaaggacagcaggcacatacctgtgctgactcaagtctacttagaacaagggggatttttttttggaatcaatctgcattctctgccccaagtcccgtaccctgcaattctgacagagtagattgcactgtcagatgacatctagaagagcagaaacatttccctgagttatgagtag

SEQ ID NO: 468554 - DNA, 481 bp, Homo sapiens
gtttagatagggtctaagttatgatattcaaaaccatttaaataatctactttccttttcactgatattgcttcattttcctgctgaaagaaaaaatacaaaataaataaccgttctcaaatgcataggatacgattaatggtgacattaataaaatagaaattattttttaatgttttccaacctttttttttttttaaactagcccatctagaaacatcacaaataccaaaaaccaattctaattctaaacgggaaactttcacagtgacaagagcccaggttgctgctaggtttgaaaccgaaggacagcaggcacatacctgtgctgactcaagtctacttagaacaagggggatttttttttkgaatcaatctgcattctctgccccaagtcccgtaccctgcaattctgacagagtagattgcactgtcagatgacatctagaagagcagaaacatttccctgagttatgagtag

SEQ ID NO: 468555 - DNA, 452 bp, Homo sapiens
tttatttagcccaatatatccaaaatcattatcacttcaacatgtgcatgatataaaacttactaatatttgatacattttgttttgtgctgtctttgaaatttcacatgtatttggcacttaaccgcatacctcagtttgcagtagcgctgaacagctatctgtggccagtggctaccaccttggacagtgcagatctaagcatttctgatgataataaaggataactgatactcagaccttgttttgttccagattctgtcgcaattaagtgcattaatccagttagtaggcaacattgatggtcctcattttaccgacgagaamtctgacgcaaacgggaggcacactccctccctcagagtcacacagccagttaccggagagtccaggtttaaatgagacatctggctgcagaaggcctgctcctaattgtaacacaccctccccaa

SEQ ID NO: 468556 - DNA, 645 bp, Homo sapiens
tgcccttcttggagcccaagccaagtatcactgcatctcacttggtcacacgcttacccctaaaccattcagtgtggtcatgaaatgacatgatttgggtagctggattggcagtacgccacamaccaaaaaaacatacaaactgagcatagagcaggcatggctcctcagagggagcctgggagagtggatgatgggtgaccaaagcccagcacatcctgccacacagtctagtccccaggatggcactcaaacagtagtcactctagatacaccctgatcatgtcactctccgttcagagctacagtatctccccactgctgctaaccgggccttccacaacctagccccaccttaccggctaaacaggttcctcctttcattcccaaagcagtcaccagtctcatatgatagatatcactgatcattcttcccaggtattctgatgtaccagcatctatgcatgtgaagatatcccaggtattccgatatcccagatatcccaggtattctgatgtaccagcatctgtttcttcctctaccaatatctatttagcctggagagcccatatcatcatacttcaaactctggacagagccagtttcagccaggttacgtgaagtacggaggtacagatttgaag

SEQ ID NO: 468557 - DNA, 479 bp, Homo sapiens
gcttattgtaggtaaccttcttctattaaatcatgggagatttttctagcttagaggtataagttttaatgtgtgttggaatttttaatacagacttaagtcctgatgcttatctagtatctttctttgttcttaaacattgatttycccgtattgcttacatttaataactattacattttcagttttaaggcagtaatagttcatgaatttgaaaagttaaaatctattggagatgaagttttacaattctgaagtctttcaaatatatttttggtaacatcttgatgaccttcaaattttctttcatcagcggagtgttagggggctgccgagagcctgggaactgctagcattctgtttctcactgcttctgggttatgcagcatggaagagagggcatggagtttggagccacacagaccttaggttcaaatccagctctgtgactttgaaaagttacttaacatctctgagcc

SEQ ID NO: 468558 - DNA, 563 bp, Homo sapiens
tgcttattgtaggtaaccttcttctattaaatcatgggagatttttctagcttagaggtataagttttaatgtgtgttggaatttttaatacagacttaagtcctgatgcttatctagtatctttctttgttcttaaacattgatttcccygtattgcttacatttaataactattacattttcagttttaaggcagtaatagttcatgaatttgaaaagttaaaatctattggagatgaagttttacaattctgaagtctttcaaatatatttttggtaacatcttgatgaccttcaaattttctttcatcagcggagtgttagggggctgccgagagcctgggaactgctagcattctgtttctcactgcttctgggttatgcagcatggaagagagggcatggagtttggagccacacagaccttaggttcaaatccagctctgtgactttgaaaagttacttaacatctctgagccttagtttcatcatgcaaagataggacatttctcctgaggtggttgtgagggttaaataaagtatgtcaagagcccaagacata

SEQ ID NO: 468559 - DNA, 479 bp, Homo sapiens
gcttattgtaggtaaccttcttctattaaatcatgggagatttttctagcttagaggtataagttttaatgtgtgttggaatttttaatacagacttaagtcctgatgcttatctagtatctttctttgttcttaaacattgatttccccgtattgcttacmtttaataactattacattttcagttttaaggcagtaatagttcatgaatttgaaaagttaaaatctattggagatgaagttttacaattctgaagtctttcaaatatatttttggtaacatcttgatgaccttcaaattttctttcatcagcggagtgttagggggctgccgagagcctgggaactgctagcattctgtttctcactgcttctgggttatgcagcatggaagagagggcatggagtttggagccacacagaccttaggttcaaatccagctctgtgactttgaaaagttacttaacatctctgagcc

SEQ ID NO: 468560 - DNA, 653 bp, Homo sapiens
cattttaggatacttgctttctaaaaagaatacatttaaaatatgaaattgtatattttgatagagggaggtcaaataaatgtttatatttcaacaaaatgaagggaaatacttgtagagcttaggcaatgcttggtatactttgtgttttccccacagacaaaaaacctcgtaaatggcctatgttggttcttcggaattggtggcaagaggacagagtgtaggattgtaagaatttacgtcagatkaatttggcaggattctgatatttccttgatacttaattctaggcacactgtctgtctcattaatttctgtaaacgtcttggttaaggaattacactgagggagttctgatgtttcattcacactcatccctgtctgccatccatcaagtgcttctggaattccatcctggatcagaccacccagtgaagacagccgtggcaggagccagtagccccagagacagggactcttcacagggagacgtggcgctgggctgtggcctcttttcagctttctggcagcaagcctctcattagcatggggtgctgcggtatgcttggctaaggaggaaatctcaagagccgaagccttgaaaacccaggtcttgtgtccgtgcccagaattatgcattgctagcatacagc

SEQ ID NO: 468561 - DNA, 653 bp, Homo sapiens
cattttaggatacttgctttctaaaaagaatacatttaaaatatgaaattgtatattttgatagagggaggtcaaataaatgtttatatttcaacaaaatgaagggaaatacttgtagagcttaggcaatgcttggtatactttgtgttttccccacagacaaaaaacctcgtaaatggcctatgttggttcttcggaattggtggcaagaggacagagtgtaggattgtaagaatttacgtcagattaatttggcaggattctgatatttccttgatacttaattctaggcacactgtctgtctcattaatttctgtaaacgtcttggttaaggaattacactgagggagttctgatgtttcattcacactcatccctgtctgccatccatcaagtgcttctggaattccatcctggatcagaccacccagtgaagacagccgtggcaggagccagtagccccagagacagggactcttcacagggagacgtggcgctgggctgtggcctcttttcagctttctggcagcaagcctctcattagcatggggtgctgcggtatgcttggcyaaggaggaaatctcaagagccgaagccttgaaaacccaggtcttgtgtccgtgcccagaattatgcattgctagcatacagc

SEQ ID NO: 468562 - DNA, 388 bp, Homo sapiens
tcctagatcagtgtttctctcttagatgataaactcttaaccgtctagataacaggttgattcaattctctttgtattgtaacatgcagaattacacacaatgtgaaaaaagagaaggtggaaatctggatataaagatgcctttatgctcatgcattaaatatatgaaatgctccaagaaaaaaaaaatggattcaccataattgaattaggagtccctgggacacaggcacttagtctctggctgtggtcccatcggtgtgcctgcatttttgctagccactgagtagcatcaacagcatagagcatcttgcagagaacagccacatcagatggctcagaygtgtgctgcatctgacctcctccccatcacccacacagtgaattt

SEQ ID NO: 468563 - DNA, 513 bp, Homo sapiens
attgtgtggggacacagagccaaaccatatcaagtacctacaaaattatggtgactcttcactaatttgcaaactgattatctgcaaatcttaaatagggaataaaacacaaaaatatcattatccckccagaactgaggacgcaaaatggatttagaagacttagctctgacacctagatatgtattcattgatctgacctaacttgatctcagtttctctttgatagagttagttctttagatcagaggtccccaaccacaggactgcggactgccactggtctttggcctgtcaggcacccggccacacagctggaggtgagtggcatcaagcaagcattaccacctgagctccaactctagtcagatcaatggtggcattacattctcataggagtgtgaaccctattgtgaactgcacatacaagggatctaggtaacatgctccttatgaaaatctaactaatgcctgatgatctgagctgaaacagtttaggccaaaaccatccct

SEQ ID NO: 468564 - DNA, 513 bp, Homo sapiens
attgtgtggggacacagagccaaaccatatcaagtacctacaaaattatggtgactcttcactaatttgcaaactgattatctgcaaatcttaaatagggaataaaacacaaaaatatcattatcccgccagaactgaggacgcaaaatggatttagaagacttagctytgacacctagatatgtattcattgatctgacctaacttgatctcagtttctctttgatagagttagttctttagatcagaggtccccaaccacaggactgcggactgccactggtctttggcctgtcaggcacccggccacacagctggaggtgagtggcatcaagcaagcattaccacctgagctccaactctagtcagatcaatggtggcattacattctcataggagtgtgaaccctattgtgaactgcacatacaagggatctaggtaacatgctccttatgaaaatctaactaatgcctgatgatctgagctgaaacagtttaggccaaaaccatccct

SEQ ID NO: 468565 - DNA, 513 bp, Homo sapiens
attgtgtggggacacagagccaaaccatatcaagtacctacaaaattatggtgactcttcactaatttgcaaactgattatctgcaaatcttaaatagggaataaaacacaaaaatatcattatcccgccagaactgaggacgcaaaatggatttagaagacttagctctgacacctagatatgtwttcattgatctgacctaacttgatctcagtttctctttgatagagttagttctttagatcagaggtccccaaccacaggactgcggactgccactggtctttggcctgtcaggcacccggccacacagctggaggtgagtggcatcaagcaagcattaccacctgagctccaactctagtcagatcaatggtggcattacattctcataggagtgtgaaccctattgtgaactgcacatacaagggatctaggtaacatgctccttatgaaaatctaactaatgcctgatgatctgagctgaaacagtttaggccaaaaccatccct

SEQ ID NO: 468566 - DNA, 513 bp, Homo sapiens
attgtgtggggacacagagccaaaccatatcaagtacctacaaaattatggtgactcttcactaatttgcaaactgattatctgcaaatcttaaatagggaataaaacacaaaaatatcattatcccgccagaactgaggacgcaaaatggatttagaagacttagctctgacacctagatatgtattcattgatctgacctaacttgatctcagtttctctttkatagagttagttctttagatcagaggtccccaaccacaggactgcggactgccactggtctttggcctgtcaggcacccggccacacagctggaggtgagtggcatcaagcaagcattaccacctgagctccaactctagtcagatcaatggtggcattacattctcataggagtgtgaaccctattgtgaactgcacatacaagggatctaggtaacatgctccttatgaaaatctaactaatgcctgatgatctgagctgaaacagtttaggccaaaaccatccct

SEQ ID NO: 468567 - DNA, 423 bp, Homo sapiens
tgtagtatctacatgcatgtgatgaggttcaaggacaataaccataaagcaaagacttaaaaggttttatcattagaataattgtaattcacttgatctctcaatgtaacaatacttcggtctactgtctcaagccattattatgtcttacactcagcatattggtttgtctaccattaaatatttattttctacagtrctttctggaaggcaaacaaagcagccactctgctactttatattgattcctgagttgtccttcggaaacgctttcaggaagtttaataggtttgaaagatatttagacctgtgactggcaaatatacttccttctttttatttcaataagagagtactagaacttagatctttattgtttaatctagtcagtgctgtcattgtcaatcaagttctcaaatgaca

SEQ ID NO: 468568 - DNA, 596 bp, Homo sapiens
ttaaaatatttagaacggagygtattgtagatatcaaggaaaggggttgttaagaacagtcttcgttccacacaactagcagagcttcctcaggtggaggtaatcaaattccttcctaaaatgctggtttcaatgtcatctcaggcagagtcctgaaaaactagaaagtttatttgcacataacgtaggtctcagaaatttcaatggagaagcattttaaaattaataaaactaaaacagttttactagtgagttatcctaaatattcccattattgatgtaactagcagaaagtttacattaatagatgatcaataaatagttccaccttcacacacactttctgggaaagattctgacaatatgaactagaaaaataagggtaaaggtggataaagaaaaagaggaagaaaagaaaaattgaggtgctttgtaatgtgtcaacttgggtaggccgaactacagttcccagaattccttttgccttatgttttccattaggagcagttggcaggcagaaaggaagtggcagccatctttgcagctctcccatgctgtcacgtatctcgttggccttaagatagtggctaagcctc

SEQ ID NO: 468569 - DNA, 601 bp, Homo sapiens
ctgccagaagtttgatttatataatctttcattgccaaaacgggtcagattcagaaccagcctcttcagggtaactgtgaggatcaagaaaatcacaacagccgaagtgctttacagtgtgcctggcataaaacaaactctgagaacattttttaaaaaaycctttcaaggtaggcagtatcattccttccccctcatttcatagatggggcaattaaggctcagaaaggcacgtcgcttgtccaggatcttggagtggtggaattaggatagggcattctggactacaataaacacctgagcgtttagctgctgtgttctgagctcccacagcactttttcttacaacacaaactttatttacatcacactccacttccgcatccttcactaaaatatgagctcttcaagggcagggactatatttttgctaccgcagtagttagcgatacacacacagaatatgaggaaaaagtgtctgaccaacgatcaatgcactcacgactgaacctacggtggcagattgcagtgggatagaagagctttatgtgaattgcgtactgagatgcagacctactattttgggaacaatttgtttttg

SEQ ID NO: 468570 - DNA, 522 bp, Homo sapiens
cctttctttccctagcaccttcctggtgaggacccctgaacaccaatataatacagagtttttgaattgaaggtaaacctggtatttatgtagtgacgaggttattttattatgaagtacagtagcttttaaatgagcaaacatttttaaaatcatcggatatacgaggttgttacatagtttgagtaacaggaagctcgatcaatcagaggagtaaactttggcatagactattaaaggatagttagggctaaccatctttgttacactgttccgaaatagatatcactttgctgtttggtaagatttcagaagtttaggggatttaagcatttatgcatatcacactattttccaaaagaattgaggtaacttaaatttaaaatatgaataagttatatttttccccttcttttgatctttctaaacataytttagaccaaaactgaagtattttttattctgtatttcatagcgtaagtaatttacttaagtgatacatatttttaatcctaattagga

SEQ ID NO: 468571 - DNA, 503 bp, Homo sapiens
tttagagggttgcctggctgcagtggagaaaaaattcgagtcctagacttggaaaggaaatttaaggaaaagaaaaatatgtagatacttgatacgtttctagactgtggccaatcaaaagagaacctgagaattcagtcatttgccatccagggtgcttagttgataaaataatgtaatgtcctgttactctagtgtttgttcacgtgatgaagagaagacttagattatttcaaaggtatttttccactataaagaaaaggacttagccttgccctatcattacattcctactgttcgccaaaacaaaagtcttccttttgcttattgtaattattgaggactcagccttasctgacctctaagtaaatgcttatttgggtctgcattgagttcatcccattacagagaaaaattactgtgtggcctgccaaccctcaccccttaggttgtccctctctttctgagttgccagaatacttcgactcctacgtattttcttt

SEQ ID NO: 468572 - DNA, 540 bp, Homo sapiens
tctcacactctgtgggttgtctgtttactcagatgattatttcttttgccgtgcagaaactttttagtttaagttccatctgtttatctttgtttttgttgcatttgcttttgggttcttggtcatgaagtctttgcctaagccagtgtctataagggtgtctccaatgttatcttctagaatttttgtggtttcaggtattagattttgaaggtatattttttattgattagaagtaataataattctatgtaaaaaatttaaatatgtgatatctaatggtggttttatkactactttattttaattgataggggtgcttaaactacaaacatgtttctttgtattatgttagcataaaatcatcaaatttaatatttttcaaatttcaacataaaggcatatatgtatatataataggctttgttaggctaatgtattttctttttaaaaattagaaactcccgttattgaaaatcgtagttcacaacaacctgtaagtgaagtttctaccatcccatgtcctagaattgatactca

SEQ ID NO: 468573 - DNA, 535 bp, Homo sapiens
gaggaaccccaagctcaggaaacccctcgagttataagatgggctgcttctccaatcaactcatccaacctttgccctacaggtagatgatgatctttattaccgtagtcaggaaacaaatctgtcctctgcctagacaagcatccttgaagatgtccagaactgccacagagaattgcccaacgcacaccagtctagcatcccctgtgccacctggctgggaaacccactttatcaacataagagggacacagtgccctagggaaaaagagaggactgattttcatgtgagctgagcaacctccccaagttgtgaaggttgaggagcccagccacacttccccaggcttgtagacggggccagcatgcagctcggtgaggtctggagcctgctggtcacatctgtcatatgtgaggctaagctggcaagtattttgtaaattgtcaccaataaacaaaaactatgcttcactttgtgagactaacttcaataatgactrtgtgaggttttatagtgactttttataaatttctg

SEQ ID NO: 468574 - DNA, 646 bp, Homo sapiens
ggtgtctcgttcctcgaatgagttcatactatctagcattttcattcttgccatctgtcttctacaataggtccctcttkttttccacctcatggaatgaatgttcttttatcatcctgtttattaaaaaacctccaacatatcactacacagaggaaaagcaaggctgttgtggatactcatgtgcttatgctgtgcacctacattcagccccagagccacataaagggctttctaataactgggatggcaattgcagatggccaacattataacactgaggcacagaaaatagtctcacctcttcccagtacttaggagcccagcgtggatagtggagagtgcacattccacatcttggttctgacactttcttgttgtatagtcttgtttcttcaccaatagaatgggtataagattatgtacctcatagatttgttgtgattatttaaacatatagcttcctaatccaatgcctggtccctaatgggtggttccttttaacaagcaaatattctcgactaccccataacatcagagaatagccttgaaacaatgttattgacattttaaaaatcaaacaatatgcaccccatattatagttatagtttcattgcaattacttaaaggagtgaatagacagac

SEQ ID NO: 468575 - DNA, 580 bp, Homo sapiens
cctctaggtcctaaaattttgtgtttaaaaattgtaaaatttacaaacaattgcttctgacgtaagaatgggaaaattgctttatttttataagtcctgaattcccagcttatattcatttggtgtcactgtcattacccataaatactactaggtattacrtgaaattccattgtatacaataatgggttagtgtttttacctcattttagaaatgaggatatatgtgttaatgataaatgcagtgggaggaaagacattcgtatcccactgtcctaaagccaaacaataatgtttatgttgacctttcagatttgctcatcattttccttagctggaatcagaagaatagaagtcttagttttcagttttagattacgcaggttgcaactttattaacatgtgtatcgttgtccaggagaatccaaaaggcagcttagaagacggatgtttctaattatctgagtgactttgggcaccttttatttaatgtagccttaaggacccttccagttttgaggttatcttagcttttgattttcacagtattgaacacatgggattaagattcagtgagaaa

SEQ ID NO: 468576 - DNA, 531 bp, Homo sapiens
tgctctccaggacgtggtggtgatacccactgctgaaatagcatgtggagcactgatgcaggaggccagttttatgccttctgtcttggacaaagaaagcaagctggccctgacatccagttgtcatactttaagaataaaaaataaataagtaaatatatagataggtaataaacagggccaggcatggtgactcatgcctrtaatcccagcgctttgggaggccgaggtgggtggataacctgagatcaggagttccagaccagcctggccaacacagtgaaaccccatctctactaaaaatacaaaaattagctgggtgtggtggcacatgcctgtaatcccagctacacgggaggctgaggcaggagaatctcttgaaccaggaggcagagtctgcagtgagctgagatcacaccactgtgcttctgctgagtgacagagcaagactgtccaaaaaaaaagaagaaaaagaaaaaaaagataagcaataaatatactgataccctgtataataatacatattttaga

SEQ ID NO: 468577 - DNA, 531 bp, Homo sapiens
tgctctccaggacgtggtggtgatacccactgctgaaatagcatgtggagcactgatgcaggaggccagttttatgccttctgtcttggacaaagaaagcaagctggccctgacatccagttgtcatactttaagaataaaaaataaataagtaaatatatagataggtaataaacagggccaggcatggtgactcatgcctataatcccagcgctttgggaggccgaggtgggtggataacctgagatcaggagttccagaccagcctggccaacacagtgaaaccccatctctactaaaaatacaaaaattagctgggtgtggtggcacatgcctgtaatcccagctacacgggaggctgaggcaggagaatctcttgaaccaggaggcagagtctgcagtgagctgagatcrcaccactgtgcttctgctgagtgacagagcaagactgtccaaaaaaaaagaagaaaaagaaaaaaaagataagcaataaatatactgataccctgtataataatacatattttaga

SEQ ID NO: 468578 - DNA, 531 bp, Homo sapiens
tggaaatgtttgactttacccatcagccaaattaaaaaaatctccttttaaggttaaaaggatcaaaatgtaggtgaccgtgaatattcaccaaaaccttcatcttttcaatctcttcatctgtttctgggctgctcattttggatgcttttttattggttactactatcagtatctgttttagatggtttgtcttgtgtgtctaacagccgtgaacactcgaaaagtctatgatatttctcctgmgtcgaagtattcctctgtagcccaggctggagtgcagtggcaggatctcagctcactgcaagctccgccttctgggttcacaccattctcctgcctcagcctcccaagcagctgggactacaggcacctgccaccacgccgggctaattttttgtattttaatagagacagggtttcaccatgttagccaggatggtctctgtctcctgacctcctgatccgcccaccttggcctcccaaagtgctgggattatagtcgtgagccaccgcgcccagccaattttt

SEQ ID NO: 468579 - DNA, 594 bp, Homo sapiens
ctcctttcttttcttttttttaagccaatgaaaccattttattactgttaatcagttacttagaaatcacttttaccagagtttagattactaacaccttaggaagaccattctctcctttttcattattatttctcaaaagagagaatgtttctggkattccagaaatgaatatgttgagaaaatctttccattatcagtatcatttaaacaatgttgaagtctggggaaaaataaattttttccaaggctacacacatatctattctttgaatacaggaaactgaatgtgcaaatccagacagttgcagaattttcactgagagtctaagaagggatgagtgtgttattgtgaatggactctatagacagtattaattccttcactttcaggcaccatctctcagtgtgaaatctcagagtcccagaaatccagtgctgtttctttgggctttgttccttgcttctttcttgcttttttttttttttttttaattattatactttaaattctgggatacacgtacagaacgggcaggtttgttacaaaggtatacacaggccatggtgtaaacctcctttctttttaaatta

SEQ ID NO: 468580 - DNA, 594 bp, Homo sapiens
ctcctttcttttcttttttttaagccaatgaaaccattttattactgttaatcagttacttagaaatcacttttaccagagtttagattactaacaccttaggaagaccattctctcctttttcattattatttctcaaaagagagaatgtttctgggattccagaaatgaatatgttgagaaaatctttccattatcagtatcatttaaacaatgttgaagtctggggaaaaataaattttttccaaggctacacacatatctattctttgaatacaggaaactgaatgtgcaaatccagacagktgcagaattttcactgagagtctaagaagggatgagtgtgttattgtgaatggactctatagacagtattaattccttcactttcaggcaccatctctcagtgtgaaatctcagagtcccagaaatccagtgctgtttctttgggctttgttccttgcttctttcttgcttttttttttttttttttaattattatactttaaattctgggatacacgtacagaacgggcaggtttgttacaaaggtatacacaggccatggtgtaaacctcctttctttttaaatta

SEQ ID NO: 468581 - DNA, 594 bp, Homo sapiens
ctcctttcttttcttttttttaagccaatgaaaccattttattactgttaatcagttacttagaaatcacttttaccagagtttagattactaacaccttaggaagaccattctctcctttttcattattatttctcaaaagagagaatgtttctgggattccagaaatgaatatgttgagaaaatctttccattatcagtatcatttaaacaatgttgaagtctggggaaaaataaattttttccaaggctacacacatatctattctttgaatacaggaaactgaatgtgcaaatccagacagttgcagaattttcactgaragtctaagaagggatgagtgtgttattgtgaatggactctatagacagtattaattccttcactttcaggcaccatctctcagtgtgaaatctcagagtcccagaaatccagtgctgtttctttgggctttgttccttgcttctttcttgcttttttttttttttttttaattattatactttaaattctgggatacacgtacagaacgggcaggtttgttacaaaggtatacacaggccatggtgtaaacctcctttctttttaaatta

SEQ ID NO: 468582 - DNA, 594 bp, Homo sapiens
ctcctttcttttcttttttttaagccaatgaaaccattttattactgttaatcagttacttagaaatcacttttaccagagtttagattactaacaccttaggaagaccattctctcctttttcattattatttctcaaaagagagaatgtttctgggattccagaaatgaatatgttgagaaaatctttccattatcagtatcatttaaacaatgttgaagtctggggaaaaataaattttttccaaggctacacacatatctattctttgaatacaggaaactgaatgtgcaaatccagacagttgcagaattttcactgagagtctaagaagggatgagtgtgttattgtgaatggactctatagacagtattaattccttcactttcaggcaccatctctcagtgtgaaatctcagagtcccagaaatccagtgctgtttctttgggctttgttccttgcttctttcttgcttttttttttttttttttaattattatactttaaattctgggatacacgtacagaacgkgcaggtttgttacaaaggtatacacaggccatggtgtaaacctcctttctttttaaatta

SEQ ID NO: 468583 - DNA, 609 bp, Homo sapiens
tgtaccatttatcagttatctgactttttgcaagtaggtaaacttcyccatgctttagtttcttaaacaatacaaataaaaagggtcatatttttccatcattgttactcttgtcttttcccccttattccctcaaatgattgcacagttagtggtttgggagcatggtgatagggtttggctgtgtccccacccaaatcgcaacttaaattttagtttgcataatccccacgtgttgtgggaggagagcaagtgggaggaaatttagtcatgggtgggttaccttgatgctgttctcatgatagtgagtgagttctcatgagatctgatggctttataaggggcttttaccccttttgctcggcacttccccttgctgccaccatgcgaagaaggacatgtttgcttccccttctgccatgattgtaagtttcctgaggccactctagtcatgctgaactgtgagtccgttaaacctccctcctttataaattacccaggcttgggcgtgtctttatttgcagcatgagaacggactaatacagatggttaacactacgcttccctaaagcaggaaccctcctcttgcacctgtctatttccattcat

SEQ ID NO: 468584 - DNA, 586 bp, Homo sapiens
atggtagtctatgaagtgtccaagagcactatatctaaaaaaatacataccttaatttaaaaataccttattgctaaaaaaaatcctgaaacagagacacagaatgagcatgcgctattggaaaaatggtgctgatagacttgctcatcatagggttgccacgtaccttcaatttgtaaaaaaatgcagtatctgtgaagtgcaataaagtgcagtaaaacaaggtatgcctgtactcacagagaaggatattctaattaactgcaagcccacctgaggatatgaaaaccccagagcataaaatattgcrtaggttttagcatgtcacaacttgcccattccaatgtcttcctttgcctaacattcagaagtaagaaaggtgatttttttccactcttgtattcttgggtggtgaaggaggcagcgtggtgcagcagacggggatgtgaggcagggtcttgcctccagtctgctgaatgagctgggataagacacttatattttctcggtccaggttttctcatcagtcagactaaccaaaaaatttttcttctggtttaaatttcttattctgaggttggtctta

SEQ ID NO: 468585 - DNA, 586 bp, Homo sapiens
atggtagtctatgaagtgtccaagagcactatatctaaaaaaatacataccttaatttaaaaataccttattgctaaaaaaaatcctgaaacagagacacagaatgagcatgcgctattggaaaaatggtgctgatagacttgctcatcatagggttgccacgtaccttcaatttgtaaaaaaatgcagtatctgtgaagtgcaataaagtgcagtaaaacaaggtatgcctgtactcacagagaaggatattctaattaactgcaagcccacctgaggatatgaaaaccccagagcataaaatattgcgtaggttttagcatgtcacaacttgcccattccaatgtcttcctttgcctaacattcagaagtaagaaaggtgatttttttccactcttgtattcttgggtggtgaaggaggcagcgtggtgcagcagasggggatgtgaggcagggtcttgcctccagtctgctgaatgagctgggataagacacttatattttctcggtccaggttttctcatcagtcagactaaccaaaaaatttttcttctggtttaaatttcttattctgaggttggtctta

SEQ ID NO: 468586 - DNA, 603 bp, Homo sapiens
ctgcccagacttcagcttccagtgtagaatgttggacgtgcttctccatcttgaaattcattccagataggaatgattggatgctgagaagtccaaagcaattgtccagtgttttagctacaatggaaccaagagactgtagatgaaatatgcataagataggtcgttctttggttctgtcttatttcatgacatcagacacgaaacatagttctgtattatttctttccactacagatgaagaacaggaattaaaaaaaattctctaaaaacaaagaccttgaatyacctggggaagagatgttggaatttaataggcttttacatttatccttacttgtctcctaaagtttaggatcaatattctaacagcctcatccaaggtttctttattcttttcactttgaagaaaccaattttaactaagcccacagactgtgaagaggaaaggtgagaagccagaggcagcttgtcattctgggcttaaataaggaagaaacttgaacccagtcaccttgaatctgaatgatgaacaaactgactaattttctgggttgattgaaactcaaagctgaatactcccactatctaacctggaatttt

SEQ ID NO: 468587 - DNA, 618 bp, Homo sapiens
cttaaaatcaaaacatctctgtgtatattcacattatcctgagtcttggcccagtggttgcaaagtcattcttcaagtctccttatcatgcagacggggcaacaatcccagaaaaaacagacacaagatagaattcaggtctctatctccagcatgaatctctttgcattctctgttctgtcttctaaaggggtctttcagcctcactcaaacataacctagaggaatataaacttgcacctttagcttctgagaaaggggacagccctgggattaattaaaatcctacacactgattaaaacactstagcacctcaggatcagttatgaaagcttttcatcatgcaacctcagtaaaaaaaaaaaaaaaactcagtaaacagctcccatttccaacctgtattttgagaacaaaagatatctgtcaggagggaggaaggatgggggctggccacgaggattgtttttctgtggctgcagtagaaaatagtctggtttgaattgttgtaaagtagaaaaacaaatggcatgtagctgtgcattttaactcacaatatcagtttgaaaaaaaaaaaaagttgttttctcccatgactcaatggagcgttgcatttggca

SEQ ID NO: 468588 - DNA, 610 bp, Homo sapiens
accccattactggcatccccacaaaggaaatgtcagatcaggcattatttacaatctcaagtttactttttcactgaagcctttcatggccctgtccacatttcaagtgacggggcttcaaaccaaagtcatttacactccatctcatcacatgcaaactttcacttcttaacatctttaataccagagccgataagtcttctcaaccaaaattgtacttagagaactgagggttctgttaatgtattccctggcaatgaacaatgtgcatgggctaatattatttattcaatgttattataaatgtttgaaaaacaaacaggagtkattgcaaactggttccagccacataactggcgccagatgattttaagcaagttagaaggatacatacacattacatgccatggaactcctgtgtctgcacgggagaccatctgaacttgctaagtctgaaagtttccattgctttgtttttatctaagtttgaccactttgaacaatgagacatatttgccagcttttaatagaagagctaagatacataaggctgtgtctttatgagaatgtcagaatcagattttcttgaatgtcactcctttcttcaagc

SEQ ID NO: 468589 - DNA, 509 bp, Homo sapiens
acctcacaataaataaaaataaataaatagaacaaagtacaaaaagtaacgagtaaaacaatattatactgatttctggatgcagagtagagaacaacgtggkagggaagacagacctgagaagttgcttttgcaattctcagaggacatcttgtcttgaatttggtgtcggcagtgggaatagaaaaaagatttgggagacactaacaagatttgatctgtaaaactgggtaattttttttaagtccaccaaaatattttgctcaaaagacacaaaaacagtttttggtacttaaaaaaaaaaaaggcagcaaagtgaggttgcaactcatagaattgaccttagttgtaatccccactccgtttgcttaacccttttattacaattggtgccactttaacttttctatgttttagttaccttttctgtgaatgggataaataacactttacaatgtttctacgagtattaaagaaaaacttacagagtagctcctagcaggaagggt

SEQ ID NO: 468590 - DNA, 598 bp, Homo sapiens
gagtgacattcaagaaaatctgattctgacattctcataaagacacagccttatgtatcttagctcttctattaaaagctggcaaatatgtctcattgttcaaagtggtcaaacttagataaaaacaaagccatgggaaactttcagacttagcaagttcagatggtctcccgtrcagacacaggagttccatggcatgtaatgtgtatgtatccttctaacttgcttaaaatcatctggcgccagttatgtggctggaaccagtttgcaataactcctgtttgtttttcaaacatttataataacattgaataaataatattagcccatgcacattgttcattgccagggaatacattaacagaaccctcagttctctaagtacaattttggttgagaagacttatcggctctggtattaaagatgttaagaagtgaaagtttgcatgtgatgagatggagtgtaaatgactttggtttgaagccccgtcacttgaaatgtggacagggccatgaaaggcttcagtgaaaaagtaaacttgagattgtaaataatgcctgatctgacatttcctttgtggggatgccagtaatgggg

SEQ ID NO: 468591 - DNA, 625 bp, Homo sapiens
tatcatcttgatagattgaccctttttcattgtgtaatgctgttttctgtctctgatgattttctttgctctgaagtctattttatcttacattaacatagctatttttgttttccttcaataaaaattcacatgatatattgttttcatctttctacttttaacctgcctgtattttgccattagtttaatggcaaaaaccacaattacttttgcataaacccctaatatttggagttttttatatatagcaaatgactgggtcatattttttaaagcaactctgccaatatttgtattttaattgttgtacttaaataatttacatttgatgtaatattgctgttagaccttaagtctgctacttgatttgatttgatcttttggtttcgcttgtaatgtttttcatttttccaatttctttccccagccttcccatgggttactgaacatttcttagaattacaatttgatatacctttaatatttttaagagtgtatctttkgtggttcctctaggtaatatattaaatcatttatacagaagttattgcagtctactgttgccatcattttactaggtggagtaaggtataaaaagcttacctctctttatgctgcttta

SEQ ID NO: 468592 - DNA, 625 bp, Homo sapiens
tatcatcttgatagattgaccctttttcattgtgtaatgctgttttctgtctctgatgattttctttgctctgaagtctattttatcttacattaacatagctatttttgttttccttcaataaaaattcacatgatatattgttttcatctttctacttttaacctgcctgtattttgccattagtttaatggcaaaaaccacaattacttttgcataaacccctaatatttggagttttttatatatagcaaatgactgggtcatattttttaaagcaactctgccaatatttgtattttaattgttgtacttaaataatttacatttgatgtaatattgctgttagaccttaagtctgctacttgatttgatttgatcttttggtttcgcttgtaatgtttttcatttttccaatttctttccccagccttcccatgggttactgaacatttcttagaattacaatttgatatacctttaatatttttaagagtgtatctttggtggttcctctaggtaatatattamatcatttatacagaagttattgcagtctactgttgccatcattttactaggtggagtaaggtataaaaagcttacctctctttatgctgcttta

SEQ ID NO: 468593 - DNA, 261 bp, Homo sapiens
ttgatttgatttgatcttttggtttcgcttgtaatgtttttcatttttccaatttctttccccagccttcccatgggttactgaacatttcttagaattacaatttgatatacctttaatatttttaagagtgtatctttggtggttcctctaggtaatatattaaatcatttatacagaagttattgcagtctactgttgccatcattttactaggtggagtaaggtataraaagcttacctctctttatgctgctttaa

SEQ ID NO: 468594 - DNA, 602 bp, Homo sapiens
  misc_feature (1)...(602): n = A,T,C or G
taaatgaacagtacaaattagaataacttttctggggtcagggagagtatataaatcttttgactatgcttctngacttaaaatagtgaaacaagagagttcccttggcccctttgcaggacttgtgaaaggggtggctcgtttacttggccrttgtgctcaaccccttatgggagggaacacgcaagcagacaggtgtgggaaccagagtgaacaaacactggaaccaccagccanttctctccagtgggaacaggccctgtttaggcctcatggcagcatccacatggtgttacaattgctcttttatctctgcctcttgggaagggatgcctgggacccctggaaccccagagggcatgctaacagctcagtgaggcatttacctcattgtatgggccagcttccctctaccagtgaggactaggggccagtgtgacagccttttttagttcccccacccagggtgtcctgaattcttgtccaatgtccaagagaaatgaggtcacatggacctaaaggatggtgaatgcggagattttattgagtggtagaagtggctctcagtgggatagggagctggaaaggggatggagtgggaa

SEQ ID NO: 468595 - DNA, 466 bp, Homo sapiens
tctgggaaaggtagacatgagcttttctatacacaaggtgttgaaaaagcatcagggactgtagatcccaggatttggcagaagggttataacagatgtcaagtgtcatcacagtcattctggctggaggaactgtacctaaagagttcacattcatgggctggtttccacttgctctttcaaatatgggtaaaggaatagagargtggtttccattcttttctatttgtgtatcaaagggtggactgttattggtgcctgctcagacctttgctgacttgtggaccaagcctagaggaatgagagcagttggaaaatactactaccagctacacacatgcaaactgcagtgagcattctagataccatctgacccctcctgtggccacatgttccagtacttgttcatcctctccattacagggagactgtctacctgcctacacactccatagctcttagtgtt

SEQ ID NO: 468596 - DNA, 577 bp, Homo sapiens
ttaatattcacccatttacatttacgctatgattcatgctcctctaaaactctcaagtcaattcagtctttcccttctttcgtttattccccatttagctgttagacttctcttgtactattttacaaaaggctttttgaatgtattggtctttattttttcacatataaaggyttagaagtgagggctgggcactgatcactgtattgggtgatatcccaatgtcccatttccatcctgctcatttctttctcaaagtgtgtttatatgtcagccagctcttcttgtgttttgggcatatatcagagattatcttcaagaattaacatccacagaagctcagcttctgaaagtagcctcctagatgtttatagcccataaaatgcttataggatgtcagtcacactctggcaccacgcatctttgaaacagaaataatcctagcgaccactgaatccttcaatctcattttcgttttaaggttgttgttttgttactctaatttctgttatgatcggtatactgaggcccagaagaatcaataagtcgcccaaggtcatagagtacattaatgaca

SEQ ID NO: 468597 - DNA, 605 bp, Homo sapiens
gattgtgaatcaggcccagaaaaacatgcctttaaccccacagtaatttatgaggagagtagtttcaaaattttgctgagaattggaaaaaaaaaaaagcmaaagaaaagaaaaaagcagcataggagaatgcaagtgcaatagtcattacttttcaagccagtaaggacaagttttgaattaaaaaaagggaagatatgagttatatcacatcaaatttataggatattctttgtgagcccaccagaacaacgtaaagatctttactgaacaattaatttaggtgatttaggacaagatttgtttaagaatttttttggcatcccagtaaaatatagcagacctatagaaatgggcacaaatcacaagtgcatggctgaaaaaatttcacaattttattatcattattattattttgagagagagtttcactctatcgcccatgctggagtgcagtggcgtgatctcagctcactgcaacctccgccttccaggctgaagcgttcctcccatgtcagcctcctgagtagctgggattacaggcatgtaccaccgcactcagctaatttttgtattctttagtagagacagagttttgccatgtt

SEQ ID NO: 468598 - DNA, 605 bp, Homo sapiens
gattgtgaatcaggcccagaaaaacatgcctttaaccccacagtaatttatgaggagagtagtttcaaaattttgctgagaattggaaaaaaaaaaaagccaaagaaaagaaaaaagcagcataggagaatgcaagtgcaatagtcattacttttcaagccagtaaggacaagttttgaattaaaaaaagggaagatatgagttatatcacatcaaatttataggatattctttgtgagcccaccagaacaacgtaaagatctttactgaacaattaatttaggtgatttaggacaagatttgtttaaraatttttttggcatcccagtaaaatatagcagacctatagaaatgggcacaaatcacaagtgcatggctgaaaaaatttcacaattttattatcattattattattttgagagagagtttcactctatcgcccatgctggagtgcagtggcgtgatctcagctcactgcaacctccgccttccaggctgaagcgttcctcccatgtcagcctcctgagtagctgggattacaggcatgtaccaccgcactcagctaatttttgtattctttagtagagacagagttttgccatgtt

SEQ ID NO: 468599 - DNA, 443 bp, Homo sapiens
gcagcatgagaatggactaatacaaagaccaaatgaacagtgactgggaaaggactatgcacttatttatctcctctctccttttaggtcwctagcttgagatagagatatcactctatggcccacaaactaggaggttttattcttcagaagccaagagattctttctctaacagagtttcccatggcctggaagataacctatgactctctaacgcagtaagcatggctgctggcctcttctctgttcattctactcatgaacccgatgctctggtcatgtggaattccaaatttgatatgctaaaaatgaagaaacaaaacgaaatgattccttgtatattctgtaagttgattccccacatccccacacagatacaaggcaaatgcaaaacactcagctaagaattcagccatctctgccttgcacatgtttccattgc

SEQ ID NO: 468600 - DNA, 443 bp, Homo sapiens
gcagcatgagaatggactaatacaaagaccaaatgaacagtgactgggaaaggactatgcacttatttatctcctctctccttttaggtcactagcttgagatagagatatcactctatggcccacawactaggaggttttattcttcagaagccaagagattctttctctaacagagtttcccatggcctggaagataacctatgactctctaacgcagtaagcatggctgctggcctcttctctgttcattctactcatgaacccgatgctctggtcatgtggaattccaaatttgatatgctaaaaatgaagaaacaaaacgaaatgattccttgtatattctgtaagttgattccccacatccccacacagatacaaggcaaatgcaaaacactcagctaagaattcagccatctctgccttgcacatgtttccattgc

SEQ ID NO: 468601 - DNA, 443 bp, Homo sapiens
gcagcatgagaatggactaatacaaagaccaaatgaacagtgactgggaaaggactatgcacttatttatctcctctctccttttaggtcactagcttgagatagagatatcactctatggcccacaaactaggaggttttattcttcagaagccaagagattctttctctaacagagtttcccatggcctggaagataacctatgactctctaacscagtaagcatggctgctggcctcttctctgttcattctactcatgaacccgatgctctggtcatgtggaattccaaatttgatatgctaaaaatgaagaaacaaaacgaaatgattccttgtatattctgtaagttgattccccacatccccacacagatacaaggcaaatgcaaaacactcagctaagaattcagccatctctgccttgcacatgtttccattgc

SEQ ID NO: 468602 - DNA, 167 bp, Homo sapiens
gctggagcatcaagcttgtatttctaaccattgcactacacagcttcacagataggctgtgcctagtttatgacagatgcttagtgaatttgctccttgaacaaaggcttaytaagttcttaggacatgcctggtactagatgctggacacagagcagtgatgatcc

SEQ ID NO: 468603 - DNA, 578 bp, Homo sapiens
ataaagtgtgtgtagagaaggaaaagtgtagaatgtttgtatgtgattgaagttatcatcttaaaatagattgttttaagtataacatgttttatactcagcagtaatcataaagaaaacrcttatagaagattcataaaagaaaatgagaaagaattcgaaaggtatcactttaaaaaatgaaccagaagagaagacatcaagagaggaaaagagagacaagagagctacaaacagaaataaaacaagtaacacaataacaaatatccttccctatcaataattagaaagaatcagatctgagtaatattaagtgccctttgcaatgcctgccacagaattcagtaaacagcagttttccacgcttccatgcctaatttttcccactttacatgtgctaaggaaagggaatgaatctcactcattttttatttgcaagactggaaaaatgtctaatctcaaaaaaatatttcttggatgaataaaagagaagctccaatttattaaaatcactgctcttagataagaactaattttggccataattgtggaaggaaagggaattaatttagcagatt

SEQ ID NO: 468604 - DNA, 584 bp, Homo sapiens
ctcttttcaaataaggtcacatttacaggttccaggtggatttgaattttgggtttcactgaacccattacaacaggcttagagtatactaacctggatttaaatctcagcttatatacagactacacaatttgtactctctgtgccttcacatcctctcttgtaaatagggtcatgataatatgtttctaacactgttggatgttaaagtgtgaatgttcaaggcctgtcatgtagcaagcagacactccacacatggtatattttaaggcaaattctggccttttcacatttaatatttgtaaaaatgaaagctaacgaacaaaagaaagagaaagaaagaaagaaagaaaaagaaagaaagaaagaaggaaggaaggaaggaaggaaggaaggaaggaaggaaggaaggaaggaargaaagaaagaaagaaagaaagaaaaaaagaaagaaagaaaaagaaagaaacaaactcagatttaatggaaacttccctggattgggtctcagaagttcttttccaaattctgtcactaaccaggttattctaatacatttgagcatttcttctgccccccttggc

SEQ ID NO: 468605 - DNA, 663 bp, Homo sapiens
gcatgtaacataattttggtcaatgaaacatgtagggaggtctgataggcagattcttggaaaggttttcatgttcttcaaaagaaaccaacaaaagcttccatcacccactggacatttttatatcagtaggagacacttgtaactgggtggctgttttagatttaccaagggaactaaagctaggttagaagatggggaaggtagaaagaatgtgagtcttttatgacattgttgrgctgttaaattaattggccttgcagtcatttcacctccagacttgtgagataatacattgtctttattattgaagtaatttgagacaaggaattctaaaggcagtcaataacatcctagtcaataaaatatccaaaaagtaataggacaacgaggaaggagagcagctcattagatgataccatcagggatggtttcatgaaggatctaacatttgaatcttgctgtggaagaagggtatacatttaacagacaaaatcagacataggaaacaacactagaaaaactacaaaagatgtagagctctgggtatagctggaggaaagtaaggaatcaaatttggctaaagctaggttttacaagagtgattaattgaacagaaagcaggaaatgttctcaagaaacagaacataaaaagttttgaat

SEQ ID NO: 468606 - DNA, 663 bp, Homo sapiens
gcatgtaacataattttggtcaatgaaacatgtagggaggtctgataggcagattcttggaaaggttttcatgttcttcaaaagaaaccaacaaaagcttccatcacccactggacatttttatatcagtaggagacacttgtaactgggtggctgttttagatttaccaagggaactaaagctaggttagaagatggggaaggtagaaagaatgtgagtcttttatgacattgttgagctgttaaattaattggccttgcagtcatttcacctccagacttgtgagataatacattgtctttattattgaagtaatttgagacaaggaattctaaaggcagtcaataacatcctagtcaataaaatatccaaaaastaataggacaacgaggaaggagagcagctcattagatgataccatcagggatggtttcatgaaggatctaacatttgaatcttgctgtggaagaagggtatacatttaacagacaaaatcagacataggaaacaacactagaaaaactacaaaagatgtagagctctgggtatagctggaggaaagtaaggaatcaaatttggctaaagctaggttttacaagagtgattaattgaacagaaagcaggaaatgttctcaagaaacagaacataaaaagttttgaat

SEQ ID NO: 468607 - DNA, 663 bp, Homo sapiens
gcatgtaacataattttggtcaatgaaacatgtagggaggtctgataggcagattcttggaaaggttttcatgttcttcaaaagaaaccaacaaaagcttccatcacccactggacatttttatatcagtaggagacacttgtaactgggtggctgttttagatttaccaagggaactaaagctaggttagaagatggggaaggtagaaagaatgtgagtcttttatgacattgttgagctgttaaattaattggccttgcagtcatttcacctccagacttgtgagataatacattgtctttattattgaagtaatttgagacaaggaattctaaaggcagtcaataacatcctagtcaataaaatatccaaaaagtaataggacaacgaggaaggagagcagctcattagatgataccatcagggatggtttcatgaaggatctaacatttgaatcttgctgtgraagaagggtatacatttaacagacaaaatcagacataggaaacaacactagaaaaactacaaaagatgtagagctctgggtatagctggaggaaagtaaggaatcaaatttggctaaagctaggttttacaagagtgattaattgaacagaaagcaggaaatgttctcaagaaacagaacataaaaagttttgaat

SEQ ID NO: 468608 - DNA, 663 bp, Homo sapiens
gcatgtaacataattttggtcaatgaaacatgtagggaggtctgataggcagattcttggaaaggttttcatgttcttcaaaagaaaccaacaaaagcttccatcacccactggacatttttatatcagtaggagacacttgtaactgggtggctgttttagatttaccaagggaactaaagctaggttagaagatggggaaggtagaaagaatgtgagtcttttatgacattgttgagctgttaaattaattggccttgcagtcatttcacctccagacttgtgagataatacattgtctttattattgaagtaatttgagacaaggaattctaaaggcagtcaataacatcctagtcaataaaatatccaaaaagtaataggacaacgaggaaggagagcagctcattagatgataccatcagggatggtttcatgaaggatctaacatttgaatcttgctgtggaagaagggtatacatttaacagacaaaatcagacataggaaacaacactagaaaaactacaaaagatgtagagctctgggtatagctggaggaaagyaaggaatcaaatttggctaaagctaggttttacaagagtgattaattgaacagaaagcaggaaatgttctcaagaaacagaacataaaaagttttgaat

SEQ ID NO: 468609 - DNA, 386 bp, Homo sapiens
taactcctaataggtttccaaaatggacacacacacatgcaccctttggatctcacatatctgttgcttcataattaatgaaacactgtgaagtgaaattgttcactgtgctctgttctttttgtaaagctttaaaatatgcatatttgttatatcataatgtgtttttaaaaagtttagcttgttatggcaattggygaaattggcagcttctcttactttgaggtgatttcagaaatcatgatgtccaggaaaaagagagtgaggggaaaatatattttttggaaaatgctgctgctctttcttaaatacagtgatgcttgtttgtacgtgtggtaaaaagccaatgacccagctttgcaacaaaactcactaaggaatcccag

SEQ ID NO: 468610 - DNA, 632 bp, Homo sapiens
aaagtttgattctctcagtttacaataacttatgcttgctgttaatttacaattgaccaaaagattttgaatataatgtatttaattcttccaggaatcacacaaggtagatattatcatttccactttacagatgcagaaagcaaggcgtagagatgatcacaaatttcccaaccattgagtgacagagctcagtcatgcagaactcaggtttgcatgactcaaattaggcacaagttcttggaattttccataagggataactgcatcttttgcaccttcacaactagaaacgactcagcgactttttctrtgagcaaatgtcgaggtcttaactgctttagttcgaggaagttccttttttcttttcaaaaatcaggttgctggagatggtacacaaaataagagaaagaaggcctgattcattctgtcagctcaacttgtagtcacttgacatgcgaaaattacagatgacagcttttctatctgtgattctgacacactaaatcataaatgtgcctctcacgtctttgctgaaacagcaggaacaatgagtgtccaattgctgcactggtaagcagtcaggaccaaaattattagaggtatcagtgtaagtaatattcatcccaccc

SEQ ID NO: 468611 - DNA, 616 bp, Homo sapiens
taaagaaaaaatatgcatttcatatttacataaaaggacacatggcaaggttgtttggctttcaaggatcatgaaaagtgcccagcatggtgtgtagtagatatgaaccacataaaaacaaatgtgcttgattcaaaatggtataggtattttatcttatatcaattcatgttcataagtaaattcccattctacagtataagctcttagaagacagaaatcgytttcttttttctctctctacccctcctcaaatcaacataagtgaaaaccctgggccagagagaaaggaaggcctgagctgatagtccagttgggattggtgtgggcaagtcctatcacttcaatatgcctcagtttcccttaactgtaaaatagggataatgatgtttacattgtaccttaaggagtgattgtaaggattccatgagaatgttgtgacagcaacctgcatggaaacttgcagctatattttcattacttgtacatccccagccctttgctttttcagcaaagatcgtgtctcacaaaaagtgtgtcattagtgagcatgagcataactttgatcagggataagtggctctgacttgattggtggaagtttctacattggttg

SEQ ID NO: 468612 - DNA, 598 bp, Homo sapiens
tcttttttctggacttttattatttttgttctggcttcttgttatagaagaactaaatattaaaaaaatagctgtactagtrctatcagtattaaaactgaaagcttccagtgggtattaagttctgtcattggtgatatgctagcaatgacaagtatgtatcagatggtgagtgagactaaatgtccttgacttttgtcttttgtgaggatgatatttgtgattattaactccctttgtaatggcctgacttctgtctccagtgtgatttaatatagcattattagactgtatgtgtgttgtgtgtgtgtgtgtttgtgtgtgttaatgagagcacagtggcctttctgatacctctactaagatcatcaccatttttatctttatggggccatttaccccaagaatcttgtaattggaaactttttatgaagaagccatgtttcattttaaataagacaaccacataaaatattaccaagtgtgtgtcttgagtttgctttgggcacaaaactattttgaaaagctggcaactagaagcagactagtaaagcaaaatcctggagtcttcagaatgtacatgtgagatctaattcag

SEQ ID NO: 468613 - DNA, 538 bp, Homo sapiens
gctctccctggaactctggctgccacctttggaatgaaactggatcataaacccttttaagtctcaagcatgctgatccacattttagatttggaatatagagaaacagatggatagatagatagatagatagatagatagatagatagatagatagacagataccctctcatcctattgattctctttctctgaaaattcctaattaaataaatttgaagatacaaaagtacaaaaatataaaaatatgaaaaataggagaaaatacataaaatcaaactttttacaccataatctgtttaattgtagttccagaaatagaagacaggtgaaaaggaagaaagaaaaatgtcagggaaaagtgacaaatccctaatctaaacaattttcatgttgaaagtgccccctaggtctactacaaatagatcagaggcaggaaattatggagcacagataaaattcagcctgccgtttatacttctaaataaagttttattgaaaaacagccatgccyacttgtttaatattgcctgcaatt

SEQ ID NO: 468614 - DNA, 543 bp, Homo sapiens
cagtgtatatgacccagtaccgagcatataggaggcatagaacaacctggatctgttattactgtacaatttatcagagcattcaaagcgcttttgtaataattgactcatttatttttaagacaattaggatgcctaataaaacattgataattgcaatggttttataagttaagtcaattgttttgggacattaagctataaatcaggagagacagcagttacatgataaatacaaaatccaaactcctatatcctctgacttgaagtttaaygctatgctcaaaagactagctgtaatgcgcagtggtttgtgcatggctggaaagtaaaaacctctgggaattaaagtactggtctaaataggcagattgcaagcaaatacattaacatataattaataaatcaatcaaattatttctggccacaacaacatctcccacctcaaatgctatcttgcaatgtggacttgtcattctctcatcaataggtaatgctctttcctctttaattaaagctgagctggtcatttaatttgatttg

SEQ ID NO: 468615 - DNA, 496 bp, Homo sapiens
aatgtatgtaagacctcatggacctacattcaaaactagcacagtcacttctgccacattytactggcaaagcaaaatccaaggctagcccagatttgagggttagagagaaagactccacttaatgggggaagctgttaagtagcatttcaaaagatgtggatacaggaataagtggaggtattagaaccattttgtaagcaatctgtgagagttctattttctttcttcctctttcaagtctcctgaatggtcttgccaattgtgagtttcttgaagtcaggggctacgttatatacatttctatttttcatatttcctaagcatccaatgaacattaccactatcatcactaccattcattaagtgctggctatattcaatgctctgttttaatcactttttaatacatcacttcgtccttatgactattctttttgtaattactgctcttgactatcttcccattcctatatacttagtaagttcccagtat

SEQ ID NO: 468616 - DNA, 591 bp, Homo sapiens
ggatactccattctgaccgtgggtggcccagcctgaatcaggataaaaccagattctcttgctctaagcattccatttctattaacatatcctagtttgaaatagtttggttttacagccacagcacactggaaactccaagtgaacgtaaaagcagttcaacctcttaatatctattaatttgaaagggaggtggtgttgattgtagcaactattgaataaagcagacatataggtgattacaaagttttgttcagtacagctctgacctcaaagtaatatttagctttgtggtctcctggcttaaagagtcctctctgtactcagataagttgataaattaaggtaggagaggtgaagggaaacagtaaaagatgaattatagtaactatttggcaaaatttgcaagaaagttaaaaatattgaaaggtccagaccaaagaaaaagaattmcaaaccaaagtaagaagagagcataactagtatgacctggcatttggcatgcgtcttctctcttaattctcatatcatgaactatttttaaagtgcagaaactaaagaatttgaaaggttaaatgacttgtccatata

SEQ ID NO: 468617 - DNA, 650 bp, Homo sapiens
ctctttaacacactactctttgtctgtattggtagcaaagtataattcccacaactggatactccattctgaccgtgggtggcccagcctgaatcaggataaaaccagattctcttgctctaagcattccatttctattaacatatcctagtttgaaatagtttggttttacagccacagcacactggaaactccaagtgaacgtaaaagcagttcaacctcttaatatctattaatttgaaagggaggtggtgttgattgtagcaactattgaataaagcagacatataggtgattacaaagttttgttcagtacagctctgacctcaaagtaatatttagctttgtggtctcctggcttaaagagtcctctctgtactcagataagttgataaattaaggtaggagaggtgaagggaaacagtaaaagatgaattatagtaactatttggcaaaatttgcaagaaagttaaaaatattgaaaggtccagaccaaagaaaaagaattccaaaccaaagtaagaagagagcataactagtatgacctggcatttkgcatgcgtcttctctcttaattctcatatcatgaactatttttaaagtgcagaaactaaagaatttgaaaggttaaatgacttgtccatatagcc

SEQ ID NO: 468618 - DNA, 587 bp, Homo sapiens
  misc_feature (1)...(587): n = A,T,C or G
gctggaggcttggagaattattgcattcagttccttgcgtttacaacagtgattctccgtcacttgatgattcaagccccaacatctcacctcagagcctcctgccatctactgctcactccacccaaccattttagcgaaacgtttccacttcctttggtataccgtgaatttcagtctaaatgaactgttcttaatctagaaaaatttacctctgtctkgttttangctgtttctactgctcagagcactatacttatcactcacattttttgatatgtgtgctttctcaaactattaattcattcaacagatattgctgagaacttattctgtgctaggcactgcaccaggcacagagatacagcaaggaagggctaatattctctgtccttgaagcacttaacatacaccaaggtagtcaggcattcaacatgtgattgcaaaatgtgtgctcacttttgtaataaagtatgggacactaaggatacctgtggaaggaaaccaacattacccagctatcaaaaaaaaaagcctccctaagcctttctcgttctttaaaccactatttggtcttcctctgctag

SEQ ID NO: 468619 - DNA, 637 bp, Homo sapiens
ttcacagatggggtaactgaggcactgggggcagaaaatcacttgtccatttgactccagattctgtgtgcactaatctagtcacgtggccatacttcttcccttagccatcatgcccttctcctgcatgtaacctatttggtggcttttccaaagttttcaagatgaagtacaaagttcatggcaacaaagaaaaaagtgtccaattatctggcccttttcrgtctgaggactttttccttgcaatagggagccatagaatgtttggtattcaggagttacatggtgggatctgggtttgagagagatttactcggttattcactatactgtgtttgttaagagacattgggctcttccacttctccaaatgtgttaaagacttccctaaggtgctggaaaggagattggcaaaaattactaaggggatttaaggcagcttctgtatagaacctccctcacaccctgccccttccctaagctggattctcaaagccatgtatatagctgtccagcacctgcccaaatgtatttaatgtttgtttgataagaagaaaccagtatatgctgcaggattcccagtagcaagtttattttaagattggaagagccctgtactcctctgttctggggccca

SEQ ID NO: 468620 - DNA, 637 bp, Homo sapiens
ttcacagatggggtaactgaggcactgggggcagaaaatcacttgtccatttgactccagattctgtgtgcactaatctagtcacgtggccatacttcttcccttagccatcatgcccttctcctgcatgtaacctatttggtggcttttccaaagttttcaagatgaagtacaaagttcatggcaacaaagaaaaaagtgtccaattatctggcccttttcagtctgaggactttttccttgcaatagggagccatagaatgtttggtattcaggagttacatggtgggatctgggtttgagagagatttactcggttattcactatactgtgtttgttaagagacattgggctcttccacttctccaaatgtgttaaagacttccctaaggtgctggaaaggagattggcaaaaattactaaggggatttaaggcagcttctgyatagaacctccctcacaccctgccccttccctaagctggattctcaaagccatgtatatagctgtccagcacctgcccaaatgtatttaatgtttgtttgataagaagaaaccagtatatgctgcaggattcccagtagcaagtttattttaagattggaagagccctgtactcctctgttctggggccca

SEQ ID NO: 468621 - DNA, 637 bp, Homo sapiens
ttcacagatggggtaactgaggcactgggggcagaaaatcacttgtccatttgactccagattctgtgtgcactaatctagtcacgtggccatacttcttcccttagccatcatgcccttctcctgcatgtaacctatttggtggcttttccaaagttttcaagatgaagtacaaagttcatggcaacaaagaaaaaagtgtccaattatctggcccttttcagtctgaggactttttccttgcaatagggagccatagaatgtttggtattcaggagttacatggtgggatctgggtttgagagagatttactcggttattcactatactgtgtttgttaagagacattgggctcttccacttctccaaatgtgttaaagacttccctaaggtgctggaaaggagattggcaaaaattactaaggggatttaaggcagcttctgtatagaacctccctcacaccctgcmccttccctaagctggattctcaaagccatgtatatagctgtccagcacctgcccaaatgtatttaatgtttgtttgataagaagaaaccagtatatgctgcaggattcccagtagcaagtttattttaagattggaagagccctgtactcctctgttctggggccca

SEQ ID NO: 468622 - DNA, 551 bp, Homo sapiens
aaacagtgcattgccctgtccctagggcagttgaataaaactgttggagggagaaatgcaagcgttctccctcagaaccaggtcttaggtcacaccctggaaaagagagattaggatcaaaggtccttagatctaaagacacctgagagattgtgttccaagctcccttagcctcagactcaactcccatttatcaaccacctgcaggattttatatccatacaatgtctcatttatgcttgaaaagaagttctcatattgatcagaagcatggccttgaagtcaggactgcctgggttcaaaycccagatgtatccctagctttgtgattttgaaataattatttaccctctgtcagctttaatatcctcttctgtacgataaggaaaatagtagtgcgtactccaaaactccagagaaggaaaggggtttaccgtgtctaaagcacagtgcaccaatggcagcatggagtgggagatgttactactcatattttcagcatgcacactaccctggtttgttcccaggtctgcctgactccctggcctgtg

SEQ ID NO: 468623 - DNA, 604 bp, Homo sapiens
atttgttcactcatccaagtatttattgggagcctgggatgtatcaagaattcactgaaactcaggtggctttatgtgtatcacccacaatgaaacatctaaagcacatagacgaaataatgaatgaccatcaaggtcagcatggttcctgaattcatcccagaacatttgtaaccccagtgtcagtctaaagccagtcatgtgactcaaagccactatgcgtggattgtggtcatcctaagggaatgcctccattagcagtgctgaggaagcctttctctccactcctacttttctgcatttgagtatatttgtataattgttattattgctactccaagagtaactcatgtatttaaaatatgtagaaaatttagaaaaccagaaagagtaataatagggggtgggatcaatcatcctatattccattgcccagaaattgctgctgataatattttgtttcatagtgttatttgaacattgagatattgctatagatttagctttggatrttactttttcatttaatattatagcttacacattttccatgaagttgcataatatttataaatatttctgcaataactgcttgccattccat

SEQ ID NO: 468624 - DNA, 640 bp, Homo sapiens
ggatgattatttgttcactcatccaagtatttattgggagcctgggatgtatcaagaattcactgaaactcaggtggctttatgtgtatcacccacaatgaaacatctaaagcacatagacgaaataatgaatgaccatcaaggtcagcatggttcctgaattcatcccagaacatttgtaaccccagtgtcagtctaaagccagtcatgtgactcaaagccactatgcgtggattgtggtcatcctaagggaatgcctccattagcagtgctgaggaagcctttctctccactcctacttttctgcatttgagtatatttgtataattgttattattgctactccaagagtaactcatgtatttaaaatatgtagaaaatttagaaaaccagaaagagtaataatagggggtgggatcaatcatcctatattccattgcccagaaattgctgctgataatattttgtttcatagtgttatttgaacattgagatattgctatagatttagctttggatattactttttcatttaatattatagcttacacattttccatgaagttgcataatatttataaatatttctgcaataactgcttgscattccattaagcatattaaccatgggctatttaat

SEQ ID NO: 468625 - DNA, 600 bp, Homo sapiens
tgcatctgagaatgtgaaaaagtttggtatgttcacagagtggctgttttctaaatctacttcagaggcttatagggttcctggagacgtttatagggtatcctcaaagtcaaaagtattttcatacaattacatatgacatcatttgctttttccactctcattctctcctgagagtccagtggagctatctgatagacacatgacatgtgatgtcatttgtgctctgatagctaatggarcacactcttctgtattcttgaatttttaaatttcttagctttagtttataaagcagaaactactaatagatataacctgcataagcaaaagttcagtaaggctataagagtttaagtaggttcagaacatgtaaaacaaggtagaggtggcagaggtaagacagatgagatagataatggccaggtgaggacgggtttggattcacagcaagggcagtgagaaaaccatgtgctttatgagggcatgatatatggtaagacctgcatgtcataaagattgctcagactgctgtgtgaagaagagatcaagaggatttggttgctagaggaagggaagcagcaaggtgactgttgccaa

SEQ ID NO: 468626 - DNA, 600 bp, Homo sapiens
tgcatctgagaatgtgaaaaagtttggtatgttcacagagtggctgttttctaaatctacttcagaggcttatagggttcctggagacgtttatagggtatcctcaaagtcaaaagtattttcatacaattacatatgacatcatttgctttttccactctcattctctcctgagagtccagtggagctatctgatagacacatgacatgtgatgtcatttgtgctctgatagctaatggaacacactcttctgtattcttgaatttttaaatttcttagctttagtttataaagcrgaaactactaatagatataacctgcataagcaaaagttcagtaaggctataagagtttaagtaggttcagaacatgtaaaacaaggtagaggtggcagaggtaagacagatgagatagataatggccaggtgaggacgggtttggattcacagcaagggcagtgagaaaaccatgtgctttatgagggcatgatatatggtaagacctgcatgtcataaagattgctcagactgctgtgtgaagaagagatcaagaggatttggttgctagaggaagggaagcagcaaggtgactgttgccaa

SEQ ID NO: 468627 - DNA, 608 bp, Homo sapiens
ctgcggaccgcggtcgaggcatgctgcgggggtggctaccttgtcgccgcggcctcgccgccagcaagctccgctccatggctggccgactgcggcactcacggcccctcccccgcctcgccccggcggccggtctgccgcccgcttccgcgttgcgcgctcccatccccgccggaagcggcgtcggagcagcgcggcagggcgcggaaacccgggcgggtggagtggcaccaaacggagtgagaccggtctgtccagccgctccccatcccaacccaccgacgtactccaccagggagaccacacccttcataaccaasgtccgcgtttttgcctttgttgcttcggtcacagcccgaaggattttcccttatgactagatgaccccttaaaaaaaaacaaaaacaaaaacaaaaaaacccagagtgaccaagacctgcaaactcaccttaactgcaactggctaggctcagctaacccactccacaatgatgctgcacaccaaccccagggtgttggtctctaaactggtctgggtcagcccctcaaggctgaactgttttaccctcacatttctctttacagagagggacatcactagctacata

SEQ ID NO: 468628 - DNA, 548 bp, Homo sapiens
ccaagatcacaaactcaattttgtcagtgcccagaactgactgcccaagttattataaaaagaaactaatgcttacattggtagcatcacatcaacaccagcactagcacccatgccatctgaactcatgaaccaaagtgatttggagagtgaaggaggaactgaatactgagccctgcccctcattttgtccaactagaacatcagaatgtggccctatttggaaataaggtcgttacggaaataattaggtaaaatgacgttatatttgattagggtgggctctagatccaatgacaaatcatgagagasacacgaagaggaccatgagatgacagcaacagattggagtaatgcagctacaagccaaggaacactaaggattactgacaaccaccagaagacaggaagaggcaaggtaggattcttaagtgcctccagcgccaagagtaattttctgcttagtttatatgaacttgttacagtaggctccaggaaactaaaacaaatggcagttcctatctgcaagaaagagatcaagggttggc

SEQ ID NO: 468629 - DNA, 594 bp, Homo sapiens
ggccatggagctcaggaactggktggaagcccttgggatgaccacctctcctttaggaccccagcagagggaatacagagggcaatcaggactgggtcattctctctgtctttctctctcagtcagaaacagggtttctaacctacctggatgtgtcagtggggaagattgtggcagctctgaatgctcgagctgggcggctcgatgttatgagtcagaacccttacaatgccgtcatccatctcggacacagcaatggtcagtacctggcttagttttgactctgaccatcctgacttgcttttcttctatatttgtacttcatgagtcccttaaagttacccttttatttcccttttttgttatctcttggtcttgagttcccatctttcccatgtttagtaacctcaggcttaggtgtgtattagcaactttggttcttcttctcttccaggtactgcgtctttatggagtccagctatgaaggagccactggcaaagattctctgtcatcgtggtggggtccgggctgtggcagtagattctacaggcacgtaagtcactggtggcggtgaggtgttaggagtcataggt

SEQ ID NO: 468630 - DNA, 594 bp, Homo sapiens
ggccatggagctcaggaactgggtggaagcccttgggatgaccacctctcctttaggaccccagcagagggaatacagagggcaatcaggactgggtcattctctctgtctttctctctcagtcagaaacagggtttctaacctacctggatgtgtcagtggggaagattgtggcagctctgaatgctcgagctgggcggctcgatgttatgagtcagaacccttacaatgccgtcatccatctcggacacagcaatggtcagtacctggcttagttttgactctgaccatcctgacttgcttttcttctatatttgtacttcatgagtcccttaaagttacccttttatttcccttttttgttatctcttggtcttgagttcccatctttcccatgtttagtaacctcaggcttaggtgtgtattagcaactttggttcttcttctcttccaggtactgygtctttatggagtccagctatgaaggagccactggcaaagattctctgtcatcgtggtggggtccgggctgtggcagtagattctacaggcacgtaagtcactggtggcggtgaggtgttaggagtcataggt

SEQ ID NO: 468631 - DNA, 509 bp, Homo sapiens
tgccctctctgggccactgggccaaagctgtagcttgccctccgtgggctacctgggtcagccactcctgtgcttagggcttaatcactagttcgctgaggcctgaagtttaatcaacaccttgakgctaaacagctctggtccttgtgatcttcagcccatccctgcttttctctggtcctcctcaggagcttgtcaggccacgggggctccagtgatgaggctgaccatctttcttaagaggtgttctggtagcttgtattatgattggattgcgttgacttctcaaagccgaactgctgcttactagtagtacagtagactcccatttggcactgggctggtctttacccaggggtcccatagatgggtgtgtggaggggagaagagccagcatgcatccttgagttgttagttcaccaaaggatgtgaccctgtgttccacgagcgctcggtaattcctggtttgcactgatggcctttctctttggtaaagtcagggcgctgat

SEQ ID NO: 468632 - DNA, 531 bp, Homo sapiens
aaaaaaaagcaaacaaaaactacaagcaattgagagcctgggaagtgtctagtagggaaaccaggaattgtatctgtgtttgtgtgactaccccacattcctgctggttctgcctcaacaaaagctttcccccatcactccatccacagtgatctcacccggctgcgaatgcctagaatgcttgctctctgtaccaacattccatttgtttgacattcatcatggggatctgctgagtcttcatatgaggaaaagtacttgttaagctctaagatatcaaataaatgttagttaattatgttattagataagtaggtagatagataataaatagatgsacacacacatatagctacagatacagttacagttttgtatacttatatttatgtgctgatctcttaatttcccttaacttggttataaacctcttaagacccatattttatacacctttctgccttccactgctcttagttggaacacatttgacaatctactgatgttttaagtgtaggaactagcctctac

SEQ ID NO: 468633 - DNA, 661 bp, Homo sapiens
ttcagcaacattaagtaactggcccaatattgcctagttaataagtagcagagctggcacttaaacccaatttcgtctaacaccactagattacaatatgttctttttgctattccgtgtttcctttctatctcaaacccatctcaagtcaccaagtagttattgaggatctactgaataccaggtgcagctaaaaagctttcwctttgtcattccctacccccaggaccctggtgcagtcccttcaccctgctttcctttctcagatgctcccatttccaaatctctgcctccctttcccctgcccattctgcctccgccagtgcccattcttgccgtcccccgttctgggcctgtggtcagcagtgcagcagtacccaggtgaggcagcaggcctgactcactcctatgtcagggattgtaaagggcgcgggccagggctttgctgtcgctgtcgtcactgcacaattgttcctgattcagcggcggatcacctgagccacacctgagtgcccccaacctcctctttgaagagcaaacatgggggcctctaaaggaacatggctagataaacagacctctctgcagatgaggtttagctcctcggaggagacagatttaagaatatttattaagttcctactaggtgacagccaagtac

SEQ ID NO: 468634 - DNA, 611 bp, Homo sapiens
gttggccaggctagtcttgaactcctgacctcaggtgatccacccgcctcagcctcccaaagtgctgggattacaggtgtgakccaccgctctcagttctacccccaggtcttcatcccctcatttctcaaccccatatctcagatcctccttctcccacacctcatcccctgatctcaccaaccagctcaaccacatcttcctagaagtgaagagtttcagtttctcaacccaacccctgttcctctggaactggagaaaaaactcagtgaagcaaaatcaagacatgactccatcacagggagcctgaaaaaattcaaaggtaaggaagaggctgtattttctctattcacctacttccaggagattctctccctgctcactccactgaaatggaactgtgactcatacatgccaacaatccctgggcccttctagtgccaggcttctggctgagtactttccacgcatcagtatgcctcctcccaggcatttcttatattctgtcttcgtgatatgttatttatctgcctccctggctcctgcgagagccatagagggcctggacctattccccatgtggacacctggcctagagcagtggctgttgg

SEQ ID NO: 468635 - DNA, 611 bp, Homo sapiens
gttggccaggctagtcttgaactcctgacctcaggtgatccacccgcctcagcctcccaaagtgctgggattacaggtgtgagccaccgctctcagttctacccccaggtcttcatcccctcatttctcaaccccatatctcagatcctccttctcccacacctcatcccctgatctcaccaaccagctcaaccacatcttcctagaagtgaagagtttcagtttctcaacccaacccctgttcctctggaactggagaaaaaactcagtgaagcaaaatcaagacaygactccatcacagggagcctgaaaaaattcaaaggtaaggaagaggctgtattttctctattcacctacttccaggagattctctccctgctcactccactgaaatggaactgtgactcatacatgccaacaatccctgggcccttctagtgccaggcttctggctgagtactttccacgcatcagtatgcctcctcccaggcatttcttatattctgtcttcgtgatatgttatttatctgcctccctggctcctgcgagagccatagagggcctggacctattccccatgtggacacctggcctagagcagtggctgttgg

SEQ ID NO: 468636 - DNA, 611 bp, Homo sapiens
gttggccaggctagtcttgaactcctgacctcaggtgatccacccgcctcagcctcccaaagtgctgggattacaggtgtgagccaccgctctcagttctacccccaggtcttcatcccctcatttctcaaccccatatctcagatcctccttctcccacacctcatcccctgatctcaccaaccagctcaaccacatcttcctagaagtgaagagtttcagtttctcaacccaacccctgttcctctggaactggagaaaaaactcagtgaagcaaaatcaagacatgactccatcacagggagcctgaaaaaattcaaaggtaaggaagaggctgtattttctctattcacctacttccaggagattctctccctgctcactccactgaaatggaactgtgactcatacatgccaacaatccctgggcccttctagtgccaggcttctggctgagtactttccacgcatcagtatgcctcctcccaggcatttcttatattctgtcttcgtgatatgttatttatctgcctccctgrctcctgcgagagccatagagggcctggacctattccccatgtggacacctggcctagagcagtggctgttgg

SEQ ID NO: 468637 - DNA, 537 bp, Homo sapiens
cccactccctgtttcgggcctcgtctgctgggaaagtcacttttccagtatgtctcctggcctcttatgatgagatttctggtcaaggagcgagctctcaggatacgaagacatttgacgttgcgctgtccgaggagctccatgcggcactgagtgagtggctgacagcgatccgggcttggttttgtraggttccttcaagctaagccagctcagagaacacggggagcggtggtgctccacggacttcggagcatagagtggcgctgagtgagtggctgagaccgaccacggttcttgacttagtggaattgggtcgaaggagtggagaatgggagggctcgggctactgagagtggagatgggggcgggggtggtggtgaagagagttggagaaggaatggacgagttcttgagcaaaaggaggggaagagacaatctccagccacccgccccacgcttgacttcttatcactttggctgtggtgccgcctagtggaaaaaggaagtccctgcagcagtccccgcactctttaa

SEQ ID NO: 468638 - DNA, 537 bp, Homo sapiens
cccactccctgtttcgggcctcgtctgctgggaaagtcacttttccagtatgtctcctggcctcttatgatgagatttctggtcaaggagcgagctctcaggatacgaagacatttgacgttgcgctgtccgaggagctccatgcggcactgagtgagtggctgacagcgatccgggcttggttttgtaaggttccttcaagctaagccagctcagagaacacggggagcggtggtgctmcacggacttcggagcatagagtggcgctgagtgagtggctgagaccgaccacggttcttgacttagtggaattgggtcgaaggagtggagaatgggagggctcgggctactgagagtggagatgggggcgggggtggtggtgaagagagttggagaaggaatggacgagttcttgagcaaaaggaggggaagagacaatctccagccacccgccccacgcttgacttcttatcactttggctgtggtgccgcctagtggaaaaaggaagtccctgcagcagtccccgcactctttaa

SEQ ID NO: 468639 - DNA, 505 bp, Homo sapiens
gagaacagaagcagcatctcactccttttcgtttcactctcccaccctccttgagcactacagggcctggttcctaaagggatgtaaatgaaggaagggttcaaagtaaatgaaagaatactttgtagcaaggtttaaatytggggaggtcttccaacctggaccttaaccttaaacgatgatcacactcttctcagctgtgagggatgggggtcgcctctttaggagcctctcagaagctcatttactcaaagagagtcctggccattcattcgatgttatggccgggaagtcaagtgaatactgaaccctggccaagatttccatcccccagtccaaagtgttttctgcctcttcacacagttatgatactactaacagcatgtttacaatgttgaacagtttattaaatggattcagatacattattccatttgcttctcacaactgcttaaattaggtatcgttacattcccatattccaaatatggtatgaatgttcaaa

SEQ ID NO: 468640 - DNA, 505 bp, Homo sapiens
gagaacagaagcagcatctcactccttttcgtttcactctcccaccctccttgagcactacagggcctggttcctaaagggatgtaaatgaaggaagggttcaaagtaaatgaaagaatactttgtagcaaggtttaaatctggggaggtcttccaacctggaccttaaccttaaacgatgatcacactcttctcagcygtgagggatgggggtcgcctctttaggagcctctcagaagctcatttactcaaagagagtcctggccattcattcgatgttatggccgggaagtcaagtgaatactgaaccctggccaagatttccatcccccagtccaaagtgttttctgcctcttcacacagttatgatactactaacagcatgtttacaatgttgaacagtttattaaatggattcagatacattattccatttgcttctcacaactgcttaaattaggtatcgttacattcccatattccaaatatggtatgaatgttcaaa

SEQ ID NO: 468641 - DNA, 505 bp, Homo sapiens
gagaacagaagcagcatctcactccttttcgtttcactctcccaccctccttgagcactacagggcctggttcctaaagggatgtaaatgaaggaagggttcaaagtaaatgaaagaatactttgtagcaaggtttaaatctggggaggtcttccaacctggaccttaaccttaaacgatgatcacactcttctcagctgtgagggatgggggtcgcctctttaggagcctctcagaagctcatttactcaaagagagtcctggccattcattcgatgttatggccgggaagtcaagtgaatactgaaccctggccaagatttccatcccccagtccaaagtgttttctgcctcttcacacagttatgatactactaacagcatgtttacaatgttgaacagtttattaaatggattcagatacattattccatttgcttctcacaactgcttaaattaggtatsgttacattcccatattccaaatatggtatgaatgttcaaa

SEQ ID NO: 468642 - DNA, 615 bp, Homo sapiens
gcaaggacaaaagtgtatgagctaacggtgataaactgagaagttggaaaggcctgtctattcagtttcttcttggcatacctgtgtggcagtccctccctcagggcataggagaggatgcctgttatataaggggcctcagatgaaggagggagaaggagggagcaggtcagagagtgaccttcctagattttgtggcctgcttcagggaagaaggggcgaggggaactctagtttctatggcctgcttcagggcagaaaggagcaagaggtcagagaaaccttcctgtttctgctattttctcaatttccaaggtgccatattttggggtggcatttcctgtaccctgtcatatacaaactcatttttagacagcggcctttagttcctcctgaggttaaaccagagctgctcaaggaatatacctactaaatcttcttgctccatttaagatatttatttcaaatgcaaataattataccataccctttggcctagtcagcactgattcactatttcaaagcttyacatttaagcctcataataaccgtacgaagcagatctagctacttccatgttacagaagaagaacctgtggcacacagaggttgagc

SEQ ID NO: 468643 - DNA, 565 bp, Homo sapiens
ctggctgctacctcctgcccctctttgagccctgtggggatttctagcgttcagagccctggtagtttttgtggcctgcactgtgcttcagagcaccactgatgctcrgctccgtggggaaagtaagccaagtgtgaccacaagaacgcatcatccacagtcactgggatctcctgggacagcctgggatccaggcctttggcctggccagtaggggtgcagtcactcctagtatgcacatccagatcacttgctttttgccccgaattctggcctctccaggtttgttagaggtgtctcacggaagtttaccccatggagagtttgcttatctcagattaaaatatggggattaatctgggacccaggagcccttaaatggagtacccacagggaatggagctctaggctaagtgctttgggattacaggtgctttgctcttgtttggaggtccagacatatgcttgagaagcagcttgggatactcaagagaggcctgaactggtaccctggaggccaggatgaaaacccaggcctctccatttactttcttgggccccagag

SEQ ID NO: 468644 - DNA, 625 bp, Homo sapiens
gtcattcttccaaccaacatccctcccagggtcatatagattccacactgaaagaatgagaaagaaaacaggacacagaacagactagagacttgtataatgtttgaagccactttgttccttcctgtcaaatcaccaccaaagatgacccaaagaaagaagtcccccgccacctgccacctcccttagatactgaggattcactcttattccctcatgctgcacctcttgcctagccccactcctgaaaagctttcttagtatcctacctcaatttctcctgctacaatttcagatcatcttctctggctcyagacctggagagatggccagcagatgagtggttcttatatcatgccaatcatatgtgttcatatgtcagtaaatctcagggcggggggtggaaagactcatgctttcctagaaacactgaattaccaggaaaattacctagggtagctggaaggtgagatggactttggtgcagggcgtggcttgtttgctcaaggggaggaggaaggtcttgggcctttgacgtcgatatgacaggaaatgagactcaactaagaatggacatcctagaaccccagcttatggaaccccaggatccaggtgtcacagaata

SEQ ID NO: 468645 - DNA, 618 bp, Homo sapiens
atgcctaggtcctgaatggtattgcctaggttttcttctagggtttttacagttttaggtcttatgtttaagtctttaatccatcttgagttgatttttgtataaggtgtaaggagggggtccagtttcagttttctgcatatggctagccagttttcccaacaccatttattaaatygggaatcctttccccattgcttgtttttatcaggtttgtccttccttacattgttctaattctttcctcaagtttggataaggatttaagggagcattgggtttagctccttcatgacctcccaaatccttttcctctgaccttccttttgccccctgatctccctgtcctctactttgtgagatgtatagggtgtagggcaagcgtgttaggggatcccagggcttttcactgggtgagggctctttactatgctctttttatttctctttaagggggaacacggggcttaattcactaatccaacaaacagcataacccatctcctcttgtgaagatggggttttatcattcacatagagaattaaagcttggcatatacagtccttatttgagctaaacttaggccaaaggactgaaggctgacaaatgggcttttt

SEQ ID NO: 468646 - DNA, 618 bp, Homo sapiens
atgcctaggtcctgaatggtattgcctaggttttcttctagggtttttacagttttaggtcttatgtttaagtctttaatccatcttgagttgatttttgtataaggtgtaaggagggggtccagtttcagttttctgcatatggctagccagttttcccaacaccatttattaaatcgggaatcctttccccattgcttgtttttatcaggtttgtccttccttacattgttctaattctttcctcaagtttggataaggatttaagggagcattgggtttagctccttcatgacctcccaaatccttttcctctgaccttccttttgccccctgatctccctgtcctctactttgtgagatgtatagggtgtagggcaagcgtgttaggggatcccagggcttttcactgggtgagggctctttactatgctctttttatttctctttaagggggaacacggggctyaattcactaatccaacaaacagcataacccatctcctcttgtgaagatggggttttatcattcacatagagaattaaagcttggcatatacagtccttatttgagctaaacttaggccaaaggactgaaggctgacaaatgggcttttt

SEQ ID NO: 468647 - DNA, 618 bp, Homo sapiens
atgcctaggtcctgaatggtattgcctaggttttcttctagggtttttacagttttaggtcttatgtttaagtctttaatccatcttgagttgatttttgtataaggtgtaaggagggggtccagtttcagttttctgcatatggctagccagttttcccaacaccatttattaaatcgggaatcctttccccattgcttgtttttatcaggtttgtccttccttacattgttctaattctttcctcaagtttggataaggatttaagggagcattgggtttagctccttcatgacctcccaaatccttttcctctgaccttccttttgccccctgatctccctgtcctctactttgtgagatgtatagggtgtagggcaagcgtgttaggggatcccagggcttttcactgggtgagggctctttactatgctctttttatttctctttaagggggaacacggggcttaattcactaatccarcaaacagcataacccatctcctcttgtgaagatggggttttatcattcacatagagaattaaagcttggcatatacagtccttatttgagctaaacttaggccaaaggactgaaggctgacaaatgggcttttt

SEQ ID NO: 468648 - DNA, 398 bp, Homo sapiens
ggctccctctctccagccctccctctgcccagagcagcacagtccagagtccttgaacaggaattccccctcatctaacagttaatcatttattagtggggacagacayctggttgtctctttccggtgaccccatatcctcattcaaggcatccagatatagcccctgagccagggatctgtatctgccctccagaggcctatgcccaagacaggttgctccctgggattctcactacaggtggacttaagctaatgggctggaaaaagagaaaacgaggtcgaattcctcacttaccatgagatcttgcaacacaggttccaagggcctcaacccctctaccctggctgatgctccctcctccactccctctgaccagggccctgagccccccaca

SEQ ID NO: 468649 - DNA, 312 bp, Homo sapiens
ctgcccacttctggaaggttctgtaccctgcaagtctggtctccacaaactctgcatcctgaatttggtcctccccatcccgctcctgggtcagtgtgatctccagagggtagaagcccagggcccagcacctcagcgtggcctcatagttggagatggggtggtgggttacctgtgccttcaggggatctgagggcaagaggtagaaaattcaggcactttgcattcctcatgagacacagcacccatgtgaccatcctgagaatggaygggacacctggggtggggaagggagcacagaacccagacagc

SEQ ID NO: 468650 - DNA, 557 bp, Homo sapiens
tgaaaaatgcctagattcaaagaaaattcaataawgcaaaattcaaagatcttgctaatagaaaaaaatgtgagctaatgtcttgtagaaaatataggattatatatttgtggactgaggttggggaagcacttcttaagatcaaataacttggacaataaggcaaaaaattgatggattttattatattcaaattaaagatttccagtcaacaaaaggttagttggatcaagttaacagataaatgacatattgggagaagatagttgcaacatctaaaatgaacagggggtttatatcttgaaacatccagaaattcctacaaatccacaagaaagagacaaaaatattcaactgagaaatgagcaaaggataagtatggaatttactgaatgagaaatcctgaagtggccaatgagtatatatgaagaaatgctccaattcaacaataatgagaaaaaacacaaattacaacagtaagggaaatcacttctcatctattaaaccggcaaaaaattagacggatggaaatgccaagtgctaaatatggggggtag

SEQ ID NO: 468651 - DNA, 557 bp, Homo sapiens
tgaaaaatgcctagattcaaagaaaattcaataaagcaaaattcaaagatcttgctaatagaaaaaaatgtgagctaatgtcttgtagaaaatataggattatatatttgtkgactgaggttggggaagcacttcttaagatcaaataacttggacaataaggcaaaaaattgatggattttattatattcaaattaaagatttccagtcaacaaaaggttagttggatcaagttaacagataaatgacatattgggagaagatagttgcaacatctaaaatgaacagggggtttatatcttgaaacatccagaaattcctacaaatccacaagaaagagacaaaaatattcaactgagaaatgagcaaaggataagtatggaatttactgaatgagaaatcctgaagtggccaatgagtatatatgaagaaatgctccaattcaacaataatgagaaaaaacacaaattacaacagtaagggaaatcacttctcatctattaaaccggcaaaaaattagacggatggaaatgccaagtgctaaatatggggggtag

SEQ ID NO: 468652 - DNA, 557 bp, Homo sapiens
tgaaaaatgcctagattcaaagaaaattcaataaagcaaaattcaaagatcttgctaatagaaaaaaatgtgagctaatgtcttgtagaaaatataggattatatatttgtggactgaggttggggaagcacttcttaagatcaaataacttggacaataaggcaaaaaattgatggattttattatattcaaattaaagatttccagtcaacaaaaggttagttggatcaagttaacagayaaatgacatattgggagaagatagttgcaacatctaaaatgaacagggggtttatatcttgaaacatccagaaattcctacaaatccacaagaaagagacaaaaatattcaactgagaaatgagcaaaggataagtatggaatttactgaatgagaaatcctgaagtggccaatgagtatatatgaagaaatgctccaattcaacaataatgagaaaaaacacaaattacaacagtaagggaaatcacttctcatctattaaaccggcaaaaaattagacggatggaaatgccaagtgctaaatatggggggtag

SEQ ID NO: 468653 - DNA, 557 bp, Homo sapiens
tgaaaaatgcctagattcaaagaaaattcaataaagcaaaattcaaagatcttgctaatagaaaaaaatgtgagctaatgtcttgtagaaaatataggattatatatttgtggactgaggttggggaagcacttcttaagatcaaataacttggacaataaggcaaaaaattgatggattttattatattcaaattaaagatttccagtcaacaaaaggttagttggatcaagttaacagataaatgacatattgggagaagatagttgcaacatctaaaatgaacaggggrtttatatcttgaaacatccagaaattcctacaaatccacaagaaagagacaaaaatattcaactgagaaatgagcaaaggataagtatggaatttactgaatgagaaatcctgaagtggccaatgagtatatatgaagaaatgctccaattcaacaataatgagaaaaaacacaaattacaacagtaagggaaatcacttctcatctattaaaccggcaaaaaattagacggatggaaatgccaagtgctaaatatggggggtag

SEQ ID NO: 468654 - DNA, 521 bp, Homo sapiens
tgtctccagccctaggtcagtgccatttgctaaacatacttcctaaatcttctgccttgtctttggtgaaatggctaaaaagtacagggacagcctggggagctgtggctctccactacggacytcccccagctcatcctgactctattatcaccagggtagcatgaccaagcatactcctcttaaggcagtcgaggtggaatggaagaggtcagaagacatatgagggagagagcctggaaagtgcatcccacaatgtctgtgttccctctgaggaatggctcaccacagtagaacctctgtgtccttttcaggtgcttgcagatgtgtttgatgccccggtgtatgttatagacactgccaactcggcctgtgtgggttctgcataccgagcttttcatggtaggttgatggagggagacagctatctctggaagtggccaggacatggggtgggctgaggagggtggaaaggggagagtgaggtgtacccagtctttggggacattggagtcttgggg

SEQ ID NO: 468655 - DNA, 504 bp, Homo sapiens
tctccagccctaggtcagtgccatttgctaaacatacttcctaaatcttctgccttgtctttggtgaaatggctaaaaagtacagggacagcctggggagctgtggctctccactacggacctcccccagctcatcctgactctattatcaccagggtagcatgaccaagcatactcctcttaaggcagtcgaggtggaatggaagrggtcagaagacatatgagggagagagcctggaaagtgcatcccacaatgtctgtgttccctctgaggaatggctcaccacagtagaacctctgtgtccttttcaggtgcttgcagatgtgtttgatgccccggtgtatgttatagacactgccaactcggcctgtgtgggttctgcataccgagcttttcatggtaggttgatggagggagacagctatctctggaagtggccaggacatggggtgggctgaggagggtggaaaggggagagtgaggtgtacccagtctttggggac

SEQ ID NO: 468656 - DNA, 521 bp, Homo sapiens
tgtctccagccctaggtcagtgccatttgctaaacatacttcctaaatcttctgccttgtctttggtgaaatggctaaaaagtacagggacagcctggggagctgtggctctccactacggacctcccccagctcatcctgactctattatcaccagggtagcatgaccaagcatactcctcttaaggcagtcgaggtggaatggaagaggtcagaagacatatgagggagagagcctggaaagtgcatcccacaatgtctgtgttccctctgaggaatggctcaccacagtagaacctctgtgtccttttcaggtgcttgcagatgtgtttgatgccccggtgtatgttatagacactgccaactcsgcctgtgtgggttctgcataccgagcttttcatggtaggttgatggagggagacagctatctctggaagtggccaggacatggggtgggctgaggagggtggaaaggggagagtgaggtgtacccagtctttggggacattggagtcttgggg

SEQ ID NO: 468657 - DNA, 497 bp, Homo sapiens
tgcaaagtatggacccatgccctgctgccaggctgctgtagtcccggcggtctgtagagactagcattttgcaaatgataagcactagaataacagataacrctaggctttatgcactaagagaacccattagatctgccagtctgaatcccagaaagggcactgatacagagcatttagtactaggtagcaatttcataaaatgtccctggtcaaagcttgctggagcaggccccgttcccattttactgatgtctagcagtcgtgttcagtaatacgtcatacccaggtctccacgctaaacagcctaaacactaaaagtaaacatgctgtgaagtaaaggaagctagattcatgctgtccttgcggttggatgccaagattcaggagtaactgtttgttacctgtatacttacatgtacaaccttaccccagagaaagatgagtggacagtgatgtgcattgtgttgatagcagattataacttgccacaccat

SEQ ID NO: 468658 - DNA, 415 bp, Homo sapiens
aaaacactcgtcacctcaatcaagacgggtacgaaggccaacggacgccttcctttagacgctcagcacacagagcaacttctcacgcctactctcaaatggsgtactccaaactagcactcccgacgtccagctgtgaacccagagcggcggaagcccctgaacccagcgcccgggcatgcgcagacgcgttgttgtggtgggcgtggctccctccggacccggcgccccgccctccgccccgtgtccgcatgcgcgactgagccgcgggggtggtactgctgcatccgggtgtctgaagatccgatgaaataacatatgcaaaatgattgggtccgtgattggattccagaaatggtagctgttattcagccaacaaatatttattgagcacctactatggacttccctggtg

SEQ ID NO: 468659 - DNA, 663 bp, Homo sapiens
  misc_feature (1)...(663): n = A,T,C or G
gatcgtgtgaatcaattcctccggttcatgcccaggtccaggcccatctgacttgaaagcttttcctgactttgcttcagtgctgatttcccctttgcaggtgcaccttccactgtgctttcctttattactgtttgctgacactgcattttttcctttgctttttctttctttccatctttctttcttttttcttgcttttttanttatagaccgaatgtttgtggcaaccctgtgtcaagcaggtctatttggcaccatttttccaacagcatgtgctcacttcatgtctctgtgtcacattttggtaattcttgaagtatttcaaccttgttcattattacacctgtatggtgacctgtggtcagtgatctttgaagttactctcgtaactgttttgggacaccatgacccacacccttataaaatggtgaaccttattgataaatgttgtgtatgttgtgacttctccaccnactggntggtttcttgactctctctctctctcccggccttccctattstgtgagacacaaaaatattgaaggcaggccgattagtaaccctacaatggcctataagtgtccaagtgaggagaataatcttgntgcaaacttcgttgtgttattttaagaaattgccacagcgatttcagcaaccacc

SEQ ID NO: 468660 - DNA, 663 bp, Homo sapiens
  misc_feature (1)...(663): n = A,T,C or G
gatcgtgtgaatcaattcctccggttcatgcccaggtccaggcccatctgacttgaaagcttttcctgactttgcttcagtgctgatttcccctttgcaggtgcaccttccactgtgctttcctttattactgtttgctgacactgcattttttcctttgctttttctttctttccatctttctttcttttttcttgcttttttanttatagaccgaatgtttgtggcaaccctgtgtcaagcaggtctatttggcaccatttttccaacagcatgtgctcacttcatgtctctgtgtcacattttggtaattcttgaagtatttcaaccttgttcattattacacctgtatggtgacctgtggtcagtgatctttgaagttactctcgtaactgttttgggacaccatgacccacacccttataaaatggtgaaccttattgataaatgttgtgtatgttgtgacttctccaccnactggntggtttcttgactctctctctctctcccggccttccctattgtgtgagacacaaaaatattgaaggcaggccgattagtaaccctacaatggcctmtaagtgtccaagtgaggagaataatcttgntgcaaacttcgttgtgttattttaagaaattgccacagcgatttcagcaaccacc

SEQ ID NO: 468661 - DNA, 543 bp, Homo sapiens
ttagaggtaacacagatcttaaatccttgttttctgacttgaaatccagtggctactcactctgccaattctacttaactgttgatctgaaaaaaaaaatttttttttaattattacttaaaaccagcctctgatactgaaagtgagaaggatcactctacccaatattaaggtttattatatagctatagtaattgttatgggctgaattgtgttcccttatatccctcaaaattcatatgtttcagtcctgacccctagtatctcagaatgtgactgtgtttggagatagagcctttaaacagctaattaaggtaaaatgaggtcatatgggtgattcccaattcactggtgactagagtccttagaagagcttaggacaaggagaggcacagaaggaggaccatgtagagacatagagagaagatggtcacctacaagccaaggagaggatccctcagaagaaaccagccctgccaacaccttagccttggacttctagtttcctgaaytgtgagaaaatagatttctattgttgaaacc

SEQ ID NO: 468662 - DNA, 620 bp, Homo sapiens
tcataatttgatagacatggcagtatcaataatttttgagtttgggcactacatagtcctcatgcaattgtttggctttcagcaagtcactttgagcaccagtttctttaaatgggtctaatggcaacattgctggttgagataatgtatgtgatatgtctcacttagtgtctgatacatggtagatgataactatcagtagcttacattttctagtacttttaaggtttacattgcagtttgacaagtaaaattgtattaaattcttatagtgtccctataagcttatattttttactttttcataaaccaagttaactggggtccagatatgttaagtttcttaagttcaagattgccaatcasgtcctaaaacttgtatttattcatacagctattccaacatgtaaatataaatttgttcaaaagaaatgagtgataagatatgaaatgagatggctttaaggaatgccgtagcacaacagaaaatcgtcaaatattgatgcctatgtggagggaagacaaagccaatgaactatgtttgtattaggcactgagtgatccaagcctttttattgttcttgacttagtccaatgagcagcaccagtgcctgcagtaa

SEQ ID NO: 468663 - DNA, 546 bp, Homo sapiens
gacacacgaagagtcagggcctggatttgaaccgaggtctggcacaagtgattccaatcctatgcctctcagtcaggccggggataggcgggcatcatgaagtccccatctccaggggcatgtcgttgggaaacaaccaccaggctcgcccacctcttctgttctatggggctaatgctgccagccaagggctgcatcagcttgtgccacggaaccaccctgcccatggagaagcatcacgaggcactttcagcatttactaatggaccctagaaaatgtctctcagctccaccagtgtgatgattaaggctgaccacagaagccaaaacagtaacatttaggattttgtaggtcagtccttgcacggttgctcaggccaaggggcatagattggtgatgctgaatggcattttctttcaaagctgagcccggcagagccctggggcakgaccttgcaaaaccattgtgtgaaggagagcgagtcccttggggaggtgctaggaaactcgggtaaccccgaatccctgcagatcagcaaaggatgc

SEQ ID NO: 468664 - DNA, 546 bp, Homo sapiens
gacacacgaagagtcagggcctggatttgaaccgaggtctggcacaagtgattccaatcctatgcctctcagtcaggccggggataggcgggcatcatgaagtccccatctccaggggcatgtcgttgggaaacaaccaccaggctcgcccacctcttctgttctatggggctaatgctgccagccaagggctgcatcagcttgtgccacggaaccaccctgcccatggagaagcatcacgaggcactttcagcatttactaatggaccctagaaaatgtctctcagctccaccagtgtgatgattaaggctgaccacagaagccaaaacagtaacatttaggattttgtaggtcagtccttgcacggttgctcaggccaaggggcatagattggtgatgctgaatggcattttctttcaaagctgagcccggcagagccctggggcatgaccttgcaaaaccattgtgtgaaggagagcgagtcccttggggaggtgctaggaaactcggstaaccccgaatccctgcagatcagcaaaggatgc

SEQ ID NO: 468665 - DNA, 624 bp, Homo sapiens
aggcacaatacttgcctttagtggacatgacattgggccgcctgaccatgttcccaaagcaaatggatcatgggcagcttgccctggccccaggaaagcgcatacaaactctcaccacctgcacctcaggacagcaactccaagactggaataccttttcaccccttctcccagcccccaattccttccttccttcctcaggctgtgtgtttttccacgtggctggctggacattctgaaacaggcagtaatgctgccacctttatggacagccagaaagaatagggagtccctgtgggggtcacacccaagcatccagcccagcctttctgccttactcaggctgcctggcatggaactttctggaagggttggaaagtggaataagcagagggattgaartggggcaaacatcagtccttacgatatgccggcaactgtaggttctccattttttggggtacatctactcttgccaagcaatgcaagtcgctgcctggggccaggacaataaaagagatagcttcagaaccagaggaaatcccaaaggccaaggagggccacacagggaggattcccattagacagatggggaaagtgaggctctgggagggaaagggaccc

SEQ ID NO: 468666 - DNA, 629 bp, Homo sapiens
agaataatcacccagtcgacccacagaatcgtgagaatgagaaattgtgaaattgtggtttttatgccattgcacttggggtggtttgttatacagaaagagataacagaaacaaagtttgatctaaatcatgggtgtgtgtgtgtgtgtatatatatatatatattcattgtgacatttattcaactttcctgtctaattaaagattttcaagataaaaagttgagaaagaaactcttaaagtctcagctaccacaagaaggaatcaaacaacagaacatactctgggatgagataaaaagatgcacccagaatttctagaatttcacgaagcaagaatgagtagacayagaacaaccccctaatccaagaaattgatgcagaagtccaagaaaccagaaaaagagaggagtggcctctctgggatgccttctacgagattccaaatatctggaaaaacatatctgggtgaaatgaatacttcattttgcgggtggtctttctgtccagttaacatcagatactgtttcaaatacccagatgtttgccctgttattctgattggttatagcagaagcattcaccgtacaggtgggaggagaaagattgggttcctccaaatcgcaaaa

SEQ ID NO: 468667 - DNA, 535 bp, Homo sapiens
cttttccctacatatggtccaccgggtttgataacttctgtgcttcggttgcgggattcctcctctgcctgggtcgttctttctcgtgtcatctgatccgagtcgtttgttgcacacactgtaattttatcttgtataaatcccaggcaattgagctgggaggctccagagctggagaatgtttgctggacgcagtcaaagctgccctgagggttgtctttgcccacatttgacaaataaaagttaaagttatgaacttcattgaggggatcatttttgggaattttgacaagctcctggagtctttggaactgaattgaaggtcgaaaagaaattaaattcttgtggctctggtaagtctggagcgcctggatcgccgactcggtgagcttcacatgcagtacggtgatgttgtcctgccccagccgtccgcackagagcccatagcgctgccccgcgacccccccacccccgacatcttaaactcccagaggtgccgccgccgccagtccagctccagcctccactgcggccg

SEQ ID NO: 468668 - DNA, 613 bp, Homo sapiens
aagaagccctcacacaagttttttttggctcatttgacttcatttataaaacacacattaagataaaattatgaagaatttaaggatgatgatcatagggcatcaactatgatgctgcattggttgcgtgccccatgaagcaagcccgggatatacaatacaccgattaactcactatttgggggatgatcctgactttgtctctttacaaccttcggaaaattttgcctctttcagactttccatcctacaactctggttagctcagtcttccccaaccatttctgccatcttccaccttggtctcagtcatgcggatgtcttgtgcctgatcagaccaatgttggtcctctcttcctatctctctcaccttttcattccctgctctttgcattaacttgggaaacatttgtgtgtgtatgctagctttagtgccctcattttgttaccttggcgtgaagtctgccgtcyctgcagctctatttcatttgaatgagggagaagcctcataaagttttaaaagagctttttaaggattacagtccctatatctctaaggttttcccaggacccattccacatgagaaatcaggataagcttgctaaacttgta

SEQ ID NO: 468669 - DNA, 449 bp, Homo sapiens
gcctattttgcaaataagaaaacttgggaatagagagaaggaagtaattagaacacttttgtatttcctatagatactatttcacagaaacaacatttagaccatcctcaagcattctagctctatactatatgactgttcccaaacattctaactcctcttcccaggtcatagcttttccttcagtaaagacttaaagagtgaattttgggtatgagattaatgtagtagcaaatattttcctattgttcaattcacctctataaacatttattgaacaaatatgtgtcaggcagaaagaacacaaaattcagcaaggtacaatctctgccaccaggcagcttacaaccctgyacagaagcagacatctcaataggatttgtaaagtacagaacacttcagtgtgcctgagaagtggctcatttctcaggtcaggatgactgaaaaaa

SEQ ID NO: 468670 - DNA, 449 bp, Homo sapiens
gcctattttgcaaataagaaaacttgggaatagagagaaggaagtaattagaacacttttgtatttcctatagatactatttcacagaaacaacatttagaccatcctcaagcattctagctctatactatatgactgttcccaaacattctaactcctcttcccaggtcatagcttttccttcagtaaagacttaaagagtgaattttgggtatgagattaatgtagtagcaaatattttcctattgttcaattcacctctataaacatttattgaacaaatatgtgtcaggcagaaagaacacaaaattcagcaaggtacaatctctgccaccaggcagcttacaaccctgcasagaagcagacatctcaataggatttgtaaagtacagaacacttcagtgtgcctgagaagtggctcatttctcaggtcaggatgactgaaaaaa

SEQ ID NO: 468671 - DNA, 574 bp, Homo sapiens
aattagatcattgagcttcccttaaaataattctgatcctgtcaatgactgccttttttttttttttttttttttttttttaagacggagtcttgctctgtcgcccaggctggagtacagtgktgcgatctcgactcactgcaagctccgcctcccgggttcacgccattctcctgcctcagcctcccgagtagctgggactacaggcacccgccaccgagcctggctaattttttttgtatttttagtagagatggggtttcaccgtggtctcgatctcctgacctcgtgatccacccgcctcggcctcccagagtgctgggattacaggcgtgagccaccgcgcccagccatgactctccttaaagccttcttcacctccttgttgcgaaggctatagatgataggattgaggaaaggggtaataagggcataaaccaaggcaacaagcttgtctgtgctctcaggtcgactcccaggtgagcccacatatactgtgaaggcagaagcatagaatagtgccaccacagttacgtgggaggaacaggtagagaaggccttggcactactggca

SEQ ID NO: 468672 - DNA, 335 bp, Homo sapiens
tttctttgacttttctgcagttgaaatataaaatgtccagatatgatttgtttttcagcatttgtcacagtggataatatctgagcttcctgcatctgaggttttkgctccggttggttttaaatatttcttggcaattatttctccaaatactgatacaggagatagaaagaaattatcttaggcagatagtgagggcaaaagagtccttggcagaacttcccttctaacaaaaagaagcccaaaaatcacttattttctaataaagagcagcctgaaagatcgaactgcaaacatagagaaggaagctgggagcctgcatggggggatgctgg

SEQ ID NO: 468673 - DNA, 515 bp, Homo sapiens
aaagaccagttagcaaataaattcaggagatcacatgagaatcataaaggcttgaaatgctccacaacaaagaagatagaagaggctgacctgaaatggcttatgtataaacaatagtcccctcatgttgtgtcatgtgctggttattccatcatcccagtacttctctatcttctctatcaacttgtgttcagtttagttttacacaacagcaagtgtttgtttggctgtctttccctccctactacatgtgaagtctttgagagatgggccatgtctgtttcccataagtgtatctctgatgcttcatggagggtccagcacatagtaggaatcaataagttcattgacttaaactcaacaggaaagttatgtcctttttttgctactaaatcactgttcaaattgtctgcagctaaatgcacaatgttgagcatttctatctcagtagctgtaacaagctgagtaacycctctgttctgatttcagccaaacattggattttctggtgatct

SEQ ID NO: 468674 - DNA, 521 bp, Homo sapiens
gctcaggaggctgaggcaggagaattgcttgagcccaggagccggatgttgcagtgatccaagtttgtgccactgcactccagcctggctgacagagcaagaatctgtctcaaaaaaaaaaaaaaaaaagaaagaaatgtttagagtgtgctaattatcctgacttgattattacacactttatgcatgtatcaaaatattactgtgtgccataaatatgtacaattattacatgtcaactgaaagtaaagaggaaaaaaaagtaaaccaaaacaagaactgagtgtctcagagtcctcaaatcccatgaggaatcatatttaaagccgaccaaaattaggtctttatttttaattatgcaaaaagagaaaattcctttaatatgtgccaaagggaatagggaaaatgataagattatattcaaattatttgaaatttgaaaacaaagcagtaaagatcccactacacagaaaggcatgaaaatgaaaagattcrgggttgattcaaatggaagaaagcac

SEQ ID NO: 468675 - DNA, 649 bp, Homo sapiens
atggggaccccatgggttaccatgaaacacaacttgcttgactgaacacatgaagcacatgacttctcaattgctacgggcaatcactctcctaytcccaaccagaacccattttggtaccatctttctactgaccacgggtgtaagtgccatctggtagctgtagattctggccaggccaaagtcagccagcttgactgttccaccacttgtcaccagaatgttctctggcttcagatctcggtgaacgatgcaattggcatgaaggaaatctaggcctcttagaaactggcgcatcagatcctagtttcaaaggggaggtacagatgcactggaaactaggcaccatacctgaaatcccagaaggttctactacaaaggtcccaatccacctctcaatgcctaccaaccccactcaccttgatcgtttcggctggcaagcctggtgggggtgccttgtccagatatgtccttaggtcctggtctacatgctcaaacaccagggttaccttgatctcccggtcagttcgggatgtggcacagacgtccatcagcctgaccagagtaaatgctcacttttcaatcccctttaacccaacatggcctctcattatttcctcagggtccccacttctctacagatcatcac

SEQ ID NO: 468676 - DNA, 554 bp, Homo sapiens
gctgtgggaggcctggggtattgggggtagtaggggagggtagacccaggcagaggggtcccaggggaatccagtagagctggcccacagagtcccagggatatcacgggctccaggagsaggccatgggtcagcagcgacctcaggtcctgaggcctgtggactgcagggtgacccctttgcaggctgctgggaaaggtcattttaggtaatgctctcaaaagggagtgctggggaagcttccgagctctgtacaaatattttttggtgttcctccatctatccatccatctgttctgcgaatctttcacagagcacctgcttcgagggaagcagagctggtgcttgggggagggagggtagagcaggagcccagaccaacctgcggtgggtaccctggggaaaccacacacaagccattggaggcgaaggtgggaggaggggatatgggccagatgtggtcagggaaggtgcctgcaggaggagccggcagccctgaggctgaaaaaggaccagtttgtggggcatcccttccatttcttccccaggggaag

SEQ ID NO: 468677 - DNA, 554 bp, Homo sapiens
gctgtgggaggcctggggtattgggggtagtaggggagggtagacccaggcagaggggtcccaggggaatccagtagagctggcccacagagtcccagggatatcacgggctccaggaggaggccatgggtcagcagcgacctcaggtcctgaggcctgtggactgcagggtgacccctttgcaggctgctgggaaaggtcattttaggtaatgctctcaaaagggagtgctggggaagcttccgagctctgtacaaatattttttggtgttcctccatctatccatccatctgttctgcgaatctttcacagagcacctgcttcgagggaagcagagctggtgcttgggggagggagggtagagcaggagcccagaccaacctgcggtgggtaccctggggaaaccacacacaagccattggaggcgaaggtgggaggaggggatatgggccagatgtggtcagggaaggtgcctgcaggaggagccggcagccctgaggctgaaaaaggaccagtttgtgsggcatcccttccatttcttccccaggggaag

SEQ ID NO: 468678 - DNA, 476 bp, Homo sapiens
tcctcccagtggcctcagccacccgagcaggcacactatagttgaggaaagcacagcagagccacagctgggacccagagtcccctccctgaccccaccatgcccagcttccctgagamagaccctccccggggcccagcccacagttgcccctgacctcccatgaagatgtgtggaaatggctccatgaagagcctgtgaggacactggaccatgaccagaccactggagagaggggaaatgcagtcatggggctgcagcatctgtggagcccacttcccactgggtggggccagcatgacaggattgaaggcagtgggacagaagaactgggcaacacaaaggacacctggctcctcagcaacagagagctgccaccgaggaggcccctacaggtccaggccaggccctgggaaacccatgatgggacacatggctggggcaggacagggagtgtgcagcttgtcagctggaag

SEQ ID NO: 468679 - DNA, 637 bp, Homo sapiens
tgcacacacgcacaaccacatgcagacagaggcatggacctgtgcatgcacacccaaagatgtgtacatggacctgctcacagacatgtacatggatctgcgcgtgcacatgaacagacacatgcacacactggcatacaagcaaccagacacagacacatccatgcacctgcactctcacagacacaaacagggacctatgcatacacgcacacataccgcaatggacctgcatacacataggcacctatgcatacacgcacacataccacaatggacctgcatacacacaggcacctatgcatacatgcacacgcaccacaatggatttgcacacacacagggtcctatgcatacacacacacaccgcaatggacctgcacacacacagggacctatgcatacatgcacacacaccgcaatagacctacacacacacagggagctatgcatacaygcacacgcaccgcagtggatttgcacacacacaggcacctatgcatacacgcatatgcaccgcaatggacctgcatacacactggcacctatgcatacatgcacacacaccacagtggacctgcatacacacacacgcaccgcaatggacctgcacacaggcaccacatactgccacaaa

SEQ ID NO: 468680 - DNA, 637 bp, Homo sapiens
tgcacacacgcacaaccacatgcagacagaggcatggacctgtgcatgcacacccaaagatgtgtacatggacctgctcacagacatgtacatggatctgcgcgtgcacatgaacagacacatgcacacactggcatacaagcaaccagacacagacacatccatgcacctgcactctcacagacacaaacagggacctatgcatacacgcacacataccgcaatggacctgcatacacataggcacctatgcatacacgcacacataccacaatggacctgcatacacacaggcacctatgcatacatgcacacgcaccacaatggatttgcacacacacagggtcctatgcatacacacacacaccgcaatggacctgcacacacacagggacctatgcatacatgcacacacaccgcaatagacctacacacacacagggagctatgcatacatgcacacgcaccgcagtggatttgcacacacacaggcacctatgcatacacgcataygcaccgcaatggacctgcatacacactggcacctatgcatacatgcacacacaccacagtggacctgcatacacacacacgcaccgcaatggacctgcacacaggcaccacatactgccacaaa

SEQ ID NO: 468681 - DNA, 637 bp, Homo sapiens
tgcacacacgcacaaccacatgcagacagaggcatggacctgtgcatgcacacccaaagatgtgtacatggacctgctcacagacatgtacatggatctgcgcgtgcacatgaacagacacatgcacacactggcatacaagcaaccagacacagacacatccatgcacctgcactctcacagacacaaacagggacctatgcatacacgcacacataccgcaatggacctgcatacacataggcacctatgcatacacgcacacataccacaatggacctgcatacacacaggcacctatgcatacatgcacacgcaccacaatggatttgcacacacacagggtcctatgcatacacacacacaccgcaatggacctgcacacacacagggacctatgcatacatgcacacacaccgcaatagacctacacacacacagggagctatgcatacatgcacacgcaccgcagtggatttgcacacacacaggcacctatgcatacacgcatatgcaccgcaatggacctgcatacacactggcacctatgcatacatgcacacacaccacartggacctgcatacacacacacgcaccgcaatggacctgcacacaggcaccacatactgccacaaa

SEQ ID NO: 468682 - DNA, 578 bp, Homo sapiens
aactcagcacactctacttgcctctgggagattcacaatgctcactgccaagtccaggctttgggaagataactccaagaactgcgggtggatggatggatggatggatagatagatgaatatatcgttctactcacttccaaatggtaagaatcacagggaggaaagtgaaagcgattcgagccccaaggactcagggcagaaccattcacagcccctccagaccacaagtttggctggaaaacagacggaacttattcattcattgattcatttacacamcacagagtggtaagagcagcattagagattagcactgggaaccatgggaaccaccaggaggggacaattaactaaatgtgggggtgaaggcggccagggatggctttctggaggtgagcctgaagggtcctttgggggaactgacctcagggctccagccctcatgccattttctccagccacaagagtcatgcttggggcttcttggactacataggcagcttcaatctgatggctgtggccccttggcctcaacagaatacatcttggagccccctttttaccccaaaccccca

SEQ ID NO: 468683 - DNA, 627 bp, Homo sapiens
cacgggcaggcacgatgactggcagccccttctagaatcagaagtgggtaagctttgcggagtcaaactgtaatggtcttctagaatccagacactgacattgggtcttcagacttttttattgatacctcctaaatatttgtaaagaaataggtgctatccattaaaaacacccgaataatattttctttaacagtcaaaactttaatcttcttcttttttttttttgagacagggtttcactcccattgcccaagcttgagtgcaatggtgcgatctcggctcactgcaacttctgccttctgggttcaaatgattctcctgcctcagcttyctgagtagctgggatgcaggtgccactgcacctggctaatttttgtattttttgtacagacggggttttgccgtgttgcccaggctggtctggggctcctgagctcaagtgatctgcctgcctcaccctctcaaagtgctgggattacaggcatgagcctctgcacttgggcccacttcttcaattcttcttgccatttcttgaaccatatttccaaagtctttttctggttatttatgagacacaacttgatgctcagttaaaataagtgaggtccgctaacactcagtagt

SEQ ID NO: 468684 - DNA, 541 bp, Homo sapiens
cacctgatgactgccacagacatggatatgagtgatgctagtcaccagacgcagcccccttcccactgctcacccacccttccaagcctgccagagaccctcacccaaaatgaattagcaaaatgtgcaagcagatgttttcatctctggagactttaaaacaatgatcatcaacacggagatttaccaggaaagataatatcttccctcaaaatctccttggagtttactgtgaggcatctcagacagtgctttccatatagaaaraaacccaggtaatagatatgctgcagcgttttatcttgtgtttgattttataaaacttacttattgatgatggtgacccatgtgtattttttgttgctacgtgtactagtcaagggtcttcaaaatttgaagtgacgccactaagataagcctgtaggaaatttgtgtgtttatttacaaatttatgtatctcttgtgggaactggctcacataattttggagtgaagtcccacgatcagctggctgcaggacagagaagcgggaaaggccagc

SEQ ID NO: 468685 - DNA, 541 bp, Homo sapiens
cacctgatgactgccacagacatggatatgagtgatgctagtcaccagacgcagcccccttcccactgctcacccacccttccaagcctgccagagaccctcacccaaaatgaattagcaaaatgtgcaagcagatgttttcatctctggagactttaaaacaatgatcatcaacacggagatttaccaggaaagataatatcttccctcaaaatctccttggagtttactgtgaggcatctcagacagtgctttccatatagaaaaaaacccaggtaatagatatgctgcagcgttttatcttgtgtttgattttataaaacttacttattgatgatggtgacccatgtgtattttttgttgctacgtgtactagtcaaggktcttcaaaatttgaagtgacgccactaagataagcctgtaggaaatttgtgtgtttatttacaaatttatgtatctcttgtgggaactggctcacataattttggagtgaagtcccacgatcagctggctgcaggacagagaagcgggaaaggccagc

SEQ ID NO: 468686 - DNA, 541 bp, Homo sapiens
cacctgatgactgccacagacatggatatgagtgatgctagtcaccagacgcagcccccttcccactgctcacccacccttccaagcctgccagagaccctcacccaaaatgaattagcaaaatgtgcaagcagatgttttcatctctggagactttaaaacaatgatcatcaacacggagatttaccaggaaagataatatcttccctcaaaatctccttggagtttactgtgaggcatctcagacagtgctttccatatagaaaaaaacccaggtaatagatatgctgcagcgttttatcttgtgtttgattttataaaacttacttattgatgatggtgacccatgtgtattttttgttgctacgtgtactagtcaagggtcttcaaaatttgaagtgacrccactaagataagcctgtaggaaatttgtgtgtttatttacaaatttatgtatctcttgtgggaactggctcacataattttggagtgaagtcccacgatcagctggctgcaggacagagaagcgggaaaggccagc

SEQ ID NO: 468687 - DNA, 623 bp, Homo sapiens
gggcttgctttctctgcacacagctcaggagcattcaggcttgagagcgtctgaccaggcaggaaggtttgcacttacgtgtcatcacagagctgaagttgaggcagtgacgggctccaagggtgtgcccggtgcaccagcccctccatgatggtgtgggcctgcacggtgcagggtcattctaagtagccacggtcagaaggtatcaactggctgcagccgtggtgaccgtcttagattgtttgtaacacatatgatsatatgattagtaatttcaagcccccctcaaattctaaaagggatgacctcttcaagaaaccacgctagggtgtgatcctctagccaatacacggagggccatgtccccctttgttggacgttccatttttcacggatgattgctgccttctggcttggggctggatgcccttggatgtacccaccttatttagacatcactggcatccccatcgttagtttggccgaagattcttaatttataacccatcttaaatgtcgttattgttttggggggaatggagaggagtgttgggggttgtatctgtcagggtccagtaagaaaaaacagaaacaacttgaagttttttgagaagagtgcttaa

SEQ ID NO: 468688 - DNA, 623 bp, Homo sapiens
gggcttgctttctctgcacacagctcaggagcattcaggcttgagagcgtctgaccaggcaggaaggtttgcacttacgtgtcatcacagagctgaagttgaggcagtgacgggctccaagggtgtgcccggtgcaccagcccctccatgatggtgtgggcctgcacggtgcagggtcattctaagtagccacggtcagaaggtatcaactggctgcagccgtggtgaccgtcttagattgtttgtaacacatatgatgatatgattagtaatttcaagcccccctcaaattctaaaagggatgacctcttcaagaaaccacgctagggtgtgatcctctagccaatacacggagggccatgtccccctttgttggacgttcmatttttcacggatgattgctgccttctggcttggggctggatgcccttggatgtacccaccttatttagacatcactggcatccccatcgttagtttggccgaagattcttaatttataacccatcttaaatgtcgttattgttttggggggaatggagaggagtgttgggggttgtatctgtcagggtccagtaagaaaaaacagaaacaacttgaagttttttgagaagagtgcttaa

SEQ ID NO: 468689 - DNA, 637 bp, Homo sapiens
gggcaggaactcacccattcctccactctctgctggagttgaggaggctggtggagcacagacagttcccccaaagcaatgcctcaaccctgcgagggcctgagcacatcgagagtgagcttcctggcactggaggcatcccagtgcagatgcagactgcctgctgcacgctggagatgctgcagagagagcacctacactgagaaagtggggccaggggaccaccaggtccctgggctctcagtagaactcccatcctccctctgcagcccaggccagygggggcccaggcctctcctttgctcctgtcttgtggccccttaaactggttgcccaaatgaagctttgacttagtgagggcagagagctgaacacagagacagtatgagtgcctacagccagaggcatctccctagaaggatcagtaggggtcatctgctccagccctctgcctctgtacaggaaaccagcctggatagtagagccagggagctcggggagaaccgcgtctacagacattgctctcaaggttcattcagtcagttcctgtgggctggccagggctcaagtgtaccctcagggggctcttcacctcccctgcttcttcaggctccggcgtctgagcccccagcagcca

SEQ ID NO: 468690 - DNA, 619 bp, Homo sapiens
tctacgtatgtgcaagtatatcccagggcatgtgccccgcaggggcctagagggtgggggccaggggtatttgcattcrtacattgtgtcatcaagcattccttgagcgcctactgggcatccggcctgtgctgggcatgggtggtgacattggcagaaatggccactggaaaggggagcgatgagctgtggaggaagccctggtggtaccagaggccagaatggtgggaaagacagatccagataatgctgggaagtgtggctacaccgtggcttggtcatagggtgagtgtaaacacccacaggacactgggggctgtcaccctgctctggcagtcctgctaagagtgtcagggccgtctccattttatggttgaggaaactgaggtctagagaggtcaagattacttgcccagaatcactcaggcagctagtgatagaggtggggccaagcccaggctgcccgactgcagaccacgtgctcttccctggccacccacctcctaccatccccacgcttggggcttccctgctcagtgttactgtcattctgggaggccttggggccctcagccccttgagacaccctgattctgctgcatgccaagggcctgttctg

SEQ ID NO: 468691 - DNA, 619 bp, Homo sapiens
tctacgtatgtgcaagtatatcccagggcatgtgccccgcaggggcctagagggtgggggccaggggtatttgcattcatacattgtgtcatcaagcattccttgagcgcctactgggcatccggcctgtgctgggcatgggtggtgacattggcagaaatggccactggaaaggggagcgatgagctgtggaggaagccctggtggtaccagaggccagaatggtgggaaagacagayccagataatgctgggaagtgtggctacaccgtggcttggtcatagggtgagtgtaaacacccacaggacactgggggctgtcaccctgctctggcagtcctgctaagagtgtcagggccgtctccattttatggttgaggaaactgaggtctagagaggtcaagattacttgcccagaatcactcaggcagctagtgatagaggtggggccaagcccaggctgcccgactgcagaccacgtgctcttccctggccacccacctcctaccatccccacgcttggggcttccctgctcagtgttactgtcattctgggaggccttggggccctcagccccttgagacaccctgattctgctgcatgccaagggcctgttctg

SEQ ID NO: 468692 - DNA, 641 bp, Homo sapiens
agaaaatcatcttttttttttaaattgtgacttttatcttaacactgtgtgaagtactcaaggtccaagaagcttaatggtcatttgtcaaaatagtaattatccaattttttcctatgaattatgaaattttttcaaaaccagaaataaaccaatgaaaataaataaaaattccctagaatttcctcaatggaatgcatgcccctattacctttgagtctgatgtatatgaatttaaaccattttgtaaaattgcaaatccaatcatacttaatacttcaggtttccaagcaaagcttgaagcctacaacatattacaggaattatctttactgacaactgatggaaacatctctaaaataagcttttgaagttagtacattaagcctaatttaatataaaggcaatttaatcttatcttcatatgaaagaaaaatacactgtcaggatgaaggatttactaaagttacaattaactggagatatatcaccagtaaaaacctaattccctgttataattaaatcaaagcctcattaggttagagggtgtggaagggcatgacccagtgggaggtgggaatctcaccaataaaasgccctcatgtgccccttccgcacaagacctgagcgcccagtggaag

SEQ ID NO: 468693 - DNA, 560 bp, Homo sapiens
ttgttcagcaggaatgtcctggctgccgtggcttctgctgtgtgattagcggttgtcatccaccctgcctgccccgtggagaggccaggccactctctcktcagagaacctgaggcccctcctcaatcctccatgcatttgacaccaaacacatgctaagctcctgttatcccactgcacaccaggtaccgcacctgagcaggtactgcacctgaacactcagatacagggaggcaggatcatccaggaaaatgcaacatagcagaggctgagaactttccttgcttggaaacatgtgaatttcacacgttttgcttccatgtgcctcacttgtctttttttcttttaagactaatttttagagcagttttaggttcatggtaaaatgaaactgatggtacagagagttcccctttcttctgtgcccccagatatccacagcctccctcactatcagcttccccaaccatggtagtttgtacattttcattgtgattgctggacctctattgaaacgtcctcacccagagttcattgtttatatgaacattcaccctcgg

SEQ ID NO: 468694 - DNA, 563 bp, Homo sapiens
accttgttcagcaggaatgtcctggctgccgtggcttctgctgtgtgattagcggttgtcatccaccctgcctgccccgtggagaggccaggccactctctcgtcagagaacctgaggcccctcctcaatcctccatgcatttgacaccaaacacatgctaagctcctgttatcccactgcacaccaggtaccgcacctgagcaggtactgcacctgaacactcagatacagggaggcaggatcatccaggaaaatgcaacatagcagaggctgagaactttccttgcttggaaacatgtgaatttcacacgttttgcttccatgtgcctcacttgtctttttttcttttaagactaatttttagagcagtyttaggttcatggtaaaatgaaactgatggtacagagagttcccctttcttctgtgcccccagatatccacagcctccctcactatcagcttccccaaccatggtagtttgtacattttcattgtgattgctggacctctattgaaacgtcctcacccagagttcattgtttatatgaacattcaccctcgg

SEQ ID NO: 468695 - DNA, 560 bp, Homo sapiens
ttgttcagcaggaatgtcctggctgccgtggcttctgctgtgtgattagcggttgtcatccaccctgcctgccccgtggagaggccaggccactctctcgtcagagaacctgaggcccctcctcaatcctccatgcatttgacaccaaacacatgctaagctcctgttatcccactgcacaccaggtaccgcacctgagcaggtactgcacctgaacactcagatacagggaggcaggatcatccaggaaaatgcaacatagcagaggctgagaactttccttgcttggaaacatgtgaatttcacacgttttgcttccatgtgcctcacttgtctttttttcttttaagactaatttttagagcagttttaggttcatggtaaaatgaaactgatggtacagagagttcccctttcttctgtgcccccagatatccacagcctccctcactatcagcttccccaaccatrgtagtttgtacattttcattgtgattgctggacctctattgaaacgtcctcacccagagttcattgtttatatgaacattcaccctcgg

SEQ ID NO: 468696 - DNA, 546 bp, Homo sapiens
caaagatggagcatttggaagctgctgtcagtgcctctattaacctcacaaacaacattctgcgggcttttgtttctgctgactccaccttcaattatcgcttgaatctccccatctcctgcttgaattgagggtcttctggtctctaattggggccactgctgtgtcttcctggaggttctctgtccctgaagtcacttgccctcctccttctccatccctccatgtgctgagcacgatgggaaagccatcctcgggcttcccttagtggggtgggagggcctcagctccactccttcagcctcacctgccactcttctggaagtgcccttggccttaatggggccattcaccaccctccctcccygccccagctctcctcaccaaaaaacccaaaccaacaaaaccgagtcctcccactcacccctgtgtcctcagctctctgcagatttgcccatccgttcccttcttagaagacacacttcccatgcctcgtgtgcctgagacatccctgatgtctgtaagcacaactcaagttcactgatg

SEQ ID NO: 468697 - DNA, 478 bp, Homo sapiens
ggactacaggcatccaccaccacgcccagctacgtttttgtattttcagtagagacggggattcaccgtgttaaccaggatggtctcgatctcctgacctcgtgatccaccggcctcggcctcccagagtgctgggattacaggcgtgrgccaccgtgcctggccattctcctcattttaagacacgtactatctcagaacaggattcacactggccccgcttgggtaacatgactaccagcttctctactgactggccatagtgaccccggacaagttaagttaccgcttgttaaatgaggacagtaacagtggttccctgagtgactttgtgatgatcgaatgagctaatatgtgtaatacacttagaatggcatgtatgtgctcataaaccttagggaacaatccattttcataattctcactgcacatttctttttcatttaaacatttttcataaatctttgtggtggttcca

SEQ ID NO: 468698 - DNA, 588 bp, Homo sapiens
ttcaatacttacgaaaggaagatttaaaccagaggggggttggtctacatagtagtaatcctttgttggaatggaacccttgctrtattagtgacaaagtcaaaggaaatttaggaggcataggccatttcaggcagcataagtaatctcctatcctttggcagaagctcctttagattgcgatggattccaaataaagaatttagaaatatgggaagatttaattatgaggccttgaacacggattatccccagacccttgtcatttctctcagtgagctctgagttctagactgctttgaaaatgccatattcattttgctaacttagtatttggggaccctgttccttggctgttcttttcttggaacccttctcagtcaagcctgtagggtatctttctttacccaccactcattcaattttgtttaaaacatgcacgcaaccctaaggagtctcaagaataagcttacttggttagtgtgttatttattgagcatagcttgtcccaaccactgtgttagattataaaaattagtggattgagtccactttgttgtgttgttttcattattgaaaataaatata

SEQ ID NO: 468699 - DNA, 629 bp, Homo sapiens
ctagaatgagatgaagccggccatgacgaaagaagtaacttgtagttaatcagttggggtccagccttgaaaaccaaaactacactagctacttcagcagggaaaacatcacatgactctttggtaaaatgggagttagaaaacaaaaaaaaaggttaaagggatccccgtggtgacacagacggaggaatcgggattgtcagaggtggggggctgcagccccactgctagcactatgaaggcaggcaaactcccgctgccaagtgcggcttcgcagatgcaggaccatccatcctaggatgagttgaacggcatcagcaagcaaatggaaggaaatcgctgtcttcctcagcgtgcctcccgtggtccctctgatgctccctttggtagaatataaaaccagcagagaagggagttgtatgtgcaggatcccagccccaktatcacaaagcagaacatgaaaattggatttgcaaccatcagaaaaggcttcataacagatgcaggtggcagaaaacatgaaaggtcctgtatgtgttcactgtaagttctagaaggaaagaatcagtatagtaaggccaagagaatgttcagaaacaatgattgagtagttttttggtttgatgaaa

SEQ ID NO: 468700 - DNA, 567 bp, Homo sapiens
ttacctaccaggctagtcttgaactcctgggttcaagcaatcctcctgcctcagcctccccaagtgctgggcttacaggtgtgagccaccacacccggccatggttactttttttttttaagtttggtaaagttttaatgaccaggtctaagggttggagtgagtagggattactctgttagcaggctctgggaatctcatggtcatgtagaaaaagggattcctccacaatggggagtgtggtcatctccctcaattgcagacacaccttgagttcagggagacatctctccacacttggaccatcttcacagaccctggcagcagtcgatgggcaaagctgtgtaacagtgatggccgtttascattgcctggtattcattgtccagcacgatgatgtggagctcaaatactctgccatcctcagcgggcatattgttggatctctcctcacacttccaggcccacactcatggctgttcatgatcacccaatggccaaagtacactcagaaatggaaggcgatgtctgagtgctcatcgtccccctgtggaaatgcacctgcag

SEQ ID NO: 468701 - DNA, 474 bp, Homo sapiens
taggctggaagcacttgctacagccactgatgaatccttaggagaacttaaccctggacttccaaggctcggctgtccaacagggcagtcctagctacagatggttattgtgtgctgagaaactgaatttttcggtttaattaaatatccgtaagtgagtagtggctatgatactggatgggacagtggctactaggaaacaatgttctgaggtttaagttaccagaatatgaaaaaatcaaggtgaaagtgctttagttataagacaagtatctgcataaacagtaaactgcatatctaggtcagggaataactaggttggcagccacagcaatagactmccactagaagtctagaagatgcccagcattttagaacaaatggaattttcctggcttgtttcctagagttcctgtgtacaaatctggaaacatctgaaaagccagcagctttatgataattcctttaaataag

SEQ ID NO: 468702 - DNA, 578 bp, Homo sapiens
tattagctgaggctgtggtctcatatcagggctcaactgaggagggatcagcagatccaaaatcatgtgggttgtgatacccacattttcttctagttttcaccattgtattttaaatatttaactatttaatccctgtgatgcatggtagaatcaaaacctcacccctacatgtttagtcaattattattattattattattgcaacacactgaatagtctactgttgtaccattgataaaaatactatattctaaaatgttatgtatagttgagtttgcttttggattttccattctcttccattttatttaatcccaacatcatagttttaaatcacacttttattatattttataatatgccgtattttctggccatcttggttcctcttagtttgcaaattcctcacagccattcttctaagaggtgaaaaggcaatatagaacattaaatttgttggaatcaattttgtttttctcaaagygatctacttttcagtgccctaataattttgtcatttgtaatttgaaacaatttacatttttatctgcaaaaagcccttcaagttggtcaca

SEQ ID NO: 468703 - DNA, 637 bp, Homo sapiens
agagggccaccttgtttgttttctgacttcctcttaaaatacagtttatcgcccttgatctttagtttcaaatagtaactattcacagtaaacaatgtgacacagtaaacaacgtgtacagaaaaacaaacaggagaaaacaatttgccccttgtacttcacccagaagagccactgctaatattttgatgtatttccttctattttagttgcaaactgtaacaaccattaaataaataaatacgatgaatttgtaaagttyacagagtaataataggagtgatgattgcacaacatcgtgaatgtactaaatgccactcaattgtacactttaaaatggtgaattccacatgatgtgagtttcacatctattagcctcctgggctaggaatactgcctagacctcaggaaccacggaattcatcatctctttccttttccttaaagtttgacctcctgtgtgtgcccttcaacaaacggtttttcagcttgtcctgcttttgaacttcatacggattgaagaagaccatgtgtatttttcatggtttgcttctttctcaacactgtctctttgatattgatgttgatgaattactcatttcactgctgactagaagcccactgtgtggaggtccca

SEQ ID NO: 468704 - DNA, 467 bp, Homo sapiens
accccaaagcgggccaagtaccctctccctttaaaaataaaacaaaataatacacacagtaagcctggtcttgttcacacttatttgagttaccagtttttcctcaagtggattaagccaatttaccaatgaccaggtttttctactctgaaacagtaacaagcctgccagaaatgatgtgcagcattttcctggcttagttcagaaactcgatttgtgtttaagctgtcaatttaatccacactgcctttttacttttatcaggatattcttcaggtagaaaagaatggagggaggctttaggcatgactaccgtcctaartataaagttggttaaaaaaacaaaaatccctactcggcccaaatagcattgtgctttataattcattcttttcacatacagtaccctgcgttatcatggctaatgttttcctgctgagctgccatcatcttttgtcaagctgtca

SEQ ID NO: 468705 - DNA, 614 bp, Homo sapiens
acctcttactgtcattgcccattaattactacctaggtgctttaacgtgcatccttaagtcatttccatttgccctataaataataaaaaacaattttttaaaaaagagaaattattatattttgaataatgcaatttaaaaatactgacayatagcaaaggctaattatgaccctaagagaaaaagattaaatcatcaagttaagtttcttcaatatgatcgtaagatgacgggctttttccttttatatttccttttcctatttaatttctcaggtgtcaatactgactgccattagaaatccgtattcactggtctgtgactgatctcaggcatcaaaaccagatattgagtgtccaccagaaatctctgaaacaatcattttattagatgtaggaacaggtcataggaatgtgtgttctgactgctatgataaccacagtccaacctggatctcttgaacttcccccctaatacttcccttagagccttagccttttactttatactttgtcattctaatattattcgtattgatttaggtgacactgaggaaaaaagaaatcataattctaagtcacatttctcacttgtcaaatcttgtggtttaaat

SEQ ID NO: 468706 - DNA, 614 bp, Homo sapiens
acctcttactgtcattgcccattaattactacctaggtgctttaacgtgcatccttaagtcatttccatttgccctataaataataaaaaacaattttttaaaaaagagaaattattatattttgaataatgcaatttaaaaatactgacatatagcaaaggctaattatgaccctaagagaaaaagattaaatcatcaagwtaagtttcttcaatatgatcgtaagatgacgggctttttccttttatatttccttttcctatttaatttctcaggtgtcaatactgactgccattagaaatccgtattcactggtctgtgactgatctcaggcatcaaaaccagatattgagtgtccaccagaaatctctgaaacaatcattttattagatgtaggaacaggtcataggaatgtgtgttctgactgctatgataaccacagtccaacctggatctcttgaacttcccccctaatacttcccttagagccttagccttttactttatactttgtcattctaatattattcgtattgatttaggtgacactgaggaaaaaagaaatcataattctaagtcacatttctcacttgtcaaatcttgtggtttaaat

SEQ ID NO: 468707 - DNA, 614 bp, Homo sapiens
acctcttactgtcattgcccattaattactacctaggtgctttaacgtgcatccttaagtcatttccatttgccctataaataataaaaaacaattttttaaaaaagagaaattattatattttgaataatgcaatttaaaaatactgacatatagcaaaggctaattatgaccctaagagaaaaagattaaatcatcaagttaagtttcttcaatatgatcgtaagatgacrggctttttccttttatatttccttttcctatttaatttctcaggtgtcaatactgactgccattagaaatccgtattcactggtctgtgactgatctcaggcatcaaaaccagatattgagtgtccaccagaaatctctgaaacaatcattttattagatgtaggaacaggtcataggaatgtgtgttctgactgctatgataaccacagtccaacctggatctcttgaacttcccccctaatacttcccttagagccttagccttttactttatactttgtcattctaatattattcgtattgatttaggtgacactgaggaaaaaagaaatcataattctaagtcacatttctcacttgtcaaatcttgtggtttaaat

SEQ ID NO: 468708 - DNA, 614 bp, Homo sapiens
acctcttactgtcattgcccattaattactacctaggtgctttaacgtgcatccttaagtcatttccatttgccctataaataataaaaaacaattttttaaaaaagagaaattattatattttgaataatgcaatttaaaaatactgacatatagcaaaggctaattatgaccctaagagaaaaagattaaatcatcaagttaagtttcttcaatatgatcgtaagatgacgggctttttccttttatatttccttttcctatttaatttctcaggtgtcaatactgactgccattagaaatccgtattcactggtctgtgactgatctcaggcatcaaaaccagatattgagtgtccwccagaaatctctgaaacaatcattttattagatgtaggaacaggtcataggaatgtgtgttctgactgctatgataaccacagtccaacctggatctcttgaacttcccccctaatacttcccttagagccttagccttttactttatactttgtcattctaatattattcgtattgatttaggtgacactgaggaaaaaagaaatcataattctaagtcacatttctcacttgtcaaatcttgtggtttaaat

SEQ ID NO: 468709 - DNA, 627 bp, Homo sapiens
gtaatgatccaagacttcttctcgctgaattaaactgccttttgagaggcactgtaaaatcttccctaattggaaaaagaaggctaaatatttatttagagataaatgactcaatatttggaaaccacagaagttaactgaaaaaactactggaaacaaaagaaaattcagtagactaacgtctagaaaactaaaaatcatcataataagaattaatatttgttaattgagaactatgtattaatctctttaaaagatyatctcattattcttatgaagtagctacaatatcatcttaaagatgaaaatattgaaggaagtaacttgtccaaaaacacacactatgctgcgctgtttgttaaactcaatatgtagaataaaacagctttcttatgtaccaatactaaaagagaaaatttagttaaataaaaagtacaatcaaaatatcaacaaaaagaaacatgaagcagcaggtaataaatattaataagaaatatacagtatctatatgagaaaaactagaaaatgtaaataaggaacagaaggaaaatgactggagagagaacttgtatttgaacagtaagacttgaatattttacacatatcagttcttcctaatttctaaat

SEQ ID NO: 468710 - DNA, 525 bp, Homo sapiens
ccatcccctccaaaaaccccagactgctgagctctttctgaattacttggaactttyccaccgccctttgtaccattcttggacactttccttcatttctaccttatatcattatttgtataagcttgacaaaacaggggaaatcaggagaatatcaaaagaatggacatttttataccagaattgctttttcttttttaaccaaaggtactgtttcagggtaatattcttgcgggccaaattcatcatatccctatttttaataagatcattcctggcaacattcatggaattattaaactatgtatattttttaaaagtagtttcaaatttctgtcatttcagcaagaaacgtatatttattgaacaaaaagaagctgtactaccttaaaattctgctgtttcttgcagacaaatcagcaggaagcatataatctaaccctttggggtctgaacataatatgaggcctgcgaaaatgctataaacttacagggattattgtcttgctttgggttcgtgaattt

SEQ ID NO: 468711 - DNA, 328 bp, Homo sapiens
ttttaaaagactcaaggcagagtcctctagtcatgatcaaaaagtaaaaatgwattacaagtatgttggagcatgcaatatttttaagggtttttgtgctcttcttaaggacatgaaggcagtaaataagaaaccacccacatcactaaagcaattaaattataaatacatgggcctgagaagtcaatgaactgcaaacacagaaaatttgaaagaaaaaaaaatgtaagggcacgttgaaatcaaattacttaaaatagaaactaaaagataaggatgacagaaaatagttgatgactaaattaatagagaaaggcaattagaaagc

SEQ ID NO: 468712 - DNA, 545 bp, Homo sapiens
gcagaaccacatggcccagtcaagtcttcaaatgaatgcagctccaaccgccatcttgaccgcaacctccaagacacccagagcctaaaccacccagctaggttgctcccaaattgctaacccacagaaactctgtgagagaacagatgtttattgttgtttaggcactaaggcatgaagtttaggagtaatttattatgcagcaatagataactaacataccctcaaaggaccctcttcaattataaattctctcattcttagtcaaaaggacaagattcagtaaacatgcaytgctcctgatcccctgactggacctgaaacaatcttctagcttcataaatgtcatgtatttatttcttatctatttttttaatacaggatctcactctgttgtccaggctggagtgcagtggtgcaaccatagctcactgcagcctcgaactcctgggctcaagtgatcatccagcctcagcctcccaagtaattgggattacaggcatgagctactgcacctggcttaatgtagcaatttatttaaagag

SEQ ID NO: 468713 - DNA, 625 bp, Homo sapiens
tattagtccatcctttcattgctataaagaaataccggaaactgggtaatttataaagaaaataaatgtaactggctcacggttcttcaggctgtacgggaagcatagcagcatctgcttctgaggaggcctcaggaagttttcaatcatggyggaaggcaaataagaagcaggcatgttacacgacgaatcaggagcaagacaaagtgagggaggaggtgccacacactttgaaatgagcagatctcatgagaacagcgccaagaggatggtgctataccgttcatgagaaatccacccccatgatccagttacctcccaccaggccccgcctccaacactgggaattacaattcaacatgagatttgggcagagacacagatccaaaccataccaccagctaataccaaaaaaaaaaaaaaattttttttttaagacatggtcttactatgttctacaggctggtcttaaactcctggcctcaagtgatcctcccaccttggcctcccaaagcactgggaattcagacatgagtaacagtgcctggccaatacttatttttaaacattctctaccataaacttaggatcttgatttgttcacattgaacagatttttattata

SEQ ID NO: 468714 - DNA, 402 bp, Homo sapiens
tgtgaagctacgagccatgcctattttgttcccccagcagatagcccaataccccaagtacactgggccttcagtaaatagtcaatatgtgaataaatgaacaaattagtgaatgaatactctcctaaattcgtgtgctcatccattggctgttcaacctggctgttcaacctttggctgttcaacctagtggcatactgtgactgaatagattraactttaaaaatcttccaagctgtctttttgaatctatcttcatattctccacagaactttgcagaatgccttatactaaggtcttaatgaaaattctttatttaatgatttgattaattgatcacactcatagtcttttgaagcgaaaatagttctgaaagggccgtaatcatgtcatatgataaa

SEQ ID NO: 468715 - DNA, 642 bp, Homo sapiens
agacagttatctacacaaataaagtggcaatgtaaacgctataatagaggttgtatcaagtgctctaggaactcagataaaggaggagttaatgatgctaggaaggtacacaagtgtgtgctacaaraagcaaccaaggagcagtgacatttaaaataagccttttatccagatgaacaaattgggccagggtatgccaggcagcaggggtctcacagacaaaggagaagttgaaggtgaaaagagcagagtgctgggaatgagggtagaaaggtggactgagcccattgcagtgggtagtaggagccgtgctgaggggtctagattattttctatgggctatgagctcttcaagcagaggaaactatacttgggggcagaagacaagagaagcctgtaaatccgttatgcatactgagttttcagggaaggtgaaatatctcaagaaaaataacgggttcagtttattatgtggtcactcaacaaacactgatagagactagagcacataagtaaagaacgtcataaagagtttagtatcaggaggtgggatctacaaaagaatggctagaaaaagggtagtttggaaagtgggagaagtctagagatagtgctctctagggcagggatggcccatcacag

SEQ ID NO: 468716 - DNA, 560 bp, Homo sapiens
ggagttaatgatgctaggaaggtacacaagtgtgtgctacaaaaagcaaccaaggagcagtgacatttaaaataagccttttatccagatgaacaaattgggccagggtatgccaggcagcaggggtctcacagacaaaggagaagttgaaggtgaaaagagcagagtgctgggaatgagggtagaaaggtggactgagcccattgcagtgggtagtaggagccgtgctgaggggtctagattattttctatgggctatgagctcttcaagcagaggaaactatacttgggggcagaagacaagagaagsctgtaaatccgttatgcatactgagttttcagggaaggtgaaatatctcaagaaaaataacgggttcagtttattatgtggtcactcaacaaacactgatagagactagagcacataagtaaagaacgtcataaagagtttagtatcaggaggtgggatctacaaaagaatggctagaaaaagggtagtttggaaagtgggagaagtctagagatagtgctctctagggcagggatggcccatcacagca

SEQ ID NO: 468717 - DNA, 602 bp, Homo sapiens
caataacattttcaaaatctgtgtgccttcctgcttttttttctggagattaagagagtgatctaagatggtaagtttgtttttaaattttataagtaaagtctaaatcattgaatcagatttctgcattattatacatgaaacttctttcattttattacacgctatccataattcttggttattccatccccagcattatcagaaagcgtttgtgaaatgcgcgccagtgccctgcatccactgggcactgttgtgctacacagtgtcctgtttcttgcccacagggcccccgagggaratggcaaggtagtgggtacagagaatgtatgttacctggtttgttgaaatataaatgatcctgtgacctcctctcctttctcctcaggccttgtaccccctggtgacctgtttgctctgtgtcagtcagaagcagctgttcctgaacaggtggcacattttcctcaacaactgcttgtccaaccttaaagttagtatttgtcagctcaaaaacgatctctttaaaaaatttacagtagtttttaggctggctgatgtgcttctggaagtgactcctgatgtttgccaggggaattgtccta

SEQ ID NO: 468718 - DNA, 594 bp, Homo sapiens
gttctgtctttgatgaagacaaaacttttgtagcagaaacattggaaatgggtgaggttgttgaaaaggatacaacagaactcatggaaaaacttgaggtaaccaagcgagagaaattagagctgtcacagagactgtctgatctttctgaacaattgaaacagaaacatggtgagattagttttctaaatgaagaagttaaatctttaaagcaagagaaagaacaagtttcattgagatgtagagagctagaaatcattattaaccacaacagggcagaaaatgtacagtcatgtgatactcaagtaagctctttattagatggagttgtgacyatgacaagcaggggtgctgaaggatcagtttctaaagtaaataaaagttttggtgaagaatcaaaaataatggtggaagataaagtttcttttgaaaatatgactgttggagaagaaagtaagcaagaacagttgattttggatcacttaccatctgtaacaaaggaatcatcacttagagcaactcaaccaagtgaaaatgataaacttcagaaagaactcaatgtacttaaatcagaacaggtatgtttacttcttc

SEQ ID NO: 468719 - DNA, 554 bp, Homo sapiens
gtggcatgggtgttgttatgcactgatttatgttctcccttccaaaactccacaccaaagccctcacccccaggacctccgaatgtgtatttggaggtagggtccttaaggaggtagttaagttaaaataaattcatgagggggtaggtcctgatcccatatgactggtgtccttctaagaagaaattgggacacagacatgtacagagggacaactccgggaggactcagggagaaggtgccacccgcaaggcaaggagagaggcctcaatcggaaccagccctgcccacaccttgatcttggactcccagcctccgagacaagacaataaatgcctgtggttaagccaccggtctgcagtgcctcagracacagacacaggtggtgatgaagccaggcgagaacattttgaatgcatctagggatagaatcggcaggacttgctgatggatccaatgcaggacaagtaggtgaccctgaggattttatttgagcaaatggtgcagtcaccagtcagacgggggacccccgggcaagcacagtgcagtttctt

SEQ ID NO: 468720 - DNA, 424 bp, Homo sapiens
ctggaacctgtctggtcagggaagacccatttcaggccatgaggtcaacactgtgaccaacaggcaagaccctgggcacccttggtggccgctgcagcttggctgactggagcacgtgacccagcgtgactgcagaggccccgcctccagtrcctcagtttctccatggtgaggaccttcttggtgaggggttctgtggtgggctcccctacctccggtgttgtgtagggtgctgagcagatggatgccatgctgcatgatgggcaagggtggcccactagcactgtggcaagggccctgggctggggcttggattggcaggccacacctcctgctcccctggccaccaccagaggctcatctatagagtggggaccagcaggttatccttgtaggttgtgtgagggtgaaacatactagcaga

SEQ ID NO: 468721 - DNA, 590 bp, Homo sapiens
ctgggaggctgaggcaggagaatggcgtgaacccgggaggtggagcttgcagtgagccgagattgtgccactgcactccagcctgggtgacagagtgagactctgtctcaaaccaaaaaaaaagaaagaaaaaaaagaaaaacaamcaaatcctggtacatctacacatttctttaaaaaacaaaaacaaaaaacttagtcttcactaaaaccaatggcagagaagcgtgccttcccccaggagctgtgccctggtccaacaagatggcccctgctcctggcccacccctccacatgtggccaacatgcccctctgccatccaggagccaggagggtaggtaggagactctgctcccgcctagaaatgtaggcacagcaggctcaggtccagatcagggacagagagagtcctgcttctccctcccggcccaggaggcctgtgcgccccaagtccagctacagatgggggccctgttcccaggacaatggggacttgcacggaccagcagtgaagctggccacagcttctggtttcaagaggagaaaaacagtcactgctaacatcctctgacacctgtgcgggtgtgcc

SEQ ID NO: 468722 - DNA, 599 bp, Homo sapiens
gctgttgaaatcaaaagagtggccacagaaggtagtgagcttcctatctgagtttgtgtgcaattagaggttggatgccagtgagcctgttgcagccccaagatcccagggcttaggtgcccatcctagacccatttcatctgccgtcacctgcttcctggcatcgcatgtcatccagactggagtgtcagtggtgacaamgaagatcagagtgtctgctctggctctgtctagctgggaaaagtatggctgggggtggggatggcccaaggccacaaggtatgacagaacaggatgcaaaccaccatctgacatgttactgcatccctctttgtgggcaaagggaaaccttggtcaactcatgtccagctttgaggtgcatggcctggtgctttggggaagcccattctccaggtgctgccatgaaccccagggcacagtccatcacccccaagccccagatcccacttgtccaccaccaccacctcttggccctatagattgcataggtttggctgctcagagggaaatcactggtaccagccccacatgatcccactgctggatggtgggagagacaaccatgtctggctgggtct

SEQ ID NO: 468723 - DNA, 388 bp, Homo sapiens
gcacctcagtggtgctggccacatggatctgtctgtctgctgccagggcccagagctctgaccttaatcacctgctagtcaatattctgaataatgactctaaccaaagtcatatacagggactgttttatcggctamggttatgctttgagactgtcaatatactagagtaacaatcagaatcttaacagatttgaaaggactatgaaattaaaaagataaatgtacacaaataaaatacatttgtgttaagtataaaaaaaagatcaaagcttgcttcaaaaagcagctctaatacataaaatgtcaaccaaatgcaatgcataggccttctttggatgctgattcaaataaagcatttgaaacaaatagagaaacaacactgaca

SEQ ID NO: 468724 - DNA, 566 bp, Homo sapiens
gggcaagccacctgccttgaggggagggacagagagtgggagcctgtggaagcatctgatacacaggtgcctgggactgggaatttaaatggctcatctggagggggaatttgagggaggaacagaacaaacagtggggtcccctaggcctaaaaacacaaaactcactcagggcccacgagaattgtggtctaagacctaaggccatgtgctttgacacaagtaaaagcatttacatggsacctcatggcagatgattaagggtgtaattatgatgactgtatctggtcctgactgggatgctacatcagacaggaacctgaggagaaacattggttccccttccacattgaacacaggtagggacagggctcacgtacagttctaggaacccaggggaagatactgggtgactaatcactgaatcaaggtccccctcacagtgcagaatctggcatgggctgggatggggacttcagggacagtcagaaatccatcctgaccaacttggatggaaatctgggatccaaaaaaggaaccagcccaggtcaaggtgagccaggcac

SEQ ID NO: 468725 - DNA, 491 bp, Homo sapiens
tgaaagtggacaaggaccatgctggcgatttgtgcagcacacatgggcatgctcacagacacgctcatctcaaatgaggctgtgacacgaggcttttcasgtaaatgtgtgaaaagaccactgatcacagcaaatgcaaacagagtcagatcatgtgtaactcagcagatagtcaaagattaaaaaaacagtctgggtgccgtagctcacacctgtaatcccagcactttgaggggccagggtgatcacttgagcccaggagttcaagactagcctgggccacatagcgagtccttgccctaaaaaaaataatcattagctgggcgtggtggcgagcgcctgtaatcccagctactcaggaggctgaggcaggagaattgcttgaatccaggagatcaaggctgcagcgagccatgatcgcaccactgcactccagcctgggcgacagagcaagaccctgtctcaaagataaaaaaacagataacccagaa

SEQ ID NO: 468726 - DNA, 491 bp, Homo sapiens
tgaaagtggacaaggaccatgctggcgatttgtgcagcacacatgggcatgctcacagacacgctcatctcaaatgaggctgtgacacgaggcttttcaggtaaatgtgtgaaaagaccactgatcacagcaaatgcaaacagagtcagatcatgtgtaactcagcagatagtcaaagattaaaaaaacagtctgggtgccgtagctcacacctgtaatcccagcactttgaggggccagggtgatcacttgagcccaggagttcaagactagcctgggccacatagcgagtccttgccctaaaaaaaataatcattagctgggcgtggtggcgagcgcctgkaatcccagctactcaggaggctgaggcaggagaattgcttgaatccaggagatcaaggctgcagcgagccatgatcgcaccactgcactccagcctgggcgacagagcaagaccctgtctcaaagataaaaaaacagataacccagaa

SEQ ID NO: 468727 - DNA, 608 bp, Homo sapiens
acctgctggggactaggctgcccattggagaaggaaacacagtgctgggctgtgagctcctgaagcctgtctctgtgccccaggaccaggttcctgggtggagggagagaccaggggcaggtgaggaaaggcagggcccccagaatccctccatgcctgcccctcagtctccaggacttatgtgcaggtaccggttggagctgtggtgcagttcccagtctcaccaccagatggcaccatgcccctgcagaagcagtgcccagagcaggccaggtggttctcgggggctgcggcggaggaatccacccagccgaagctctggcagggaaggggcagtgctagggggagccccctccccacttggatccgaagttcccatggggcctagggcaggggcttgccaggtagccagaagttcccttgctgagtctasggtgtctatcccacatttcacatggagacgaatcatcccagacaccccggcactgtcccggggccgtttgccacccctcccaaggggcagggctcctgtcttggggccttcccaagcatagtagccttcgggcagccccggcctggccccaggttgtcccacttgtcagtgggca

SEQ ID NO: 468728 - DNA, 640 bp, Homo sapiens
tgcggggggaatatactgtaaagggctgagcstggagtgggggctacctctcctgctcgggctggtgttgggggttggggtgggctgggtgaagctgccactcctggcctggatatatggagccctgggcagtcctgcctgtcccatggctttgctggacacaacaagaactgccagatgtcatttgtgtgggaatcattttgctgtttgagcgaagttggatttgttagtgtgctcaccagtgtggatggatgaggtctgaccaggaggctgcctgttgtctgtctttcacagagggccctccacacccagggtagagctggggagaaggagtcctggggaaatactgagttaaacaaggctgatgtatcctctgcaggacttctcagtgcctttagcatggcgggtgtaggtgagtctaagagatggccaggtagcctaggtgtggatatcaccaggctagggctgctgtctgtctcctctgctcacgctcctgtgcagggagggacttgagggtgggcctggggaaactgtggaaagtaggagtctctgtccccagacactgtctctgaactggggccaagattcagtcatttcatgtccccactaggcagtgcttacagatgttgcccagtatcag

SEQ ID NO: 468729 - DNA, 602 bp, Homo sapiens
tgcctgtgcagaggtgccaacacctgtccttggactgtcccctggacagcctggggcgtggggtagtatcccctccttgtgtggactccggaggtggggttgacatgtcaggaggggcgggttgatgcctgtgaggtgtggtggccacgcgtgtatgctacttgattaaaaagggaaaaaaggaacaactggcatcatttccttttcacaaagcttgtggtgatctcttggtattttgttgctagctgtgggttggtggttcatggctattaaatttaggtattagtgaccaagtgttttcttttttttttttcatcttattttaaaatttacatagagttaaattcactttttggtacagtactgtgagttttgacaaatacacagtcatgtaaccaacactgcaatcaagatgcagaacatttctgtacattccaacattcttcttygttggtcaaactctcccacctgtatcctctggtgggcactgaactgcccctgtagttttgccagatcctgaatgtcctcttagtggagtcacctggtacgtagcctttgaacctggcctctggcttggtgtggtgtgacgcatccgtcgtgtg

SEQ ID NO: 468730 - DNA, 550 bp, Homo sapiens
cactctgaggtgtgatcctgtcactgtcacagcttacggactrtgtcacagcagtgccttgactaggaaaactcccagagacacctgcatgtccctggatggtgctccagccaccacaaggcagggctgcactcttccccactgccaggcaaggccaaaacatcccctcacattggtgaatatttcaggcaaacccagtgtcctaccataaagacgtttagataatacactgtgtgcaaggctaaatcaggtgaaaattttgtaaactcctgagtacacagattggcaatactatcgtgtcttcagagactgcactgtgcacaatcagcagagttcatacgctgtcatctaaccatctgacaagaccagccattttgccagcattgttctctcagaagaattgttttcagataaatgcattcaagcacatacatttgtgaagctaaaattaaccacataaggtctgggattcctttttataaaggttcaaaactgtgagaggaggaagtttgaatcttccctctatcaatgaggactacaacttccaact

SEQ ID NO: 468731 - DNA, 646 bp, Homo sapiens
ctgggggaggtggtctttccattgcaattgggtacactgggattcctgtttaagaaagcattctatgaatgagtgttgatttaattaaccctaagaaaagttaagcttcacgaagtgacaaatttaatttcatgactttaaaaaatgaagctctaaccttgagatagatatctttccaaaactgtaaccactaaggttctacttgaaacaagcagccagctatacccttacctccaatgagagtacatgtgtagggctttaatcagaagttagttgtaaacagggaaaatgctattagcaaactcattgtgtaggcttccctttaaacatgtctttgtggaggcacttctcccaactacatggtgacaacaaagagatgtcaagaaaaaggaagaattttctataccacgaaaggcattgattcaatacttccacttctccagctacctcataaattgtggaacttgggagagcagcttagggacataagtacttaggatgttaacaactaaacttaactatagtcatgagaataattgctgtattccatttattgagctcttcaggagaagttgcaaaccacttggattttaagtcaacaaayatttccagaaaacatgttgcacacagggactgtgcattccaa

SEQ ID NO: 468732 - DNA, 550 bp, Homo sapiens
cactctgaggtgtgatcctgtcactgtcacagcttacggactatgtcacagcagtgccttgactaggaaaactcccagagacacctgcatgtccctggatggtgctccagccaccacaaggcagggctgcactcttccccactgycaggcaaggccaaaacatcccctcacattggtgaatatttcaggcaaacccagtgtcctaccataaagacgtttagataatacactgtgtgcaaggctaaatcaggtgaaaattttgtaaactcctgagtacacagattggcaatactatcgtgtcttcagagactgcactgtgcacaatcagcagagttcatacgctgtcatctaaccatctgacaagaccagccattttgccagcattgttctctcagaagaattgttttcagataaatgcattcaagcacatacatttgtgaagctaaaattaaccacataaggtctgggattcctttttataaaggttcaaaactgtgagaggaggaagtttgaatcttccctctatcaatgaggactacaacttccaact

SEQ ID NO: 468733 - DNA, 594 bp, Homo sapiens
tgtcgtcttaaaagctgtagacagctttagttcagccaacatactcatttcctgcaaataaaaagttgaacagacaaatacccatatctctgcactcaaaatgcatgtgcttgaatattattcttcattatatatagcactttttatttgtaaagcactttctaattactctggtgacttactctctaaggcaatcctgcgaatggcattttcagagttgatagacaagagaattaaaatgctgagactgtggcacaggctgagggcctgtgcctcttaggtcctgcagctccatgtgttgggatgaggagatgctgaaaaatgtgaggtgcatttagagacttctgaatcactactttctgccctaagtggatgttcttggggcaacctgttattgggtgagatctgtccttggcaatatgaaagtaatgctggtttatactttatgattcttttctcctaagttacttaaagtgcttttcaggtaataactcacaaattaccatagcatctctrtgatacatgtctgcggcagatattatcttcattttagcaataagaaagaaatggaagcatagagtcatagaacaactt

SEQ ID NO: 468734 - DNA, 621 bp, Homo sapiens
agaaggatgccactactattgcctctcccagttaacttccttgttagctggagtggtaggtcattctcaactgggtcaaggaagggatgaaaccctctgaaagtcccaagaataagatcttttctaaaagattgctgtgttttaaaaagactgaactcacttgtcttgtgtcaggagcatccacagttcttctatgttattagaagatgagatcctgaactccacgtcgcaatacactgctgtctcgtaatggaaaaggggccactttgagcttacaaaagtttctctagctagtttggcatattcgagctatgtaaaattgtagagaagtacctttgtaactttagggtactaaggagctgataagaacagcaatttatctcaggactttatctctctctactctcccattcatgtaaattattaggaaatgataycctgaaaaagtctgagtctgttgccttttcatcacagtattttacaacaggccacaaattcaattgcctgtatgtacaaaatgggtaacataaatgaatattgtgggtctgtcatcagaaaacctgacactaagcctcctctatgtcagagagcaaaaaaaaagtagtgaggactgtggaacca

SEQ ID NO: 468735 - DNA, 520 bp, Homo sapiens
cctggagctacagtttaaagaattcctatgtaactgttctcactaattcaatgtattccttttcttaattccatattcagtgctatttctgtagagtactagacaaaataatttctcaccctacttggtatttacacctttaaagtatttatagattgcttttatatcctcacgtagtcatcacttaaccaaacagtatgcattttagttttacactattactttagaaattcatccctccataaagtgatagcttttcctgaattattctatttctttatatatttcttraattgtagtatttcttctttgaataactagataacgagcctgttgaagatagcaattctgacttacaattacgactttgccttcactgttgcctctaccatgattgacacagaactgggcataaaatatggggagaggaggaaagagtggatttgccaagaagctgtagggacagaaagttctgaaccctctttctgtcatgtttttggtcctcctaacccatgttcca

SEQ ID NO: 468736 - DNA, 575 bp, Homo sapiens
ttgcagcatagcaccaggacctctgggtagygcttctgctctggcagctcaaggtggtattgatttcctgcagttactaatctttgagtgactttaccttgttcactttggtttcttaagtaacttctaccacctgtgtaaccaatttctcttttaaatgtcttatttttgaaatatctagagtggttcctattttctgataagtttctaatgtaatgtgttcaactccacatttaagtatcattcattacctgttaatgtgtcccaatttcaggatattaatgtactctttgaatgttgcctgaagtaacacatttccaaccaaaatgaaattgtaaccttgggcattggacttgattctgaatcttcttcagaggagtcaagataataagatacattggccaggaatattcgtgtgaggaaatcaaaattgatggcgcaaactgctgccatggaccatccaaagtatactttatttaatctgctatgggggatgtggaaggcagaaatttataggcacctaagtgtctttctgtctagctgtaccccatgttgttcctagctgtgtaacacat

SEQ ID NO: 468737 - DNA, 589 bp, Homo sapiens
ttgcagcatagcaccaggacctctgggtagcgcttctgctctggcagctcaaggtggtattgatttcctgcagttactaatctttgagtgactttaccttgttcactttggtttcttaagtaacttctaccacctgtgtaaccaatttctcttttaaatgtcttatttttgaaatatctagagtggttcctattttctgataagtttctaatgtaatgtgttcaactccacatttaagtatcattcattacctgttaatgtgtcccaatttcaggatattaatgtactctttgaatgttgcctgaagtaacacatttccaaccaaaatgaaattgtaaccttgggcattggacttgattctgaatcttcttcagaggagtcaagataataagatacattggccaggaatattcgtgtgaggaaatcaaaattgatggcgcaaactgctgccatggaccatccaaagtatactttatttaatctgctatgggggatgtggaaggcagaaatttataggcacctaagtgtctttctgtctagctrtaccccatgttgttcctagctgtgtaacacatcactcaagcaatag

SEQ ID NO: 468738 - DNA, 208 bp, Homo sapiens
tgacgagttagtgggtgcagcrcaccagcatggcacatgtatacaaatgtaactaacctgcacattgtgcacatgtaccctaaaacttaaagtataataataaaaaaaagaataaagaaaattagtgagtgctagtatgtacaaagtgtaaggaattttatgtggcagaagatatggttcctagcctcaagaaacctaaaatccagct

SEQ ID NO: 468739 - DNA, 576 bp, Homo sapiens
aaaattcttgaatgtttagtacacatatagtcacttagatatagaaatacatgatgcatgcacatgcctcactagccatgttgaggtaccctccgaaattgaaatagatgatcactcttcagtgaataactgcaacagtaacagcaacacaataaaagtccaaggaaatccaggttcttgttatcttccttttgatttagtaatagagtaacagtgcctctaaaatggtaatccaccaacctggcartgctcctcaggaaggtttaaaatactcagattcatggtgctcatccaagacttactaaagaagcatctctcagattcatcctaggaatcaattatttaaaaaattccttcagatgattctgatgccgtcaattaatctgtaaacaggtgtttaggaacgatttatatcaattaatataatagaatcttgacagacttaataggattgcttttctcttttgccctacactccagcagtattatatttctgttaaataacaattattgagatgtatttatggaatttagtcacagtatctagcacagaggtagatgataggaatggtgaga

SEQ ID NO: 468740 - DNA, 358 bp, Homo sapiens
ttcagtagtaaataaattagcaatcacattgcccatgtsatgattatcataacctctttccagacatagtatgcataaacatttgatgttttcagacttaaattctgtatagcagaaagaaataaatttaatggtcttaaatggtagaataatcactgtattgttctgtgtattatcagttttagtacttttctgtgataatctaagtatcattgaattgtgtattcctgtatgtttacattttaagtcttttctgtgatgtcctcataaagtactgagcagtttcacttttcctttactgcattttaacgcctcttctgcagttcttgtttgggcaaaatttcctacatttttcact

SEQ ID NO: 468741 - DNA, 372 bp, Homo sapiens
gaaggagcaccccccaagagagcgctcagctttggaaatctgcctcactcagaggccactcccaccagattacccttccaaacataccagaccagtgataaatgattccctactcccgcccggtgtagctgtatgtataactaggtaagctttttcttcacacaaaccctccaaattgcaatcccactatcccatagactttggtcagcagaataagctytgttcttgcccagatggaaatggctccttgattctgcctagggtaagatgaggaaagagttagtcattgttcacccctttgtcatgtgcccaggtgcttaatgtcactcctggctccctgtacccagacactgtgacacctctcaaggtacc

SEQ ID NO: 468742 - DNA, 580 bp, Homo sapiens
gttttataaggggcatttccctcttttgctcggcacttcttgctgccaccatgtgaagaaggacgtgtttgcttccccttctgccacaattgtaagtttcctaaggccttcccagctatgctgaattgtgggtcaattaaacctctttcttttawaaataacccagtcttgggtatgtctttattagcagcgtgagaatgaactaatatatccatatttcaacatatactcatccatggcttccaagagactgcccagacagcgtcagtgtctaattcactttaaagcatggaattggatagaacattctggctatttattctcagctaaaattgctgtaatctactaacccattttttcttctctttcccactatccttcttgccctggcttgctttctctccttccctatattcactcatcttttactgaatgtttttaaatttgtgaactttttttctctttcagaactgcataagagaatttatctatataagtaaaattcctaaataaaatcaatttagaagtcaggaggaatgccagggagccatacatggttttaaatatattatcactacac

SEQ ID NO: 468743 - DNA, 580 bp, Homo sapiens
gttttataaggggcatttccctcttttgctcggcacttcttgctgccaccatgtgaagaaggacgtgtttgcttccccttctgccacaattgtaagtttcctaaggccttcccagctatgctgaattgtgggtcaattaaacctctttcttttaaaaataacccagtcttgggtatgtctttattagcagcrtgagaatgaactaatatatccatatttcaacatatactcatccatggcttccaagagactgcccagacagcgtcagtgtctaattcactttaaagcatggaattggatagaacattctggctatttattctcagctaaaattgctgtaatctactaacccattttttcttctctttcccactatccttcttgccctggcttgctttctctccttccctatattcactcatcttttactgaatgtttttaaatttgtgaactttttttctctttcagaactgcataagagaatttatctatataagtaaaattcctaaataaaatcaatttagaagtcaggaggaatgccagggagccatacatggttttaaatatattatcactacac

SEQ ID NO: 468744 - DNA, 650 bp, Homo sapiens
gttttataaggggcatttccctcttttgctcggcacttcttgctgccaccatgtgaagaaggacgtgtttgcttccccttctgccacaattgtaagtttcctaaggccttcccagctatgctgaattgtgggtcaattaaacctctttcttttaaaaataacccagtcttgggtatgtctttattagcagcgtgagaatgaactaatatatccatatttcaacatatactcatccatggcttccaagagactgcccagacagcgtcartgtctaattcactttaaagcatggaattggatagaacattctggctatttattctcagctaaaattgctgtaatctactaacccattttttcttctctttcccactatccttcttgccctggcttgctttctctccttccctatattcactcatcttttactgaatgtttttaaatttgtgaactttttttctctttcagaactgcataagagaatttatctatataagtaaaattcctaaataaaatcaatttagaagtcaggaggaatgccagggagccatacatggttttaaatatattatcactacacatttgaggtatattgaatacctatttttaagttctagaagaactttgggcatgtcaagtgcaatattttc

SEQ ID NO: 468745 - DNA, 445 bp, Homo sapiens
tctctaaaaaaaacattaaaaattagctgggcatggtggtgcacgcctgtagtcctagctactcaggaggctgaggcaggaggatcacctgaggccaggagtttgaggatgcagtgagctagaaatgcaacatcacactccagcctgagcaagagagtcagaccctgtctctaaataaataataaaaagaaagaagtgaaatgcacagtcaaatatatatttaacggacaggtggaagaagacaagctagcaaaggtgactgagttaaagtgcattccattaaggaaataagaaaaagagytttaagagctaagagagttgaaggagaggccaaaataatcctaataaagctgatatctacgaagaacatcctgctattaaggcactgtgctaaggagtgtctatagatgaactcagggattttggcctcagagtctagactcaa

SEQ ID NO: 468746 - DNA, 602 bp, Homo sapiens
actctgcaatacaacttcttaaacttgcagccaggaggagccctagggcagggaaagctgcagactagctggcttcctggctgctatccaggcaaggattttgttttctctattacagtcgattatcctagactttagggagcaataggtctctggactgtaggtttcagcctccgttctgggcttatctttggattcttgttgatgagtcaaaaaaaaaaaaaaaaaaaaggagtgaccatcagatgtttgctaactcttcaagtatgagctcaaccttgttatctgcctggagtcatttcctttgaaaatgtrtggtagactttgccaaagtaagtagtaatgtcccattccttctcaggaaaatgtgtacacatagatcaaaactatgcattgtaaaactcatatctgtttgaaaacatagaggtagggacagaaagtaaacatatgaaggatttgacaggacacattaccagcctggtggtcctttttggaaaatgtttgctttctcgtaattgccttcaaaatagggacagtgtcctgaatgttggttacagttgttgaagatttctttttgagattatgcttggatgatggggcct

SEQ ID NO: 468747 - DNA, 483 bp, Homo sapiens
tctctccgtaagttagatggtatatttgtgtgtgctattattgctrttgctatttaactgcaaatatgcaattatcacacctttagcatgaggttcagtagacatagaggcactagattcaacaatattgaatttacaaaagaatggtccaatgaatgaaagttgggcagccacagaaagcctcagagagctaatcaatgtttcccaagaagtctgaaccccaccaccaaaccaagcaaagctgaaagtaaacatgttccggccaaagtacagaaagtaaaaatgcttcctactgctgtggatgagggtcctctgacaggccccactgatagagagtgggaagctcaagtttaccttaaaggaccttgtttcctaatacatattgttaaaccctttcgtaatgctctctgcaagcttggctgggtacttctctgctaactactaataagctgcagttttctcttggtctctgctttgggcaaa

SEQ ID NO: 468748 - DNA, 647 bp, Homo sapiens
ctttccttcatttcttattttctttgtgctgagacttcataaaaatatcatatgtgcttaaataaggccatatttctattactcaaatgaagcrtatttgagtcaattaattatacaactcaggacactcatcatcctctttttttaaaaaaaaattgttttggattccacttttctaacaattattttggttaggaaaaacgctttttcttctctcactatattctcacttcagcccacagaagaggagattcctacctcccaactccattctctttgggagctccagaacaaacatttcctctctcactctccgttcctttactgactttccccaacatggagggggaaagaaatcaaagccagagttctacgtttattgggcaaaaggggatagcaggctctctctttattctctgacctgtccacatacatctcaggcttcttttctctataatgtcatgagaccatgctgggcctcaattcttggaaaggaagcccaccctcttctctccatattccactggcaaccagacatttgagaaatacttgaagtccatgctactcactgcaagtgaactttaagtcttccgtgcaggcagaagtgggtcccaaggttgagatatggtgcaagagtaggaggcaca

SEQ ID NO: 468749 - DNA, 525 bp, Homo sapiens
tggtggtgcacacctgaagtcccagttgcctaggaggctgaggcagggggatcacacgaacccaagagttcaaggctgcagtgagctatggtcatgccaccgcaytccagcctaggcaacagagcaagaccctgcctcaggaaaaaaaaaaaaaaaatcatcctctaggtatgggggtaaaaaataaaaatttaaaaaataataagacctgagacccaaagtttggctatatgcctgagcctagagtccttgccacatcttattttctcctttgctcagcgatcttccaattagctctgaagagaattccttgatgggaccaggactagctccccaagtcctctaacaacgaaaggaaactattttacttaacatcaattatagacatattcccagagtcaattctagtcacattcactaatatggctaaagaaaaaacgagcaggaaagcagaccggtgggagaaagcaatactaacaaaaattaaatcgctcattctgaaggtacaagattagtatttttcag

SEQ ID NO: 468750 - DNA, 483 bp, Homo sapiens
gctcagcctccattttggacagctattccagtggagtggagtaaacgtgataccagggcagaatgcccccaaggggcctgtgaaattgcctagactgaggcttccctcatgctcaaaagcctggtagctgttgaactaagggaaagacaatggactctaatctaaatactaccccttcatatattttgactgtggacagcacagcctcagttaatataaaatgtatgggccaggtgtggtggttcacgcctgtaatccctacattttgggaggccaaggcaggcagatcatttggggtcaggagttcragaacagccaggccaacatggtgaaaccctgtctctactaaaaatacaaaaattagccaagtgtggtggtgcatgcctgtaatcccagctactcgggaggctgaggcaggagaatcatttgaacatgggaggcggaggttgcagtgagctaagagctgagattgcatgggcaaca

SEQ ID NO: 468751 - DNA, 589 bp, Homo sapiens
gcaaattattcgttttaattcatctagttagataattcgcattttaaagtattttttttttttgtaattgctacttcaaactttttggatcttgacagttattcaccttcctagcaaaaaactgtttcacattttgatatattttaattaaaaatacctatatcctatttataagagacacaaataaaacaaaatgtcggctgggggcggtggctcacgcctgtaatcccagcattttgggaggccaagccgggcggatcacttgaggtcaggagtttgagaccagcctggataacgtggtgaaaccctgtctctactaaaaatacaaaaattttagcccggcgtggtggcacatgcctataatcccagctacttgacaggctgaggcaggagaattgcttgaactctggaagcggaggttgcagtgggctgagatagcgccattgcactccagcgtgggtgacagaccgagactctgtctcaaaaacaaaacaaaaaaaaacaacaagaraaaacaaaaattagccaggcgtggtggtgggcgcccaaaatcccagctactcagggggctgaggcaggagaattgctt

SEQ ID NO: 468752 - DNA, 570 bp, Homo sapiens
gtgaagtgaaagaggattagatagcacgggcaggggaccccaggtggagtggccactggtgccctctgctcaggctggaggagaactcactgagccttcraaggagcgtatgcaagtgagagccctgaaacttatgccttgtttgcttcaagtcatatctgcctctgtctggaagccttctattataatttttttacattttttgaaattactatttattgggtcctgctttgtgccagccacatatatgcatgttagtttttctcaacattagaaacacatggaaagctttaaaaaatacaccaacctaagaccaattaaagccaaatctctaggggtggggcttcagtatctgtagtttttaagagcccccagatgattctaacgtgcaaccggagttgaaactctcagcgcacaatgctactttacatgttagcttcttaacgccttacacaaacctggaaaataggtcctcttatccatattcaagtatatgaataaactgaggctcagggaggttaaatattttactcaagaggaaatcacagagtcataattcaaacccacact

SEQ ID NO: 468753 - DNA, 570 bp, Homo sapiens
gtgaagtgaaagaggattagatagcacgggcaggggaccccaggtggagtggccactggtgccctctgctcaggctggaggagaactcactgagccttcaaaggagcgtatgcaagtgagrgccctgaaacttatgccttgtttgcttcaagtcatatctgcctctgtctggaagccttctattataatttttttacattttttgaaattactatttattgggtcctgctttgtgccagccacatatatgcatgttagtttttctcaacattagaaacacatggaaagctttaaaaaatacaccaacctaagaccaattaaagccaaatctctaggggtggggcttcagtatctgtagtttttaagagcccccagatgattctaacgtgcaaccggagttgaaactctcagcgcacaatgctactttacatgttagcttcttaacgccttacacaaacctggaaaataggtcctcttatccatattcaagtatatgaataaactgaggctcagggaggttaaatattttactcaagaggaaatcacagagtcataattcaaacccacact

SEQ ID NO: 468754 - DNA, 529 bp, Homo sapiens
catgagaaccagaggttgaggttaaggctgtagtgagcagtgatcacaccactacacatagcctgggtgacaaaatgagaccctgtttcaaaaaataaaaaataaaaaagcaatgcaaaatatcttcctttgattaaataaacaataaaactgtccaacatttttttcaatatgtagtgataaccaatatatagctaggtgctttactaagttactttaaaattcatttgctcaacaaacatctattgaatgctatttgcaaggcactgttctaggtgtctgaaatataacagtgaacaaacaatgattcctgcccttgggaagcttacattctaattgagggaaatgaacaataaaaatagagcaaatagtaagtgatgaaaaaaggaacacacagaaaatggtaagcgggaaggggaggggaaagaactacagttktgtaaaggatattcagcaggcctctttgcaaaggtgccatctaaacaaagatttcaatgagagcatgaacccccaagcccatggcaggagc

SEQ ID NO: 468755 - DNA, 642 bp, Homo sapiens
gccttgctgagagtgagcccagcatatcttggaaaatgaattcaccacactctggcacaaaccccatatcatccaacagcttcttcaaccagagcagctcagtcttggtccttatccatgaatgatggttgcagaaccacgctggctttacagggatctgggtaggatccattgcccccaccctgagtgtattcatagtgatgtgctatatggtttagragccttggtaaataagtcaaggtagaactgtctcaacccagaactttcttcaggtaagaagtatgcttccaacagaagttcctaacaggaagcagctatcaccatcaaaggggagtactgaaatcattccaagactaacccccacagtctactcttttcttccctatcatctgtgcccctaaagcagtcaggagagttccctagccagacctaactcagtacttaaatatctttgataggcctgggaaacagaacacaggaagaaaagtcgtggcttttcaccccagcagtggaatctattcttgttttttgtagcatgagatgtttacacctaaggaacagaaagtgaacttaaaatgtctttaattaagaaattaggtttaaatgattccatataacaaatctgatttaattttaaatttt

SEQ ID NO: 468756 - DNA, 432 bp, Homo sapiens
atgatacattaaagagattttatgatctactgaagggctgacaaaaaccactaatgcatccctatccaaaatttgaaaaacaaaatttatctggtctagagtgtaaataaacatgttatctgttaatcaaatttctgtatttccaaaacccttataaccagacttgagcatcagtcactacaatgtttatcacaggtacttttggaaaagtgctttgcttcataataattaccctatcagaaggcctcaatttataaagcatttagttacttagtgcttatgacgtaaatgtcacagttcaagtacttgatggagaaaaatattaaatgaagtgcacttgttttgaagataatttyatttagcatctccaaagcaggggataattaagttactctgtcatacaaaatgatggaggctttaaataagtaacag

SEQ ID NO: 468757 - DNA, 532 bp, Homo sapiens
tccactctcagttttatgtatatgtaaatgtatctttgtgtaatattttcatctgtaacttttaagacttttttcttatattttttctcatttttccatacagtgtggacwtatttttggatatatttcaaagaatataatacaaatttttaaatatataaaagcagaccttggcttcctgaccattgtgaatttgtattttcttatctccattttaaattgaattataaatttctaggtaaagttctataatttttttaaatatttgcaatgtttgtcagatcaataaaaactaatagtttgtgtctcaaatttccttcctactctttaagtgatgtaaacttctgtatattaatagcctctttgtaaagaatacaatttgctgacttttatatatggatacagcaatgaaagcatcaccacattccagattcaagataataaacacattcctccctcttcaaagttttctcctcctcctcttgaatccatctgtccttctccctccatcctactgtcttccccctgtact

SEQ ID NO: 468758 - DNA, 532 bp, Homo sapiens
tccactctcagttttatgtatatgtaaatgtatctttgtgtaatattttcatctgtaacttttaagacttttttcttatattttttctcatttttccatacagtgtggacttatttttggatatatttcaaagaatataatacaaatttttaaatatataaaagcagaccttggcttcctgaccattgtgaatttgtattttcttatctccattttaaattgaattataaatttctaggtaaagttctataatttttttaaatatttgcaatgtttgtcagatcaataaaaactaatagtttgtgtctcaaatttccttcctactctttaagtgatgtaaacttctgtatattaatrgcctctttgtaaagaatacaatttgctgacttttatatatggatacagcaatgaaagcatcaccacattccagattcaagataataaacacattcctccctcttcaaagttttctcctcctcctcttgaatccatctgtccttctccctccatcctactgtcttccccctgtact

SEQ ID NO: 468759 - DNA, 337 bp, Homo sapiens
tgttacacagtgtttacaaatgttctaaatcaagggaatttgtatcaatctagtagaataaataaaatatttgagttcttaatttcctttaattaggataacctttttcttaaagtgaagacagtggttttattatatcttttycttcggaaaagataggctgtattttctagcaattacgaatttgttatatatgatgatctggttcttggaacgttctcgaagctagtgtctctaaggcaggtgtgtacagcaagaggagaataacacagcaatcgatgttgaaagcactataaggcaattgagcttgtcagaactacaaaatattgctgagtgt

SEQ ID NO: 468760 - DNA, 337 bp, Homo sapiens
tgttacacagtgtttacaaatgttctaaatcaagggaatttgtatcaatctagtagaataaataaaatatttgagttcttaatttcctttaattaggataacctttttcttaaagtgaagacagtggttttattatatctttttcttcggaaaagataggctgtattttctagcaattacgaatttgttatatatgatgatctggttcttggaacgttctcgaagctagtgtctctaaggcaggtgtgtacagcaagaggagaataacacagcaatcgatgttgaaagcaytataaggcaattgagcttgtcagaactacaaaatattgctgagtgt

SEQ ID NO: 468761 - DNA, 337 bp, Homo sapiens
tgttacacagtgtttacaaatgttctaaatcaagggaatttgtatcaatctagtagaataaataaaatatttgagttcttaatttcctttaattaggataacctttttcttaaagtgaagacagtggttttattatatctttttcttcggaaaagataggctgtattttctagcaattacgaatttgttatatatgatgatctggttcttggaacgttctcgaagctagtgtctctaaggcaggtgtgtacagcaagaggagaataacacagcaatcgatgttgaaagcactataagrcaattgagcttgtcagaactacaaaatattgctgagtgt

SEQ ID NO: 468762 - DNA, 573 bp, Homo sapiens
taacttttaaataacgcccccccaccctggttttcataatgactctaccagttgagaactctgagcgttcagaattgttttttctttacatccttatcaacattgttagtagattggcgcaaaagtaagagtatttcttactatttagaaggcmaaaaccacaattacttttgcacagccctaatatgttacttatttttgatattagcccacccttggtatccccaaaagttggattgtaaattggcctttggtgtcacaagctttttagcttaatgtactccattttgtttatatttacttttgttgctgtacttttggtgtcgtgtctaaaaaatgattgccaaaaccaatatcagaggttttctctcagagtttttaaggatacatgttttacattttaggcttgatttcaagttaatttttgagtatggtgtaagaaaaatgggctatttcattattttgattgcgggtattctgtttctccaggaccaagtgttgaagagactatactgtctgtattgtatcttcttcgtgaacttgtgaaagattagttaagtggatatgcatgag

SEQ ID NO: 468763 - DNA, 573 bp, Homo sapiens
taacttttaaataacgcccccccaccctggttttcataatgactctaccagttgagaactctgagcgttcagaattgttttttctttacatccttatcaacattgttagtagattggcgcaaaagtaagagtatttcttactatttagaaggccaaaaccacaattacttttgcacagccctaatatgttacttatttttgatattagcccacccttggtatccccaaaagttggattgtaaattggcctttggtgtcacaagctttttagcttaatgtactccattttgtttatatttacttttgttgctgtactttwggtgtcgtgtctaaaaaatgattgccaaaaccaatatcagaggttttctctcagagtttttaaggatacatgttttacattttaggcttgatttcaagttaatttttgagtatggtgtaagaaaaatgggctatttcattattttgattgcgggtattctgtttctccaggaccaagtgttgaagagactatactgtctgtattgtatcttcttcgtgaacttgtgaaagattagttaagtggatatgcatgag

SEQ ID NO: 468764 - DNA, 573 bp, Homo sapiens
taacttttaaataacgcccccccaccctggttttcataatgactctaccagttgagaactctgagcgttcagaattgttttttctttacatccttatcaacattgttagtagattggcgcaaaagtaagagtatttcttactatttagaaggccaaaaccacaattacttttgcacagccctaatatgttacttatttttgatattagcccacccttggtatccccaaaagttggattgtaaattggcctttggtgtcacaagctttttagcttaatgtactccattttgtttatatttacttttgttgctgtacttttggtgtcgtgtctaaaaaatgattgccaaraccaatatcagaggttttctctcagagtttttaaggatacatgttttacattttaggcttgatttcaagttaatttttgagtatggtgtaagaaaaatgggctatttcattattttgattgcgggtattctgtttctccaggaccaagtgttgaagagactatactgtctgtattgtatcttcttcgtgaacttgtgaaagattagttaagtggatatgcatgag

SEQ ID NO: 468765 - DNA, 573 bp, Homo sapiens
taacttttaaataacgcccccccaccctggttttcataatgactctaccagttgagaactctgagcgttcagaattgttttttctttacatccttatcaacattgttagtagattggcgcaaaagtaagagtatttcttactatttagaaggccaaaaccacaattacttttgcacagccctaatatgttacttatttttgatattagcccacccttggtatccccaaaagttggattgtaaattggcctttggtgtcacaagctttttagcttaatgtactccattttgtttatatttacttttgttgctgtacttttggtgtcgtgtctaaaaaatgattgccaaaaccaatatcagaggttttctctcagagtttttaaggatacatgttttacatttwaggcttgatttcaagttaatttttgagtatggtgtaagaaaaatgggctatttcattattttgattgcgggtattctgtttctccaggaccaagtgttgaagagactatactgtctgtattgtatcttcttcgtgaacttgtgaaagattagttaagtggatatgcatgag

SEQ ID NO: 468766 - DNA, 634 bp, Homo sapiens
agaagctttagagaagaacaaataagcacctctaaaccaaaagagaaaaaggtaatagcgggggaattcaagccaatttatccatcatcaatatcacattgtttacatcttataaacaagcatatgttaaggataacaatttaataccactccagatgtaaacaaaactacacattctcaaaggaaatagaargcctgaaacagaggttgagatcccaataataaaagatgtgtattttgtcgggggaagagtgagctaaggagagctgggtagtaataaatattgtcacagcttttcctcatcagctgtaacagaaactttgtcagggttgcagtcttcagtgacatcatctcaactctcaaacaccagcatcacactcttggagcgggacacagcacagagtaagcctctaacagtactcatctcttccaggacagaagcagcatgtagacttccatctctggtcatgagggccccggctcaggacacatgtctcaagataaactgtgctgccataaaatatttgacaggaaaataggtaatgggataagctaaaatataaacactccagttggatttcaggtgtagtttcagcaaattggaaagggaagcaaagaaatgtcaatggtctta

SEQ ID NO: 468767 - DNA, 511 bp, Homo sapiens
gctgtcatggacttgtgggccctggaggatgggatgattctgagacattgaatccctacactgatctcagtagaaatctcaggtagggcttcaacattcgtcgacaaaggactctgtgggcatcagagcaacagccttggtgcatgtccaagctccatcaatcccaactggggctttgaacaagttacttattttttttaactaacgttattttaattgacaaatcataattgtacccatgtatgtgatgttttgatatatgtatacaatgtgggatgattagatcaaactaatgaacacgtccatcccctaatttactgacaattttcatgatgmgacatttgaaatgtacccacttagttattttgaaagatacattattattgactatagtcacgctgctgtgctatagatttcaaaacatataatccagcaactcaacttctggatataggccaaaaaaaaatcaaaatcaatatgtcgaagggatccctaaattcctatgttcact

SEQ ID NO: 468768 - DNA, 511 bp, Homo sapiens
gctgtcatggacttgtgggccctggaggatgggatgattctgagacattgaatccctacactgatctcagtagaaatctcaggtagggcttcaacattcgtcgacaaaggactctgtgggcatcagagcaacagccttggtgcatgtccaagctccatcaatcccaactggggctttgaacaagttacttattttttttaactaacgttattttaattgacaaatcataattgtacccatgtatgtgatgttttgatatatgtatacaatgtgggatgattagatcaaactaatgaacacgtccatcccctaatttactgacaattttcatgatgagacatttgaaatgtacccacttagttattttgaaagatacattattattgactatagtcacgctgctgtgctatagatttcaaaacatataatccagcaacycaacttctggatataggccaaaaaaaaatcaaaatcaatatgtcgaagggatccctaaattcctatgttcact

SEQ ID NO: 468769 - DNA, 511 bp, Homo sapiens
gctgtcatggacttgtgggccctggaggatgggatgattctgagacattgaatccctacactgatctcagtagaaatctcaggtagggcttcaacattcgtcgacaaaggactctgtgggcatcagagcaacagccttggtgcatgtccaagctccatcaatcccaactggggctttgaacaagttacttattttttttaactaacgttattttaattgacaaatcataattgtacccatgtatgtgatgttttgatatatgtatacaatgtgggatgattagatcaaactaatgaacacgtccatcccctaatttactgacaattttcatgatgagacatttgaaatgtacccacttagttattttgaaagatacattattattgactatagtcacgctgctgtgctatagatttcaaaacatataatccagcaactcaacttctggatatagrccaaaaaaaaatcaaaatcaatatgtcgaagggatccctaaattcctatgttcact

SEQ ID NO: 468770 - DNA, 248 bp, Homo sapiens
aagcaggggaccaagtccctcagacagcggattcragaagaaagaggttttttgttcagccgggaacgtcggcagactcgcatcttaagagcccagctccctgaaggaagacagagttcctggcccgtttaagggcttacaactctaaggggttccacgtgaaagggtcgtgatggattcagagcacatgtgcttagagtgggggggcgggggttaatcttttcatctcaggccggctcatcattgcc

SEQ ID NO: 468771 - DNA, 630 bp, Homo sapiens
atacacactatcacacagtatctgctctttcgggctcaggatctttttcattctaatcatctcataggaaacagaaatgtcatttagaggtaggtagagtccaaaacaaagaagaacctgagtttttttttttttttaatcagcctggtgcctttagagctaggatttagtttctattctttctgtctcattttcaagtgattttttcttcaaatggcatctactgggctcaagaactggagatccccacaaagctgagattcacatgggaattttgtacacacccacacaggtatacacttccatttacatgcagacatccacccacagatacacacatccggagaccaagacagaacgcaaactgccccataaaagcacggttccccaaacaggagaaacacaccattcactccagggaggtatctatttgtttaattcagcctctgatagtcaggctgttgccaagmccagctctgaaactcttcccctctaggaaagaaagatggattttttctttactcaagaatatagatctaaaaaaaaaaaaacacttctgcatctcaaagcaggctctacctcctgagctacacgtattgatcagctttttattgtcaattttcttttaat

SEQ ID NO: 468772 - DNA, 603 bp, Homo sapiens
gcgtctcggaggccgtcacgcgctgtcactccgcgcccttcggagttgccgctaaaataccaacttcaacccggggccggccactgagcctcccgccgcccctaccggcgcccccggcacccccggaccccggcgcccgcgtcacttactcctctgccttcgccacctgtctgggtgccggtctcctccctgcctggccgcggcgcgtcctccccgtcctcgcagtcctcgggttctgcgcttcccccctccagctacagccgcagcctcttctcttcgggagggacgtcgtcctcctccctcctgggccggccatccctgcctcggggcttgccagtggcttcggagctgccggaagggctggccacggctggggggctctgcctgcacctggagaagaggaaggatacggcgcgagcggcctctcggcggagctggggcgtctgagcgcgggctcggtgggtccgcccggcgaggggctgggcatagcggccggcgcgggctcctacgcgggccgctcctggctctcgcgccctctgctggccgctcgcgcgcaccgcggacaagccgggcyctggcctgcgctgcactcacctgcccccg

SEQ ID NO: 468773 - DNA, 281 bp, Homo sapiens
catcctgggactgccatccctgcctcggggcttgccagtggcttcggagctgctggaagggctggccatggctccgcgggctctgcctgaacttggggaagaagaaggacccggctcaagcggcttctcggcggagctggggcgtctgagcacgggctcggtgggtccgcgcggcgcggagctgggtatcggggccggcccgggctcctccgcgggccgcgcctkgctctctggcgccctcttctggccgctctcgcgcacctctgccacgccgggcccag

SEQ ID NO: 468774 - DNA, 600 bp, Homo sapiens
tgccatgtaaggatgtgtgtggacttcactagggaagaacggtgttatgaaagaaggggcagaaaaactcacctgttggtctccatgtagacatttattgtcctgaattcctggaggttcagtgaaaagcagaagattgtcttttacacatgttgagttatgcccccatatatgtggttgtggtaaagaaagaggatgtgttgatgagaggtcctgaaatgcattttcctaatactcagcaggggcttctcaagaaggatcttccctaagaaagaagctcagagaacaaaaatggaaaaggattagatatggcactttcactggaaaaagtcatgttattcattgattgttttgtcatctccctccttaagtgttgtttttaggatgtggtaatctctgaccctgcctaacacatttcccaactcacccatarccttcccttaacgtcctcccatcttcacactatcacactgtgacccagtgaattcgaacttgtgaagttccattcgggggatcatatgggaagggcttcacacccagacatagattatagatgggaagtgggccacatggtgtcagtgaggcaagtatggatcgttt

SEQ ID NO: 468775 - DNA, 548 bp, Homo sapiens
ggcgttagcttttttttgtttttcctttcctttctttttgattttcctgaagttaataatcatcttgctttttcacttgtctagttttctttgtacctrttagttaattatttccacatctcataatagcctttcagaacaatttcccacaaagtccatcatattgtgtaatctgtcagtttcaggttgttgttttttttttggtcactcccattcctcttctgtttggactggtttttttctaggcttactgcatagttgatcatcaggggcttttctttactataatcagaggaattccccttggctttcttttgagttggagtctctacttcctgagttacacatcttccttttatatacccccttgatttgacaaagcataacctctagttgcttcccaagttaaaaagatgatttaaaagcagtggactgttacaccggaaacacatgtgttctaaattgaagaagtcaccctttatgccggtacacaacaatcattttgggattgcctttcactactacactgaagattctctttacccctc

SEQ ID NO: 468776 - DNA, 548 bp, Homo sapiens
ggcgttagcttttttttgtttttcctttcctttctttttgattttcctgaagttaataatcatcttgctttttcacttgtctagttttctttgtacctgttagttaattatttccacatctcataatagcctttcagaacaatttcccacaaagtccatcatattgtgtaatctgtcagtttcaggttgttgttttttttttggtcactcccattcctcttctgtttggactggtttttttctaggcttactgcatagttgatcatcaggggcttttctttactataatcagaggaattccccttggctttcttttgagttggagtctctacttcctgagttacacatcttccttttatatacccccttgatttgacaaagcataacctctagttgcttcccaagttaaaaagatgatttaaaagcagtggactgttacaccggaaacacatgtgttctaaattgaagaagtcaccctttatgcckgtacacaacaatcattttgggattgcctttcactactacactgaagattctctttacccctc

SEQ ID NO: 468777 - DNA, 548 bp, Homo sapiens
ggcgttagcttttttttgtttttcctttcctttctttttgattttcctgaagttaataatcatcttgctttttcacttgtctagttttctttgtacctgttagttaattatttccacatctcataatagcctttcagaacaatttcccacaaagtccatcatattgtgtaatctgtcagtttcaggttgttgttttttttttggtcactcccattcctcttctgtttggactggtttttttctaggcttactgcatagttgatcatcaggggcttttctttactataatcagaggaattccccttggctttcttttgagttggagtctctacttcctgagttacacatcttccttttatatacccccttgatttgacaaagcataacctctagttgcttcccaagttaaaaagatgatttaaaagcagtggactgttacaccggaaacacatgtgttctaaattgaagaagtcaccctttatgccggtacacracaatcattttgggattgcctttcactactacactgaagattctctttacccctc

SEQ ID NO: 468778 - DNA, 636 bp, Homo sapiens
atgccactttgtaagaatggtctcagcgaatcggtggaagggactgctgtgtttaccattttacagaggaggaagctgagccccagagaggttcaggaactcacctgaagtcacacagctagacaggtgtggcaccaggctcagcttcatcacacctgcaaagtcccttttaccctatagcgtcacactcataggttccagggttaggatgtgkatatcatctttggggccattattcagccaatcacggtgattacattcaggatcttgagatgggatgatttatacctgagctcagtgtaatcagaagggtctttataagagagaggcaagaaggttgaaagcagaagacagagatggaggcagaagcagagatccaagttatgtgctttgaaggcagaggaaggggccaagatcagaggcacagacggccttgggaaggtgagagacaggaaaacagactctcctgggagcctgctgcaggaatgcagtcctgctaacaccttgatgttagccccatgagactcattttgagtttctggcctctagaatttaagagaataaatgtgtgttgttttaagccactaagtttgtggtcatttgtcacagcagccacaggaaacggataccgcccca

SEQ ID NO: 468779 - DNA, 636 bp, Homo sapiens
atgccactttgtaagaatggtctcagcgaatcggtggaagggactgctgtgtttaccattttacagaggaggaagctgagccccagagaggttcaggaactcacctgaagtcacacagctagacaggtgtggcaccaggctcagcttcatcacacctgcaaagtcccttttaccctatagcgtcacactcataggttccagggttaggatgtgtatatcatctttggggccattattcagccaatcacggtgattacrttcaggatcttgagatgggatgatttatacctgagctcagtgtaatcagaagggtctttataagagagaggcaagaaggttgaaagcagaagacagagatggaggcagaagcagagatccaagttatgtgctttgaaggcagaggaaggggccaagatcagaggcacagacggccttgggaaggtgagagacaggaaaacagactctcctgggagcctgctgcaggaatgcagtcctgctaacaccttgatgttagccccatgagactcattttgagtttctggcctctagaatttaagagaataaatgtgtgttgttttaagccactaagtttgtggtcatttgtcacagcagccacaggaaacggataccgcccca

SEQ ID NO: 468780 - DNA, 582 bp, Homo sapiens
ctggggcaactgagggcggggactggcaagtccttagtgcttgagctgggaccataggtggcagggcacggtggcaccggccaccccctaacttccacaccgcttgcccctgctgcccagggaggatgtgagcctgtgtggacctagttgagaactcactctgtgacttccgggatctggatgcagcggctggggtyggcagggcccactgcagggaaacggttaaaatgcgctgggcttcgtttttcccggaagccctcattacctggtattaccttaggtgtggattcctttattcgcctgctgtctgtctctgccaatcaaatgtgagctccgtgagggcggaggggggcggtcctctcggcttcatcatccgagcccagcacaggatcgggcacatcgcggggagcatttggtaaatggatgtctgaatggctgctgtgaagtgaccggtcttagttcaggctactagaacaaaaatgtcatagactcgggggcttaaacaacagaaatttgtttctcacagttctggaggctgggaagtcccaggtcaaggtgcgggcagatacagggtctggcgaa

SEQ ID NO: 468781 - DNA, 531 bp, Homo sapiens
gtggctctgctagggtccagaggaggctacctctaatggggcccataggcaccgtggctagagaggaaagggccctcctccctacccccaggccagccccctgcccctccgcggccttgggcactctcaccgtctccttcggccgtttctgggctctcttggggttcatctccagggtggcaaacttggaggtgccctcctgccagggtagaggacagggtcagcaaggccstatcccctcagccctcaggcaccctgacctggggtgctgccagtgtggtcgggttccagggctgaccctgtatcaatactcactagtgtggggtcctgggccggtggcctggccttcctgagcctgcctccccctctggaaagtgcggatgagaactccgcctgctgcatggtgcggtggctcacgcctgtaatcccagcattttggaaggccaaggcaggtggatcacttgaggtcaggagtttaagaccagcctggccaacacagtgaaaccccatctctactaaaaaatacaaaaa

SEQ ID NO: 468782 - DNA, 544 bp, Homo sapiens
tacctttcatgtgcggtttattgtatacatccgttgaaacatattaagacaaaaaagggaaaacaaagaccacaaaggagggacagggaagaacccggaaggcgctggcagcacagggaggaggcaggtgtttgcagtcagacctgagtcccaggccccactcagcccttcctgcctaggaccagagcactgtcccagatctctccaaacctgttttcccgtgggtgaaagaatgacccgggaagtatttaccgttccttcctgagaactcagcgataytgaacacagtgctgcctcacagtaaacactgacaaatggtgagcattactgagggcagggcctcgacctacaccatacccggttttcttcatgaattttccactcctctgcctcccgctcctccagggctgcacctccggggcaggagccctcaccaagtcaggcctcagtatgccttatccgccacctgattccaaatcaaagtaaaattctctccccagatgtgtacacagcactcctctaaattaaagggctgtgtgctggc

SEQ ID NO: 468783 - DNA, 544 bp, Homo sapiens
tacctttcatgtgcggtttattgtatacatccgttgaaacatattaagacaaaaaagggaaaacaaagaccacaaaggagggacagggaagaacccggaaggcgctggcagcacagggaggaggcaggtgtttgcagtcagacctgagtcccaggccccactcagcccttcctgcctaggaccagagcactgtcccagatctctccaaacctgttttcccgtgggtgaaagaatgacccgggaagtatttaccgttccttcctgagaactcagcgatactgaacacagtgctgcctcacagtaaacactgacaaatggtgagcattactgagggcagggcctcgacctacaccatacccrgttttcttcatgaattttccactcctctgcctcccgctcctccagggctgcacctccggggcaggagccctcaccaagtcaggcctcagtatgccttatccgccacctgattccaaatcaaagtaaaattctctccccagatgtgtacacagcactcctctaaattaaagggctgtgtgctggc

SEQ ID NO: 468784 - DNA, 602 bp, Homo sapiens
cgcggctgcacgtgctgcagcttccagcctggcgtgactattttttgaatatggcttgtctgtaatttccactaagcatttattttcattcttcctcagcctcccaagtttagagttaattacacggatcccaaccataatcacagccggccaggcccaggcttcctttcgggcacaggatgggcccagcgcacccctttcccatgggcccagcaactgctgtgcctggcccggccccacccgtggccactctggccaccctaacctttaagaagtcctcctgstgcagctctgggcccaacccagggtggtctctgcaaaactgagccacacaggctgatgcagatggcagggacagggactgcacggacggggatggcagagaccgggacaaagcctgggggccacgtcaggctccacctcgagggaggccacacacggcccggcctcccttcagggagcatttcctgtgctttctacagttcatcccattttccacaaagggaaactgaggcacagagagttaaggacgtgggcacctgaccagagggcggcagcgccaagaatgaagccatgtcgacatcggccagggcaaaggccct

SEQ ID NO: 468785 - DNA, 518 bp, Homo sapiens
tgtcagatcaactgtcttagtatcaccctatcacagtgcttgtgttcaagtaacactcagtttacttaataaatggccacaaattacaagagtagtgatgctggcaattcagatatgccaaagagaagccataaaatgctgcctttaagtgaaaaggtgaaagttctcaatttaataagaaaaaaaaagttacatcccaaggttgctaagatctatgataagaatgtagacattgtgaaatttctgtgaaattatgaaggaaaaatttgtgctagttttgctgtcacacctccaaacacaaaacgtatggcacagagtgcatgataagtgtgtagtkaaaatggaaaaggcattaaacttgtggattgaagacatgaagagaaacatgttccaatggacagcaatcaggttcagtactacctacggtttcagtcacccactgagggtcttggaatgtataccctttgtatgaaaggagactactgtattctgcataccaaagatttaaggaaaggaat

SEQ ID NO: 468786 - DNA, 657 bp, Homo sapiens
ctggtgctgtcattttaaaaataccatagactgggtgacttatataaccgaaatttattgctcacagttctggaggctgggaagtccaagatcaaggtgctattagaatgagccaattctgatgcaagtggatggagcaaatacagtcttaaggctcaatattatgagtatatacttcagagtatcaaccctctgagctctgtaccggtctgcactaggtggggacattcacagcctagcttgcccagaaacagataatcaggactactggaggtttggaaagtgtggcattcatgtaaagaaagttacagcaacaagttaagaagccctgccacacttctggtttgtgaacaaccagcattcaagartgcacacctatgccttacaggacatctctgaacgcaagttgttaaactattcaaatatatgtcttggttttagtgtagctcttcagcctgtcaagaccacttaagatagtataatttgatctgagattgaccatctcagctatctgttttagcttagtatcatctatacatctgagtgaaatgtctcctacagcttcatccaaagctctggaacaacatagcagcatcactggttatctagcccaggaaaaatcacctcacctctttgatcctccatgtatttccctat

SEQ ID NO: 468787 - DNA, 566 bp, Homo sapiens
tgaggagacttgtagggacacatgtttgtccctgtgtccaggccatgtctgtgggctgtggcttcccagtttgaggggtgggactcccaggacagggacagcgttggcaacctggtggggccagtgtggaagaccctggctttatgcagatgcccagacccgagcccctagctgaggccccagcaggtctccctcctgactgcccctgaagtcacttccttctctgccggtgtcccagcccggccactgccgtctctctcctagagcaggtggcggcagatgttccagcgcaggcctggatggtaaatattttaggtttcttgagccagacggtctctgtcacgactacgcaactctccccttgcagcacgacagcagycctgggtggtctgtaaacggaggagcgtggcaatgctcccatgaaatttatttttgtagaatgaaatttgaaatgtgttatcattttcacatatcatgaaatattactcttacgcttcccccaccaccctgctcaaccatttaaaaacgtaaaaacctttcttagcttgcaggatgtacaaaaccag

SEQ ID NO: 468788 - DNA, 536 bp, Homo sapiens
ctaaacgagcaccagctggggcccgcgttgtgggaaggggggcacctctctcccctctggggtattgaggccccaggcacccctcctgctcctccggggtcagagctctggggtcatatcctgctccgccctcctgaatgcgcagctggcgtcctcagagaagcrctttccaacccagcgcctcctccccatctacagacacaggaagttggatgacaaggacaattgatccctccagcttccttcaacccagcggttctgtggagcgagaggcagtgaagagcccctgatgctaccagcccttggacggctcaacacacctccaggcctcgctcctctcccggatacgccaaagaccaacagctgctgggagctctaaggagggacggcaggtgcggtctcgtgctcagcagtgttatgcacacatgtttatttttaacaggaatcaaagacattttctttatccaactcaaaactggctttcctctagcatttgacagaaatgattcagctgattccaaaatactgataactaa

SEQ ID NO: 468789 - DNA, 557 bp, Homo sapiens
tacaggcacccgccaaccatgcccggctaattttttgtatttttagtagagacggggtttcaccgtgttagccaggatggtctcgatctcctgaccttgtgatccacccacctcggcctcccaaagtgctgggattacaggcgtgagccaccgcgcccggccacacacggttacttctttaagaacacttacacagagcgtgtctgagatccaacttgcgggcaccatggaagagtgggcatcatggaagagcgtacaattcttatctgtgtctgtatcattttacaagtgatatttctttaaactcattttgccaatacctgtcagcttagaaagtcccagtgaggaaagtcagaagaggagtgggaagacctgaatcctcagaaacacgcactggcagcaggcgcttcatttgtaacayggcagtcacttctttacccccaaagtctgggcactgaatctcaaaatgtcttgaagttgcattaagtttttcttaaatcattttttctcttttttagttgtatgtaataattgtactatttatgggacacagtgac

SEQ ID NO: 468790 - DNA, 553 bp, Homo sapiens
tttctgcatcctctttctgctgccttctcactgggcctggattctctgcccccaagtgagtgtgtcagaagaggccccagggaggacagaccaagttcaagttcagagactcctggtgccgctctgtggactccagccatctctaactagcttatctgtccttgtcctcagacaaagggctttcagccacactgttaagggaaggccagagctggaagagacaggagagctaatatttgcacagcacttcacagtttattctttacagctctcacaytcattatgcaaacttactttgttctccagctaaatcccagcagggaacctgccactgctgctgcttagaaattctggttcctgcccttggtctctgatgctgccctacaacccagggaccctggacaaacaggtgccatggtgaggaacaccctgccccaccttgaactccagtgggttttgttcctggaaatgggctgtgcatcaaaataatgtgggtggcctctggtatatcactcaggtgggaacaaaggtaattagaggcaatgagccctga

SEQ ID NO: 468791 - DNA, 532 bp, Homo sapiens
acagctgcgctttgcagatctttagagggacagcaatgctttccacgtatttccaytgtgctctgataaacacatatcccccttcgaactcattatctgccctcaccacctgcctccacctccattatagtctctgttttttgctgaatggctctaggcaggctaaaaataccaacatttcggttccccacacactctcgtctgatcagtgtctaaaccaggggtttgcagccttagcggcacattagattcacctggagttttgtttttcatacagatgcctgccccacccctttcatctccggcaggataaacttcttcagctatgaccagctcagaacactcctctaaatgtatgaaacaacccacacacttgccatgtgggagatgctctgatattttctacactactctttctctctttttgttaggctcatcatgatctgcgaagagctcacgcagactggaaaaaacttacctgagatatgaattcgtgtcattctctctgtatttctctctatcccagtttcag

SEQ ID NO: 468792 - DNA, 552 bp, Homo sapiens
ctgctacttctccttccaggggaccccagggagcctgccggcccggagtgctcacctgtggyagaacatgcgggccatgccgattctctgcttctcgccacccggcaggacatctttccagtcacacatagcctcccaacctaggcaggggcaatggtcttggctcagttccaccagtacccagacctggggtccagccggggagctgggggagctgcgggaatgagctagctgtgacgacagggcccctgtgcctctgcgtccttgtctgtctgacaggtattaatcatggaggagtggggactggaatcgtgccttcccccagaagagatatggtgaagtccaagccccaacacttcagtgtgaccttatttggagacagggccttcgcagaggtgatcacactaagataaggtcatcagagcggaccctaattcaatatgactgtgtcctcataaaaagggggtgtgcgggcagaggacgtgcacaggggaacacgaggtgaagatatacagggagaagtggaccatctgtgagccgaggacagaggcc

SEQ ID NO: 468793 - DNA, 483 bp, Homo sapiens
aggcagctgagtctaagtaggttaaatcacttatctgaggtcacacggcaggacagtgcttgttctgcaaagttaagtgtgtttctttttgtggaccatgagaacatctccaactgccctttttgacttggccaccagggaactcagcgccatgttctcaaatccagtttagtaactggccttctggcctgtatatctttattctaccttccatcctgctctgttctgcytttacctcttattctagattatctttctttagtcctaattttaaatttatatctataatcttgttatatatatttcttggcatctactgtaagtgggtagtgaacgaataaacaaaatgtgatgaattttagaggactaagaagggcctaagtcacaccaagattcatgctggataatttgtcatcgacccagactgtggttctgcactcgccagtaaccagtttttttttttttttttttttgctttttgcc

SEQ ID NO: 468794 - DNA, 524 bp, Homo sapiens
agtaggttaaatcacttatctgaggtcacacggcaggacagtgcttgttctgcaaagttaagtgtgtttctttttgtggaccatgagaacatctccaactgccctttttgacttggccaccagggaactcagcgccatgttctcaaatccagtttagtaactggccttctggcctgtatatctttattctaccttccatcctgctctgttctgcttttacctcttattctagattatctttctttagtcctaattttaaatttatatctataatcttgttatatatatttcttggcatctactgtaagtgggtagtgaacgaataaacaaaatgtgatgaattttagaggactaagaagggcctaagtcacaccaagattcatgctggataatttgtcatcgacccagactgtggttctgcactcgccagtaaccagtttttttttttttttttttttgctttttgccaaccatacattttgctttcatggtatsgaagtggtttaagcttatggcttccagcc

SEQ ID NO: 468795 - DNA, 462 bp, Homo sapiens
aaagtgctgggattacaggcgtgagccaccgcacccgggctgttattagacttggaatgggacaaaagtcatatgagacagacttgtttgctgaggtatttaaaaaacaaaatggtctaagatggcagattcttggggaactctgctctgtgcacatttctgcctattaaagtggccgtaaaaacaaccataaatccttgatgaggacacctcaggagctttaggacrgtgccattcttttttaattaaaagctttttatttgatttgatttttctgtagagacagggtctcggctatgttgaccaggctggtcttgaactcttggccttaagtgatccttctgcctcaacctcccaaagtgctgagattataggcatgagtcaccacacctggccagggcagtgccattctaaggcaacggcttcaactcggtcttcttttctggggttacaggagatggg

SEQ ID NO: 468796 - DNA, 282 bp, Homo sapiens
tgatcatgtctgaagaaggtgtgttgagaagtgaggctccgctgttcatctggcaaaagcctcctctttgtacccctctctctcacactttctctcttttctagctcattcctttgctgctgcagttgacaagccggctacagggagtcggcgcgctcggccaggcagcctctgacaatagcggcccagaagatgcaaagagacaagccaagaaacagaagacaaggcggacktgaggaggaaggggacagttgcagtctcacttgggacaggccacagcca

SEQ ID NO: 468797 - DNA, 496 bp, Homo sapiens
ccagcggccggggtgcccggcgcgtgtggccctgcccggcgtggacgtgagccggcctcagctggtgctgccgcggctggcgctgcctgtggggcactactgctttgtgtttgtcgtgtcatttggggacacgccactgrcacggagcatccaggccaatgtgacggtggcccccgagcgcctggtgcccatcactgagggtggctcctaccgcgtgtggtcagacacacaggacctggtgctggatgggagcgagtcctacgaccccaacctggaggacggcgaccagacgccgctcagtttccagtgggcctgtgtggcttcgacacaggtcagtgcgtggcagggccgtcctccctgcccctcacccgtccacacccatgagcccagagaacacccagcttgccaccagggctggcccgtcctcagtgcctggtgggccccgtcccagcatggggagggggtctcccgcgctgtctcctgggccgggctctgc

SEQ ID NO: 468798 - DNA, 496 bp, Homo sapiens
ccagcggccggggtgcccggcgcgtgtggccctgcccggcgtggacgtgagccggcctcagctggtgctgccgcggctggcgctgcctgtggggcactactgctttgtgtttgtcgtgtcatttggggacacgccactggcacrgagcatccaggccaatgtgacggtggcccccgagcgcctggtgcccatcactgagggtggctcctaccgcgtgtggtcagacacacaggacctggtgctggatgggagcgagtcctacgaccccaacctggaggacggcgaccagacgccgctcagtttccagtgggcctgtgtggcttcgacacaggtcagtgcgtggcagggccgtcctccctgcccctcacccgtccacacccatgagcccagagaacacccagcttgccaccagggctggcccgtcctcagtgcctggtgggccccgtcccagcatggggagggggtctcccgcgctgtctcctgggccgggctctgc

SEQ ID NO: 468799 - DNA, 496 bp, Homo sapiens
ccagcggccggggtgcccggcgcgtgtggccctgcccggcgtggacgtgagccggcctcagctggtgctgccgcggctggcgctgcctgtggggcactactgctttgtgtttgtcgtgtcatttggggacacgccactggcacggagcatccaggccaatgtgacggtggcccccgagcgcctggtgcccatcactgagggtggctcctaccgcgtgtggtcagacacacaggacctggtgctggatgggagcgagtcctacgaccccaacctggaggacggcgaccagacgccgctcagtttccastgggcctgtgtggcttcgacacaggtcagtgcgtggcagggccgtcctccctgcccctcacccgtccacacccatgagcccagagaacacccagcttgccaccagggctggcccgtcctcagtgcctggtgggccccgtcccagcatggggagggggtctcccgcgctgtctcctgggccgggctctgc

SEQ ID NO: 468800 - DNA, 635 bp, Homo sapiens
cagcactgtctggctccttttgcatgtggtttaaattggtgaaataattacaagtttgctgttgacctcagtttgctgaagagagtgaattttacttgcttgttcaccggcagaaaaacaacatggtcattaaattcattagaaggaaaatgtgccaggaacatttttgctggactatttgtggaatataccaccgaccccttttacctggtagatttgcagaatgttagtgctggtagaggggacctcataggtctagtccaactcccttatttgaaagaggctcagaaaaggcatgtgacttgttcaggtttgcagggctggttgatgacaggccggaccrgaacctgcatgcccaatccagtgctttttcactagacagcgtggctgagcatataatgaagtctttaaatgtctccagtgttctcctctccatcttttgtttttctgttttgtttgtttgtttgtatgtatgtatgtatggattgattgagacagggtctcactctgttgcccaggctggagtgcattggtgtgatcatggctcactgcaacctcaaccttgtgggctcaagcagtcctcccacctcagcttcccaagtagtggggactgtaggcgcatgccaccacaccca

SEQ ID NO: 468801 - DNA, 283 bp, Homo sapiens
tccatgccaggaggaggaggagacacccagagcctgcgacaccacagctcgcctcgctgcgagtgggtggcagcgacggagactgcagtgcrccagagcggtaggagagcggctgtgctaggagggcaggcggctgcagccagggttgggggtcaggcttacagcgatggatgggctgcagcagtggccaggccgtaggagctttgtagggagggctggtgcattggcaatgggcctgtctttgccctgcccctgccatggatctggccctttactgccctgc

SEQ ID NO: 468802 - DNA, 544 bp, Homo sapiens
cttggcccccatagtcttctgctgctgcctggatagcagtgggagagtyccagcttcccagccaaagccttctgagcttttgtcctgcctctgccactactgtctcagtcctatcacttgacccagaagcctggggctgatctgccctttcttcttgtcccatgtgactgcccaaccatcatggccatttctcagtgtgtggcccagcagggtgaggcactttcacgttttcaggtagccaacctcaagaagtcttcagcctgcagagctggactccacccatgaaagagcctgtagatgtcgcctcctaagcctctctctcacaacccttgggaccactgctgtggtggggccaccaccatcccatatagaccaagtgggctccctgccacctgccttcccccctttggcttgtgcaccccacttccagtggcttgctatcacatggatcctccaggacgcggctcccccacagtctctgcttcggcctccccctgtcacgaagcagccatgtgggtctcatgggagagcctcacgtaataca

SEQ ID NO: 468803 - DNA, 517 bp, Homo sapiens
atacatcccaccctgggggacagagcccagtcagggaggatggcagacggccaccagaggtcacaggcagaccccccaccccactcacatcagtcaccatggagagatcaatgacaaagcggagggcacaacagagggccacagagatctccctttggaaacagaagtagtaggaggctgggaggaggttgaggaggccggtgatgaagccctccacacctacaaactgtggccaggccagctcaggccgagccccgcaccaccctccacccctttccttgcccgcagccctcactccgcccctctcctggctccctgtcccagagccccatgcaaatctggctgtcgagaccaagcagcaacagcatgaagaagaacagggcagcccagagtggggccactggcatcagtgtgacagcctgtgggtaggcgatgaaggccaggcccggccctgtgggaaaggtgcaggctctagaccttgcagccgatgtcstgccctgcgcgcaccctgagccct

SEQ ID NO: 468804 - DNA, 242 bp, Homo sapiens
ctgctctggggcagggcttttggccttgggggtcctctatgcatgggacagtgtgcctcccccgctggaaggcttctgggcttggggtttggtgggtgacgagatagtgaggtcccagctttgctgcccacatccctcaccctccacccttgcttcccaggcacctgccaaaccgcatacccagcctgcygttgctccggagcttcttcacagacggggtgagttgcaggtctgtgtgtgtg

SEQ ID NO: 468805 - DNA, 485 bp, Homo sapiens
ctgggattacaggcgtgtgccacaacggactggctaattttttttttttgtatttttagtagagacggggtttctccacattgctcaggctggtctcgagctcccgacctcaggtgatccacctgcctcggcctccccaaaatgctgggattacaggcgtgagccaccatgcccggcctactttgccaaacttttgactactgataatgtacgcgtgccctggcagggatggccattgtactgtcagtatcaaggaatgggtaacagcacccaccacaatgtcagctatgaaaggattcagaaaatagccttctgtaagtcagaatttattaatttaggagtagggccatggaagatgtcaacataggaataggtttcagmttctaaactgtagatttagatgatcacttcttagtgtttgtataaaatttactttattttttattataatattaagttcactgtccacctttatactatgaaaa

SEQ ID NO: 468806 - DNA, 637 bp, Homo sapiens
acagactccattttgctttctaagatgctccctgactcttctcagaagctttacataacatgctatataaaacactgatctaatcaaaatatcaccctataccctataaatatgtacaatgatgtgtcaatttaaaaattaaagcaaaaaatccactgatctaaagggatgatttcctcatgcttcaggtaattcttcatggaatattagtctccaataccaaacttttcttaagaatttggctgcaaagaatccaataatgtattttcagaaagagattggaatgccacaatcttgtgcatcaacaaaagagtgtgtccctttttgacatttgggtctctgcgtgacttctgacagaaaggacaggctcagaggacacatgggcatgtccaaaatttaatttctaaaaggcttctcgatctrccctaatgaagacatgagtctagaaattttctgacctccagagcacagacagtgcttcttcggagaaattatagattttcccacttcagaggcatttctgcattgagctctcataaacctaacatggtgggcaagttggtatttcagtccttcacatttagctctgagtttagtacttgatggattttaaattaagtttctttgacatgaaatg

SEQ ID NO: 468807 - DNA, 637 bp, Homo sapiens
acagactccattttgctttctaagatgctccctgactcttctcagaagctttacataacatgctatataaaacactgatctaatcaaaatatcaccctataccctataaatatgtacaatgatgtgtcaatttaaaaattaaagcaaaaaatccactgatctaaagggatgatttcctcatgcttcaggtaattcttcatggaatattagtctccaataccaaacttttcttaagaatttggctgcaaagaatccaataatgtattttcagaaagagattggaatgccacaatcttgtgcatcaacaaaagagtgtgtccctttttgacatttgggtctctgcgtgacttctgacagaaaggacaggctcagaggacacatgggcatgtccaaaatttaatttctaaaaggcttctcgatctaccctaatgaagacatgagtctagaaaktttctgacctccagagcacagacagtgcttcttcggagaaattatagattttcccacttcagaggcatttctgcattgagctctcataaacctaacatggtgggcaagttggtatttcagtccttcacatttagctctgagtttagtacttgatggattttaaattaagtttctttgacatgaaatg

SEQ ID NO: 468808 - DNA, 298 bp, Homo sapiens
gctgggacaggcctggacttccccatagctctctcccgcccgcttcaaatcagggcaagatcagtatgtggtgatgggggccttggaggcaggggcacgatgtgtgagactgataacrttcttgcagcctgagacatgggctttagagcagtttcgaaactctgtgttctctctcttcacaagtacaatgcgtttccctggcatttacaggccaggacctgggagaacgccgtgtcgtcttaaacctcagaaattgccaagtgacagtgccaagggacgggtttactggtttcccctc

SEQ ID NO: 468809 - DNA, 556 bp, Homo sapiens
tgtatctgagagcgtccaggagaagggagggttttaaccagggaatctggaagccagtrcaactttttaaaggcgtctttttgtgtgtgtggagacagtgtattaaaacaattatagcagtgggatttcaactatgactcaggaatttgaatctcaagagcgaaaattccatttcttccctgccttgagtctgtccagtccaatgttgttctcagctctgcctcgccctccctggggaaaaattgacgtgtgtagaatttaattgaggacacccttatgcaactggctttcctgggactcccctcacatttgttttgtgatccacatttgacttttacagagaaaccacttatttggggacatctagttctaggattcaggttcccctggatgtctggagttacatagttgatcataagatgacagaatgctggagagagatgtcggtggcgcctgagatgatatcagcctcactggatagcccatctctggtgtggttcatgtttacgttccccttttctcctgatgagaaggtgacaaggacagtttaggagag

SEQ ID NO: 468810 - DNA, 508 bp, Homo sapiens
gtgtgaagggcacatgggaactcattgtatctttacaactcttctataaatctaatgttatttcagacacaaaaatttcaaaatcagaattcaaaaaccaggcctgttttacaaatctttaattagggctgggcgtggtggctcacgcctgtaatcccaacactttcggaggctgaggtaggcggatcatgaggtcaggagattgagaccattctggccaacgtggtgaaaccccgtctctactaaaaatacaaaaattagccrggtgtggtggtgtgtgcttatagtcccagctacttgggagactgaggccgggaagtcgcttgaacctgggaggcagaggttgcaatgagctgagatggccccactgcactctaggctggcgacagagggagactctgtctaaaaaataataataaaataataataaaaatctttaattcatttagaagaaaaggaagtaaaagtgcaagccccatccctgctccccattcgctcctatcctccc

SEQ ID NO: 468811 - DNA, 562 bp, Homo sapiens
agaggctgtattcttatgaattctaggaaaactgggactaagacattattctccccaaaccgcttttcatgcaattgttgtcagctcggtaggctctggcttatttctgtgatcgtaagaatttgcttattagatgttgaatgcaatggccctggtttcatggtaactaaacctgcatccgcttctcgctaatgtmctgctagtcattttattcagcagactgagtagctttcgccgtttctatgggaaggacagtgctcattagtggatgtgctcagccttcagtttagctaaaatctgaatgctttctcaacctgaaacagtgggtattattctaaatgttaagtaatatggctctttacaaagacaaagtgtttcccagtcattattagctgcttcatcatcgttcctcatgatgatgccttgaagtaggttctcgtatcgccgtgctgattttagcactggagcagggacgggcgggtaacttgctgaaggtcacataataacaaagcccaatggcaatttgtgtcatcgcatgagtcatgttggcattggggatgca

SEQ ID NO: 468812 - DNA, 512 bp, Homo sapiens
gccaattctcagagcacttcagataaaaaccctacctttcttaaggcaaaaaacaacggcattaacttttttttttaattaacctaagttcccattatgtttagagaagagatcacaatgataaatgcttgccctgtctctcttttttaaaaatttactgttcttacatgtgacatatactgtggtacttagtgtcaccctacaaagaataaatttaaattgaagaaacagaaacacgggagagtccttgtttgggtttaatttgtatctgactacaataaaattctatcctggaagctagagtcataaaactaaaagtcaggaaggaaaagaatggctaattaagctcyaaaactaaaagctctttctttattgctatttctttaagtcctaacaattggtcaggcacagggtcttagctgtgccattctagttaatggtcggttacaaatttccaccataaactcatcttccttctagcaacttaaatctcaggcactgggatgtaataa

SEQ ID NO: 468813 - DNA, 512 bp, Homo sapiens
gccaattctcagagcacttcagataaaaaccctacctttcttaaggcaaaaaacaacggcattaacttttttttttaattaacctaagttcccattatgtttagagaagagatcacaatgataaatgcttgccctgtctctcttttttaaaaatttactgttcttacatgtgacatatactgtggtacttagtgtcaccctacaaagaataaatttaaattgaagaaacagaaacacgggagagtccttgtttgggtttaatttgtatctgactacaataaaattctatcctggaagctagagtcataaaactaaaagtcaggaaggaaaagaatggctaattaagctccraaactaaaagctctttctttattgctatttctttaagtcctaacaattggtcaggcacagggtcttagctgtgccattctagttaatggtcggttacaaatttccaccataaactcatcttccttctagcaacttaaatctcaggcactgggatgtaataa

SEQ ID NO: 468814 - DNA, 512 bp, Homo sapiens
gccaattctcagagcacttcagataaaaaccctacctttcttaaggcaaaaaacaacggcattaacttttttttttaattaacctaagttcccattatgtttagagaagagatcacaatgataaatgcttgccctgtctctcttttttaaaaatttactgttcttacatgtgacatatactgtggtacttagtgtcaccctacaaagaataaatttaaattgaagaaacagaaacacgggagagtccttgtttgggtttaatttgtatctgactacaataaaattctatcctggaagctagagtcataaaactaaaagtcaggaaggaaaagaatggctaattaagctccaaaactaaaagctctttctttattgctatttctttaagtcctaacaattggtcaggcacagggkcttagctgtgccattctagttaatggtcggttacaaatttccaccataaactcatcttccttctagcaacttaaatctcaggcactgggatgtaataa

SEQ ID NO: 468815 - DNA, 512 bp, Homo sapiens
gccaattctcagagcacttcagataaaaaccctacctttcttaaggcaaaaaacaacggcattaacttttttttttaattaacctaagttcccattatgtttagagaagagatcacaatgataaatgcttgccctgtctctcttttttaaaaatttactgttcttacatgtgacatatactgtggtacttagtgtcaccctacaaagaataaatttaaattgaagaaacagaaacacgggagagtccttgtttgggtttaatttgtatctgactacaataaaattctatcctggaagctagagtcataaaactaaaagtcaggaaggaaaagaatggctaattaagctccaaaactaaaagctctttctttattgctatttctttaagtcctaacaattggtcaggcacagggtcttagctgygccattctagttaatggtcggttacaaatttccaccataaactcatcttccttctagcaacttaaatctcaggcactgggatgtaataa

SEQ ID NO: 468816 - DNA, 450 bp, Homo sapiens
cacgactgatcacgagataaaggaagtctgaagcagtccccaccaaacatgcaaattcaatgaatgaagatccatttcttgcagctttctgctttgyataataacatttggctgtgatgatctattatgacactaatccttgcacagcccagagaagatgggcaatagttttctggatgtcagtgggactctggcacaagggccagccaattttggtgagcgcaacaggaaattctttgcaatgtccttgtgaatctgaggttacaaagactggctcaatctgtcacaggaagcatgctggaatgcctttgtccttctttctagtttttctttctttctttctaataattctcagtgtgggagaatattattctttctaataattctcggtgtgggcttacatcctttgctttgggaaaggtttctatcattagacctctcttttccccc

SEQ ID NO: 468817 - DNA, 594 bp, Homo sapiens
agagattattgggcttctatttcatgccaaggcactttacatatgtaaataatggtgcatgctttgaatgaagtcatgtttttgtgacctacaatccccactggctgctgcagcacctggcacatattagccactcaagaaattctcgttgagtgaataaatgaaacattcaatggctctgagascctacctttcagattatcagcaccatgaccctgcttttgagacccctactctctctcccttccctattatctcttggtgaatattggggaatggctcacctgaactgccccacgatttcatgcctctgttttcgccattacctgtcaccttacctggccacagtcattccttccaaagccactattcacatctctatcagatgctctgcagttctggggctcctgcctcttgggacaaggctagtactgtcataccaggtgtgatggttaatattgagtgtcaacttgattggatcgaagggggcaaagtattgatcctgggtgcgtctgtgaggatgttgctaaaggagatttacacttgagtcagtggactgggagaggcagacccaccctcaatctgggtgggtac

SEQ ID NO: 468818 - DNA, 594 bp, Homo sapiens
agagattattgggcttctatttcatgccaaggcactttacatatgtaaataatggtgcatgctttgaatgaagtcatgtttttgtgacctacaatccccactggctgctgcagcacctggcacatattagccactcaagaaattctcgttgagtgaataaatgaaacattcaatggctctgagagcctacctttcagattatcagcaccrtgaccctgcttttgagacccctactctctctcccttccctattatctcttggtgaatattggggaatggctcacctgaactgccccacgatttcatgcctctgttttcgccattacctgtcaccttacctggccacagtcattccttccaaagccactattcacatctctatcagatgctctgcagttctggggctcctgcctcttgggacaaggctagtactgtcataccaggtgtgatggttaatattgagtgtcaacttgattggatcgaagggggcaaagtattgatcctgggtgcgtctgtgaggatgttgctaaaggagatttacacttgagtcagtggactgggagaggcagacccaccctcaatctgggtgggtac

SEQ ID NO: 468819 - DNA, 529 bp, Homo sapiens
aagttttgccaggcatggtggctcacgcctgtcaccccaggactttgggaggccaaggtgggcagatcacctgagatcaggagttcgagaccaacctggccaacagggcaaaaacccatctctactaaaaatacaaacattagccaggcctggtggtgcacgtctgtaattccagctactcgggaggctgaggcatcagcatcacttgaacctgggaggcagaggttgcagtgagccaagatcatgccactgcactccagcctgggggatagagtgagactctgtctcaaaaaaaaaaaaaaaaaaaaaatgtaactgggcatcctgtttgtatctggtaacactccttaaggttggactaactatgcgaagacactgaatttaaaaggcttttcttttcatttattttttaagagacgtatctgtgtaactcaggctgcagtgcaatggctattcacagggatgatcagggctcactgyagcctcaaactcccaggcttaagagatggtcccacctcagcctcccaag

SEQ ID NO: 468820 - DNA, 559 bp, Homo sapiens
ggtataacataaagctagagtaattaaaacatcatgggcctgatttaaaaaataaaatccagaagcagactccaaaacatatgagaatgtaaaatatgacagaggtggcattttgtatcagtggtgaaaaacacatagttaagcaaatggtgttgagacaactaggtagccatttaggaaaaaaataaagcaggattactaaatttatccatcagaccaaagtaaattcctgatgggtgtaagtcactagaaaaacacggaaaaatattttataatcttagaaatggaaagacctaagtatgagaaaaaaaaaaatcccaggaaccataaagaataaaatgtatacaactctacaaaaattraaaattgccttcaagaaacacacaaaattaagacagacaatgacaacacacctgggataccatttgtaatacatgtaagaaaggactcattctctaaatatatacagtcaccaaaaatcaattagaaaaaggccaaaaacacaacaggaaaatgggcaaaggacctggatggacatgtctttctctgtggcacacac

SEQ ID NO: 468821 - DNA, 588 bp, Homo sapiens
tcccacgtgacacgcagggtcctctaagttccaaactattccaacttctcacgtgcgctgaccacagacggtagacagagtcaggcaggctgtgtgcccggccaaggagaagattatgacccgatggaaggtcgcagcccgatgtgggagataatgttctgaccacatttattttttcaaactggctgagtaasaacccctgaagctaggaaaactactgcctcgtcgaaggcctcttacgttcttcttccctgaggtgggtacagccccctgacttctcctttcctgaaccctgtcctgcacaggtgctggcctggacgccaggtcagagggctgggacttggcccctgcatgcccccttccaccctcctggctcctggctctctgggttctctctagcaccccttgtccctgcctggggtctcattttctccctctggactctctccttatgaaccttccctcacctcccctcgtctcccatttcctctttcctgagggtcagcatgtcttggccctgtgccacttacccacaaggatggtccttccatctaccgtggctgtgtgcttgtacagggtcagggcgta

SEQ ID NO: 468822 - DNA, 459 bp, Homo sapiens
ggtcaccatggctttggagcacctggtagtgtggcgtgtccacagtgaagaccagagtttcattgtccttaagactgacctgggagacgtggctgcaggccattgaggaaggtgaggcaaaagcttcctgtctgctccccgtgtgctgaggagggagctctgccatgtgctttactttcacacgttatattctacragtcttgttttacaaaagcatcccttccttgaggcttcggctgctcatcgctgctcatcatcatagcgtgccataacatatagtaagatttgggtttgtttctgggagagatcttggcatagagaaaggagaaatgcttagagccaccatcaagacagttgggatgaaagctggggataggcagaggctggaggaaacatgtgcaccccttgtaaacacttattcatgttttagttattcacttaaagtgttaaattagtaaa

SEQ ID NO: 468823 - DNA, 622 bp, Homo sapiens
ggctaactctaaatatatgtgtatcttttcagcataaaaaaataatgtttttcataagaatgacaacttaattagaatcaaatctataagctttaagattttacgtttctagtaagtataatattagcttatttgactagaactcaagcagaataggaatttatgcttgttttatattcaataatgataattttgaagatatagttgttttattacaccaaaaatactatattaatcttatttaactaagttttatccaaatcatgttaacttaagaaacatttgatcagttcctatatttctaggagtttggtgaatatttatttataaatgcttatttttttccaagccaagttagaatagagcacttttagaggatttcataaatgaattttgcaatgctctctggagttaagaaaatatcacatatacataacatacattaatagatacacaaacacaaatagagatttcatagctttcatcctgaaatttcagccatgaatcaggcataaatattctgatggttaatttcagacatctacttgatcggattgagagacacrcatagctggtcaaacacgatttcagccatgaatcaggcataaatattctgatggtt

SEQ ID NO: 468824 - DNA, 603 bp, Homo sapiens
tctcctgactgtgccccagttgggcatgagtgtccttcacagaggtgacacaccagtycattcaggtcaagggcgcagagcagtcctggcagcacacagtaggagatttattggagctctgagcctggctgtggttggcggcttccctgcaggcctgccccacccgtgtagcatggctgccgcccagacccgcccgacgtcccgcccagcccagccggcagcagcagggggcaggatttcccgctgatcccggcggtccgtcctctgcagtttaaaaagagcccagcggggcttaaccctcccgcgtccggccggcctccgatgccccccgtcccctgttctgtgcggaactccggctttggccatctgcctacttctctgagcttcagtatcctcatctgtaaaaccggttcccctcatttcagggtcaaaaatgagcattcagtgagcacaaggagccctcagtcgccaggggcatcctccccctccccgcggcggtgccgtttatctggccaggggaggtccacccgggaggaggtgactttgcagcctccagccgctatcgcttcctgccttcatcttgggaacaggccgtgctgtgcg

SEQ ID NO: 468825 - DNA, 647 bp, Homo sapiens
actgactaaggagttcatttatttatcccctcaacaaatattccaaatcttattgcttgtcaggaggctgagatagatttaaaaaacagaaaacaggaaaaaaaaaaaaagttctgctttgggagagaaggttctagaacacatgggatctagggactgtcaaagcacagacaatgtgcccacaccagcccaggggaagtagaggagctaaatcctgaagggggaggaggcacatcctccagggagcctgtataatgacaaccagaaagtgtctccagaacaatggctgtgctttcatcctcccatgctrgatcgggggctggggtccgctttcactcctctcctcagccactaggaagctcagaaccacctctgtctagtgttccaggtcttctagctcagtgagtggggactgctggcttcatctttctttcctaccatgatttttcccttcacttgatgtcctctttcacgttgtaacttttcagacttctgggttttgttgtttgagacaaggtcttgctctgtcacccaagctggagtgcagtggtgtgatcttagctcactgcatcctcaacctcctgggttcaagtgatcctccttgcctcagtctctcaaatagctgggactgcaggtgtgtactacga

SEQ ID NO: 468826 - DNA, 647 bp, Homo sapiens
actgactaaggagttcatttatttatcccctcaacaaatattccaaatcttattgcttgtcaggaggctgagatagatttaaaaaacagaaaacaggaaaaaaaaaaaaagttctgctttgggagagaaggttctagaacacatgggatctagggactgtcaaagcacagacaatgtgcccacaccagcccaggggaagtagaggagctaaatcctgaagggggaggaggcacatcctccagggagcctgtataatgacaaccagaaagtgtctccagaacaatggctgtgctttcatcctcccatgctagatcrggggctggggtccgctttcactcctctcctcagccactaggaagctcagaaccacctctgtctagtgttccaggtcttctagctcagtgagtggggactgctggcttcatctttctttcctaccatgatttttcccttcacttgatgtcctctttcacgttgtaacttttcagacttctgggttttgttgtttgagacaaggtcttgctctgtcacccaagctggagtgcagtggtgtgatcttagctcactgcatcctcaacctcctgggttcaagtgatcctccttgcctcagtctctcaaatagctgggactgcaggtgtgtactacga

SEQ ID NO: 468827 - DNA, 563 bp, Homo sapiens
caataatagaaaaataagggtaattgacagaagagtagaccttaatattcagtaaacatgagaaaaaatactgaaatattctaaatttagatagacttaataacaaagccatttcaaggaaatgatatattgtcttccccaaatgaagcttaacaaaaattaatttggtaaaatacaatctcagcaattttttgagaaaatgaacacttcatatgcttttgatgagactatcagctggtataatcaccaaggaagaaaactggcattatctgtttaatctgaaagtgatctagaaattttactcttggtgtctacccccaagtcagtgagagaakatattctttatgtgagtgatttttctgaagggtctacttgctacattcaaatagaatctggcaaaatgatgacaaacataatttttaaatcatcattgggtgatcaagaaagtgaaatctccagggaaaaggcggatggaggcaaagcataaagaatcagaatatggaaaagaagaaagaagagaaagagagaaggaagagaggaaagtgagatgtagatagtaagtt

SEQ ID NO: 468828 - DNA, 622 bp, Homo sapiens
ccaatacttgatttatactctaattatattctgaatgtaaatagaacttctaaaggtagtccctacacaaaataccacaaattcagagttcaccgtctgacttgattatatacacattatcaatgtaaggaaaagacatttggaaaaaatactgcatataaatgacacaattggatagttggggatcatattaaatgaggcagttcaagtggataaatgagctccattggcctttatagctagggaaatcacagctttctaggaagagaagatgagaagaaagataaaacagagatatattattcatgtgatggaagaagatactgacatagtttagaaattccctgaccggatccaagttgaactaaggccagactatatcccagatattcaaccaagtttaaaccagcttgtaatagtacttcaaaactaagtttaactgtcagtaacttcttttgtgtcaccctagaaccaactactaggtattttatggtgttggaytccagagtccctgtaatgatgatggcaaagctttgcccctctattctagcacgtatacaaggaaagagaaagttttgtcctccttttgtttaattctcttttcccttacacctggagcagt

SEQ ID NO: 468829 - DNA, 557 bp, Homo sapiens
acttacagttaataatatagatataatgttaaaaacaatttgcaaaccagcagaattttaagcttttaaaataattcaatggatatacatttttttctgaagattaagattttaattattcaacttaaaaagtagaaatgcattattatacatttttttaagaaaggacacgttatgttagcatctaggtaaggctgcatgatagcattcctatatttctctcataaaataggatttgaaggatgaaattaattgtatgaagcaatgtgattatatgaagagacacaaattaaaaagacaaattaaacctgaaattatatttaaaatatatttgagacatgaaatacatactgataatacatacctcatgaaagattttattctttattgtgttacagagcagtttcattttcatattaatatactgatcaggaagaggattcagtaacatttggcytccaaaactgctatctctaatacggtaccaatcctaggaactgtatactagttcctacttagaacaaaagtatcaagtttgcacacaagtaatctgccag

SEQ ID NO: 468830 - DNA, 628 bp, Homo sapiens
ctgcttaaaaactcactctcttccagtctgccaacaaactgaagagcaaagttcacctggaacttctctaagcaaagaatgcattagtaaaggcaaaaaattactgaccctctagttagggagaaaaatgctaacccatatcttgtcaaaataataatagtatctaacacatgtagaacttacaacatgctagatgcttttctcagcccttttctcatattagctaatttaatcctcacaacaatcttaaatgtggtaactattgttatacctgcttaatagatgagaaaagtaaracacaagtttacatgggtagtaaatggcatagccaggatttaaccttagacagtctggttctagcatttgtattaataatcatcattctttcttccctagaaaggagaggctgaattgattgaggggccaaatgtataaggatggattcagggtactgtttatatgtatgtatgtgtgtgagcatatgtataaaaatatgcatataaattgaacatgatccagtttgaatctctgagaatatttttaataatcatcatattattaacattttatgcctaaattctacaaataagcttatgacagtgttgttaaatagcacctgtttatcttt

SEQ ID NO: 468831 - DNA, 494 bp, Homo sapiens
ttccaatacagtattatataaatattaaaattagacctataaagataataaaatttatactacagtttataagtcaattctaattaattgaacaacactttataggcaacagagccaagtagcacagattatggtgaggagcttcttaaaacactttgtgagcggtgaaatcaacaatttttatgtgtcacataatttgtggtccagtaatattactagtaatgataatgaatatgtacactatcatttgcaatacacaggggtgttttttgaaacattatatacttaattctagcaagaatgttagaactagtagttattcctgttttctcaactctaaatcttgcattcttttcacatggactagtaaggaactagaaaaattaattgtttttgttaaaatctttatagaataatrccaaattaaaagaaaattaaatatagcatatggtgttttattctcttgtgaatcataaatatgtatccatcagaat

SEQ ID NO: 468832 - DNA, 518 bp, Homo sapiens
ctcttcttgatctccttttgggagatttctctgagttcacaatccaaatgttcttctgaaagtttaatacctgttaatgtatttttattttgaagaaattttcattattccttgattgcttctattttatggcctcatgttcatatttgatggatataatgtcccaagaagcctgtwagttgagtcgtattttcatcctctttaagaaatggaaaatgaggcacagcaagtttaagacttgctcaaaatcatacacttagatgagaatgaagtccaaactgcaatccaggcagtcaggcttcagaaaccaggccctggaccactttctggtcactatttattaaaatttactgtaagaccaaacacatagcttgaagaccatgaggatgcaactgagaaacccctggacaaggtaatctctaaagtctgatttagattcctaattagcttttataggattcatgtacttccaacaatgatgctacaaatagtgtctttaaaaacagttgccaataaaa

SEQ ID NO: 468833 - DNA, 518 bp, Homo sapiens
ctcttcttgatctccttttgggagatttctctgagttcacaatccaaatgttcttctgaaagtttaatacctgttaatgtatttttattttgaagaaattttcattattccttgattgcttctattttatggcctcatgttcatatttgatggatataatgtcccaagaagcctgtaagttgagtcgtattttcatcctctttaagaaatggaaaatgaggcacagcaagtttaagacttgctcaaaatcatacacttagatgagaatgaagtccaaactgcaatccaggcagtcaggcttcagaaaccaggccctggaccactttctggtcactatttattaaaatttactgtaagaccaaacacatagcttgaagaccatgaggatgcaactgagaaacccctggacaaggtaatctctraagtctgatttagattcctaattagcttttataggattcatgtacttccaacaatgatgctacaaatagtgtctttaaaaacagttgccaataaaa

SEQ ID NO: 468834 - DNA, 531 bp, Homo sapiens
aaaactgagattttcttatccttcatttgttgastgcagagagggttaagatcacatgaacaacagatctggagcttggaaatgaaacctgatcattcctaccagctttttgcaaatatatgcaaataccacatgaacacagccagaaaacagataattttctatctagaaattctgagacaataatctagcttcatatttcatttcagagtagaagagaccaacagcccagcacaggaatttagaagtcctacctcatgactctaaggccagtgctctttctaccatctgttccagacgaacacagtattagttgaaagggagcttatatatcattaggccaaaccctacattttgtagactaaaaagtgtatttctccttaccccacccccaatcaaagccacctgagatgatgggaagttaaattccttgacgaaggtcagggtttatcaaaagcagattagaatttacctctcctaattcccaatcctaactgtacttccacaggtcacctccctccaggctccagt

SEQ ID NO: 468835 - DNA, 647 bp, Homo sapiens
caaacaaacaccaaataacaaaaactaagaaggaagaaaaggggaaggaggaagccaggtaggagaagggtgggggggagaaagaggaggaggaagaggagaaggagaagaggaggagaggagaggaggaggagaaggaaaaggagaggaggaggagaaggaaaatgagaagaggaggaggagaaagggggaggggaagggggaggggaaggggragggggaggaggaggtattttcgtttttctctggtcctactttcaagcacacttgtctggagaaacacattactgaggtctttgaaaaacctgtatttcacatttctagagaaatcaaattttctcattctgaggtcaagttgccatttcaaatagatttttatctgtagtagcttttttttcccacagaaactgttttagaaaagcagaaaagaaatggatatacttcttgatattatcacttttcctcaatctttgattacttattaaactcttgctaattcttacatactacatatcatactgtatctaaaaatcaaagtcaaacccattcattcctaatcttctgttttaaaagccatatacagcatcgcgatgagaatgaatcattgcatgagctaggattaaagaaaagcagataaatcagatgct

SEQ ID NO: 468836 - DNA, 521 bp, Homo sapiens
caaacaaacaccaaataacaaaaactaagaaggaagaaaaggggaaggaggaagccaggtaggagaagggtgggggggagaaagaggaggaggaagaggagaaggagaagaggaggagaggagaggaggaggagaaggaaaaggagaggaggaggagaaggaaaatgagaagaggaggaggagaaagggggaggggaagggggaggggaagggggagggggaggaggaggtattttcgtttttctctggtcctactttcaagcacacttgtctggagaaacacattactgaggtctttgaaaaacctgtatttcacatttctagagaaatcaaattttctcattctgaggtcaagttgccatttcaaatagatttttatctgtagtagcttttttttcccacagaaactgttttagaaaagcagaaaagaaatggatatacttcttgatattatcacttttcctcartctttgattacttattaaactcttgctaattcttacatactacatatcatactg

SEQ ID NO: 468837 - DNA, 615 bp, Homo sapiens
tatgaaatcaattctattattaaccctgttttcacaggtgaaaaaaatggagtgttcaataaatagtagctttatttcataastctaaattacaaagagagaagtggtatcaaggaagaaaattcacaaaaaaagagatgtcattaaaaaaaatcacaactagtatcaatgaagaaaatggagcaaagaagaaaaacaaatgtgctacacagagagttccatgatgtacctgaatttcaaaagaacatgaataaaaataaaagatatttaagaaggataattttcttatacgtctagatcctaaatgagatgaagccgacaataaaaagagctatttcatatctacacattattagaaaaagaaacaggaagaccaattacatggagcatatgaaataaagttcaagtgacagagaaaatagagctcctcagatttctccatcaagaatatacttcaagtgtttccttaataactttttctctttctactgactcctttgtcatagtctatatacatactcgattattccccatttagtttaaaactgaaacaacacaaaacacttctcccctttcttctagttctcttttctttccctgcctcactgctaaaaa

SEQ ID NO: 468838 - DNA, 483 bp, Homo sapiens
attagaatacatttttctcctttagatgtccttggtatgcaaattaaattagaattcctaggacttatatagacgtgtctcatctcctatgagacagcacgtcttttatttcttttgtattatcttacttaggaaggaaggaaggaaggaagcaaggaaggaaggaaggaaggaaatgacagctctataccccaacattttctgtgtagcatttttataagtagaaaaaaaatccaaattgagaagcatgggtcagcaaaagatctggataaagtactcatgytaatttaaccaaaaatgctctttacttttactctcaaaatgtgttgtgcattgctttaattcagaaaattcagaaagaaacaacagaaagggcatgtaaagaagtttagtaagtgccttttctagctactgtctatactctctcgatactcttctgaacactggtagatgagatccaagattcttacactagtgaatgca

SEQ ID NO: 468839 - DNA, 369 bp, Homo sapiens
cattcctataaatcaagaaagatctycctaatttgaaagtaaacagtgatactaaaatttgtaagcctagtcaaatgtgggctattcaacaggtgtgatgtccttcataggtatttctaagaaaaagaaaaggaaatggataaatctgggcatgggattccttttgtggcagacagtgtttattggcttgcccagtacttaacctcaaccttttcttccctttcaacctcagttatagaggttgaaaatgtaagatacttgtattccccagccccctttacaactgaaaaaggctttgtggctaatgacaagtaagcagatatctgctgggatctttcctcgtcctctgttctatctgttctaaggagg

SEQ ID NO: 468840 - DNA, 553 bp, Homo sapiens
ctgggtccaccttgctgccaggccgtggataaagcccatacacaaaggagcaaggggagctggaacactgagctgctgagtttggagctgctctacttctgggctcccagttacattttcttactgtttaagccactctaaattggagttttatctcacttgcagccaaaacacactctgatacaaaaggttgataattatawcaatcagtagcagaatataagaaagactgaaaaggttctatatttctctacaaatgaattatttaatacaagtattcacaagggagataatcaagtccacataacccatttaaaagtgccacattctaagttttatgtgtcgcaagttgattttcagaatttcttgggcttcatatttcagctaaatatgctacagaaagaggtgggaaaaaatattatgatccatgaggtctggcttgtatttcctcttgccatattctgataaagctggggttgtcttataggactgtagaaagtgatgatcaactaatgattttcagcacccctttgacctttctttctagcattct

SEQ ID NO: 468841 - DNA, 553 bp, Homo sapiens
ctgggtccaccttgctgccaggccgtggataaagcccatacacaaaggagcaaggggagctggaacactgagctgctgagtttggagctgctctacttctgggctcccagttacattttcttactgtttaagccactctaaattggagttttatctcacttgcagccaaaacacactctgatacaaaaggttgataattataacaatcagtagcagaatataagaaagactgaaaaggttctatatttctctacaaatgaattatttaatacaagtattcacaagggagataatyaagtccacataacccatttaaaagtgccacattctaagttttatgtgtcgcaagttgattttcagaatttcttgggcttcatatttcagctaaatatgctacagaaagaggtgggaaaaaatattatgatccatgaggtctggcttgtatttcctcttgccatattctgataaagctggggttgtcttataggactgtagaaagtgatgatcaactaatgattttcagcacccctttgacctttctttctagcattct

SEQ ID NO: 468842 - DNA, 618 bp, Homo sapiens
tttgccagacctagacaaaataaggccagaaacacatgaaggggagaggaggcacatgctttcatgtccaaaataagaactgtttccaagggctttcaaaaaactccccaagaaactcgtttgcatccttcacacatcacctgcctatgacaaggtttatcactagacattctttaggactgccgtaattcagataagatgcttgcgaragaacacttacccagtgacattttcaccaatgaactgacattcactgtggctttgagcctctggaatgaatgaactctgttttttgctgtctcgtttttctaatgccacatcttaacacatgttatcagggacacaagcatcaaatatatatttgagaccaataactgatattgactgaaactgaatcccagaatcaaagtcttttttcagagccagaaagaatgacagacaggtgaaagataatgtttattgagtaattcttctgtgccaggcacacttctaagcactttacaaatattaactcatttaatcctcacaacaacccaatgaccaagttgctattattggcaacattttaggataaggaacctgaggcacacagaagttgagcaacttccccaatgtcac

SEQ ID NO: 468843 - DNA, 550 bp, Homo sapiens
tactgctatgtttgatcttcacagcaatgctgttcggtaagcatcactgacaaccctcaggatgttaaagaactktcttgaagttatgcagccaataagcataacttgctgaagttatgcagtaaataagcagcaaaaaagcagagaagccaggagctctttcctttccaaaagactaatataaaatgtcaaatttgcatttaagaaacaagctactgttatgggatctttggggtgtcaatttttctggccagaaacctctgtggctggagatgcctttgcccaagttttgcttgggcctgtggggcttgtgttttgcccacttggcctggcaggctgcgctgggctcatgctaccggcctgggtcccacacctgccaagggtgagtcaggcctggaactgtgaggagtgtgtgagggagcatggagtctggccactgtgcagtcagacatgccacctgctggagcagggcaggctgctccaggagccagcacaggtgcgggctctctgcaaggctgtgactgaaccacttgcactgcaagcagcttcc

SEQ ID NO: 468844 - DNA, 625 bp, Homo sapiens
gccgctcattaccacccgcttcaatcaccgctgccagcatctcccctgaacgtttttccctcccccgatttcagggccattggtcataaccgacatttaaaggaaataaacactgatttaaaaaattacaacacccatctctgcctgaagagcccagaagcaatgaataacagaacagtccggcgaagagagcctgtcggatcttagctccgccagcccttcctgccttacaattccccacaaccgagcagcacaaatcaccatttccaggcaccactcgagtctgccaattccactttcgcttaatctcattttaaaatcctctacagatgaggctctgtcgctgccgcgaggggccgggcggscgcggcgggagggacagggggcctgggtgggaagggagcgcgagggcccctagcggttcgcggcctcgggcggattcccagaacgagtgcgggccgcccggactggcagactgcgagccccgaggggcgcgggacgcagccggctcagacaaagaaaccggcgccagcggccgtccctgccgcccctctccttccctcacgcatcctcccaggaaaaacagggcacactgacggccaaaggggctggccttccccttcag

SEQ ID NO: 468845 - DNA, 418 bp, Homo sapiens
ttgtaaatagccaagagtatttgtagtcagttttcccaaacgcatttgctttgtattgtacaaagtcgctattgtctatcattaacatatcattaacaatcatattatgtgaacacttaataattatgtaccttcatgctgagactccttgacttaccatatgtacaatgaaaatgttgaatcagcttttttagtacaaggtcattgacaggmcatgtgggagacactgactgataagaatggaatcttctcactcagcccaatgctccaccaaagggagattttcagtttgcttcttattagcacgattcacaactgagaagtgtgaatgatcttatggttcacttctctgatgtgttggagttggcctgcatgggtttgcaaaagctggctcttaaaattttagaaaacttgccag

SEQ ID NO: 468846 - DNA, 418 bp, Homo sapiens
ttgtaaatagccaagagtatttgtagtcagttttcccaaacgcatttgctttgtattgtacaaagtcgctattgtctatcattaacatatcattaacaatcatattatgtgaacacttaataattatgtaccttcatgctgagactccttgacttaccatatgtacaatgaaaatgttgaatcagcttttttagtacaaggtcattgacaggccatgtgggagacactgactgatragaatggaatcttctcactcagcccaatgctccaccaaagggagattttcagtttgcttcttattagcacgattcacaactgagaagtgtgaatgatcttatggttcacttctctgatgtgttggagttggcctgcatgggtttgcaaaagctggctcttaaaattttagaaaacttgccag

SEQ ID NO: 468847 - DNA, 573 bp, Homo sapiens
ggaagtagaacttcagcatcggaacttggaggggttgggggcacagctcagtttttacagggagaataagtcatccttttcattcattgtgcatatatatacattactttaaattaggatggaagaatgccacttcttaaaaataacattgaatattggtaaataatttgtttccatgtagtcattgtttataagaaaatatataaagagatgaaatataatttctctatattataaagaaatatycatttttacaatgttttaatttaagctggcatttacttggaaaaagcaaaatggcattagcacattcagaactatattaaagatatttagatgaattcctaagttcatagtatagacattggcatttcacttatactttgttgagaagtgaaaactaaatgccaatgtaggcattgctgaactataaaacattgaaaagggattctttactaatgtacaacaattggcaaagtgtaaacacagaatgttgattttttcatgtttctcttaaaatgctgattcaagttcagtgccagaagcagagtgccaggccatcagcttcgacaa

SEQ ID NO: 468848 - DNA, 627 bp, Homo sapiens
aactacccatctatctacttaagcaacagtctagaaatagcctagaattagagtaatcttaagttcatctgatcttacataaacctattattggatagatgctgtggctcacacctgcaatcccagcactttgggacaccaagggtggggggcagatcacttgaggccaggagttcaagaccagcctagccaacatggtgaaaccccatctctaccaaaaatacaaaaattagccaggtgtggtgacacgcgcctatagtcccagctacttgggaggctgaggcaagagaatcccttgaacccaggagtgggaggttgcagtgagctgagatcgtgccactgcactccagtctgggtgacagattgagactgtctcaaaaaaaacaacaacttaytgaagaacaaacatacattagtgtgagctaagttgtcctgtttggggtgaataacagggttaaataagacaattttgaaattcccttttcatatggtacctgaagtaaattatgtaaaatttcattgtaagataaataaatggcttaagtaatcagtaaaagcaccttttgtttctattggcccttggtaaccattgcagtatttctagtggagaccaaattcatgtttgtt

SEQ ID NO: 468849 - DNA, 493 bp, Homo sapiens
gcagcaggtttctttagtcatcaactatgaccttccgaccaacagagaaaactatayccgtagaactgtttgaagtggacggtttggccgtaagggtgtggctattaacgtggtgacagaagaagacaagaggactcttcaagacatagagattttctacaatacctccataccttcactgaggaaatccccctcaatgttgctgacctcatctgaggggctgtcctgctacctagccccagccagggttcaatcttgggggtcagaggagctgcaggaggcgggagggaagggagccaagggatggacatcttgtcattttttttctttgaataaatgtcactttttgaggcaaaagaaggaaccgtgaacattttagataccctttctttagggtaggctcttgccccaggcactggctcttctcccaaaaaaatactaatccatttccctaacctagtaacctccagatcccagaggctttcttcacctc

SEQ ID NO: 468850 - DNA, 604 bp, Homo sapiens
attggtaccaatcctattgacattattccacaagatagagaaagaggaaataccccctaaatcattctatgaagccattctatgtaaactccatggagagagataattttttttggtccacctatgggttcttagtttctggcattaaaaatggcattcagaacatttatcaacttaatattggctaagtgtgtttcctgaactatgaattactaggttaatatcaactgttatgattagtcataacaaatatattatttatctattgytgcataacaaactaccccaaaacttagtggggtcaaacaacaattattcactatttcagaggttctatgggtcagaaacttgggcagagctcagctgaatgcctccactttgagttctctcacaagctgcaatgaaaatgttacccagagatgcaatctcatctgaaagctcaaatggggaggatctacttccaagatcaatttttttggtttctggcaagattcagttcctcatgaattgtaggaataaaggcctcctttcctcactttctcagtttcttgacacacaggcctcagtttctgaggcctttctcagtttcttgacacacaggcct

SEQ ID NO: 468851 - DNA, 564 bp, Homo sapiens
ctggacagctacattagacttctgactagtgtcccagcctttattcttgtccctctttaatatatatttcatactgcaactagcataatatttttttccaataaaatatagtcatggcacttctgcagttgaagtcctccaatgactttcttgtgcccacaggatgaagttcatactaaaatgtaggactctacgtgatttggcccctgcctaacttgtcattcttacctttcaccaagccaccctttcatatccttgatgcagcaattttaaactatgtatagtttcggatagtacctgctccttctacctggatttccaccatctcatcctctccttcctgtctctagagtatatttaataagcatcttatctttcaacactcagtttaagcattaccattttttacatgttcctgmcttcaaggatttttattttttaattatttttatttcaataggtttttggggaacaagtggtgtttggttacataaataagttctttagcagtgacttctgagattttggtgcattcatcacccgagcagcatacactgtacccac

SEQ ID NO: 468852 - DNA, 602 bp, Homo sapiens
ttatctacctggccaaaattaatactgcaaatggaaatgttaataactcttttaatctcatttatatttattacctaatattacctaatgtaaattctacattccaaatattcattccagaaaagctccttttgtcatatccaggactgaactttattgaaagagaaataaaagaacctacttattctacattagaggatagataataattataaccaattttagaagccaactaaaatctactaaaaattggcagtaaatatgagtcttagctgtctcctgccatgccccaagcttatttaaagatcaagtgtatggggaagtattttcctatcagttttgtttcttaaaaccctgtttcaaaaatctgatgcctttgctaaaactaacattagtcctcctaaaaccgtacagccatcatctaaaaccacggttctcaaagtgtggtcttgggactctcaggacactgtctaggggtctaggaagttaaaactactttcaaaataatactrtttttactcattcttccttaaatgtacatgaagtttcatagagactacataatgtatgatatcataacagagtgcagaaggtaatgtgag

SEQ ID NO: 468853 - DNA, 613 bp, Homo sapiens
tgggtactggcagagccagaagttaattctgggtctgtttattaaacatagtttattaaacatataaacatcaataggtttattaaacatataaacatccaatgcctggtcttcctgaccccatgattatagttgcccctcatgaagaatttcaccattttcttactctttcatcagggtgctcctagatttaagamgagccttggtttttatggcagaaagttgctatggagatacagtgtgcatccgtcttcagaaatgcacagaaaaagcagcaggagctacaaacctttaaaaaaagtccttcagggatattcaccactaaaattggaggaggggagggggagaatgaatagctgtgcttgaactcttgcaaaactgaattcaagtttgtgggtcaaatcctgggctgcagcacgttccactctgggcatgggggagcactcaattaggctgcaggagacctggctcagccatgctgactcagttcactgtgtgacctcagacaaatcctttcccctgttctgggcctcagtttgtctacctataaaatgaggactttgaaggagggaatccaaccagctcccacaatactcttcttttcccctgatac

SEQ ID NO: 468854 - DNA, 405 bp, Homo sapiens
atatgagtaagtcctacctgagatctgactcatctaccctgaccctttgcctttaagccagacatcaagaaaccctcctgcctcaagtccacctccactcatttaaaggtgacatgggatcccgcatccttgttcaatttccttggacctctttgttttccccagtggagatcagaaatatactccataacttgggttgccccaagccatttctcctacagagacagcctgtggtcaccaactgcccttttctaattttaaaaatatttttatttaggctgggcactgtggctcatgcctgtaatcccagcactttgggaasctgaggcaggcagatcatttgaggtcaggagtttgagaccagcctggccaacatggtgaaaccctgtctctactgcaaatgca

SEQ ID NO: 468855 - DNA, 627 bp, Homo sapiens
acaatatttgtttgatatgaccatacacccttttaccttagttgattcacctttttttcacatgcaccttgccatccattttgtttcactactgttactaagcagaaattacttcaaaaactcaaattggttgttcatttcagtcaaaagtctactatttgtatgtctattccattttcttcaagcaattataaaccacttttaatgtgtagatataaaaataatatcactttataacaaatatttattgaaagactactttattttctatttcactgaacaatagctcatgagtatctaccatgtgcaaagcactgtggtgacactagagatacagtggtgaagaagacaaacatcatccctgaaatagttggggtagggaaactgctgtaggaaacaaatgtaagttgtgcatttcttcatgtaacagtaccagtgggtcaataggttggcatgtcagtagtccttcatattatagtcaatcagggacataagctgacagaggctcagyctcttttaacatatggtttccaaagtcactctcaggcttatctccattctagctggcaagaagaggaaaagataatggaagaggtcacttccacatgaagggacattgtggaagac

SEQ ID NO: 468856 - DNA, 580 bp, Homo sapiens
aggaagggtcactgggctgcctgcagcagccctgggctgaggaagttccctgcaaggtgactactatgactccagaagaaaagataccaacaggagtgtctcctggacttttagcaagggatttcagccacaggttatcagcctcaggaacacccagatgacctctgcccatgcccagccattgctctgtggttctgccagcaatgcgtactccagatcatcagtttttttcgggaaccatattctgtccttaagttggattcttcaagctttgagagtgcctgggagaaaacacctttgggtttacagatttatattgtgcccaaggccccactaaccagatagcattgtccttcccaatggtcactcttctacgacatcccccacatgcagaagcaagaagaaactggtcttctcctctcaagcacttgtaargaaacacaaggggtggggtgacttgcattcatttcttcccattgcaaaggtggcacccagcactgaggaaagcaagccaggatacccaggctatggaagtattcatatagagaggatgaaagggtagggctcctaaggaatgact

SEQ ID NO: 468857 - DNA, 513 bp, Homo sapiens
tcggaacatctgtcttggcataaagcagagtattttactttgaaatatcagtgaaatataatttaagcttgcacatccacacacatgcacagacatatgtaatcaacagatatctgtttcacaaatagggaagataggcagcaataaagtattaaaataatttccatgttggaaaatcaataactataaaaccccacagggttcttctctgaattaatgagtaatcacagcctccatgaaatacrctacattttatgtaaatgaaattgttgcaaatacatgaaaaaataaatataattagaaattcatgatgtcaaagaaaattattttttaatgtatgcctaaaaagctattgtgatggaaaagtgacagtttcttttaatgtcagagcaatttctaaaaccaaatgaataattcttataattaaaatgacatacattttagataaaatccatgttatttcactctaggcattaatacagtaaggtaggtttgactgcagagtccccacag

SEQ ID NO: 468858 - DNA, 430 bp, Homo sapiens
acatgcacagacatatgtaatcaacagatatctgtttcacaaatagggaagataggcagcaataaagtattaaaataatttccatgttggaaaatcaataactataaaaccccacagggttcttctctgaattaatgagtaatcacagcctccatgaaatacactacattttatgtaaatgaaattgttgcaaatacatgaaaaaataaatataattagaaattcatgatgtcaaagaaaattattttttaatgtatgcctaaaaagctattgtgatggaaaagtgacagtttcttttaatgtcagagcaatttctaaaaccaaatgaataattcttataattaaaatgacrtacattttagataaaatccatgttatttcactctaggcattaatacagtaaggtaggtttgactgcagagtccccaca

SEQ ID NO: 468859 - DNA, 344 bp, Homo sapiens
tgtatctcttcctataggaacactaatcctattggatcagggccctacccttaggacctcatttaacctaaatgacttccataaaagccttgcttccaaayacaacaacattgggaagtagggcttcaacatacaaatgtaggggaacatgattcagtccatagcaaggttgttataagaaatctgagaaattatgcaaagttcattatgcctggcacatggcaggtgctcaataaatgctaactaatgttagctataaaatcatcattgtaataggcatcatatctgaggtaacttatgctttttattttatatttttaaaggaatgctacagatggaaaagc

SEQ ID NO: 468860 - DNA, 519 bp, Homo sapiens
ttggaatgcatcaacattctggtgtttttcaacttaaggatggatttggaactggctgcagaaatgtaatcagcatcttctcaaagaaaaaggcagacttaactgaaagttgaaatttgtgtgcccaaatacatccctctgaattatggggcttggaatagtcaataacaagataccacaaaacaactatctctatacaatctgtataaaagaatactcagaatcatgtgtaagtaaagaagtggttacctatttcatatttctaaacttgaaaaatggggcactggagattaaactgggattcatgaaatatgagataaatcgactctgtctacacattgtaaaagaagctcatgagaaaaattgatgattcactaacaagttaggaaraaaaaatccatacacacttaaatgttccttgcttcaatactaaaaagcaaaggaagaggggcataacatagaaaacctaaagaatattttagtggaaggctttaaaatgggggtgagtgttaaaattaa

SEQ ID NO: 468861 - DNA, 598 bp, Homo sapiens
caaaatagtgcaatataacacaatggtttggtatttagttttgaaatcagaatcttgagttcaagtactaattatcccacttactcattcactgaacttggaaaatttacttagccttttaatctcttaatctaagaaacagcccaggtttcttaggaaaaccatggcaaaatgcattagtgatttggccagaccatgccgatagcttgatttgctgggacattttcagagaagtcrtatcttattctaatactctctatctaaacaatctatccataggaagaagggagataaatttatcttttcagtcccatttcccattggtaaaggctgatcctcatgaactgctgcacaaatataagacccattagtttcttagacaactcgtgcctcagaagctacagggaagactcagtgtccataagctatagaatgaacatggagcaaccactctataattaatccttcacctgtaatgttggcagtgacaacaggtggcggtaaaagtgtatcagtcagctattattacaacagtgctgcctaataagtcatccccaaatccaagggcttaaaataataagcaattttgtttacgtag

SEQ ID NO: 468862 - DNA, 579 bp, Homo sapiens
gctggtaaagactcagtgattttaactatgatgatctcaacttgcacttgtgtagagtctagatagtgttatttttttgacctatacaatttctgaaaataaaagtataatttttaaagtgtttgctggattaattgcaaatctttggtagaggtctttatgaatatatacttttacaccatggtgttgtttaatcaagacttaagagatacaagtagctctagccacttttttttggactaacatgggtctgtctgaaataycatttagaatcatctttagagaagtctatttgctaatattgcatgggagaaaataaagtcttgcaattaaatgattacttttgattctgcaaacatccagcacaatcaattcatgacagaaagaaagttccttatataaataattttgttgctggtttcattgacactccaaatacttcattcattaatacaaatatttattgagtgtctattgtttttgccactggggatgcataggtgaatgaggcaaacattttttgtcaccctggagcctacagttgtaacaaaagttagaaggaaaaaaaaaacggtactg

SEQ ID NO: 468863 - DNA, 253 bp, Homo sapiens
agaccaacatttcagaggtctggcacaggaactgatttttaaaawatctttgcatttcttcagagccccaaaacactgcatgtgtcttagtggctgcccacgctctggctgagtggggcaagccaagccatcttctatgccagatgctagcaggaagtcaaagctcctgcaagaatgggaaggtagataacaaggatcccctatatcaccaggcagtggagtagatttgtcctcctgcagggtatagtgtttc

SEQ ID NO: 468864 - DNA, 636 bp, Homo sapiens
gttgaatgaacattcattcctagaacacaaataagaatacctaagaatagctacatccacacaactggcaataaaaatgaaggaaagtagtgatcatctttttcaacaaggtaatcttttttgatggaaaattccagaaaagccattccacatgcaaaaccccaaaaccttagcagagaaaggtcctttccaacacctcacaagattgctttccaaaacgtctttaatcaaagccaagtgctaaagttacacaaacacagagaaacacactgggctgagttacacctacagtttctgcttccctatagaactggaagttctttccctgcttacagtttctagcttctcaaatgaaatagcacaacgcttggagcctgattattttaggaaaggtcaagtgagcccaaatgctaatagaatttcatgaaaccaaagagatggcagcttcccaattctaggtgctaagctaaacacactggggttaaaacataaccacatccttgctaaggagaaaatggtcagagtggtcaggcttactgtgtaagctggtcatgtgatgcccacacagttttatggtcttcttatcattgttactggtctgcarttggagatgagtcagtggataggagtgggaaa

SEQ ID NO: 468865 - DNA, 551 bp, Homo sapiens
tggcaacagaagtcaagggtgtcaccagagttcatattgattaaatctttttcctcatcccaaaaatgtgactagtaaaggtggaggagaatgaataattattaaattcctggcttatcaccatccctaaattctcagaagtatacacatgtaatttttctttacactcatctacaatgattgagcatggtggtgcactaggtgagcttcaaggggtcagggacctttggctgatttgttcagtgtatcccagccatctagaacagaggctgtgttctttagwgctcagtgaataatttgctggactgaattattcatgttgtttttgagcttgctcttcacttatctgcaccattattgtttaatgatttagtaaaaaatcaggccttaatattttaatggcttcagctatagcctgttaaggtaccacttaacattccttgtagagagaggtgatgttctatacatatataaatatacatatatatacatacacacgaaatcaaattattcaaactcttttagcttcaacttgtttgttttcagttagt

SEQ ID NO: 468866 - DNA, 556 bp, Homo sapiens
aagtcaagggtgtcaccagagttcatattgattaaatctttttcctcatcccaaaaatgtgactagtaaaggtggaggagaatgaataattattaaattcctggcttatcaccatccctaaattctcagaagtatacacatgtaatttttctttacactcatctacaatgattgagcatggtggtgcactaggtgagcttcaaggggtcagggacctttggctgatttgttcagtgtatcccagccatctagaacagaggctgtgttctttagtgctcagtgaataatttgctggactgaattattcatgwtgtttttgagcttgctcttcacttatctgcaccattattgtttaatgatttagtaaaaaatcaggccttaatattttaatggcttcagctatagcctgttaaggtaccacttaacattccttgtagagagaggtgatgttctatacatatataaatatacatatatatacatacacacgaaatcaaattattcaaactcttttagcttcaacttgtttgttttcagttagtgtatctttcatgac

SEQ ID NO: 468867 - DNA, 551 bp, Homo sapiens
tggcaacagaagtcaagggtgtcaccagagttcatattgattaaatctttttcctcatcccaaaaatgtgactagtaaaggtggaggagaatgaataattattaaattcctggcttatcaccatccctaaattctcagaagtatacacatgtaatttttctttacactcatctacaatgattgagcatggtggtgcactaggtgagcttcaaggggtcagggacctttggctgatttgttcagtgtatcccagccatctagaacagaggctgtgttctttagtgctcagtgaataatttgctggactgaattattcatgttgtttttgagyttgctcttcacttatctgcaccattattgtttaatgatttagtaaaaaatcaggccttaatattttaatggcttcagctatagcctgttaaggtaccacttaacattccttgtagagagaggtgatgttctatacatatataaatatacatatatatacatacacacgaaatcaaattattcaaactcttttagcttcaacttgtttgttttcagttagt

SEQ ID NO: 468868 - DNA, 515 bp, Homo sapiens
cttagagattctaatttagtagatcttgtgttgggtttagaatttcattttctctattccaggaagccctctcatatacttaccaacaaaataatcgtttactggtacttgctagccatgtgacactgaccaaattacttgacctgcctgtgccttagtttacagggaaataggggcaataatattacctaccctgtagatttkttgagagtattaaatgggggtaacataggtaaggactttgtaatggcgtgtagtacatagcaagcacttgcacgtgttagctggtgttattcactttgttgtgcttccagaatttcaaactgtactttcttatatggcccttgccatataatgtatgtgatcttataggtgctctaaagaagataggtgatattactgatacacttaaaggagatcatgcgtacataatttgactcctttaatatcatgcattccagatgttactgcccagctctcctttttttccagggtaagatacctagtccgcagca

SEQ ID NO: 468869 - DNA, 655 bp, Homo sapiens
tcatttttaccttttgacattgttctttgcacaatttttcttcattttggaaaacttttaattcctttaggtaatggctcttcacactccagtgtgtgcagaaatcactttaggaaactcgttaaagttatgagtccaaccttagagattctaatttagtagatcttgtgttgggtttagaatttcattttctctattccaggaagccctctcatatacttaccaacaaaataatcgtttactggtacttgctagccatgtgacactgaccaaattacttgacctgcctgtgccttagtttacagggaaataggggcaataatattacctaccctgtagatttgttgagagtattaaatgggggtaacataggtaaggactttgtaatggcgtgtagtacatagcaagcacttgcacgtgttagctggtgttattcactttgttgtgcttccagaatttcaaactgtactttcttatatggcccttgccatataatgtatgtgatcttataggtgctctaaagaagataggtgatattactgatacacttaaaggagatcatgcgtacataatttgrctcctttaatatcatgcattccagatgttactgcccagctctcctttttttccagggtaagatacctagtccgcagca

SEQ ID NO: 468870 - DNA, 475 bp, Homo sapiens
cgttagggagcccctaggtgggagagcagagctgccagagggactccgttgagtcttgtggggggaatgcttcagtccaaagcagattctctctgaggtctgtgggtgtcacattaacccctgaaatgctttgcccacaccccccaaagccagaaggggagcttcmgccaagaggactggcaatgcatagcctcagtgagagatgcttgaatgggggactttcaggcgacactcaggcaacaaaatacctcttctacctgcctcccccttcccaaccaggggtggggtgggggcgagggtgggagggcttcttatatcaattctgtctccaccccagatattcagaggaggctgaggctggaacacagagggcaggggcagtgaggtcaggcaaggagtaaggcttggcttgcttgagcctcacctggggccccccgaccatgacccccgtccttatttagaaggtgtaggagac

SEQ ID NO: 468871 - DNA, 399 bp, Homo sapiens
cacccatgccatgtgatactgcagaatttactttaatccatctcaccacactgcagaataccaaaaacaaacagaagatcatacagacagagtaagaggaaagtcagataccwaacagggaaccacaaatagcaagtagacttctgacctcaacaatgaagatcaggagggggagaatagctacaaagtgctgagagaacatatctaactcaaattttgtatgcagaaaaccttcctccaagaatgagaacaaaataaataaattatttaatttgataaatagaaacttagtttgtcaccaacaaatttacacataaggaacacgtaaaagttaacttcaagaagaaggaaaatgatatgaaagggaaggtctaaaatccaagaagcaatggtgatgaa

SEQ ID NO: 468872 - DNA, 628 bp, Homo sapiens
taaaactcccagcaccttagttaataccctgtatgctggtggttcaagaactagttaagaaacagtcacattttctattttcactgccaatgtataataaaatctctgttccagtgaatggctggccaattattttaataacgatgttggcatggcttcattttacctttcttgctattagcaaagctttccttttgtactctgaagtacgggtaaatcacaaattaaactgagctgttgtttgtttaatgctgtgtttcctgctaaccttattcttgtctatcaacctgaacgtagttccccagtggctcasaaaaccctcaattgggattaagtaatagtttacacaaccttgctcagtcattaacctgtgttgactttctcattcttgtgttccagcctcatttaagagtttcttaagcactctatccagttgctggtttggtgacaactaacaatacctatttaatcaagaaatttaatatttccaaggaatcatttatcgtatctcagacttcttcattaacataatctaattcagtcttgtattccttcttcaaaataaagcctggtttcattcatagtaaatatgaagcttaaaaatttttacttcttttcttctctatac

SEQ ID NO: 468873 - DNA, 400 bp, Homo sapiens
cctggtgcccagaaaccattcagaaaatttttatataaaccaaaataaaaatcctttgaaacttcaccacgtaaactgcaaaatcttacttaaaatgactagaactgatttataaaaacaagtagacaatatggttaattttttaaaactaaaaattgatagggtttcaatacagccaattcttggtgattcaggaattgataatccaaatcatagatttttccaggaccttgtttttctgaaatctttttcctttggctgcatttcagccattttgctgcttttcatctcaaccactgagtttgggtaagttgtgcaagagaagatctagctcaaattattctgctcarttttccttagttgtttgattggaaaagtccaaaccacagactaacatggg

SEQ ID NO: 468874 - DNA, 497 bp, Homo sapiens
tcatatacatctttcttggtgtgatatgaaagacccctcatatatattctgacccccacctacatttttagcccctctcctgtcctaatcccaaatgcactgtgccccaactattttaaactatttgtaaaaccctgattataggattatgtcaacacaggagtctgtgtgccttcctccccttgcaaatacagttgcctgacaaactccttctcatcccataggatttgactcaaacatgaccttctttgtggtgtcctccttgtytcctcaccttctcccaatccccaaagtcagtccataacattctcctaacagtggatagcatgtgccatgctgtaccaggtctgctgatttacatgtctgtcttctgtgctagttgtgagctcctcaatgttaaggaccacatctcattcatctttgtagtcccagacactaacacttcccaggtgcatggtaggggctcaataaacatttggttaagaaattaattgatg

SEQ ID NO: 468875 - DNA, 452 bp, Homo sapiens
agaaagtttcaccttgtcgtgggcggggcagaggcgggaggaaacgcgacccccgcggggccaggcgcggcgcggacggcaggaagggcgggggccgatttccctctgggtggtgccagtccccacctcagcggtcctcggaacccgcggactaggggacggacagcacgcgaggcagacagacacgtgctggggcgggcaggcgagcgcctcagtctggtcgcctggcggtgcctccggccccaacgcgcccgggccgccgcgggccgcgcgcgccgatgcccggctgagtcactggcagggcagcgcgcgtgtgggaaggggcggagggagtgcggccggcgggcgggcggggcgctgggctcagccsggccgcaggtgacccggaggccctcgccgcccgcggcgccccgagcgctttgtgagcagatgcggagccgagtggagggcgc

SEQ ID NO: 468876 - DNA, 494 bp, Homo sapiens
actttattactcatagccatagcaatagccagagtatcaacacttctgtacattccttgagtcctgatttcttttttttttcttagatggagtttcgctcttgtcacccaggctagagggcaatggcgtgaccttgggttcaggcaacctctgcctcctggattcaagcgattytcctgcctcagtctcccaaatatctgggattacaggcacatgccaccacactgggctaatttttgtatttttagtagagacaaggtttcaccatgttggccaggctggtctcaaactcctgatctcaggtgatcttcccacctcagcctcccaaagtgctgggattactgatgagagccactgcacccagcctcgtcctgatttctacaaggcaacgcagagtgggctaggacacctgcataagcagtactcaaaagaggatcagtgttacttactttctttttgccttaggatcaaatatacaacagcatggtgctgtt

SEQ ID NO: 468877 - DNA, 639 bp, Homo sapiens
aatgccatttatgtatcctcaaaagtgatccaaacacctaaaacgactgatattctgccaggctcatcaaaggaaagataattcatgttggggttatacatttttcttttaatgatttgataaccatttatggattaagattcaaaagaataatgacaataaaaatcttttgcagaattcttcttaattatagaaaaagtacttcataaatattgaaatctgttcttatctgcgaatgccctgatttttctatacttggacacactccgaacgcaattatttggtgattaatctattttttaaactttctgttcattagtcgtttgatgaaagtttatctaggcaaagatcacacagagttagtgtataaggagaatagaatatagatcatcgtatgaacggaaaaggaagacaagaaaatggcctcatgctggcytactaaggctatatctttaggggacaaatgaattctcaatttagcattttggccaccttcattttccatcaggagggatgaacacagctgactcattcatcatataaccccattcattttctttctttctaaagcacttataaaatataaatagataatgatatgttgataatgtagaaagaacaaccatttataatatataa

SEQ ID NO: 468878 - DNA, 639 bp, Homo sapiens
aatgccatttatgtatcctcaaaagtgatccaaacacctaaaacgactgatattctgccaggctcatcaaaggaaagataattcatgttggggttatacatttttcttttaatgatttgataaccatttatggattaagattcaaaagaataatgacaataaaaatcttttgcagaattcttcttaattatagaaaaagtacttcataaatattgaaatctgttcttatctgcgaatgccctgatttttctatacttggacacactccgaacgcaattatttggtgattaatctattttttaaactttctgttcattagtcgtttgatgaaagtttatctaggcaaagatcacacagagttagtgtataaggagaatagaatatagatcatcgtatgaacggaaaaggaagacaagaaaatggcctcatgctggcctactaaggctatatctttaggggacaaatgaattctcaatttagcattttggccaccttcattttccatcaggagggatgaacacagctgactcattcatcatataaccccattcattttctttctttctaaagcacttataaaatataaatagataatgatatgttgataatgtagaaagaasaaccatttataatatataa

SEQ ID NO: 468879 - DNA, 625 bp, Homo sapiens
tgactcattcatcatataaccccattcattttctttctttctaaagcacttataaaatataaatagataatgatatgttgataatgtagaaagaacaaccatttataatatataatatatgatgttatgggttgaagaggggaataatatataatatttaatgttataggttgaatagggggctctccaaaaaaaaaaaaatgttgaactccaaagccctacaactaggcaacgtcgtcttatttggaaagacagtctttaccaatgcagttaagttagaatgacatcattctggattagggtggatcctaaatgcaatgacaggtgtccttctaagagacagaagaggagacacagacacagaggagaaggccacgtggagacagaggcagagactggagtgatggggcctcaagcccagggatgcctggagcccccaggagctgggagaggcaggaaggaccctcmcctagagcctccaggaagaacaaaacacaactgcaatgggttgggtggtgacgtccaaaagatatgtccatgtcctaagcccaggaacctgggaatgggacctcatttggaaaaaggttatttgtagatgtaattaaggatctggagatgagataat

SEQ ID NO: 468880 - DNA, 547 bp, Homo sapiens
gagagatgccagaattggaggtggtaacagtgagccaggaagagacgtgaaggcctgagaagtagcaataagtgaaacagaaagargtgagctttggaaagagtcttgaaacatcagccagaaaatatttaacctctcttttagactatggttgtaaaatcttggagggtaaagatatcagggatctgaaagggttacctttatttggtatttacaggtagttgtccaggccagaatataaggacaaataaatacaaatccagcatcttctgtgtggcaggcagcaagctgggaagctcacgcaccttgttgcattaagttaactttggtcaagtgaacatagcattggagtgagaagttgggaggccggggctctgggctaacactgctccttgctagctgtgtgacacagggtagatcatttcctccctgtgggccccagttttcccatccataaaataggaatgggaatcataccatgaacttcatatgattattttggggactaaatgaattgaggtacagaattactgagtcaacaagtata

SEQ ID NO: 468881 - DNA, 408 bp, Homo sapiens
ccacctcgctgcaccatagacctggggggccaagccrcaacacaaaggaaaattatctttttctgtttgggccagagtaaaatatgtgtgacgaaacatagacatcagctactctgcttagcacccaatattaaactggcaaggcttaaatttgtccttagatggctcccgtcatctttaatccaacttctgactaggaatttcaacacgtccctgggcaagatggtcaccctgagtaatagaaaagataagaaagggaaaggagagagagaaaagcattgcctgtggcagggtggggaaggtgaagagctcacagaggccagagaaggacccactcattcattgcagtgacactgaaaatgaaaagttcaggggaccacttgccagtagtgaagggatcttttccag

SEQ ID NO: 468882 - DNA, 631 bp, Homo sapiens
gctgcacatatgtcacataaggaagaaatgaaagtgctaaagtggaaggtatgggaaattctacaggagtcatgcgaaaccactttttaacagattcgaatttaaccaagaatagttgaatgatacagaagaaaaaatgtagttttttgtttttatcttttccgacatatttatggttaggtacatacacataccttgtaatgttagccttrcaaaggatcttaagcaccttaaggtcctacatttgagtgctaaaaccacctactaaatgtatattaatttatatcactcatggattgcatcgctcagtgtttttattcctctcagtaattaggctacgtagagactttgctgcctctgagaagatttgtatttcttgaatatgtaagccaggactgccaaggaaaagaggtactttgatcttagagactcttcccacaaaattaaccaaaaaagaaaaaatcatctttctgtggagtttttgtttgtttaggacatcttaaagaacgtcagcgataaactatttgagccatttgattatttactatttttcctaagagaaagtaatgaaagagaagagaaagagggaaagaaaaaaatggaggccgggaggaagggctgatgggtgccc

SEQ ID NO: 468883 - DNA, 563 bp, Homo sapiens
ttatatgaatcctaaacattttatttgaatagcaaatgctataaggaatcaagagaatattaaatattttatggtaaataacatctgtttcaatgatttcttcaaacctgtttcattttattctttcctgaaactttaaagccaatcaaaaaaaacagatacactgagtatatatattgttgccttataaaagaaacacgattcttatttttaatgtttcttctatataaaacaatactttgaatgtttcatttctgaacaggtgctcaaaggaaacaaaaaaattaatgatattatggtattttgtaagttgtaattatatccctgacttcctatttycatcaaattattatagatattcatatatcaaaaagcacagtttccccaaataattaattttttaaattaaataaaatatatcaaaagtagcaataagggtaaaatctcattggtgaatttctgattgtacgaattaatattaataactgacctttaagaagacaaatatatgtgagagtaaatctggtttgcacttctgtctgactttcttctctatctttctg

SEQ ID NO: 468884 - DNA, 508 bp, Homo sapiens
cagccccttgattccccattgcgggagctcttctgttcattgtggtattttaacagcgtccctgactcctccttactaagtgctagtaacacccttcttccctacctcacacccattgagataatgagaaatgtctctagacattgtcaratgtactctgtggtgcaaaattctcctccactccccacccgagccacacactgggatagagtgtggagcaggatctcacccgtttgctcacacctggtgatctaaatgggtgtgcatattctattccaatgattaaccgaaccctgtacctatgcttagtaactgaattgaattaatttgaaatgttttaggctgggcacagtggctcatgcctgtaatcctagcactttgggaggccgaaacgggcagattgctcgaggtcaggggttcaagagcagcctggccaacatgccgaaaccccgtttctactaaaaaaatacaaaaattagctgggtgcagtggcgcgtacctgtaatcc

SEQ ID NO: 468885 - DNA, 623 bp, Homo sapiens
ctggcaagcactttttaagtgtctgcttctgttactcctgctattatctcattggtcaaatcacatcccacggccaagctcagggttatcatgggagggagctacttaaaagcttgtgtgtagagaggaatgcttcactgggtacctgtactgctacctttactgccactttcttcctagtttctgaaatccctttcagttggacagatacaggaccaaattaaaaagttttcatgactgttgctgcaaaatttatgtttctgcaaaattcatattagaatcaataaacctgaatacatagaaacttgttcataaaaaaaaaaaaccttgccactgtgaggtttttttcctcttaagcaaaacaaaacaaacaaacaagaaaacaactctccgagataagtgaatcttctcccagttttggtgtatcattctagtcattggagatatttaggagaataataaatgcatgttttacaaactgtaatctgacatgccaaaaagacatttcaaaattctcatgtccaatacagacattgattctgttrtggcgtctgatttaaaaaaaaacaaaacaaacaaaaaaaaaaaacacaactgtactatagtaccacagtacaccagta

SEQ ID NO: 468886 - DNA, 642 bp, Homo sapiens
tttgtggaacgatgttccctcaaaaacagtttatcaagtataactttttcctagatgaaggtcatgtggcaagtgaccaagagccttggcttgcacttacagaatttccccacccaacagcttctagcatactgggcgtrgaaggaaaatctactcccttcttctttttgccagcaaaaccaagcttgacacaagaaaccagacttaaccaggtgaccctaattaaattctgacagttctaaaccaattcagagggtcccactccctttgcttgtgatgattggattggggtggaggtgcgggtaaggggtgtggccacctaggaggcacaggtgaagtctgcagaaaggagtttcttgtttccaaaaaggtgatcaggaagaggtgtctcttttcttcctgtaggaagtaccatgtctgaatgtgtcaccagaactgtatctgttattaaatattcataaggggaaacccattgcaataaagatgccagaaccaaggataaatgggaaaaaacttgaagacttcatgacatattgaaacttatgccttgataaatcttgaaaccttttctacctcttgacttaccattagatgaaataatgcatttccttattgtgtaagataatttgagataattttatc

SEQ ID NO: 468887 - DNA, 266 bp, Homo sapiens
gaatcagggccaccaggattatcaaggataatctcccttacttaaaatcaaytgattatacttcaatcacatctacaaaataccttcacaacaatgcctatattagtgtttaattgaaagactgaggaaggtagccaagccaaattgacccgggaaactgaccatcacagcatcccattgccatgaataaagacccctttccaaatgctttgctcatgtagcaatgtctgcagctctcccattgctgctccactctttcaacccca

SEQ ID NO: 468888 - DNA, 622 bp, Homo sapiens
ttcactcattgctttcttcactgggaacacataataatgtaccattgtggaagtgcttcacaaacctaatcgtcagactctcctgggaacttttaaaatgcaaattctttggtgcacctgatacctgtggtctggtgtaggtctaggaaaattcatacactaagagatcaaattactatatgtttcccttaaggattttggaagcactcatttactctaaaattgtggttcacgtataagttacaaagcacccttatcatatactgaagaaacaastgtcactaaagaataatacaatgtaaagattttagcctagtaaacatctacattttatcaattattcatttaacaaatatttctactctgaagcagtgttgtgataggtgctggaatatgacagaatatgggggagaaaaagaaataacagcaaacaaaaaaatgagcaagtaagtcaacagataaaataattacaaaccttaaaataacttaagaggaagaattcatctaattttgaatattctctaattcagaccggcagtacccagttatgctcaaattgtgactttctgtcctgctttcattacatttcttgttgtactctagttcagaatctgcaacttgg

SEQ ID NO: 468889 - DNA, 622 bp, Homo sapiens
agggtcctaaactgatatatagacatcatccacaaccaaaatccaaacaggtctctacccttcaggcacttattattggatttaccactgatgctatttacaactgaagcccttaacaagtgaggtgtgaccatagaaaaagacaccagtttctagaaactgcatgcawcctttctagaagcaagcaaccaaggagactgcattttctaactagagatcatatctagatatactaataataataatccatcaatatcactaccatctacagagctctatatggctgcaactatgcatgcattagcaacttgatccttgccactacctcatgaagtggatatttttattatcaccatttgatgaagaaactgaggctcagtgagggtaaataggccacagatctgtaagtgtaatagataatacatgtgaaagagcccatgcctggtgagctgctgtattggctgtaaggaggagagatgatttttgtccatgggtactggggcatttcctggaggagtaggcatttgaaatgggtgttggagcatgggttattggctctaaggaggagagatgatttgtgtccaggggtacaacaggcatttcccagaggagtgggcatttg

SEQ ID NO: 468890 - DNA, 624 bp, Homo sapiens
ttgtagtgaatcattgtgtctatgcaagaaggacttatgagcactcagtgggaattctgtacttcaaatagcctattccaagtcaagctcattatcctgccaccctgaactctactccaaatctcctcctcttccttcatcccctctaacatggccatcatcctcccagtgctatatttatagacttgggcgcctactgaractcttttgtcttccttattcatgagagctcattagtcatgaagttctgtgaatttttgtaatacacttcatggttcttgcaactattgctgtcctctttatacccagtgctactgcttcagatcagggcctcaagtactctcaccttattattgcatcacttcctaactggtcttgctgcttccaaccttatgtctctcgaagccagtctctccatagccattgtgatggctctaggtctaaacatttcacttccctgcaaacgaaatccttcagtggcaccttagttccctatgggaaatgtccaggctcttttatccggcctgaaaggcccaccatgacctccagcttcaccattcacctccctgcccagcccacataagccggccatgccaagccactgcatggacctgactgtttgca

SEQ ID NO: 468891 - DNA, 631 bp, Homo sapiens
acttcttggggtgaagccttatgtgtatgctcagaaactgtcctggcttataaggttagtgtgggccaggctccccgagcattctttttatagagattctgctaaaatcaaatttctgaatcctctggactgcagagtcagtctggcaccttagatgtccctgatacccagcctaagctttaggcactgtgacacatacttttaaaggtggagaatgagtcagaatcygataaggtataaatatttggttactcacctcctgaaggtgaattagctctcacaggttgccagaaatatctctcggttccctgaagctgaaacacacttgctgatgtgcattaatagccaaaatggtaggaaatggcagagtctgccattattcatccacttaccaggggaggaaagaagataaatttattgtatatgaatgaattaacacaggcattgtgcctgttgagcaggtgtgcagggaaggaaagtggatgaatatgtgtgtgtgtgtgtgtgtgtgtgtgtgtgtgtttctcatgttcctatccttaatcaagaaaatggaatcccttctggaagacctcatgaccacatttgaagctctaccatttttctgttttggagaatagtggtttgggtt

SEQ ID NO: 468892 - DNA, 631 bp, Homo sapiens
acttcttggggtgaagccttatgtgtatgctcagaaactgtcctggcttataaggttagtgtgggccaggctccccgagcattctttttatagagattctgctaaaatcaaatttctgaatcctctggactgcagagtcagtctggcaccttagatgtccctgatacccagcctaagctttaggcactgtgacacatacttttaaaggtggagaatgagtcagaatctgataaggtataaatatttggytactcacctcctgaaggtgaattagctctcacaggttgccagaaatatctctcggttccctgaagctgaaacacacttgctgatgtgcattaatagccaaaatggtaggaaatggcagagtctgccattattcatccacttaccaggggaggaaagaagataaatttattgtatatgaatgaattaacacaggcattgtgcctgttgagcaggtgtgcagggaaggaaagtggatgaatatgtgtgtgtgtgtgtgtgtgtgtgtgtgtgtgtttctcatgttcctatccttaatcaagaaaatggaatcccttctggaagacctcatgaccacatttgaagctctaccatttttctgttttggagaatagtggtttgggtt

SEQ ID NO: 468893 - DNA, 631 bp, Homo sapiens
acttcttggggtgaagccttatgtgtatgctcagaaactgtcctggcttataaggttagtgtgggccaggctccccgagcattctttttatagagattctgctaaaatcaaatttctgaatcctctggactgcagagtcagtctggcaccttagatgtccctgatacccagcctaagctttaggcactgtgacacatacttttaaaggtggagaatgagtcagaatctgataaggtataaatatttggttactcacctcctgaaggtgaattagctctcacaggttrccagaaatatctctcggttccctgaagctgaaacacacttgctgatgtgcattaatagccaaaatggtaggaaatggcagagtctgccattattcatccacttaccaggggaggaaagaagataaatttattgtatatgaatgaattaacacaggcattgtgcctgttgagcaggtgtgcagggaaggaaagtggatgaatatgtgtgtgtgtgtgtgtgtgtgtgtgtgtgtgtttctcatgttcctatccttaatcaagaaaatggaatcccttctggaagacctcatgaccacatttgaagctctaccatttttctgttttggagaatagtggtttgggtt

SEQ ID NO: 468894 - DNA, 631 bp, Homo sapiens
acttcttggggtgaagccttatgtgtatgctcagaaactgtcctggcttataaggttagtgtgggccaggctccccgagcattctttttatagagattctgctaaaatcaaatttctgaatcctctggactgcagagtcagtctggcaccttagatgtccctgatacccagcctaagctttaggcactgtgacacatacttttaaaggtggagaatgagtcagaatctgataaggtataaatatttggttactcacctcctgaaggtgaattagctctcacaggttgccagaaatatctctcggttccctgaagctgaaacacacttgctgatgtgcattaatagccaaaatggtaggaaatggcagagtctgccattattcatccacttaccaggggaggaaagaagataaatttattrtatatgaatgaattaacacaggcattgtgcctgttgagcaggtgtgcagggaaggaaagtggatgaatatgtgtgtgtgtgtgtgtgtgtgtgtgtgtgtgtttctcatgttcctatccttaatcaagaaaatggaatcccttctggaagacctcatgaccacatttgaagctctaccatttttctgttttggagaatagtggtttgggtt

SEQ ID NO: 468895 - DNA, 530 bp, Homo sapiens
ctgccgggaatgccgccccccgcccccccgcccctgccaccaattcccctgccagtggtgaggtggtgttgaaatatccaacaacagggccttcccccatctccaagttcctcttctgagccagcaaagaggactcatagtccttgctggggaccctgcatggggcagaaaggcctggagtcggggtgggttggtgggaccccagagggcacagagagagccagtcctgcttccactttttcttcccatgttgacaggatgccatgatgtggarggctcatcttccctctggtgcagggctggtcagaggaggtgtagggtctgcctgggtccagcttcccaaggcagcccacgatggggcagggaggagagcctcttgggggtttctaaatagtaatgaaaggaggagttagagggcctgcatctcatatggagggggcctccaggttctggctggctctccacactgctttcctggtgttctggaatattctaggcccatgcagtcctgggctgacccagcctgcttc

SEQ ID NO: 468896 - DNA, 466 bp, Homo sapiens
taaaacaactacatgagatatgtttcttgaaacccatttcatagatgaaaagagtgagactgagaagttaaataaccagcccatggtcccatagctagtagtggcagggcctcaatttaaacccaagtgagtctgaagtcaaaacttgtgtagtttttaaaactggtatagtgtcttttaaaaactaaaatttgaatgtcgttaggtggggcacacacccccaccaatccctgtggtcttgcctctttgcccctttacatgtttacatcctctgctggtccttgaagagatctgattttataatccctgcctacccaaccctgtctcctgagaaataaagtcacaagcagtactggtgtcaggggccacattcaacaagcatttatcaaagtcagcgrggactggggaggcagttgggcaagtgaataagaacaaggctttggatttaggtagtcacttcaaattc

SEQ ID NO: 468897 - DNA, 596 bp, Homo sapiens
ctccctgtcatcatgcagttttcagggggtcttccaggtggctcctgggcattctgggcattctgttgtgggctgctcttcaaggagagcccaggagcagggttgagaaggctgcggggggccctgggctagtacggagccatccactgtccagaccactgtccctgtgcycacatgtgctcagcaatgctgggacgggcggactcactctgctcctggaacttcaagtgcagcctcaaggtttggggtctctggtcgcagctccactttactcacaacattcgtgcacctggtgctcacagagacccagcagttgccaggcttccccgtcccatgaaacagtaccccccaccccataaaacagttccctgggttgctctcggagcccttctgctccagcccccatcagcttccttgggtagccgaggctggagaggaggttctgactctgaccaggcagctctcagtggggccctgggcagttggaacctgaacacctttccaaggactgcagggcgtgaggctggggcacgccgagctgggatctgggcctcccaggctggctcgtgtggcttgcctgggcagggaaggcagag

SEQ ID NO: 468898 - DNA, 596 bp, Homo sapiens
ctccctgtcatcatgcagttttcagggggtcttccaggtggctcctgggcattctgggcattctgttgtgggctgctcttcaaggagagcccaggagcagggttgagaaggctgcggggggccctgggctagtacggagccatccactgtccagaccactgtccctgtgcccacatgtgctcagcaatgctgggacgggcggactcactctgctcctggaacttcaagtgcagcctcaaggtttggggtctctggtcgcagctccactttactcacaacattcgtgcacctggtgctcacagagacccagcagttgccaggcttccccgtcccatgaaacagtaccccccacsccataaaacagttccctgggttgctctcggagcccttctgctccagcccccatcagcttccttgggtagccgaggctggagaggaggttctgactctgaccaggcagctctcagtggggccctgggcagttggaacctgaacacctttccaaggactgcagggcgtgaggctggggcacgccgagctgggatctgggcctcccaggctggctcgtgtggcttgcctgggcagggaaggcagag

SEQ ID NO: 468899 - DNA, 596 bp, Homo sapiens
ctccctgtcatcatgcagttttcagggggtcttccaggtggctcctgggcattctgggcattctgttgtgggctgctcttcaaggagagcccaggagcagggttgagaaggctgcggggggccctgggctagtacggagccatccactgtccagaccactgtccctgtgcccacatgtgctcagcaatgctgggacgggcggactcactctgctcctggaacttcaagtgcagcctcaaggtttggggtctctggtcgcagctccactttactcacaacattcgtgcacctggtgctcacagagacccagcagttgccaggcttccccgtcccatgaaacagtaccccccaccccataaaacagttccctgggttgctctcggagcccttctgctccagcccccatcagcttccttgggtagccgaggctgragaggaggttctgactctgaccaggcagctctcagtggggccctgggcagttggaacctgaacacctttccaaggactgcagggcgtgaggctggggcacgccgagctgggatctgggcctcccaggctggctcgtgtggcttgcctgggcagggaaggcagag

SEQ ID NO: 468900 - DNA, 534 bp, Homo sapiens
gtccctgccactgagctgctcccagcatcrcagcaggcagcatggcaggcacggggacagccagccaggacacatccagccctcaccacggagccttccagccccttccctccatgccttccttggtctcatggctgaccactgtcaccctgaaatggggtcagagctcagcacattacaggaggggagtgagcgctctctctattagagcttctggtacccctcaagggccccgttctgaaagccctggggtgccgcccgcctctgcagggggaaatggtgctcggacaccgtcctcgttaggaaagtcacagtcacacacgaggaaccctgcccttcctgatgccggcttggcctctctcagcttgcgtttgctttgttttgttttgatgaaaagttggggtaggaataccaccaccaaacaaatagcacatgtcctgtgtcctctggaaccctgtcacatttgggaactgtagttttccccttggagtagctggggagggctccctgctgccccatgcccctccattggag

SEQ ID NO: 468901 - DNA, 534 bp, Homo sapiens
gtccctgccactgagctgctcccagcatcacagcaggcagcatggcaggcacggggacagccagccaggacacatccagccctcaccacggagccttccagccccttccctccatgccttccttggtctcatggctgaccactgtcaccctgaaatggggtcagagctcagcacattacaggaggggagtgagcgctctctctattagagcttctggtacccctcaagggccccgttctgaaagccctggggtgccgcccgcctctgcagggggaaatggtgctcggacaccgtcctcgttaggaaagtcacagtcacacacgaggaaccctgcccttcctgatgccggcttggcctctctcagcttgcgtttgctttgttttgttttgawgaaaagttggggtaggaataccaccaccaaacaaatagcacatgtcctgtgtcctctggaaccctgtcacatttgggaactgtagttttccccttggagtagctggggagggctccctgctgccccatgcccctccattggag

SEQ ID NO: 468902 - DNA, 603 bp, Homo sapiens
tcctctagccacagcacctccggaggcgcagtaagggcactgccaaggagacatacccwcccctaccctgctagacagcacccctgccagaccacagctcacgtactccaactctgggacatttctgccacccccaaaggagaccccgtatcccttagctgccctcctcaaccctgcccctcctcagccatggcaaccactaagctgcttcctgtctctatggatttgcctgttcgggacacttcatctaaatgaaatcagccaacgtgtggccttttgtgcctgacttcttccctccagcatgatgccaagttccattcaccatgaacgtgcaccaggaagggcttcattcctttttatggctgacaaataattaatagtaagtggaatcaactttagtaatacactgtacttgatccagtatatttgaaatattatcatttcaatatgtaatcaatgtacaaatctattagagagacatttgacattcttttttctcgccaagtttcaaaacccagcatgtggtttgcactgatagcgtacttcagtttgaaccctaaattttcatcagacgcatttgatatgtgtttaggtttcacagaa

SEQ ID NO: 468903 - DNA, 603 bp, Homo sapiens
tcctctagccacagcacctccggaggcgcagtaagggcactgccaaggagacataccctcccctaccctgctagacagcacccctgccagaccacagctcacgtactccaactctgggacatttctgccacccccaaaggagaccccgtatcccttagctgccctcctcaaccctgcccmtcctcagccatggcaaccactaagctgcttcctgtctctatggatttgcctgttcgggacacttcatctaaatgaaatcagccaacgtgtggccttttgtgcctgacttcttccctccagcatgatgccaagttccattcaccatgaacgtgcaccaggaagggcttcattcctttttatggctgacaaataattaatagtaagtggaatcaactttagtaatacactgtacttgatccagtatatttgaaatattatcatttcaatatgtaatcaatgtacaaatctattagagagacatttgacattcttttttctcgccaagtttcaaaacccagcatgtggtttgcactgatagcgtacttcagtttgaaccctaaattttcatcagacgcatttgatatgtgtttaggtttcacagaa

SEQ ID NO: 468904 - DNA, 603 bp, Homo sapiens
tcctctagccacagcacctccggaggcgcagtaagggcactgccaaggagacataccctcccctaccctgctagacagcacccctgccagaccacagctcacgtactccaactctgggacatttctgccacccccaaaggagaccccgtatcccttagctgccctcctcaaccctgcccctcctcagccatggcaaccactaagctgcttcctgtctctatggatttgcctgttcsggacacttcatctaaatgaaatcagccaacgtgtggccttttgtgcctgacttcttccctccagcatgatgccaagttccattcaccatgaacgtgcaccaggaagggcttcattcctttttatggctgacaaataattaatagtaagtggaatcaactttagtaatacactgtacttgatccagtatatttgaaatattatcatttcaatatgtaatcaatgtacaaatctattagagagacatttgacattcttttttctcgccaagtttcaaaacccagcatgtggtttgcactgatagcgtacttcagtttgaaccctaaattttcatcagacgcatttgatatgtgtttaggtttcacagaa

SEQ ID NO: 468905 - DNA, 603 bp, Homo sapiens
tcctctagccacagcacctccggaggcgcagtaagggcactgccaaggagacataccctcccctaccctgctagacagcacccctgccagaccacagctcacgtactccaactctgggacatttctgccacccccaaaggagaccccgtatcccttagctgccctcctcaaccctgcccctcctcagccatggcaaccactaagctgcttcctgtctctatggatttgcctgttcgggacacttcatctaaatgaaatcagccaacgtgtggccttttgtgcctgacttcttccctccagcatgatgccaagttccattcaccatgaacgtgcaccaggaagggcttcattcctttttatggctgacaaataattaatagtaagtggaatcaactttagtaatacactgtacttgatccagtatatttgaaatattatcatttcaatatgtaatcaatgtacaaatctattagagagacatttgacattcttttttctcgccaagtttcaaaayccagcatgtggtttgcactgatagcgtacttcagtttgaaccctaaattttcatcagacgcatttgatatgtgtttaggtttcacagaa

SEQ ID NO: 468906 - DNA, 610 bp, Homo sapiens
agcttcccccacctgcagccctcactggcccacccagttgtcctgtctctgctcaggacgagacccccccccgcctcttcagtctctgtagccaggtgatggcagtggccttttccagaccctcactggccccttagttcactatgatgacttcacctcttgggaacccatggggatgtctttccctccaatacatctacatttgcctgacccagaatgtagtttcaagatgggtccatgcctggctccaaatccccttatcagagtaaggaaataccttaattcctagtttgctaaaaactcgttataaatggctgtcgcgtcatttactgtgttcctgttctgcaaccattgagatggtcacgtgggttttgctcctttaatctattgatatgaattacactcttgattctctggcattgaaactgctttgcaattctgaattaaatccagtgtggcactttgctaaacttggtttattattgtctaaaatcttgacattggtatttgtagggaccagccccacagggtccgtgggtctctccctccctgtgtgcagcaatgagagagtgtagaaatamacacacaagacaaagagataaaagaaaag

SEQ ID NO: 468907 - DNA, 610 bp, Homo sapiens
agcttcccccacctgcagccctcactggcccacccagttgtcctgtctctgctcaggacgagacccccccccgcctcttcagtctctgtagccaggtgatggcagtggccttttccagaccctcactggccccttagttcactatgatgacttcacctcttgggaacccatggggatgtctttccctccaatacatctacatttgcctgacccagaatgtagtttcaagatgggtccatgcctggctccaaatccccttatcagagtaaggaaataccttaattcctagtttgctaaaaactcgttataaatggctgtcgcgtcatttactgtgttcctgttctgcaaccattgagatggtcacgtgggttttgctcctttaatctattgatatgaattacactcttgattctctggcattgaaactgctttgcaattctgaattaaatccagtgtggcactttgctaaacttggtttattattgtctaaaatcttgacattggtatttgtagggaccagccccacagggtccgtgggtctctccctccctgtgtgcagcaatgagagagtgtagaaatacasacacaagacaaagagataaaagaaaag

SEQ ID NO: 468908 - DNA, 646 bp, Homo sapiens
atggtaaatcccagtaagtaattcttgtctgcatttctttctatattgcagtatcaaaaaaatgagacattaaaggaggaagagagaaaacgatcctatcaaaasggtcagttggaacaaaaaataacaataatgccaacagagaaatgagaggagtgaaaaaagcagaggaaagccagagaagaacagaaatgagaggacagaggtgaaaggaggagacaagacaagaaacccaggaaaagatgttgtcatctacctgctttaaaaagtgtgcagtgtttgaaccagggccaaggtcttaagtgggattcaagcaaagtaataaatccataatgaatctaaaagtatttataaagtacctcaatattagtaacagcttacagcagaaaaaaatatatgatcaggacctaaggatactttctatcataaaatgttaatcagagaaaaaatgaagtgtgaaaataaaggtgtgaactctagcagagagcatggtaagacatagagcttggctggtaccctctgggcccccagctctcaggctggtgggtgagctgagtgctctcaggcacagggccaggcttagaccctgatggcagcaatccccatcctgcctgtgacctctccaagccagacccactgggccaca

SEQ ID NO: 468909 - DNA, 646 bp, Homo sapiens
atggtaaatcccagtaagtaattcttgtctgcatttctttctatattgcagtatcaaaaaaatgagacattaaaggaggaagagagaaaacgatcctatcaaaacggtcagttggaacaaaaaataacaataatgccaacagagaaatgagaggagtgaaaaaagcagaggaaagccagagaagaacagaaatgagaggacagaggtgaaaggaggagacaagacaagaaacccaggaaaagatgttgtcatctacctgctttaaaaagtgtgcagtgtttgaaccagggccaaggtcttaagtgggattcaagcaaagtaataaatccataatgaatctaaaagtatttataaagtacctcaatattagtaacagcttacagcagaaaaaaatatatgatcaggacctaaggatactttctatcataaaatgttaatcagagaaaaaatgaagtgtgaaaataaaggtgtgaactctagcagagagcatggtaagacatagagcttggctggyaccctctgggcccccagctctcaggctggtgggtgagctgagtgctctcaggcacagggccaggcttagaccctgatggcagcaatccccatcctgcctgtgacctctccaagccagacccactgggccaca

SEQ ID NO: 468910 - DNA, 561 bp, Homo sapiens
aaatttctgatgaagaggttatttatggaagaatcacaactaataacttcagagaaaatactagaattcaaaaaccactatttgctattaattaatctagtgatggatacaggtaatgatgatcaagggctactaaaactattaggggaaaggttgattgggcttcttaaaataggtagaccaggatgacaccactgatcaatcctgatgccaaaggaaggcaaccagacatcttgtgcttctgatgggatccaataggatacaagggatatgataccatacaatattatctatgaagtgtgcttttaccaaattaaacctaaatctcatctagccttagctctcactacaagcatatgggaaaggggcagraggcagtcagaaacaagtgaaacaaaaaggatgtaattagttaaattcaaaatgtgtgacaccctataggataaatgatccagtttcttcaataaagagaaggcaaaagggggaatggagaaagaaagaagaaagggagggagggaagaagggaggaaggaaggaaagaaagaaagatggcaggcaggc

SEQ ID NO: 468911 - DNA, 516 bp, Homo sapiens
ggcggggagccttgagagtttacccaggcaaacacccaggcgggggcttctgagcccttcctgcgcacccattccctcttcaaacctcttccacacatgctgagtgctgcttattccagaggagaaaggggggccaatggcaagggtgaagccaagctgaggcccatccccgtgtcctggctacttcctgtgttctcagcaccaaggtaggagatctaggcccttcccttctggagctcacaggcttctaggccctcttccatccagcagactctcaccaagggtctgaacagtgcttgaggacacaatggtgactaaaagtcctgggccctgcaccrttagagctcaaggtccagtgcagaaaataggcccggtgccctgacgataagagcccagagtggtcagggcaggatgggggcgctgacctgtgggtgagggggcccttcctgaaggaaccgtccacccccaagtctcctctggggctttccagcttctccagtctgccatgcccagcca

SEQ ID NO: 468912 - DNA, 623 bp, Homo sapiens
gcaaaggccccagcatctccctcactgaaaccaggtgsccggctcctcggactctgctttatgttgcggtgagaactctgcccaggtgtgcagggtttggcttgtgggctgcttgctgctcatctgatttttgtcccagtagtccctgcgttcttcattcaaccccttctgggacttcagctcagagagcaccatcccgggggtcagggcctccccacaggagccctgcagtgtggtagcgccatggctgtctcaaaccaagcaaaggaaggaccctgaggccttcacgctaaccgtcctcgagcaactgctgttggaaggcctccctgggcctggcccccaccctctgccacccagtcctcccagctgccatgtttcaaagacgacctttacctcctgcctttggattgactctgcatttgaccacggactccagtctgtgtgtagggagagagctgagtaggaggcctccactccggatcgaggcctgtatagggctcgtttccccacacatgcctatttctgaagaggcttctgtcttatttgaaggccagcccacacccagctactttaacaccaggtttatggaaaatgtcaggccttccccacaactcctgtctaac

SEQ ID NO: 468913 - DNA, 623 bp, Homo sapiens
gcaaaggccccagcatctccctcactgaaaccaggtggccggctcctcggactctgctttatgttgcggtgagaactctgcccaggtgtgcagggtttggcttgtgggctgcttgctgctcatctgatttttgtcccagtagtccctgcgttcttcattcaaccccttctgggacttcagctcagagagcaccatcccgggggtcagggcctccccacaggagccctgcagtgtggtagcgccatggctgtctcaaaccaagcaaaggaaggaccctgaggccttcasgctaaccgtcctcgagcaactgctgttggaaggcctccctgggcctggcccccaccctctgccacccagtcctcccagctgccatgtttcaaagacgacctttacctcctgcctttggattgactctgcatttgaccacggactccagtctgtgtgtagggagagagctgagtaggaggcctccactccggatcgaggcctgtatagggctcgtttccccacacatgcctatttctgaagaggcttctgtcttatttgaaggccagcccacacccagctactttaacaccaggtttatggaaaatgtcaggccttccccacaactcctgtctaac

SEQ ID NO: 468914 - DNA, 623 bp, Homo sapiens
gcaaaggccccagcatctccctcactgaaaccaggtggccggctcctcggactctgctttatgttgcggtgagaactctgcccaggtgtgcagggtttggcttgtgggctgcttgctgctcatctgatttttgtcccagtagtccctgcgttcttcattcaaccccttctgggacttcagctcagagagcaccatcccgggggtcagggcctccccacaggagccctgcagtgtggtagcgccatggctgtctcaaaccaagcaaaggaaggaccctgaggccttcacgctaaccstcctcgagcaactgctgttggaaggcctccctgggcctggcccccaccctctgccacccagtcctcccagctgccatgtttcaaagacgacctttacctcctgcctttggattgactctgcatttgaccacggactccagtctgtgtgtagggagagagctgagtaggaggcctccactccggatcgaggcctgtatagggctcgtttccccacacatgcctatttctgaagaggcttctgtcttatttgaaggccagcccacacccagctactttaacaccaggtttatggaaaatgtcaggccttccccacaactcctgtctaac

SEQ ID NO: 468915 - DNA, 544 bp, Homo sapiens
tgccactgtacactccagcctggtgacaaagcaagaccctgtctctaaaaaaaaaaaaaaaaaggttcttatttttgtgacttggccagccttcaataatggagctcagtgatagcctagataacccaracaaaataaagcaaacatcactttgaggtgcacctctgaatttgcatctgggcattactgatttgcagtactacctttgcattttataggctgtaaactaattgaatttgagattcctttcttggagtctcaactaaaaggcaggagaactcatattttcatatttgggagcacaggggtttggggaaacagtaggttctttttaaatgaatatccttggcagccatgccccccacaaatcctttttctgcttctctaggaaaggtgctggaaagcagccagcacataggaattaaaaagacaaccggcacagaagagaaatgtgtgctaaaaatactaaaaccaacaaggattcatcatctgaaagcaaaataggttttctgtgtgcccctgcttctggacttgctcacagtcg

SEQ ID NO: 468916 - DNA, 416 bp, Homo sapiens
gtttatacataaagaatttttgcaaatgaggaattctgcttcctggcagaaccaaggagagtaggagccagtttattctagagtaaacctctataaactatggaaggacaactggagacatctccccactgtccagcatgtgatggtcatgaatacttgtgtgggacttcagtctgggctacagagcccttgccaagcctgtggcctggtggaagtgtaccgtctgccgtcttccgacctttgccacyatcactcatgactgagacgtcagagctactttgccgcaggaagttgcccaacatgttcaagttgctaatttgtgtttttgtcttagcatttcttcttttttagattgtactatctattagcctgtgtttcaacaagtaacacataaagtgaaaattgcctatgctttg

SEQ ID NO: 468917 - DNA, 649 bp, Homo sapiens
agttctaggaaaaattactttctcaagttgagaatcgctatctaattaagtggaaaggattcaataagtcttatgggttaatacatattgaaagagaaggcaaaatggtctttttactttaccacactgacatagggtgtaggaacacatgaacaaaatggagggaaatatgcagaaattaaatgtattrtattgggaggttaatgagagtagtgtaaactttttgtcttctgaaatgatcaattttattttaaaaaataaatccatatactaagtatcatatttttctattttccaaaagtaatattagtgtaagatcttacataagccatcacatataatattcaagttcataattatataaacacagaaaacaatgatttaaataatgtgattttaaagaccagacatgtgtcaggaagacagccaaatattccccagatccttccaccactctaccgaaaaatgcaactgacatcagccacaccagcccaccactttagcctgagcactgcctttcctcaaaggggatggctgtgttgctaactcttacggtgttctgaatgttgaacaatgtttatgtaaagccctttgcagagtggcagaaaaattactaaagaactttggacaatcataattatttcgcctt

SEQ ID NO: 468918 - DNA, 609 bp, Homo sapiens
atagcaacccagggaagaatagtatctggtatcaagcaaggagccaccaaccccacagaagttcaaggaaatgacaggccatttcctggtactggactttcaaagaaaggcttagagaaagagatggaacatgaacttgaaggaygaggaagttgactatgtccaggaaaggtggaaacaaaatttagtgagatgggggtggggaaaattaaagattgtcaactaagaggatatatgcgtaagctgtctgcataccctgactcatttcatcgtctcagcagcattacgaaacagaaactattaaatgtcatcccctcgggaaagaaagtttagtttactatcttgtcccaggacacaccgctggtgactggtccagaccttgcatctgtaggaaaaagtagcctaggatcacataaatgccatccacagttttcaaggataggcagttgtgggagtggagattagagcctggaattgttgaaatagaggcttcacatcaaacctgatgaggtcagagaacaaacagtggaaagggaatgaccaaaaactgtatgataactataaaaaattaatccacaatttaataagctgctcattttttaaatgcaa

SEQ ID NO: 468919 - DNA, 549 bp, Homo sapiens
aaattttacctctcacagtccaggagcacacagagatggtctgtcattttcattctcatctgtagctccagccccaattggatcagggccttacccttggacttataaactctgagaatgggtggtaatcatccctggaaaagtataatttcctgggaattaaaagaatgtgctagtttatcctgaagagaaaaaaactcagctcttgcaggaagaaagagaaatagtgggtgtgtttgaggggagagaattgtgaaataatttacsttcttttaacgacaagtatgagggcggccagagaacgtagttcttcatccaggtggagagaaaggtctgcgttaacactgcatcatacgtgtccttctctgtcatcctcaaaatgcaccctccctcttagagtgataacatcacagcagacagaacaacacagggaattagaggaagccccaccagtgacagagtttagcctcaccttggacaaagatctgagaagggttttggaggctttttgctggtaaagaagtaagtcatgaagacaagaaatttgac

SEQ ID NO: 468920 - DNA, 587 bp, Homo sapiens
agggcgtcaccctggaggcggcgatgggcgkgcacttgggcgtggccccgacccgggagttcatgggcctgggactcagacgcgaaaggatgctggggcgccatgggtgggggcgcggataaggaagaagcagaacggagggagggggctggatcagactggccaggctttccccgccctcactgggcgcccttgaccttactgccgacccctgaccctactgtgaccctaaccctaattctaaaccttttcctaactcggcccaacttgcctggattgattccatcctgagtgaaatagactccgatcccggaccccgtcgccccgaggaaccaagcccttctcgcaggcaacgctgaccctcgcgctcgctagaatggaaagactgcaagacggggctctcgggtggcctgtgtggcctcactcaactgtgcctcctggggccagatatgtgctcccacagggagtgacagaccctccgcagctactggtccctcaagcccgcaccgcctgcccctccacagtccaagacaaccacactgcttccaccaaccacttccctctccttacctctccccgctaaaggc

SEQ ID NO: 468921 - DNA, 463 bp, Homo sapiens
tggaatttgttgtcaggatttaactgtttttctaacagcaaggcatagtgatgctggaataatagctaacgattattgaacaagtatgtaccgggcactaaactgagacttttacatacattttaattgcttaattctgacatcagyggtatgaggtagataccattctaaatatgagaaaatggaaaattcacaggctaagaaacttgccaaaagttatttaactactaactctcgagccaggatttgaacactagcagtctgactctgtgcccttacgcatggctttattttggagaaatagaagtttgccagaaaataaaagtaataaagcatcccaggcagaaaagagaatgtgaaaaacaataaaatgcatttaaagcatctgttctcccatttcatgtacattattataccctcagcatctggcatgctgcttggcacaaagtaggtatttaataaa

SEQ ID NO: 468922 - DNA, 557 bp, Homo sapiens
tgtcggcagcaggagccccgcacggggcgcggagcagggacgcgctgccaccgcctccccctgcgtcctgctggccgcgtcttctcgggaggtggtagtcgctgttgccgctgagaaacccgcccgctttccacggctggtcgcctggtgaggagttgagactctgcgcctccgcccggacccacatggcttgttacctggtcatcagttcgagacatctcagcaatgggcactaccggggcattaaaggagtcttcaggggacccctgtgcaagaacggatctccctctccggtaatgtgcgcgcgcacacacrtacatacacaaacgttccaactcaacacaaacaaaaagatattgagagatagtatcctgatacaatgagtaggtggtggacatctaaaacgtataccttatccataggtatggagatacatcgtgtccgtttatacaatttattgacagactgtgacacagagaggggtgtgtatttacatgtgtattttcaattcagtcagtaggatctatagtgctacggatgtaaatacttactgaatg

SEQ ID NO: 468923 - DNA, 641 bp, Homo sapiens
gatgtttatatttgagtccccaaaacctacaaatccaatatcttacatgacaaaagggactttccggttatgattgaattaaagaggatgagatgattatcctggatcmcacagtggggtccaacttaatcacaagggtcataagagggaggcatgaatgtcagagagaaagctttgaggatgctatgcttctaggtctgaagttagaggaagaagtcacaagccagggaatgcaagtgacttcttgaatctggaaagggcaagtaaatggattctcccatagaggctcaagaaaaatcacagccttactaacatgttgatttgtgcccagtggagcttctgacctagaggactataagataataaattgatgttgcattaagccagtaagactgttaattcaacctcactcaaccttaacatggatgaatatttccaatggtgtgggagctctctgcttatcaaggtgatttcttctcctgtgagatgagtgaattaatgccagtctcctgtctctgcgcaaatgtcccttcctccttctttcttttactcactggacttcagtatgcctttttgaagcaagagtgtagggaaacaagaagagctctctgttcaacataatatccctttaaatattcaga

SEQ ID NO: 468924 - DNA, 641 bp, Homo sapiens
gatgtttatatttgagtccccaaaacctacaaatccaatatcttacatgacaaaagggactttccggttatgattgaattaaagaggatgagatgattatcctggatcacacagtggggtccaacttaatcacaagggtcataagagggaggcatgaatgtcagagagaaagctttgaggatgctatgcttctaggtctgaagttagaggaagaagtcacaagccagggaatgcaagtgacttcttgaatctggaaagggcaagtaaatggattctcccatagaggctcaagaaaaatcacagccttactaacatgttgatttgtgcccagtggagcttctgacctagaggactataagataataaattgatgttgcattaagccagtaagactgttaattcaacctcactcaaccttaacatggatgaatatttccaatggtgtgggagctctctgcttatcaaggtgatttcttctcctgtgagatgagtgaattaatgccagtctcctgtctctgcscaaatgtcccttcctccttctttcttttactcactggacttcagtatgcctttttgaagcaagagtgtagggaaacaagaagagctctctgttcaacataatatccctttaaatattcaga

SEQ ID NO: 468925 - DNA, 572 bp, Homo sapiens
cagctgctgtttctaaaacatggttaaaattcatacatcttacctggagtaattaaattagctatctgatacactgccaattaattccacctctaagtgttgattatatattagtttcattctgtttgcagtttttatgaaaaatgttaargtgactttgggagctcagccctcaggaactactgagtgggtaaattcaagaaagcacaagaaattttcccctgagctaagtgctcaagtaggaggggaggcccactttaaagagtaaagcaggaattagcagtatgtgtagcagaaacctggatatagaactaacatctggaagaagccaaagagttctagaattaaaaacaaaaatatttcaactggggagtccaagtcattcattcattctgtcagtcagtcaatcaatcatacattcaacaagtattttttaagagtatattgtctgtcagacacttgctggccatgtagcaaaactgaaagataaatcacattgtgggaagagcagatatgttttacataaaccaaataatactgggaagtaacactacttggataaatgactgtat

SEQ ID NO: 468926 - DNA, 605 bp, Homo sapiens
agctgctcacagagcccgggtgctggaggagcagtaaggttaagctgtgggctgcgggcagtgagggcagggtttcctagacggcagctctccctgatttttttttgttttttgttttttttgtttattttttgagatggagtctcactctgtcatccagtctggaatgcagtggcacgatcttggctcactgcaacctctgcttcccaggttcaagcacttcttctgcctcagcctcccaagtagctgggactacaggcgtgtgccaccacacccagctaatttttgtatttttagtagagacggggtttcaccattgttggccaggctggtctcgaactcctgacctcaggtgatgcgcccaacycaccctcccaaagtgctgggattacaggcatgagcccctgtgcctggtctctccctgcattttgaagaaggcagaggacacagcacagagaccaaaataaaggcctagaggcaggaataaacaaaccaggtcgggaggggaggtgacatggggctgcttggctgggatgggaagtccacatgcaggaggaaaggagacgtgtggggggccgggctgtgggaagggaaaccctctgtgg

SEQ ID NO: 468927 - DNA, 650 bp, Homo sapiens
ttgaaaaggaatgctttctgagttcaagagcagggtggcaggagagccttccagatgtttagagagcagcaggggcgtggcagttgcagctggacaggggaaatttcccaaggcagcaggaattcttgcaggcatggtaggaagcagccagccagccagggcctggaagctgaaggtatttgaaacctgccatggtgaccttgtcaaatgtggagaagtcacaagccagggctgggattrtctgtggcctcaccctccttctgtgtccccaaggatgctcaacccctcaacttgcaaaaacccccagctcaaggcccacgttgggggaaactactagaagaatccattgccctctgcttgggaggacatgccagacccaaatagaactctcatcaattaaaagcaataaacaaggggagaaatgtgaggcctgtgaaaaatgccaatgtcataaaatgggcagaggaaaaatgtggtttggaaaatgatttactgcaggaaatagagtaaattccaacagcatttgctttctacttttcataaatttctttttcagtgcagactccatgacacaaaaacatagacgagttgagaagaaaagagattaaagtgattgtagtttaaagccagaaagaaattaaaccatttaa

SEQ ID NO: 468928 - DNA, 327 bp, Homo sapiens
aagcaaattttcctgggtaagcattcttagattctccatcagcagcatttttctgacatgcattcacagacattctcactcattgtttccaatatccttcctcattgatctagtttaatgagaagtcttttctaactcttctccacaacagcaacgtcattgcaagttccaattattcctgatatttctcattacaataattattctttctttrtcattactaattactgttgctttaaaacatccctcagaatcaatgaggatggcagatgcctgaagactgtcactttacttccaaaacatcaagctaaatattcaggactatgg

SEQ ID NO: 468929 - DNA, 327 bp, Homo sapiens
aagcaaattttcctgggtaagcattcttagattctccatcagcagcatttttctgacatgcattcacagacattctcactcattgtttccaatatccttcctcattgatctagtttaatgagaagtcttttctaactcttctccacaacagcaacgtcattgcaagttccaattattcctgatatttctcattacaataattattctttctttatcattactaattmctgttgctttaaaacatccctcagaatcaatgaggatggcagatgcctgaagactgtcactttacttccaaaacatcaagctaaatattcaggactatgg

SEQ ID NO: 468930 - DNA, 626 bp, Homo sapiens
tgctaaaggctaagctgtgtagatgtcataccagaccccgagaccaaggctggggctagggtagggagagtgaggcattgagggtggaacatttaagaaggctgtcattctcagggctgtgcaagtgctccatgcccagtcctgacagtgaaggcctccttaattgttgatccccagatgtgtcactcaccgtatccttattggttctatcagtggggacttccttctggtaggaartcagagacagggtcaactatgaagtcaggttgatgtagggcaggcaagccccaaaactggagcttagcctgggaagattcttggctttactcaggaaagaattcaagagccagccagtggtagaagaagacagttgtatgaaggcagcagtgttacagctccgttgactgctcctgcagagcagggctcccccatcctagacagtgtgtggagagcagcagctcaggggcaggtctccagccatattaatacccatttttaattacatgcaaattaagagatgggttatttcaaaatttctagaaacagggtgccatggaaaggggcaataactttcaggtgttgccacggcaatgataaactgtcatggcactggtgggcgtatctta

SEQ ID NO: 468931 - DNA, 588 bp, Homo sapiens
ctgttgactttttttttttttttttttttttttggtccttctaaaattggactttccttctgaaaatatttcccatgccaggcygggcacggtggctcacatctgtaatcccagcactttgggaggccgaggcagacagatcacgaggtcaggagatcaagaccatcctcgccaacacagtgaaaccccgtctctattaaaaatacaaaaaattagccaggcgtggtggcgggcacctgtagtcccagctatttgggggactgaggcaggagaattccttgaaccctacaggcggaggttgcagtgagcggagatcatgccactgcactccagactgggcaacagagtgagactccatctcaaaaaaaaaaaaatttcccatgccagtttccaggctcaactcctatttgtgatgtgaccccaattgagacaccaagtcttgtctctttaaactgaagctctcagctcctgggaaaaatcacacagatcttcagcttccatattcgttagctcacacctttccttgccaactgacagcaaattgtatgcacctgaagggagcagagttggagaccgactccaaagggg

SEQ ID NO: 468932 - DNA, 506 bp, Homo sapiens
gaagtcaggagttcgagactagattggtcaacatggtgaaacccaatctctactaaaaatacaaaaattatctgggagtggtggtgggcacttgtaattccagctacttgggaggctgaggcaggagaactgcttgaacccaggaggtggaggttgcattgagccaagattgcaccattgcactccagcctgggcaataagagcaaaacttcgtcaaaaaaataaaaaaacataaaaaataaaaattgacaaataaattttcactcctgctctaaaacttgcctccatctctccttctgctttatgcccttcagttaaattctttcttctgaggaggcaagaactgaggttgctgcygacccatgcagattggccactgctaacaacattggtggccatcaggagaacagtttcagccaagctgtaggagcagaaactgggtcacaggggattaagattgtgaggacattgttgctacagtgtagacatttattcaataatttact

SEQ ID NO: 468933 - DNA, 514 bp, Homo sapiens
gaaaaaactaagatagtctctaaatggtagaaggtaaagagcattcccctggaggctgccagtttctctggaagagaatactccttttttcaaagtctgggaatcgaagcctggcttctaggcattatgttctccgggtaaagtaagtttgactgtttcgcatatagactttgattaatcgcctggtgtattagtctgttctcatgctgctatgaagatgtacttgagactgggtaatttataaaggaaagagatttaattgactcacagttccacatggcttggaaggcctcaggaaacatacaatcatggcagaaggggaagcaaacacatccttcttcacataatggcaggaaggaaaagtgccgagcaaagaggggaaagccccttatacaaccatcagctctcatgagatctcactcactatcatgggaacagcagcatgggggcaactgcccccatgattcaattacctcccactggrtccctcccatgacacctggggattatggga

SEQ ID NO: 468934 - DNA, 448 bp, Homo sapiens
tccaatcattctccctggtaatcatttactgcccctcaatagaattcttcttctccccgccctcacaacctgtttcactgggatccaagctcccattttttctgaaatctcaagrtggtatatatgcttccagaccttattgttgggttgggtctttattctgaaggtgcccacatatatatgtttaataaatttgtatgccttttctcctactaatcaatctgcctcatgtcggtgattttcagtgaaactccagggtccatagacgatggtccctagagggaatctgcaactgctcctcatcttagatcagttgcctaatctggtggtttttacagttgaattccccaagatccctagagggcaggcttatagaactgatagtagttgcctgctgagaatataggtgatgctcttgtgtagatgactacccaagaaggctccgcag

SEQ ID NO: 468935 - DNA, 485 bp, Homo sapiens
ggtccatataagaagttcctcaaaaaaatgtctgtaggccaggcatgatggttcacacctgtaatcccagcactttgggaggccaaaacgggcagatcgcctgaggttaggaattagagaccagcctggccaacatggtgaaatcctgactctactaaaagtgcaaaaattagccactctggtggtgcacttctgtagtcccagctacacgggaggctgaggcaggagaattgcttgaacccaggaggtggagattgcagtgagctgagatggcacctctgcactccagcctggatgacagagccagactccatcaaaaaaaaaaaaaaaaaaaagaaaaaaaaaagaaaagaaaagaaaaaagagctagatgatagaaaytatgagacttgccataacggagtcatgctctcacaccacaataatcatcaacacagaagacttctgtgacttctgtgggttttctccccctacacaccaagtag

SEQ ID NO: 468936 - DNA, 652 bp, Homo sapiens
aactccctccacgatgtaccgcaccctacttctgcccttctgtcttatgttaaaagcctctttgagatcatcatggcggatgggaggcaggactagattgcacctctggacacagcggtgtgtgggggcttgcactgtaaattttagctccagatcgactgcaagaaaaaaacagtaattccgagaggrcccatagaccctctaaaggaagcagattgttcctgcaggacctgggagaaccctcaaaaccatgagtgccccaattacggaagtgggaaagggaggccttcctctcccgaacacacactcccactggagaagctgaaggtctgttagccagagaagtttttgactttacctggagctgagtgactttggagagctgagcgaaatacagggttagagtaagcaacagaaaggctctgggagctcgctgggtccccaagcagtccattcctgcctggcgccacagggattcaatgggagaggagcagggagtgaaactacccagggagaagaaaatctctagctgagattttcaactttgtaacagtttgaaccaggcgagaagcctcctggccagaacgcaagggagggtgcaaatccagtgtgcagactccactggcagcaaaagaaccaagcccttttattt

SEQ ID NO: 468937 - DNA, 597 bp, Homo sapiens
cctctccatccaaaagctagtgcgttttcctgtattctgacactacttccttctcttaaatttcagtataattttttgtgtatgtacctgtctgtcccatgaractgtggctcctccagagtacaggttgatcttctgagcatattctctagttctgacatgaggcaagtactcagcaaagacttacagaaaagaccatttgtatacctaggaaaagaaagggaaggcttgattataaaaagaatataataaaataatgtattttgcagcaacatagatagatctggatatcttaagtgaaataagccagaaacagaaagagaaatattacacattatcacacataaatagatgttaaaatgtgtacatgtgatagagagtggaataacagacaacagagactcagaagggtgaagggatgggagggggtggaggataagaaattacttaatgggtaaaatgtatgttattccagagatggataccctaaaagccctggcttgaccactaggcaatctccatgtgacaccaaattgcacttgtaccccacacgtatatataaattttaaaaagcagacttcaaaattggttttataa

SEQ ID NO: 468938 - DNA, 597 bp, Homo sapiens
cctctccatccaaaagctagtgcgttttcctgtattctgacactacttccttctcttaaatttcagtataattttttgtgtatgtacctgtctgtcccatgagactgtggctcctccagagtacaggttgatcttctgagcatattctctagttctgacatgaggcaagtactcagcaaagacttacagaaaagaccatttgtatacctaggaaaagaaagggaaggcttgattataaaaagaatataataaaataatgtattttgcagcaacatagatagatctggatatcttaagtgaaataagccagaaacagaaagagaaatattacacattatcacacataaatagatgttaaaatgtgtacatgtgayagagagtggaataacagacaacagagactcagaagggtgaagggatgggagggggtggaggataagaaattacttaatgggtaaaatgtatgttattccagagatggataccctaaaagccctggcttgaccactaggcaatctccatgtgacaccaaattgcacttgtaccccacacgtatatataaattttaaaaagcagacttcaaaattggttttataa

SEQ ID NO: 468939 - DNA, 597 bp, Homo sapiens
cctctccatccaaaagctagtgcgttttcctgtattctgacactacttccttctcttaaatttcagtataattttttgtgtatgtacctgtctgtcccatgagactgtggctcctccagagtacaggttgatcttctgagcatattctctagttctgacatgaggcaagtactcagcaaagacttacagaaaagaccatttgtatacctaggaaaagaaagggaaggcttgattataaaaagaatataataaaataatgtattttgcagcaacatagatagatctggatatcttaagtgaaataagccagaaacagaaagagaaatattacacattatcacacataaatagatgttaaaatgtgtacatgtgatagagagtggaataacagacaacagagactcagaagggtgaagggatgggagggggtggaggataagaaattacttaatgggtaaaatgtatgttattccagagatggataccctaaaagccctggcttgaccactaggcaatctccatgtgacaccaaattgcacttgtaccccayacgtatatataaattttaaaaagcagacttcaaaattggttttataa

SEQ ID NO: 468940 - DNA, 597 bp, Homo sapiens
cctctccatccaaaagctagtgcgttttcctgtattctgacactacttccttctcttaaatttcagtataattttttgtgtatgtacctgtctgtcccatgagactgtggctcctccagagtacaggttgatcttctgagcatattctctagttctgacatgaggcaagtactcagcaaagacttacagaaaagaccatttgtatacctaggaaaagaaagggaaggcttgattataaaaagaatataataaaataatgtattttgcagcaacatagatagatctggatatcttaagtgaaataagccagaaacagaaagagaaatattacacattatcacacataaatagatgttaaaatgtgtacatgtgatagagagtggaataacagacaacagagactcagaagggtgaagggatgggagggggtggaggataagaaattacttaatgggtaaaatgtatgttattccagagatggataccctaaaagccctggcttgaccactaggcaatctccatgtgacaccaaattgcacttgtaccccacacrtatatataaattttaaaaagcagacttcaaaattggttttataa

SEQ ID NO: 468941 - DNA, 516 bp, Homo sapiens
ggccataatcctgaacgaattaacacagaaacagaaaaccaaatacctcatgctctcacaagtgggagctaaagattgagtacactggacgtaaagacgggaacaacagatactggggactactagaggaggggcgggagagatgggggcaagggctgaaaaactacctattgggtactatgtttactacmtgggtgatgggacaatttataccccaaacctcagtgtcatgccatgtacccatgtaacaaacctgcatgtgtaccccaaaatctaaaataaaagttaaaattttaaataaataaaattctaaactgaaggattattgataaggaaccatcaaatggtttcaggctgcaagtggtgaaaagaaattgatggcattagagagagaagccttgggaacctagagggtgtctctcgagagcctgtcaaagtctccccaaggcagtgccgggagaggctcagcatgagttccatgtgaatctggtcaactgggcaaagattgtgttcggc

SEQ ID NO: 468942 - DNA, 425 bp, Homo sapiens
gagtggtagatggttggatggatggatggatggatggatggatggatggatggatgaatggatcgatacatgggtgggtggatgggtgagtgaatacattggtgaaagtatggatggatggatggatggatggatggatggatggacgcatggatggatggacgcatggatggatggatggatggatgggtggatgaatggatagatgactacttaaatgacaaggtatgcacactgttccctttgtcttgctgcttgaacacatagagacatttattaattttctgtaagaagttcattgattatttaggattttctcagtcagtagaaagtaagtgcaaatgaaaagtaacccattggtgtacatgaagaacaaatactgtgccatctccmccttgcagatgaagagactgaggtccttagag

SEQ ID NO: 468943 - DNA, 608 bp, Homo sapiens
acagctgtgggggcgctacaactaggagatgtagagaaactcatccatctatccatccagccagtacttcccatcactcactatgcactgagcatgttggatgcatggaacaattgaacagacatgggttctgccttcttggagttcaaagactgcacctgaaattaaaggtgggatagctgatgctttattcatgggttaactcttcatagagagaaataagcaccttactgcgtcctttaccctgaaaacccaccttggagagtctcttggcacggccaacccaagttggtccagccctgagcaactggagaaagaagcagatttagcttcagaaggtaggtggagactgttggagcagcccaggcttggggcagtgggatagtctgaggcgttgttcctacttgaggtttccccagttgccttacgggtagtcacttatcacactcctggggataggtaacattctatggtgtgtgtgagcttgctgtgcttgtgtgggatgccwttgcaaagtccatctaagcccaggtcaaggaaggtgcaggggtcctcgatggaaacaattgtcagctcattatggaaactactctggggacaagggccaa

SEQ ID NO: 468944 - DNA, 651 bp, Homo sapiens
tgcctttcaccagatttcggggactctataagatctcttggactattgcgcagccttagagagaaaaaaaggctcccctcaaacataaggattcaaagctagactttatgctatttaaaacagaggcaatatggtatttctttcatctgagggatatggagcgaattctcggctctgtgatgaaaggcagcaggcagccttgagtaaatgagttaccccacctccaccccgaaaggacagctcagagtgagagcgtggaacctctgaaggtgcaggggtgggttcccaaccccactgcggcagccccggtgctccccgaccccagccccagtcccgtccgcctgtgtgctacctctgctgaaagggcaggtgctcagcacttagggcactttgcgtgaccaaggggaccaggcggcaggggaggacaagggtcacaaactcactaggtggcctggggcaggttccttcccttccccaggcctcagtttccccatctgcatggtgaatagggtgcgagggaagaggtagtctctgaggctgtgcccagcctgtggcccagtgaggccagggtggggggctgtagccagggagggagccctacctgctcaccggagcggcagcrcctgcctgagtgtggccaccaccagaccc

SEQ ID NO: 468945 - DNA, 512 bp, Homo sapiens
gttttctctcttatagtttgttgacacatgctaaaaatgtctttggagagaacttctgcctgataaacacccaattctagactgtgggtggattttcgagctgacggtggtcaattcctttcattaagcagtgatctgatttctccacatggccattctgccttcttgggggcagagtagatgggcagcagttcaccttttcagagaaagaggtcttctagccacctgggctgctactgaatggttttctccaggacgctctacctaatgattatttctataacattaagcatggtaataagtagcttccaattcaattcatcctaaagccaaagaaaatacagcamcacacacacacacacacacacacacacacacacacacacacacacaccactttatggcaattcttaactgacattcaatgacttacttcttttcttagaaaatttccaccacatttctatccccaagccaacatacaatgtgaaatgaaagccagtgcgtggagt

SEQ ID NO: 468946 - DNA, 446 bp, Homo sapiens
cgaactcctgggctcaagcgwtcctcccacctcagcctcccaagtaactgggactgcaggcatgcaccaccacacctggctaatttttgtattttttgtagagatgagggtctcaccatgttgcccaacctggtctcaaactcctggcctcaagcggtcctcccgcctcagccttccaaagtgctaggattacaggcgtgagccaccacgcccggccagaaagttctttttcataactcatggccaaaccagagagcctgagccccaactccagagaaactctcttcccctgctttcccaagggagcctgggaatctcccctctggtttggaccagaggatggacagaatgacctgttgctcgcctctccctttcggagcccctccaaggaggaaatgaaaggtggacggcagacagtcgggggaggcattgcctgtggtggaacc

SEQ ID NO: 468947 - DNA, 643 bp, Homo sapiens
cgatttcagcttctctttgtttttggaccatgggttttctggttcttctttggttcctgcaggtctgactttctcctttttctgttgatggtctttcttggcctgtgtttgcaatgggtcaaccatgtgctttctggccatacttcacacttacttcccaactgggacagatagcatttcttaagtctaattccaaacttctgggataatctgattgcccttcattgagtcagaagccagtggatagggacatggaagatgctatagctgggctccacccttgcaggtgagaggagcagtttcaggaaagtctgccaggcatgagctgagaccttaagagatgtcagctagaattagccactgtcagtatatctgcttctgggtcccactcttcatcctgcttttcaaggwtttcaaatatacactcctactcagtctcatgaaaattattatttttaaaataccctttagcacatttacctctaatgatactagattcttgcctcctgcctctgtaaatcactcggtcacttcccgatcttatatttggctgtcaagaatgtggaaatctcacagaacccttgaatttcaaagttggaagggaaaattgcttgtctatgcttataaaaaatacacacctaca

SEQ ID NO: 468948 - DNA, 643 bp, Homo sapiens
cgatttcagcttctctttgtttttggaccatgggttttctggttcttctttggttcctgcaggtctgactttctcctttttctgttgatggtctttcttggcctgtgtttgcaatgggtcaaccatgtgctttctggccatacttcacacttacttcccaactgggacagatagcatttcttaagtctaattccaaacttctgggataatctgattgcccttcattgagtcagaagccagtggatagggacatggaagatgctatagctgggctccacccttgcaggtgagaggagcagtttcaggaaagtctgccaggcatgagctgagaccttaagagatgtcagctagaattagccactgtcagtatatctgcttctgggtcccactcttcatcctgcttttcaaggttttcaaayatacactcctactcagtctcatgaaaattattatttttaaaataccctttagcacatttacctctaatgatactagattcttgcctcctgcctctgtaaatcactcggtcacttcccgatcttatatttggctgtcaagaatgtggaaatctcacagaacccttgaatttcaaagttggaagggaaaattgcttgtctatgcttataaaaaatacacacctaca

SEQ ID NO: 468949 - DNA, 530 bp, Homo sapiens
attttttttttttttttttttttttgagatggagtctcamtgtttgcccgggctggagtgcagtggcaggatctcggctcactgcaacctccgccttctgggttcaggtgattctcctgcctcagcctcccgagtagctgggatttcaggtgcgcaccaccatgcccagctaagttttgtatttttagtagagacggagttttgccatgttagccacgctagtctcgaactcctgacctcaggtgatccacccacctccgcctcccaaagcgctgggattacagacatgagccactgtacctaactgcgccacccctttataccctccagggagctggacttttcagagatcatctttcacttagaatctaccgtttaacccttaattgcatttcccctcatattattatactcactaatgattttgttggagaatcttttgcctctgctataagccacttgagggtagcatctatattcaagtagtccattgttcctctcatagtgcagcctcacctgatcaatggtga

SEQ ID NO: 468950 - DNA, 530 bp, Homo sapiens
attttttttttttttttttttttttgagatggagtctcactgtttgcccgggctggagtgcagtggcaggatctcggctcactgcaacctccgccttctgggttcaggtgattctcctgcctcagcctcccgagtagctgggatttcaggtgcgcaccaccatgcccagctaagttttgtatttttagtagagacggagttttgccatgttagccacgctagtctcgaactcctgacctcaggtgatccacccacctccgcctcccaaagcgctgggattacagacwtgagccactgtacctaactgcgccacccctttataccctccagggagctggacttttcagagatcatctttcacttagaatctaccgtttaacccttaattgcatttcccctcatattattatactcactaatgattttgttggagaatcttttgcctctgctataagccacttgagggtagcatctatattcaagtagtccattgttcctctcatagtgcagcctcacctgatcaatggtga

SEQ ID NO: 468951 - DNA, 530 bp, Homo sapiens
attttttttttttttttttttttttgagatggagtctcactgtttgcccgggctggagtgcagtggcaggatctcggctcactgcaacctccgccttctgggttcaggtgattctcctgcctcagcctcccgagtagctgggatttcaggtgcgcaccaccatgcccagctaagttttgtatttttagtagagacggagttttgccatgttagccacgctagtctcgaactcctgacctcaggtgatccacccacctccgcctcccaaagcgctgggattacagacatgagccactgtacctaactgcgccacccctttataccctccagggagctggacttttcagagatcatctttcrcttagaatctaccgtttaacccttaattgcatttcccctcatattattatactcactaatgattttgttggagaatcttttgcctctgctataagccacttgagggtagcatctatattcaagtagtccattgttcctctcatagtgcagcctcacctgatcaatggtga

SEQ ID NO: 468952 - DNA, 221 bp, Homo sapiens
gccacccctttataccctccagggagctggacttttcagagatcatctttcacttagaatctaccrtttaacccttaattgcatttcccctcatattattatactcactaatgattttgttggagaatcttttgcctctgctataagccacttgagggtagcatctatattcaagtagtccattgttcctctcatagtgcagcctcacctgatcaatggtg

SEQ ID NO: 468953 - DNA, 554 bp, Homo sapiens
gggtataaaatgcttttccttcttcagttaggtcacgtgtagagaattgatattagatagctatggtgaggagtgaatgggattctgcctggcctctctctagggacactttgccttctgcagtgtctggcatttctaagaaacgttgatttttaggcattgaggaaaaaagctgttttttttttttttttttgacattaaaagctctagttttcccttattttattccctggagcttctttcaacatattcaagcactgttggcttcaggcgtggctttgtgggctggaaagggccagggtatgttttcagaggaatcctgtgggattgaattaggaatgctgccttcaggggataagtattattttaataggaagatattctttattttttgattcttaggaattgctgtttctcatgtagatgtacttacctttgttacattaataagttccataaaatattttcagcgtatagaatttttatatatctagaccattgtctgtttcaggttaggaatkgtcagtgtttatacgtgcgcctaatcccttgta

SEQ ID NO: 468954 - DNA, 359 bp, Homo sapiens
atacaggaacgtcacacttccacagtcaaatgtgtcagtcttctaaatagatataggtaccttgtrtatactccttgatatatcacattgattggtggtgacctgtttgtctccctggctgtcagactgtgagaaacttgagggcaggggctgtactttattcttctctgtctctctagggactagtgcaaagctgggcacagagttttgtgcctgaatgagttttttttgtgtgtaaacgtggtataaaacaggtcttgtgactgaatgagggaatgaatgaaaaagccctgtcctgccctccctgcagagatggggtctgctgcagagatgggagtgagtcagggagtgaatcacaa

SEQ ID NO: 468955 - DNA, 532 bp, Homo sapiens
agatttggctcgctgaccgtaggcatctgactgtgaaacactatcctctcctttttgtacttattttatccgacccttcttagaggtatagagatgactcctagttggagacatctcagactaaaaactgactaccttatattataacttctacacagtgctctaagtggtccgatgattgagttatatcaaatgcagggtttcagttgcaacattaatgaaatagcctgagtaaacctttcgtgatgacaagagccagccaccaattatctcatccctggattgrcattattgtaagccacaaagtaccaagctttccttgtgcttaaactgttgaggaaaatgcttgactcttttttttttttttttttgagacagagtctccctctgtcacctaggctggagtgcagtggcacgaacatggctcactgaatccttgacctcctgggttcaggtgagcctttcacctcagcctcccaagtaggtggaactacaggtgcaagccaccatacaggctaatttaaaaaattat

SEQ ID NO: 468956 - DNA, 572 bp, Homo sapiens
gtgatgttccccttcctgtgtccctgtgatctcactgttcaattcccacctatgagtgagaatatgcggtgtttggttttttgttcttgcagccataaaaaatgatgagttcatgtcctttgtagggacatggatgaaactggaaatcatcattctcagtaaactatcgcaagaacaaaaaacaaaaatacttttaaatgagtgttttctttcacttaactttatatctgtgaagttcatgcatgtcattgtgtggagtgtttgtgcactttcactgttctatggtattccattgtgtgaataaatgacaattaaaaaaactcattctcccgttgaaggatacttgcattgtttccaatgtttggcttttataaacaatgctgtctgcagaactgtttggataagagattttgtgattgatggggaagcgagcagatttgcagtgatggagcgatggggaaaaggtggtcctgtgcagaatccacctcacctggggcacccccagaactggtcaccttgtkggcactaggggatggtacctcaaaaccagcataggcatcctcaaaagagac

SEQ ID NO: 468957 - DNA, 572 bp, Homo sapiens
gtgatgttccccttcctgtgtccctgtgatctcactgttcaattcccacctatgagtgagaatatgcggtgtttggttttttgttcttgcagccataaaaaatgatgagttcatgtcctttgtagggacatggatgaaactggaaatcatcattctcagtaaactatcgcaagaacaaaaaacaaaaatacttttaaatgagtgttttctttcacttaactttatatctgtgaagttcatgcatgtcattgtgtggagtgtttgtgcactttcactgttctatggtattccattgtgtgaataaatgacaattaaaaaaactcattctcccgttgaaggatacttgcattgtttccaatgtttggcttttataaacaatgctgtctgcagaactgtttggataagagattttgtgattgatggggaagcgagcagatttgcagtgatggagcgatggggaaaaggtggtcctgtgcagaatccacctcacctggggcacccccagaactggtcaccttgtgggcactrggggatggtacctcaaaaccagcataggcatcctcaaaagagac

SEQ ID NO: 468958 - DNA, 601 bp, Homo sapiens
ctacgctagtaactgagtgaccttgggcacacacttgactcctctgtgcctcagtttcttcatctttaaaaggggaaagtgatatcacctacctatatgattaccatgaggattaaatgagttgatacattgaaaaatgttagtagaatgctcagcayatatgaagtcctcaataaatgttagcactgaaagaaataatgataattttattattatatgacttcagactaaataagagagttgacaagtatgtaaatggttgccactccacatctctcgccaaccaatttactgcatccttgtgaagaaggttagaggagagatgtgtggacactgattcacactgatctaagagaataaatatagttccagtagctattatgtgtgaggcactgtgtttggcccagggaaggataaattggtaagcaaaataggactatctctgccttcacagaggtcctaagctacccagggagatgaatgtgatggactgagtatttgtgtttcccccaaattcatgtgttgaagccctaaggcctgtgtgatggtatttggaggtgaggtccttgagagataatcaggtttaggggaggtcgtggtc

SEQ ID NO: 468959 - DNA, 601 bp, Homo sapiens
ctacgctagtaactgagtgaccttgggcacacacttgactcctctgtgcctcagtttcttcatctttaaaaggggaaagtgatatcacctacctatatgattaccatgaggattaaatgagttgatacattgaaaaatgttagtagaatgctcagcacatatgaagtcctcaataaatgttagcactgaaagaaataatgataattttattattatatgacttcagactaaatargagagttgacaagtatgtaaatggttgccactccacatctctcgccaaccaatttactgcatccttgtgaagaaggttagaggagagatgtgtggacactgattcacactgatctaagagaataaatatagttccagtagctattatgtgtgaggcactgtgtttggcccagggaaggataaattggtaagcaaaataggactatctctgccttcacagaggtcctaagctacccagggagatgaatgtgatggactgagtatttgtgtttcccccaaattcatgtgttgaagccctaaggcctgtgtgatggtatttggaggtgaggtccttgagagataatcaggtttaggggaggtcgtggtc

SEQ ID NO: 468960 - DNA, 536 bp, Homo sapiens
ctgcttgggaggctgagacaggacaactgcttgaacccaggaggcagaggttgcagagagccgagatcacaccactgtactccagcctgggcaacagagccatactctgtctcaaacaaaacaaaacaaaacaaaaacaaacaaacaaacccaccagatctcccatgaagtgactgagcgagaacccactcatcaccaaggggatagtgctaagctgttcaggagggtctgcccccatgaatcacctccccgcaggtctcacctccaacgttgagaatcacagttcaacatgggatttggaggggacaaasagccaaaccatatcaccccattcaaagggcccagaagaccaggctccaagggcaagtcatttgctgtcgctgcgcctcagttttctcttttataaagtggaggttaggaatcagcctcttggcttgctccaggaatgaaaacagagggtggagcaagcccttattagatgtcagttgtcttagtgtttttgtttgttttttgtttttgttgtttggtttttagac

SEQ ID NO: 468961 - DNA, 565 bp, Homo sapiens
ctcttatgctgcatgcctgtgtctgagaactcatttcatccgttggccagggtctatgagacagatctggcaccaccccacagtatagtgctgttatgagctccctgaggcacagagaagttaaataacttgctcaagggctgaaggtcacacagcaggtggtaaaagtggcctttgaccccaagcaatctgactccagggccattcaatagtctaagaaattgcaggcctggcatggtggctcatgcttgtaatcccagcactttgggacgctgaggcgggcagatcacctgaggtgaggagttcaagaccagcctggccaacatggtgaaactctgtcgctactaaaaatacaaaaattagctgggcgtggtggctggcacctgtagtcccagctacttggaaggctgaggtacatgaatcgcttgaacccaggaggcaggggttgcagtgagccaaggtcgcgccattgcactccagcctgggtgacagagcgaaagcctgtctccaaaaaaaaaaaaaaaaaaaaaagaatrgaaaggaaattggtaggtgaggctgtccc

SEQ ID NO: 468962 - DNA, 595 bp, Homo sapiens
gatctatccatctatcttaaaattcatagaaaaaaccatcatatatttattcatttattcaatctgaaactataggaagtaatttcaaattgctacactcctgtcactaaaaaaaaaaaacctactaagaagagttcaaaattcagttgcatttctttcttcagattaagggtacataattaaagtactatattcaaaagttacttgattggtcagtcccacctcaccttcagggtgattacattcatcatttgaattagattagtttgtgtttgtactgttcttgtggatttgatttttgaatatataaaacatttacatagttctaaaagttaaaactacataaaagactgtttttccccacagagaagtgttcttccctctccaycctttgccatctacttcctgtgggttatcaatttcaataatttctgatttatctttcctgtttttctttttgcaaaataagcagacattagagtctcatattttcccttctttcttacataaaaaatagcacactgtatgtacgctttccattcatgttagaaatcactctacacccgtttgcaaagattttcctcattcttcttta

SEQ ID NO: 468963 - DNA, 595 bp, Homo sapiens
gatctatccatctatcttaaaattcatagaaaaaaccatcatatatttattcatttattcaatctgaaactataggaagtaatttcaaattgctacactcctgtcactaaaaaaaaaaaacctactaagaagagttcaaaattcagttgcatttctttcttcagattaagggtacataattaaagtactatattcaaaagttacttgattggtcagtcccacctcaccttcagggtgattacattcatcatttgaattagattagtttgtgtttgtactgttcttgtggatttgatttttgaatatataaaacatttacatagttctaaaagttaaaactacataaaagactgtttttccccacagagaagtgttcttccctctccatcctttgccatctacttcctgtgggttatcaatttcaataatttctgatttatctttcctgtttttctttttgcaaaataagcagacatyagagtctcatattttcccttctttcttacataaaaaatagcacactgtatgtacgctttccattcatgttagaaatcactctacacccgtttgcaaagattttcctcattcttcttta

SEQ ID NO: 468964 - DNA, 357 bp, Homo sapiens
cttccattcactcctggagctgacctgcctccctctttgtccttttctggctgtgcttaagagcctagcttccctggcagcctaaggtcagggtctgtgactgggatgcgtgcggagaaggggaggaaggccggtgacaggcggctaaggcagcagcaacgggggagatatgagagcggacagaggacccagggagaggccgggccctsagctcactgccccgcggccccaggggccacctgtgccctgacaccacctgaccctcagcaaacttccgcccagtggcttcctgccagaaatctagccagccgtgcacccgcctcccttacaaacaatccttgcccaaaggttagcaat

SEQ ID NO: 468965 - DNA, 599 bp, Homo sapiens
tagtttacccagcgcagccctgggagggaagagggagggctaggccgcctccctgcaggggcaagccgtgctgtggatgagccttccccaggtctcacctgccccacagctcaccgagcagggcccacgcacagcggcccacacccaggcctgccgtggcttaggctggaagtaggtgaaggtgatgtctgggcgggtgaggttgccatactcctcgccataccgcctgtaaacctgcagacaaagagcttcaggccttgtccagtgggttccctgagggtcactgtcatggccacctcccctgggaagccttccaacttcttcttgcatccctataatctttcgytcagcaagcaatcactggccaggcacggtagctcatgcctgtaaacccaaaactttgggagcctgaggcaggcagatcacttgagcccaggagtttcagagcagcctgggcaacatagcactccagcctggccaacagtgagaccctctctaaaaaaacaacaaagacaaaaataacgggaagcaatcaccaacactgacctgtaccaggctctggggatagcacagtgcacaggacactggctgagctgcaa

SEQ ID NO: 468966 - DNA, 615 bp, Homo sapiens
tttcttgagcaggagagaagagggtagctgccacagaatgcacaacgtccatactttttttttttttttttttgagacagtgtctcactctgttgcccgggctggagtgcagagggatctcggctcactgcaacctctgcctcctgggttcaagcaattctcctgcctcagcctcctgagtagctaggactacaggcgcccgccatcatgcccagctaatttttgtatttttagtagagatggggtttcaccatactggccaggctgtaggtgatctcccgactacaggtgatccacccgcctcagcctcccaaagtgcygggagtacaggcgtgagcacagcgcccggccaatgtctgtgttttttttgcagcacggctacagtgagtgaccattactgaggcaccacagtcccagcagcatcaaggccaaaacctgagcctgccacagaagggtggcgaagtggaagagggagacgctgacaccacaggaggcatccagggctgagtgagtgtgcaggccctgtgacctgagcagcccctgcaccaacgctctgggctgtggccatcttggaggctgggggaagcccagcctctgccccgagggaggccgcct

SEQ ID NO: 468967 - DNA, 526 bp, Homo sapiens
tcatgagcgtaaaggacattagcagtacttcgcacatggtatgcacaaatattaggcaagtccaaggacaggatgagctgcaagcagtctatgataagagtcaaaggcaggagttggggttgtagactcctccagccaaccacagcaaccaggaatttggatgcttcggccgccagagtgcttgcaagagttcatctctgaaatcgcttccattccagcgctaacattttatgaaacctgtgcttttcaaacagattgttttattgcttcctgcatcaccaatgtgttttctttctgctcccagctccctgagagcattttgaattatagcacagawcattgccatccacaaggtgcatgacatcacagtggacttgggggaagcaatgtcaaatgagactgagtggaatgggaaggagataggctggaaaatttaaataaaggtctttaggataaaatacagaatccagaatagttcctaactctcactacgtagtcgtttgtagcaaactgctaggactcttgg

SEQ ID NO: 468968 - DNA, 552 bp, Homo sapiens
acttcaacatccaagtttccttgcgcaaatgtataagactttctttaaacgataaacctagaaatgaaattgcatggccattggttatgcctatttttaacttcactatatatttccaaattgcctaccgaagctgttgttcaaatgtacagttccaccaactgtggataagattttcagtttctcagtatcctgaccaccactttataatgtttgacttttttaatgttttgcaattaaaggagtataaaacgccatttggttgatgttgtactttgcatttttatgattgctgaggagatgggcagcttcttacatctttcttagctgttcataacccagagaatcttaaaggaactgctcatgtataacgatgttttccaatgtatagctacgagtttgatctatggaagagaaaagtccattcatcgggtacagtaygcacagtttgcaacaaagagcctgtggaccttcactagggtcttctgagccagaaatcagggatcaagttccgtggaaagagagccaggtgtaagccaggtggagagataa

SEQ ID NO: 468969 - DNA, 422 bp, Homo sapiens
aaatccttccaagtctggcataaatggtgcccaccatgagaatcttcctggtcttcaaagaagttgtggtttgaatgcatcctccatccctgcatcaatcagcttaggtgtatcaccctgtcagagctccttaagagccaagggcacatagtagatactgaataaaaatgttgacttatacatcacaaatatctctactatctaacattctgttggttggattttttttacttaaaaataaatgataaattcacaggaagttgcaaaartcatataggaagtccctgtgtaccttttacctaccttttacccatttccccccaatggttatgttgctgaaataccaagggtttggtccaggtcctgctgctcactgcacagaaagccaatcactgagacaatgagtattgccagggaagaag

SEQ ID NO: 468970 - DNA, 576 bp, Homo sapiens
catggccaagcacaagattaaaaaaaaaaatctgtcarctataaaaggactgccagcaaggagggtagactctttctttatttggaacggctgagatctcgatttatgattggcagatggcccgcttcttaaggacatgtgagggacacagtttctaataggagtaacatgtccttatgggggaaaactggttgcagtttgcagtccaccaccagctggtgagggcggcctttcatttctccacgcctggatcacccgacagctgagagctttaataaaacaagtgtgcctaggaatgtggggtgagcgagccacccagaacacagatgtctatttacacccctaccaataatcccggtgctaaaaacaacagcagctgggaggttctgaggctgcctgctggatctgagcggcgatccggttaccctcagcaatgctgagacattctggaggcgctcatgccccaactgctgtccatccggagccaggggatggcacagattatttttatctcagatgtttcatgctttccatggcagtgaggagcaagaactcccaactcctgggctttgatga

SEQ ID NO: 468971 - DNA, 624 bp, Homo sapiens
gagcaagtgcctgtggcacctgtgccctgggcgtctgccttctcaagtggtctgtcacattagtgtggtgagtgtgtgtcagagatggctcagaccatgcccaggcctcagtatgacatcctgaaaagcctgtttatacyaacagacttgtttctttctctctcttttgatcactctgtacagcggagaatccggggcaggaaagactgtgaacaccaaacgggtcatccagtactttgcaacaattgcagctactggggacctggccaagaagaaggactccaaaatgaaggtatagatgggagaggaaggcttgctttgcttccacttttaactgtggtcttaacctcagaatgagggggccaaatgtcctcacattcccccctcttcagagaatggagaacaggctaggatttactatcttgaaggacagccagtcaccttagacaacgcagtgtcaagttggtcttgtaggactagatcccgggatttcttagaagacaaggctctagggctaaacttcagaggtcaatctgcagacggctcagagagcttgttcttttgtggaagaatcacatataccaatgtgagtgactcacagcatatcctgggcttttgaaacaa

SEQ ID NO: 468972 - DNA, 624 bp, Homo sapiens
gagcaagtgcctgtggcacctgtgccctgggcgtctgccttctcaagtggtctgtcacattagtgtggtgagtgtgtgtcagagatggctcagaccatgcccaggcctcagtatgacatcctgaaaagcctgtttatactaacagacttgtttctttctctctcttttgatcactctgtacagcggagaatccggggcaggaaagactgtgaacaccaaacgggtcatccagtactttgcaacaattgcagctactggggacctggccaagaagaaggactccaaaatgaaggtatagatgggagaggaaggcttgctttgcttccacttttaactgtggtcttaacctcagaatgagggggccaaatgtcctcacattcccccctcttcagagaatggagaacaggctaggatttactatcttgaaggacagccagtcaccttagacaacgcagtgtcaagttggtcttgtaggactagatcccgggatttcttagaagacaaggctctagggctaaacttcagaggtcaatctgcagacggctcagagagcttgttcttttrtggaagaatcacatataccaatgtgagtgactcacagcatatcctgggcttttgaaacaa

SEQ ID NO: 468973 - DNA, 662 bp, Homo sapiens
ctaactgtggaaatgaatcacacaaacgtattccactaggaacatcattcagcaattctgaatggaaaaggaaaacctcattcacagtcctagacaaagagccctaaaatccaaatcctcctctgcatagcacaataccaacatctttttccatgagggctactcccttaacagacaaatgcattgttttttcctacctctggttgattggatgaacacagcccaaatttggagagccatttaaggtgattaaaaatcattacagtgctggccaggcttagtggctcacgcctgtaatcccagcactttgggaggccaagactggtggatcacttgaggccaggagtttgagaccagcctggccaatatggcgagaccctgtttctactaaaaaagaaaaaaaaaatagccaggcatggtggcactcacctataatcccagccactagagtggctgaggctggagaatagcttgaactcaggaagcagaggttgcagtgagctgagatcacgccactgcacaacagcctggatgacagagcaagactgtctaaaaaaaaaaaaaatcattaaagtgcttcagtttgcttccaaatgtaatggcaaattcctgactcatcttgaaggtgcaayatgagagacttttggaggtagattgtggtt

SEQ ID NO: 468974 - DNA, 627 bp, Homo sapiens
actgttctagggtatttccttccctgattcctgcctctccctcagagatcttagcttgcaaaggtgaactggaccctgggtgaaccagccccattcccactggtgaactctgcacgcaccatcccggataatgatctcaaggggtcggccctattcacacccctattttacaggtgagaaaactgaggctctgaggcatacagccaggagaaggaagccaggaattgagctcagtctctcaaccagcacatcaggtggcttcctccacccggctactagaatgtttagttcccagggctgcaaatttcccatatgacaagagcggccctttctaaagrtgcattaggccaggcatggtggctcacgcctataatcccagcacactaggaggctaaggtgggagagtcacttgagcctgggaggttgaggctgcagtgagctgtgatcccaccactgcactccagcctgggcgacagagcaagactctgtctcaaaaaataaataaattataataaaagtgcatttaagaaaatcacaattttaaaaaaatcacaggattcattttttaaaagtcaatgttcagcttgatgtggtggttataatacatgtctagctcctaaaatattc

SEQ ID NO: 468975 - DNA, 508 bp, Homo sapiens
ggaaggcaggaattggaatttgtgtctgttttgttccctgttgactcccagggcttagaacaaggcttggcacacagtaggagctcagtaaatatttgagtagtgaatgaatgaaatctaaacaagcaaatggttttcctttatgaagactttatttcatcctcactcttctgattttcagaagcagcagcacggatgagacgggtctggcagrcttggcgggggacaggtgggaggaaagatgttcctcgccctctccagattccgcgcccttggttcgccagcgggaagccgtggctgcgcggagccgaggtagcaccgccccctgctgggcagtttggagaaatgcagcgcggacgctcagcgattgggccagatacatttcaaacaagtacacctgggaatttggaaaggaacaggatggaaaggtcatcgggggtgaggcagccagatggatctgcgggaggccttttcagaaaggaagaggagccgagaaaaaaaatgcagc

SEQ ID NO: 468976 - DNA, 508 bp, Homo sapiens
ggaaggcaggaattggaatttgtgtctgttttgttccctgttgactcccagggcttagaacaaggcttggcacacagtaggagctcagtaaatatttgagtagtgaatgaatgaaatctaaacaagcaaatggttttcctttatgaagactttatttcatcctcactcttctgattttcagaagcagcagcacggatgagacgggtctggcaggcytggcgggggacaggtgggaggaaagatgttcctcgccctctccagattccgcgcccttggttcgccagcgggaagccgtggctgcgcggagccgaggtagcaccgccccctgctgggcagtttggagaaatgcagcgcggacgctcagcgattgggccagatacatttcaaacaagtacacctgggaatttggaaaggaacaggatggaaaggtcatcgggggtgaggcagccagatggatctgcgggaggccttttcagaaaggaagaggagccgagaaaaaaaatgcagc

SEQ ID NO: 468977 - DNA, 541 bp, Homo sapiens
taggcaataaaggcaaaaaataaatgctgcatcctacagcataaacaaagttatttaattcagagtcattatcttctttctaatctgactgtgatattaaaactcrtcttagtatttttatggagaatttttttgacagtcgctaaaggttgctaaataggccttttccttttcgagtctcccataatctcactctagctttttctgaaatgtgtattataatgaaaggaacagtaacaatcatctcttttgttccaatgactcccctgttatacctctctcccacttgccccaaatccagcctggttttataccagggatgcaacttggcaggcatgttcaagccccatactgaacagatgtcctgcactcatcttcactcctccatagcatgtggtccgtctctgagcaatactctttttgcattttcctcttactgccacctcctccttttcaaccttttttttctcatttttcttcttccacctgtcccttaaaggtgtttcccaggctttattcctttcttgcttcttttacttta

SEQ ID NO: 468978 - DNA, 568 bp, Homo sapiens
caattaacaggataaatatttaacagatggattgttttatttaagagggagtctgaatgacaatttgacttatatatgagtatgtttttagataggtygagatgcttttttcctgttagtggggaaaaaataccttctatgcataatcgtcaatgttactttgtaaactctttgttcattgattattcactgctaattttttttttagggagatatacctaatgctaaatgacgagttaatgggtgcagcacaccaacatggcacatgtatacatatgtaacaaacctgcacgttgtgcacatgtaccctaaaacttaaagtataataaaaataaaaaaaataaaaataaaaataaaaataaatttttttaaagtcattcttaagccatttccccccaaaaaagcataaaggttgttatgtgactactgtgtttataaataggtgagaacaacagctccagaaaaatacagagtcaagccaagcaatagcagctgtgacccgggtgcatcagtggatatagttgtgtctccccatgggggtgagttgtcacttagtagccacagcagg

SEQ ID NO: 468979 - DNA, 479 bp, Homo sapiens
cataggacccaggttgaacaccagaggtggaggccagaggcggggcacgctcttgctaggggtgaggcaggcaggctggccaggtggagagcaactctggggctctcaccccacgtgaatgctgctgctgggccctggcgtttgcttacaatgaggctctgatgtctcagtttcagctacttaggtcatttgggratttttatcttgcctcagttctcttcatgtttaaaagcaggaactacttgcctcttatctcctaggaccatagactttatcagacatgatgtcaccattcacgcaggcattgccgcaccactgcctgggaaaagacactgcatataaatcttcccacagtgcctttagggggcgacttttcttatagaaaatacatgcagagttaaccatttctagagtgctctggcgtacttgtatacattcatgtgatgtatgtgagaagcactcccaccacgtggttaaaa

SEQ ID NO: 468980 - DNA, 471 bp, Homo sapiens
atgtattttgtatgcatatgattgtccrtgataattggctacttttccattgtttcctccttaaatcgtttagcatggcatgagggccacattccatggacgggaagaccccttcctcttcagaggtcccgtggactacacagctcctgagcttgatctttttctgccatgaagtttaaagattctatgcccatttccttgattgaaatggcaggattctaaagagagcctggtttgttaaaagaaaacactgtcatgctgtcagttcccaattgacaagtcacagactgggagaaaatatttgcaaatcgtgtatctgacaaaaggtttgtgtccaggatgtacaaagaactctcaaaccggatagtaagaaaacaaacagcccaagtgaaaagcaggcaaaagacttgaatagacacttcaccaaagagcatacacgcgtggcaaacaagcacacgaaaagacgttcag

SEQ ID NO: 468981 - DNA, 493 bp, Homo sapiens
gtatttttagtagagacggggtttcaccatggtctcgatctcctgacctcgtgatccacccgcctcggcctcccaaagtgctgggattacaggcatgagccaccacgcccggcccgtgatttttttaaactctgaaaatattatcttacagactgttkgaaagattcactcgatacctgtaaaatccagtattttcttttattcattcatttaccgaatttgcattgagtgcccattgtgtgccaggtaccatgccagaagctggaaaactgagatgatgacatgttgccttatcttaggtagcttaagtccagagatatagacacaaaaacagaaaagccacagtgaagtataatagaacagtgtttggtattctctttaagcagacaaagaatagctatctgaggtgtttagaaaagctttttcaaggaggtagtaacttgaggctagctcttggagtatgattggaagttttcttggtgaagaagtggaa

SEQ ID NO: 468982 - DNA, 626 bp, Homo sapiens
gtgtttggagagaaaaagaaagattggttgggaagactcggggcttggtatcacctctacatgatgrggagtcttttaaatcattaaaaggtaaagggcataaggtataatcatggtaaataatgtttcagaaagtccatcttgacaggatgattggcaggggagttgggggaagggagtaacatgttagggctggtgagattcgaggcagaaagattgaaaaggctgttgaaatattccaggccagaaatgctagcaatttgaattagggtcatttctgagacagatttttaagtctgattcaatggaaatcagtgattaattagatgggccattgaaaggaagcccacatagaggaatttaaaatgatgctgagatttctagcttgggcaagcagtggatggtgataccattacccaagattcctttctttgacactgagagcttcagaaagcaggtaagtttttccctttatctcttttattgtcatgctgtcatgatataggctttgaatgtcatgatatttgattaatgtttgcacagtgcttcttgttgtaaagctatgtacaaaaaatgatcatttccttatgcttcattgaaagatttatttcttacaaatggccttt

SEQ ID NO: 468983 - DNA, 440 bp, Homo sapiens
catcagcctagtctagttgycaagccatagggtggcatttgactcttacagcacacctaaagaaagccactctagccatatccatcaataattccatcagtccttggagaacccttcggaggcagtgtgaggaatggaaaagtcagtcccaaaagccctacccccacagggaccctgtgagcagtgtcactcctgcatggcctaatcttctgctccacatcaactgaactctcttaacctggatgttgtcctgcatccagtgtgatttcctgggaggtggagtgggttctgggatcctcttaccaggatttggtctggaagatcaggtactctaataaaagaccatttcctcctttaataaaacatggagcacaaacaggctccagtgccctctgagaaaatcccaagacaacacagtttcttaaaaggcacttcctcca

SEQ ID NO: 468984 - DNA, 537 bp, Homo sapiens
ggggttggttgcttagcaatgtagatgcagattctgccctgagcagagggaaccatcttatagtcttggctgcgggaacttcaaggagaacagccccaggagggccttgggaacctggggcctgttctgagttgggaggactggaaacagctttgtccctgggctggactggacagggagagccctccttaagggggtgattgagctttagaggacagaaaaggagaaccatgaggcctgggttgatcatagtgatattgttattataaccacagctacctttcgtgagcaccacctgcactatgccaggtactgcgctaacgtgccttaattccatcatcctccctgagccccttgctataggttactattagcatcccctttgcaaagaaggaagccagggcttatacggrttaattgacttgcctgtagccagaaagtggagcacctgggacctgaaccccagcttctctaacaccctggatcacctcacattgcagctctgactgggcacctggtggagagacttcaccatgt

SEQ ID NO: 468985 - DNA, 503 bp, Homo sapiens
tctcaccctcatcaacattcaccaccctgcaccttcgccctctgaaacaatccatatcctgccatatcatcctagccactgtgtactgagcacttactacgtcccaagcacagtgctgagtgtcttacacactcaatgacatggcttctagaatttctcccattttccaggtgaggaaaatgaggactacagaactgaagtgrcttgcccgaggttaataagtggctttggaggaatttgaaatgagatctgatgattggcacaaccaatgctttaaaccattgcattgcaggaccctcaatggtggcaaagctggaatttctgcttttggaacccagctcctgcagtctggaattggctgtgcagtgggtctcacaacctcaaaggatgtgatgtgtgggattaatgctgtcccttgctctgaataactatgggctagatgaagttcaagtggtgacatgataagaatactgactcctgctctaagatgggagggtggggat

SEQ ID NO: 468986 - DNA, 557 bp, Homo sapiens
taatttttcaaaagttccttgtttactgaacatctattcaggctaagagcctataaactaagtgcgtaatcattcatgaatgcaatagtacttcaaagttaaaatactgtaattcttttagtctatatttataataaacattatacatttattttaatctctgatacatgcgagaatataatttgaggataaaatacatataagctgtagcatctgttctaacagggagcgtgaagcatattccaggcataaaaagagtaccaaggccctaaagaagaaaggaaaatgggatgtgaacgactaatagaaagcttgtgagactgaaaagcagagaacatrtgaggagagtagcataaaatgtgcacgtttaaatgttgatgagaaggagacagtataagggaaatgagggatggaaatgtcaacaagataaggttctaagaaaataaaaaataggatctagagcagaggtggtgtgagaggactctcagtgaagcaggaattaaggacatctgctcagagtaaaatgggggtatggcaagagaagatggttgatggaa

SEQ ID NO: 468987 - DNA, 445 bp, Homo sapiens
tggatgacacctctgtcttgttgctctctgagaagaaaaggcactagctcccaaacacaggctctttctactacgacagcctgcttcccaagaagctttatcacagtgacgtgattattaagagtttaatcctctcagctccacaaaacctgaaacttgactttgtgagaaagccaggtctgaggaagacagacacacacaattaaactcagaaagatgttacaaacacaaatatcaatttatacataagaaatacagtaaatwtcatgaactgaaccagaatgttaatactggcagataatacattttctccctttaggaaaattacacagcaagctgcaatagtctgaatgtttgtgtctttcctcctcaattcatatgatgaaatcctaactgccaaggtgatagtattagaaggtgtggcctttgggaggtgactatatca

SEQ ID NO: 468988 - DNA, 495 bp, Homo sapiens
aacttttattctattttctgaaactgtatccactaaaccaagtagcaattcatttttaaagaaaatattaaatgtctaaaaattcaataatatatcacttttatataaataaatgagatttatccagtctagtttactgaataccctaatccttggagaaatgaataccatgcagtagcttgaactcactaaggttacatgacaaattaaatagtaatttacttctgataataatgttaacataatgtcaaatcttggcaaaagcccmatttccttctgtcttattttctactgttttttggaatttaaaaaaatgcttcaatttgacaaaatgtagcataagcaagtaagatattttttgaaaccccaaagagaaattaacacttcaggcacaaaaggattaagaaaattttcgtttagtaaatacatttggcacagaccagctcctaatcttcttttattttttaccccaggaaataaaacaagctcattaat

SEQ ID NO: 468989 - DNA, 489 bp, Homo sapiens
tgctagatctctctagcagtaggtggcatccaggaagaaaataatgatggcttgggtaggtgtaagcattgcacagggataaaagctactaatatataacttaggggatgagctaaacagaacttgctgaggaatagggagttgataaaaatcctcttatatttatgtagagaatttcagagattggaatttttcaagcgtgtttttttttttttttttttttttggkggtggttctctttttttccgcaacagtaacaatgcatcaacaaaaaattctgatagataccttaaacttaccacacacttattttgacagcttttcgtcttattttttagagtttagctgatctccttgataaacaagtttattcatggatggctgaaacatgcttattatttatatcaactaaataaagtggcctgcagtcgttgatcttgacaggacaatgcaatagctttcttgctgatgtgactcattattttctct

SEQ ID NO: 468990 - DNA, 489 bp, Homo sapiens
tgctagatctctctagcagtaggtggcatccaggaagaaaataatgatggcttgggtaggtgtaagcattgcacagggataaaagctactaatatataacttaggggatgagctaaacagaacttgctgaggaatagggagttgataaaaatcctcttatatttatgtagagaatttcagagattggaatttttcaagcgtgtttttttttttttttttttttttggtggkggttctctttttttccgcaacagtaacaatgcatcaacaaaaaattctgatagataccttaaacttaccacacacttattttgacagcttttcgtcttattttttagagtttagctgatctccttgataaacaagtttattcatggatggctgaaacatgcttattatttatatcaactaaataaagtggcctgcagtcgttgatcttgacaggacaatgcaatagctttcttgctgatgtgactcattattttctct

SEQ ID NO: 468991 - DNA, 652 bp, Homo sapiens
tatttatggcagtgtgaaaatggactaatacaaataccaaagcacctcaggtcagacttayaacagaggattccacttacatgagtaatgtacaatagtcaaactcagagaaacagagaataaattagtggttgccaggagttggggatagggaaatggggagttggtgttcagtgaatatgaagtttcagttatgccagatgaacaggtttgagagaactgctgtacagcatagtgtttatagttaataatacagcattgtgcacttcaaaatttgttaagtatagatctcatgttaagtgttctcaccaaaataacaacaataacaacaacaaactaaacaagcaagccaaaccaaccacaacaaaacaaagggacatgagaactttggaacatgttagatctatttccttgattgtggtgatggcattatgggtgtttgcacacataaaaactcatcaaattatgtactttaaattggtacagttctttgtatatcagctatatttcaataaagatgcttaaaaacaatatcaaagagttcattgagaggcataaatttaacttacacattctctgagacatagcagtctgttacccaagaagtagatagaaggaaattttagctattcttttttctctggattctatc

SEQ ID NO: 468992 - DNA, 652 bp, Homo sapiens
tatttatggcagtgtgaaaatggactaatacaaataccaaagcacctcaggtcagacttacaacagaggattccacttacatgagtaatgtacaatagtcaaactcagagaaacagagaataaattagtggttgccaggagttggggatagggaaatggggagttggtgttcagtgaatatgaagtttcagttatgccagatgaacaggtttgagagamctgctgtacagcatagtgtttatagttaataatacagcattgtgcacttcaaaatttgttaagtatagatctcatgttaagtgttctcaccaaaataacaacaataacaacaacaaactaaacaagcaagccaaaccaaccacaacaaaacaaagggacatgagaactttggaacatgttagatctatttccttgattgtggtgatggcattatgggtgtttgcacacataaaaactcatcaaattatgtactttaaattggtacagttctttgtatatcagctatatttcaataaagatgcttaaaaacaatatcaaagagttcattgagaggcataaatttaacttacacattctctgagacatagcagtctgttacccaagaagtagatagaaggaaattttagctattcttttttctctggattctatc

SEQ ID NO: 468993 - DNA, 652 bp, Homo sapiens
tatttatggcagtgtgaaaatggactaatacaaataccaaagcacctcaggtcagacttacaacagaggattccacttacatgagtaatgtacaatagtcaaactcagagaaacagagaataaattagtggttgccaggagttggggatagggaaatggggagttggtgttcagtgaatatgaagtttcagttatgccagatgaacaggtttgagagaactgctgtacagcatagtgtttatagttaataatacagcattgtgcacttcaaaatttgttaagtatagatctcatgttaagtgttctcaccaaaataacaacaataacaacaacaaactaaacaagcaagccaaaccaaccacaacaaaacaaagggacatgagaactttggaacatgttagatctatttccttgattgtggtgatggcattatgggtgtttgcacacataaaaactcatcaaattatrtactttaaattggtacagttctttgtatatcagctatatttcaataaagatgcttaaaaacaatatcaaagagttcattgagaggcataaatttaacttacacattctctgagacatagcagtctgttacccaagaagtagatagaaggaaattttagctattcttttttctctggattctatc

SEQ ID NO: 468994 - DNA, 524 bp, Homo sapiens
tttccaaaatttatggagaatttttcttgattatttttttcttattgatattaatgccatatggcatgcactgtaaaagtctgggctgtgagagcagaaacttttttttaatggatttattcaactctgtccttttttgtgtctaacgcttatcaaattgatcagtgcaaattacccagcatggccttaccaggccagattacacagatcctatttgagaactatggcagtcatgctaaagagtggagtggtatacatatgtctttgcactcaagtaaaggattttttaaaagatgaatttttctgttatataatatccttaattttatactttagccatcttgaacttcagtctgactcaatgacctttctatgatgatctcttcattataacaggacatctgtacttacaggatatctgtactccaygtaagaccatggaacataaaaatttgaggttcttaccaacacttaggatcactttttttgttttcagatttgagtgaaagcaacaaagggtcccc

SEQ ID NO: 468995 - DNA, 531 bp, Homo sapiens
tgatttcttgtaaaacaggtgacaactcagtaatgcaatatcttacattttatttccatcttgcctgcctcacttgcactttcccatgctctaaatttcctaggagtgaaatatccaataayactagagcatgtaagctttgccccaggttctgttttctagggtatgggtaagacacatggcattcaagaatttccacattccaacttgctctacatctttctccatgcgtacagccacaacatccaattcattataccccaattcttggagattatttttttcctaagcagtatattcattttcctatgctattccttcagtctacaatagacaatatattttgctaattattcacccataagaatttgcttttcctttacgtcccagagaaacacacccattagatgttttaattattctttcctttggattctccctgtcttccgtgtatacttctggtgaagcatttactatattctgccttgaatcatagtgaaattttatcacccatcctactacctgccaaat

SEQ ID NO: 468996 - DNA, 531 bp, Homo sapiens
tgatttcttgtaaaacaggtgacaactcagtaatgcaatatcttacattttatttccatcttgcctgcctcacttgcactttcccatgctctaaatttcctaggagtgaaatatccaataacactagagcatgtaagctttgccccaggttctgttttctagggtatgggtaagacacatggcattcaagaatttccacattccaacttgctctacatctttctccatgcgtacagccacaacatccaattcattataccccaattcttggagattatttttttcctaagcagtatattcattttcctatgctattccttcagtctacaatagacaatatattttgctaattattcacccataagaatttgcttttcctttamgtcccagagaaacacacccattagatgttttaattattctttcctttggattctccctgtcttccgtgtatacttctggtgaagcatttactatattctgccttgaatcatagtgaaattttatcacccatcctactacctgccaaat

SEQ ID NO: 468997 - DNA, 642 bp, Homo sapiens
aaagcattaaaaatattgcaggtgtgttttataatatccattaatatgctattagtgtaataaaaaattcatatgggaaataaagacataaaagcccccaaacataaaaaataacaactacacaaatatttcataatgctctatcaccattaataggaaactttactgtctgcttttaaattctacttttaaaaaaaaaactgaattaatcaaagagtggtgagtccacagatgtgcatctgtatctacagaaaaatgatgattttattgttggtctttttcaataagttcaaaataatcacggtgattgagtgtcaattccatcttttttaacaaaaacacagagtcatgaaataggattagagctggaacagttcaaatgcaaagaagatattttctgctattcagatttgatattattgagaaacacttcactatgtgtatcacactcactttaaaatcaaaatgagttatacraattaggctaacatatttatcattgttgacacagttaagatctcaatccatacggtataataattaaaatttgacatatgggaaattatagaaatatgacttctaaaattaattatttccctaatccagtaagtacaacataagtggaagaagggcaaatgaata

SEQ ID NO: 468998 - DNA, 602 bp, Homo sapiens
cagtcagccctatggaaactgcatatgagaaaaggctccttgtaaatgctggtttctcattgtatgaataccgtatttaaaatatgtgtttggttgaaaaaagtctgtgtatatgtayacctgagcagttcaaacctgtggccttcaagggccaactatatttgtaaaatgtggctagtatatcataagagaaggtaaacattttgagacaagaattcttaatctaaaaaaatagggtttattgcaatacaatattatttttaatgaaagggctttttgttttgtcaatagaagactcacatattacacttctagaatttaactaaaaccaaagagagtgtacattgtccactaggataagattttaatagctcacaataattctgtaaataattttaaaattctcaaacatcagaagctcaatcgaatctcataattgtatcttccttaaattcagtatgcaaattaaaagtttagtcaaaactagggcagaacagatccaaaaatcacatgtaataatggccacttacagaggtcaatttgcctagattcctttgggaaatatggaatattgtgggctattgctagaactcaatttgcat

SEQ ID NO: 468999 - DNA, 598 bp, Homo sapiens
agctaatagagactcatgttggtaacatactaggaacatcaagatgttaaggagagtttaatgagagcaactcagtgatgtgccatgtcttagaagggctttkaataaaagagttcacaagagctatctttgtaaaaagccacgtagccttggtacaaccacgtatcctgatttgttctacatcattgccatttataccacttatgacagtataattgataatagcatcccatttgctctccaatattgtacctagtttggatgattaaattatatggttagttttaggtaaagagcgaaccctgagagaatgttttgtatgctaagtgatttattaatgaaatgctcccagagtaaacgggtaaaggaagaagagtagagcaggaaaggaaaggagaagtcaaggagagtacaagtccatgcagttttactgaagatggcttttacttagtcgctcaagggatgccggaatagaaaatacacaacagagattatcccaaagtgaggcagcggagctggatttcacagggactgcgtaccctagtcaccagctaagtgtacccccaggtactttaggagaaagtaaaatggctccagc

SEQ ID NO: 469000 - DNA, 598 bp, Homo sapiens
agctaatagagactcatgttggtaacatactaggaacatcaagatgttaaggagagtttaatgagagcaactcagtgatgtgccatgtcttagaagggctttgaataaaagagttcacaagagctatctttgtaaaaagccacgtagccttggtacaaccacgtatcctgatttgttctacatcattgccatttataccacttatgacagtataattgataatagcatcccatttgctctccaatattgtacctagtttggatgattaaattatatggttagttttaggtaaagagcgaaccctgagagaatgttttgtatgctaagtgatttattaatgaaatgctcccagagtaaacgggtaaaggaagaagagtagagcaggaaaggaaaggagaagtcaaggagagtacaagtccatgcagttttactgaagatggcttttacttagtcgctcaagggatgccggaatagaaaatacacaacagagattatcccaaagtgaggcagcggagctggatttcacagggactgcrtaccctagtcaccagctaagtgtacccccaggtactttaggagaaagtaaaatggctccagc

SEQ ID NO: 469001 - DNA, 474 bp, Homo sapiens
aattatcccaaattactcatgaccaataactaaaggacaaaggaatttattgcatcaaacagataatctagataatgggcaccaacatttttctaaaataaagaaatgyccttttatagcaactaaatcaaacatcttagaaccactcccataggttacagaaatagaaaatcctttaaataatctcaaaatattccttcaacacccacctatgtgggtctaccaaattactataggcctttcttcttgtatgtacatgaatggttaggtcatgctctagctgattaagtatgaaaaatatatattctttcctcatattaaatgtgcatctatactctcaattagcaagtttaatatccttatctgatggagaatatgattatgcttctgtagtttgataattgcccattttcatagcatattatttagacgttcctataccaaatccttatggaacattgtgtgttgatgtgt

SEQ ID NO: 469002 - DNA, 474 bp, Homo sapiens
aattatcccaaattactcatgaccaataactaaaggacaaaggaatttattgcatcaaacagataatctagataatgggcaccaacatttttctaaaataaagaaatgtccttttatagcaactaaatcaaacatcttagaaccactcccataggttacagaaatagaaaatcctttaaataatctcaaaatattccttcaacacccacctatgtgggtctaccaaattactataggcctttcttcttgtatgtacatgaatggttaggtcatgctctagctgattaagyatgaaaaatatatattctttcctcatattaaatgtgcatctatactctcaattagcaagtttaatatccttatctgatggagaatatgattatgcttctgtagtttgataattgcccattttcatagcatattatttagacgttcctataccaaatccttatggaacattgtgtgttgatgtgt

SEQ ID NO: 469003 - DNA, 622 bp, Homo sapiens
aatgtcacatcatatgtgatatttttacaggagcatatcaacatagactgtggcacattatatatggttatattttagaaagtttttttttatcttcaatagtagagaggatcaaaatctgtgtcttcccttgaaactatactaactttgataatctttgtcataatatactcatcaggaactttggccaccttgacactccaawgaaaaattgccctgttctacaacattgatgattttacattaatggcataatgcaggacttgacgaataggctagatgctctagttagacacatgtatgacagatgttgtggtataaaactccaaaaattagggaactgctacaatgtttgagttttttaaatatatttcactttgcagtgggaattaatttgttttttctagaatcattctctgctgtaaatattggtttactttccatgtttgcaaagactctgatagtaccagtatccaagagcttatagactagtcattcattgatataatatcccacgtaatattttctaggactgggaggcacattttatgacacaggagataaatgacacaggattcatcattctggcaatggacttcattatccagaaataggcagctga

SEQ ID NO: 469004 - DNA, 622 bp, Homo sapiens
aatgtcacatcatatgtgatatttttacaggagcatatcaacatagactgtggcacattatatatggttatattttagaaagtttttttttatcttcaatagtagagaggatcaaaatctgtgtcttcccttgaaactatactaactttgataatctttgtcataatatactcatcaggaactttggccaccttgacactccaatgaaaaattgccctgttctacaacattgatgattttacattaatggcataatgcaggacttgacraataggctagatgctctagttagacacatgtatgacagatgttgtggtataaaactccaaaaattagggaactgctacaatgtttgagttttttaaatatatttcactttgcagtgggaattaatttgttttttctagaatcattctctgctgtaaatattggtttactttccatgtttgcaaagactctgatagtaccagtatccaagagcttatagactagtcattcattgatataatatcccacgtaatattttctaggactgggaggcacattttatgacacaggagataaatgacacaggattcatcattctggcaatggacttcattatccagaaataggcagctga

SEQ ID NO: 469005 - DNA, 492 bp, Homo sapiens
tcaaatctgtgtaaatctttaaaaataattattacaacctaaattcatctatgtaaacagcactacacacagtacagacctgccctgaaaaacaatatgcgaaactgagatctggcactgtatcattttgtaatgttaattcaacctaacagtcccatccccccgccctgctctatgccctcccctaccaaaaaaaaaamaaaaaaaacaaaaaaaaacaaaaaaaaaacctaaatttgtgcaagaaatggcaggcttattctatctgaaggcttcaaaaaaagatacacaacatgtaaccaggttcaaatattctgggagatccccccaaaaaggaaataaccaaaataaccaaaaaaatgaagaaagtgcctaaaacatgatacagcattttagagccctttcagatacaaggcagagaaaggtgtaaagtagaaaatatccggatcttcagtaatttccaaaatggtccaattcctcagttggctgcag

SEQ ID NO: 469006 - DNA, 583 bp, Homo sapiens
ctgtcaacagaaaccccaccccttccccagatttccacaatctagcctcatggctgccagaagattctgaagacacccagagacccccaaactcctataaatcccctaggataccctcagaccctaaaggctgttaattctgtcctcactcatagtcacaagattgtcctggttcaacaggccacttcccggaggcctcggactgcagagtcctgtgggccatcagggaactctgtcctatagactccacacctctcctctgactctagacccctgatccagcttcaccacttgccttttttttttttttttttttttttttttttttttttttttgagatttgagtttcactctgttggccaggctgaaaggcagtggcacaatctcagctcactccaacctccacctcccaggttcaagcaattctcatgcctcagcctccagagtagcgccaccatgcctgactaatttttgtatttttagtagagacaagggtttcaccatgttggccaggctggtctcgaactcctgacctcatgtratccacccaccttggcctcccaaagtgctgggattacagtc

SEQ ID NO: 469007 - DNA, 396 bp, Homo sapiens
gatgatgtatataaaatccttagcacartgagctcttataaaatggtagggacaacaccttagccccggggttgctgattcctccatttctgcctgctttacagggggaatagtaacggtaacgatagtgattgttgttgttaagaaaaggatgatccagggaaagtggaggcctgaggacactgggccaagagaggggtcagaggagtttgggagatagcttggggatagggaaccctagcttaggcacagcaggctggggtgggggtggtggagagcggtacccacatgctaagcgaggtctggagtgtatagtccaccagcagagtgaggatcatgggccacaggttgtcctggtgactcgaccttgggaggaaatgcaggggttaggaaggt

SEQ ID NO: 469008 - DNA, 458 bp, Homo sapiens
catctcaggaatgctgtagcttaatcttccattagtttttcataccactctgcagactttattatatggtggccacagtttagtgtagacatgacttcaaaaagtcccaaatattggctgaacgcggtggttcacacctgtcatcccakcattttgggaggctgaggcagacggatcacctgaggtcaggagttcaagactagcctggccaacatggtgaaaccccatctctactaaaaatacaaaaattaactcagtgtggtggcggatgcctgaaatcccatctacttgggaggctgaggcggaagaatggcttgaacccaggaagcagaggttgcagtgagccaagatcgagctactgcactccagcctggatgacagagcgagactctgtttaaaaaaaaaaaaaaaaagacccaaatatcaaccaaagtgaaggctcaccgaccattttgtca

SEQ ID NO: 469009 - DNA, 584 bp, Homo sapiens
atgtgagggtgcctgtcttcttatagttccaaacccttctgatctctactttcatcattattgcattgccatttcagccccttaatcctgcatatctgtatgcattccaagcaaatccttctttcccttttttcttcccctcmagctccaaaatatcttattctatgcaaggaaccactatcagttgatgaactcaactgttttctcttacctatagttttttcctactgtcaagatgttcttcagcagttgaaatcagagctctcttaaggaagtggccctcttgatgctatcactaatatagggaaattggttggagagattgacaaccaatgagagggacaaagagggaggaaaaatatttttaccattgagaatattggaaagtggatatggatgttcttctagtgacacagattatagcataattcatgagttatgtatcctgttttatcattgaagttcttatgaaactgtaacatggaaaatacatgtggggagcttttggcagctaatttggccctgaaccccatttggatcatcatgccttaggaaagtatgcttgtaatttgacttatgaacaa

SEQ ID NO: 469010 - DNA, 584 bp, Homo sapiens
atgtgagggtgcctgtcttcttatagttccaaacccttctgatctctactttcatcattattgcattgccatttcagccccttaatcctgcatatctgtatgcattccaagcaaatccttctttcccttttttcttcccctccagctccaaaatatcttattctatgcaaggaaccactatcagttgatgaactcaactgttttctcttacctatagttttttcctactgtcaagatgttcttcagcagttgaaatcagagctctcttaaggaagtggccctcttgatgctatcactaatatagggaaattggttggagagattgacaaccaatgagagggacaaagagggaggaaaaatatttttaccattgagaatattggaaagtggatatrgatgttcttctagtgacacagattatagcataattcatgagttatgtatcctgttttatcattgaagttcttatgaaactgtaacatggaaaatacatgtggggagcttttggcagctaatttggccctgaaccccatttggatcatcatgccttaggaaagtatgcttgtaatttgacttatgaacaa

SEQ ID NO: 469011 - DNA, 580 bp, Homo sapiens
ctggtctgatatgctcaattagtttttggatagtaggcagttatattatacataaaacatttttctctgtatgattttttattttgttatagtttcctaaaatagttatatttataaaacttaagtaaaaatctaatatttgatcaastactttcaacaaagaaacacaatcatctcatctcttgtcagtttataaatgtcacatagacttactattctctgcactgcagctatacctttaccaagaataagtatataaaaattagtaagtagctagcaggactactgggtattaaaggtagtattaatttaagttctggctcattgcttagtgtttgttaaagtctgaatcatcttgacgttttgttctgcattctgtatttattggctgattctggtacacgatgtgttcttactctcatcagtggagatttgacccttatttttcatgattttgaagcctaaattactccatctaggttggaattagtagcagttcttaccatccaaatactatttggctatggggatgttagagaaatggaaatatacgtttctgttgcccatgggacaatcttaa

SEQ ID NO: 469012 - DNA, 637 bp, Homo sapiens
ggtttgtgaggtatgagagaggaaacagctaccacttgagcagattgtgggagaagcagcgttttgaggtttcagctaaggaaaggggggcactcagaaaatatatggaaaatgtagaggagtttgatattcctgagagcacaatgcgaggtttgggtggatcatgatgactgagaaaaagtttgttgattttggcgagaagaagatcattttcaacctaagattaagcagtttcagaaatagtttagcagaatgatggaggttcccrcaaaggattatgaagtgaaaagcagatacttcgttcaaggaatttggctgtaagtgaaaggaggaagagagaattcaagtctttttttttttttttggttttgttttttttttaataatccaactaattacctatgagatttcatttccattttgtttcttaacatgaactctagagtcaggttgactttcttccataatgctttctaaaatcctttcttctttgttgtcatgctttaactcctgcctaggatgccctaaatttttttttcttcctttgtaaacacaacttttctggtaagacccattaacatctacctctcaatattatctgttatatatattttttccccattagataattcatttt

SEQ ID NO: 469013 - DNA, 637 bp, Homo sapiens
ggtttgtgaggtatgagagaggaaacagctaccacttgagcagattgtgggagaagcagcgttttgaggtttcagctaaggaaaggggggcactcagaaaatatatggaaaatgtagaggagtttgatattcctgagagcacaatgcgaggtttgggtggatcatgatgactgagaaaaagtttgttgattttggcgagaagaagatcattttcaacctaagattaagcagtttcagaaatagtttagcagaatgatggaggttcccacaaaggattatgaagtgaaaagcagatacttcgttcaaggaatttggctgtaagtgaaaggaggaagagagaattcaagtctttttttttttttttggttttgttttttttttaataatccaactaattacctatgagatttcatttccattttgtttcttaacatgaactctagagtcaggttgactttcttccataatgctttctaaaatcctttcttctttgttktcatgctttaactcctgcctaggatgccctaaatttttttttcttcctttgtaaacacaacttttctggtaagacccattaacatctacctctcaatattatctgttatatatattttttccccattagataattcatttt

SEQ ID NO: 469014 - DNA, 637 bp, Homo sapiens
ggtttgtgaggtatgagagaggaaacagctaccacttgagcagattgtgggagaagcagcgttttgaggtttcagctaaggaaaggggggcactcagaaaatatatggaaaatgtagaggagtttgatattcctgagagcacaatgcgaggtttgggtggatcatgatgactgagaaaaagtttgttgattttggcgagaagaagatcattttcaacctaagattaagcagtttcagaaatagtttagcagaatgatggaggttcccacaaaggattatgaagtgaaaagcagatacttcgttcaaggaatttggctgtaagtgaaaggaggaagagagaattcaagtctttttttttttttttggttttgttttttttttaataatccaactaattacctatgagatttcatttccattttgtttcttaacatgaactctagagtcaggttgactttcttccataatgctttctaaaatcctttcttctttgttgtcatgctttaactcctgcctaggatgccytaaatttttttttcttcctttgtaaacacaacttttctggtaagacccattaacatctacctctcaatattatctgttatatatattttttccccattagataattcatttt

SEQ ID NO: 469015 - DNA, 491 bp, Homo sapiens
gttgagagagcacaaacaaagccatgtgaagaaatgcttagttaagtgaaaacgaagataaaagaaatggaagaacgatacccatttgttgtgcttcgttgcaatgggtatttttcacacactatattgaagcattcctgcaagcactttggagagaagagtattgaaacctaactatccatgtattttccatacacgcctgagtctcaatgtcaggcatagctcaccrttaaagaaatgtgttgaaggcctagatatactacagcagcaagatgttacaattttacaaaaatcaagacatcagtacccattttctcatttatatgcaaaatgacagctaaagtaattaataattgctgttctgcataatttgtaagatattaaaactttaaaaatagtatgctcctctttctgtaagttctatgccagggagataagccagaaacttaagaaaagcagataaagagcaaagattgtagggaaagaatttt

SEQ ID NO: 469016 - DNA, 620 bp, Homo sapiens
tttgccaaagttctgaccaagtagttagcccattagccaccaactaagtgtcagtgaaaataaaaaccttaggaaaatgtttgtccaggacattgcctattgctaggagtattgcacatggctcagctcattgggcactttgtctgtcccccttatgaaaattagggtatttgcataggtgtgataggctgtggctgtccattatctggctcccttataccccgtgctaacttcattggaagacaagccattgttcttggtttgaaagtgttaaccatcctctttattccatattgagcaaaaggtgaaggcatttctggaggttatggcaagttaacctctgaggcggggtatgtggttatttcctcatggagttgttacactccaataaggacaggtttagctctatcctgtagataccatatccactttaataggaagtgctctgttactgatacaattttacagggagatttttccattacccagggaaaaataggaatctcaatccatacggtaattgactctgtttcagtaagggcttcrgtttcagtaagtgctcaatacactgccaggagttgcctctctagtggtgaatacctttgggctgagtcaggaag

SEQ ID NO: 469017 - DNA, 604 bp, Homo sapiens
gagaaactgttcagaaaagcctgggctctgttgccatcccttctaggacagaatgtcctgaaacactttagcctagtgatccaagtcacccctcccctgagatataaaacccagagaagaatgatttcacctggggcatgcacagatgagactacacctgccctgaacagcttttctgagctttggcagactgkttcaccttgaactttaagctcttattgtccctcgctgcctattggtgaataacaaaattgctttgcttaacttgttgagtgagtgttttttgttaccacacttgtgcaagtagattgataaccagtgcatggggatcccacttcacactaagggagttctaggtcagcctttattctaggaatagttcaactatactacctccacagaacatccctgggatcacatactcctgcatccttagtatcttttgaccctggtctctatctctccaacttagcaaggccatcagctctgcttagattctccattatcccctcattgtggaaattgtctccaggttgaaagctggacctcctgtggggcttatcatgtttgtttaccttctcacaggaatcccaggcctatgctg

SEQ ID NO: 469018 - DNA, 604 bp, Homo sapiens
gagaaactgttcagaaaagcctgggctctgttgccatcccttctaggacagaatgtcctgaaacactttagcctagtgatccaagtcacccctcccctgagatataaaacccagagaagaatgatttcacctggggcatgcacagatgagactacacctgccctgaacagcttttctgagctttggcagactggttcaccttgaactttaagctcttattgtccctcgctgcctattggtgaataacaaaattgctttgcttaacttgttgagtgagtgttttttgttaccacacttgtgcaagtagattgataaccagtgcatggggatcccacttcacactaagggagttctaggtcagcctttattctaggaatagttcaactatactacctccacagaacatccctgggatcacatactcctgcatccttagtatcttttgaccctggtctctatctctccaacttagcaaggccatcagctctgcttagattctccattatcmcctcattgtggaaattgtctccaggttgaaagctggacctcctgtggggcttatcatgtttgtttaccttctcacaggaatcccaggcctatgctg

SEQ ID NO: 469019 - DNA, 526 bp, Homo sapiens
aaaactgtgagtatctggcccatagaagaccaaacctatgaccttggctttttattcacctttttattaccatgtaggaaaagtcagtaagtcagtgctttaaagtgagcacatgcatgataggtacgttagaattaaccctatttgtttatgatggcagtcaagcacttgcccatttctccttcttgaaggttagtgtcagattctttcaagtctggctggaaataaaggtgcagcatctttaatcaggcttgaaatcttgagatagctgctaaggtcaaagaagaggaagagaggagtgtccaggcctgactgactttctamaaatttgttcagcttcttataggaccttttgattcaaaaatgagtgattccagtagaaaagagtagaggttaccaatgtgttggcaagctaaaatgctggccaagctgatgacttttgaaagtttgtcatgaaatatcagccactcagtgctgggtaagcttatgtcttgctctgaggttaacagttttttggaaaggtgtt

SEQ ID NO: 469020 - DNA, 496 bp, Homo sapiens
tcaccttattacaaggtcctactcttttgagtcaaaaaaatatacaaatgatgagtgaaacacataccsttatatcagtgtataaatctcagtctattgtttttcagttagatcccccacatggatcacatattttcgtcgagttcctcagcctccatccatttgataagggagattttttagaatcatacaatacttctatctctttctttggaaaggggaattgtacttagaattaaaataaaattgagttcaaaaatttttcaaaatctgattcttttaattcacatattgcaattcatattgtcatgcaggaaactaaattgttaaataatgaataattacaagagctattaaatatagtacctgatcaattgtggtcaaaatcctccactaacaataattttggagaaaatatctcaaaataataatttaactactaattaaaatatctcaataaatttgagataattttcagaaaattatctcatttgtt

SEQ ID NO: 469021 - DNA, 548 bp, Homo sapiens
ttcatataaatattccaaaaattatatacattcataaaaatttaatgttatcataattttgattgttatgttaattcttttctaaagttatatttgtatggatatgttatataatgtgagtattctaaagattatatgaaattggctgggtgcagtggttcacccctgtaatcccagcactttgggaggccgaggcgggcagatcacctgagctcaggagtttgagaccatcctggccaacatggtgaaaccccatctctactaaaaatacaaaaattagttgcttgtggtggcakgtgcctgtaatcacagctactagggaggctgaggcaggagaactgcttgaacctgggaggtggaggttgcagtgagccgaggtcccatcactgcactccaggctgggtgacaaagcaagactccatcctctacgaccaccccccaaaaaaaagattatatgaaatttataaaagtctgggagtcttgatgtgacactgccagtcatgattctgcttatcttaaaatgctgcaagtagtagaaataattaaat

SEQ ID NO: 469022 - DNA, 548 bp, Homo sapiens
ttcatataaatattccaaaaattatatacattcataaaaatttaatgttatcataattttgattgttatgttaattcttttctaaagttatatttgtatggatatgttatataatgtgagtattctaaagattatatgaaattggctgggtgcagtggttcacccctgtaatcccagcactttgggaggccgaggcgggcagatcacctgagctcaggagtttgagaccatcctggccaacatggtgaaaccccatctctactaaaaatacaaaaattagttgcttgtggtggcatgtgcctgtaatcacagctactagggaggctgaggcaggagaactgcttgaacctgggaggtggaggttgcagtgagccgaggtcccatcactgcactccaggctgggtgacaaagcaagactccatcctctacgaccacccccsaaaaaaaagattatatgaaatttataaaagtctgggagtcttgatgtgacactgccagtcatgattctgcttatcttaaaatgctgcaagtagtagaaataattaaat

SEQ ID NO: 469023 - DNA, 528 bp, Homo sapiens
cttgcatcagatttaaactatggttattccaagtttttgtcatccacagttattattttgaattctgctctaaaatcacttgcagtcagctataaaccaaaattccttttcatgggaaaagactattaacatgtactcttgaacgtagatttgtgatagctttaagatcaatagactaaataaaaatttttagaattctaataacgaaacggatgggttcataatactgctaataaaatcaagcaaaacaagaaaaattatgtgaaattaaataattgatgaagatagcgtttttatgatttatttaaaccattattagttctttacttaagcattttgttctccccatttaagaaaattttctctcataagctagctatagtttacaagaatttggtaaagtatactcctgtggaccaaaagtggaagcatttgctttttctccctagttgattcctccaaaatttggaaactctttgtggartattctcatttttatttacaaaagttcaataaaaatctgctctc

SEQ ID NO: 469024 - DNA, 554 bp, Homo sapiens
ggacttgaatgcaaatgaaagaacttcagtttaattcattctgcaatggtgagccaagagaaaatcaggggtgtggtgtcctgaaaactgtgatttgagaagatgagtcagatttcaaggcaggcctgattagcagaaaatattggaggttctaaaaccagttgggagggcagttagaaatctactgcagcaagccaggtgaaaggaggtcagagtccaaactgagatatcaggagagaggctggggaaaaaaaaggagattgacagaagagacactgagagcaaaaatacgcagggttcattcatcactaaamagcagaggcagacagcatcttcccatgggcaagaatcttgtgcagtcatcccccaaaacaggtctgcaactctgctgtgttctggaggccagtgtggatgagcggaccatgcaacgaccatgtcagcctccatcccatcagcctcattcttctaggcacagaaaacacaagtgctgacaggcagcaaacacactggctgcttcctcacctgaggacacagcctaaagaaagggaaggtgg

SEQ ID NO: 469025 - DNA, 554 bp, Homo sapiens
ggacttgaatgcaaatgaaagaacttcagtttaattcattctgcaatggtgagccaagagaaaatcaggggtgtggtgtcctgaaaactgtgatttgagaagatgagtcagatttcaaggcaggcctgattagcagaaaatattggaggttctaaaaccagttgggagggcagttagaaatctactgcagcaagccaggtgaaaggaggtcagagtccaaactgagatatcaggagagaggctggggaaaaaaaaggagattgacagaagagacactgagagcaaaaatacgcagggttcattcatcactaaacagcagaggcagacagcatcttcccatgggcaagaatcttgtgcagtcatcccccaaaacaggtctgcaactctgctgtgttctggaggccagtgtggatgagyggaccatgcaacgaccatgtcagcctccatcccatcagcctcattcttctaggcacagaaaacacaagtgctgacaggcagcaaacacactggctgcttcctcacctgaggacacagcctaaagaaagggaaggtgg

SEQ ID NO: 469026 - DNA, 674 bp, Homo sapiens
taatttgaattttactgaggaaaatcaaaatggaatttaacaaactgcaattcatttttcttatgaatcgtgagggaaatataaaataggcatttcgtaagactttggtagraagaattgatactcgattattagttagaacaacaggagaaagtaaaggttcttcagaattcaaaggattaaccaagttagtagattaaggcctaattaactttagcaaggtatttaatctctctaagatctcaccttttcatctgtaaaataagaataacagctattactacatggaaattaaattttaaagggagtcctggcatgtagtaagcccttcttaaatgctcactatcaccattgctattattgccagttttcctcttcaccatatgttacttgtagaaaacactgaagtcagtgaagatggaaacagggtgttacaggaacttgctctgttagaaggttgggacgatgaagcaaaacccatattatccaggtggattggtggatcttgtgaccatacattgcacataaaatctcagggaggtattttgtaaatatgcacctctggcaatacaagggtctgggtaaagtcatggtgcttcctatcagatccacatctctctacctgaaaacatgcctgtctctcaggtggcacagtaactgctattggaagaatc

SEQ ID NO: 469027 - DNA, 674 bp, Homo sapiens
taatttgaattttactgaggaaaatcaaaatggaatttaacaaactgcaattcatttttcttatgaatcgtgagggaaatataaaataggcatttcgtaagactttggtagaaagaattgatactcgattattagttagaacaacaggagaaagtaaaggttcttcagaattcaaaggatyaaccaagttagtagattaaggcctaattaactttagcaaggtatttaatctctctaagatctcaccttttcatctgtaaaataagaataacagctattactacatggaaattaaattttaaagggagtcctggcatgtagtaagcccttcttaaatgctcactatcaccattgctattattgccagttttcctcttcaccatatgttacttgtagaaaacactgaagtcagtgaagatggaaacagggtgttacaggaacttgctctgttagaaggttgggacgatgaagcaaaacccatattatccaggtggattggtggatcttgtgaccatacattgcacataaaatctcagggaggtattttgtaaatatgcacctctggcaatacaagggtctgggtaaagtcatggtgcttcctatcagatccacatctctctacctgaaaacatgcctgtctctcaggtggcacagtaactgctattggaagaatc

SEQ ID NO: 469028 - DNA, 613 bp, Homo sapiens
tcctatccctgccagtaatgcctgtgtgttgcccagggtccccaaatctcaatcctaggctgagccaacctcaggccatgtcactgaaggactcacatgccttttgcmagtgcgcgtatgtgtctccctgggcaaggcttttccatcgtgtgccagagtggctttaggagcaaccctaatctaatttgtctgggagcaaggcctgaaggttagaaattgaagctggtgtcattgaatcaacatcattcccgcttggttacctgcccttatgggctggtatgatctgatgagagcagacccgggataagcagaaagatgtctccgttcgatccctgcccccaggggagcagcctgcaggccaggcagacttgtaggtcctctctttccagcagcaactgagtctgggaattctgagaggaaaaggcatcactacatgggagctatcttgcggaaatgctgataaatcgccccctacctccaaatggatctcagtgtacagtttcgtcatgattttcaaaaactaaataagccagtataaaatgaaatggtctatgcaaagtaagttctcacaaatgtgatatgttccatgtgttggatggagttattagtcagc

SEQ ID NO: 469029 - DNA, 453 bp, Homo sapiens
gctgacaacagcaaacatgtttaattcctaaagcaattctttgaccttgaaatgtgtaatgtcaggaagaagactgctgaagctgtgcatscccatcaagggcacatattatccaccagtatacataccatcttgcagtacagaccctcaatttctgtgctgggggccagaggtggccaaggaggaaacaggaacaggagcgttgtcccagagagaatattcaaggaatgtcaagttggctggccaagagtcacatcattgcctgggcagaaggtcctcctcagttgtgtccagcagcaggatatactagtagcaggaaccactgtgcatagttacctttctctcctttttaaatagaatgattaacccattccttttgcacaattgaatactgactggtttgagaatttttgcaatgatcttttagtcatagtaagaggtagactcttacta

SEQ ID NO: 469030 - DNA, 395 bp, Homo sapiens
tctagctgattagagtgactgttggtttgaatgctgccctctgggcaggtagaggatctgaggttgtgagtggaaggagggcttccagagggccactgcccactacggcaggaaggatgggtggcaggaaagttctgattcctaattcaaactcctggttagggtgaggaggaggcacttctccaaggtgcagtgctttattctttctcatgcaaggcctgggagaatctgaagaatctgagcttcttgccctggctagggtaagacatcgcacccatcgcggtccatccattagatgagaagaggatagagtgccttctgggcaggaaccaggcagacagcacagcccctgtcccttggagtacmgtccatgtttttagctgctgctgaaatac

SEQ ID NO: 469031 - DNA, 596 bp, Homo sapiens
aaaggggcagagagggtgctcacaaggaaaggcaaggggaggagagctctgcagtcttaatgggggcatgggggttgtgtgtacaatggctgcagggtggaccctcctcttgaccaaaccccaagtgccctccgtccccctgaattccaagcatgattatcagcactactttccactggagtcacccagcccaacrcttgtgcgcactgccctgactccagcactccataacccagccgtctagactctgcagtcttctggccctaagtcaggggttgtccactcctctctggggagatgactagaacctcttaattagcttctctccctccccacttgttaaaccttatcagcaggtactccatcatggagaaggaaaccagtgcatgttaagcatttattatcctaggcattttaattataattctcataacagccagatgaagaaggcagcactatctccatcttatgaagaacccgaggctcacaagggtttagtgatttccccaaattcaaacagctaggaaggggccagccgaaccaggatctcaactttctttcatccactgctcccacgtggatcttaaatacaaatc

SEQ ID NO: 469032 - DNA, 642 bp, Homo sapiens
aacacttaaaaaagttaagcatgtttgggttaaagtagcgtttgaccatgttagggaagcccagttcttatccttagagaggttgcattctcacaggtaaatgagatctatacaaaggatacaacataagactataattctgaaataatttaagtgtcctagaaaaatgttctgaaggagttcagagaaggagtgcagaaaatctaaaaacaagtaggagaacctcatggagtgagtaggacttgagttgaaacttaaaggatgggaagggcatttaagtagaagggaaggaagagaagagcgtgttcrgggtagtcaaaactcataaggacgtatggtgatgattggtacaggaaggtgtttcaggaaagaaagtgggtattcagagccctcctgccatggcttacctcatttatggctttagcctctaaaacttctcccttgttgtcagttggcttctttcttgccttttatttatttatttgcctcttttctagtctagaactcatggtcaagcttgctgaacatgtgctttagcgaccttgctacctccttgtgctgtggctcctgggcagccaaacactagaggagagggcgctgggaagccaggctgtgtggcaattcttttgaccagttgccata

SEQ ID NO: 469033 - DNA, 642 bp, Homo sapiens
aacacttaaaaaagttaagcatgtttgggttaaagtagcgtttgaccatgttagggaagcccagttcttatccttagagaggttgcattctcacaggtaaatgagatctatacaaaggatacaacataagactataattctgaaataatttaagtgtcctagaaaaatgttctgaaggagttcagagaaggagtgcagaaaatctaaaaacaagtaggagaacctcatggagtgagtaggacttgagttgaaacttaaaggatgggaagggcatttaagtagaagggaaggaagagaagagcgtgttcggggtagtcaaaactcataaggacgtatggtgatgattggtacaggaaggtgtttcaggaaagaaagtgggtattcagagccctcctgccatggcttacctcatttatggctttagcctctaaaacttctcccttgttgtcagttggcttctttcttgccttttatttatttatttgcctcttttctagtctagaactcatggtcaagcttgctgaacmtgtgctttagcgaccttgctacctccttgtgctgtggctcctgggcagccaaacactagaggagagggcgctgggaagccaggctgtgtggcaattcttttgaccagttgccata

SEQ ID NO: 469034 - DNA, 595 bp, Homo sapiens
agtgaccagcccaaacgtgtttaactcaaactcacattcatttcctcgccatcctcacaccttctacttacctcatctcgggagactggggctattctacatgagctccccaacgtacctcgtctccactttaaattgtttcttgattttcattcwttcttcacctgtgtcccaaaccactccctcgcatttacacatcacctcctcaggtgaggctcaatcgttaggtcctctgactctcccatttgaagtgtctcacaaaggagagcactgtctttgctttcaggcattctgtgctttaggtgaatgtgaaacatacaatggaaaaatctctgttacacgtattcagccccggagctcccgtgattcccagagagtgggtattagaagtgatcccaaagagaccgcccctgggaagggagaatggatatagatgacagcctcctggagtcaaggtcaaacagtcatcacttaacttgtctgagcttcagttttagcacaagcaaagagcaagaacaaatgaagcagtaagtgcagaagcgaaaaggtgctttgttctctttaaaagaagcacactgaggaatgaagtcccctg

SEQ ID NO: 469035 - DNA, 595 bp, Homo sapiens
agtgaccagcccaaacgtgtttaactcaaactcacattcatttcctcgccatcctcacaccttctacttacctcatctcgggagactggggctattctacatgagctccccaacgtacctcgtctccactttaaattgtttcttgattttcattctttcttcacctgtgtcccaaaccactccctcgcatttacacatcacctcctcaggtgaggctcaatcgttaggtcctctgactctcccatttgaagtgtctcacaaaggagagcactgtctttgctttcaggcattctgtgctttaggtgaatgtgaaacatacaatggaaaaatctctgttacacgyattcagccccggagctcccgtgattcccagagagtgggtattagaagtgatcccaaagagaccgcccctgggaagggagaatggatatagatgacagcctcctggagtcaaggtcaaacagtcatcacttaacttgtctgagcttcagttttagcacaagcaaagagcaagaacaaatgaagcagtaagtgcagaagcgaaaaggtgctttgttctctttaaaagaagcacactgaggaatgaagtcccctg

SEQ ID NO: 469036 - DNA, 590 bp, Homo sapiens
atgcctgaactggctaccttcatttcttccattatcattgttgagttaccactagcttaagatgttccactggcctgagtcaatcagaacaatggtgccaagaatgtgtgtgttgtaacctctggcaactctctgactatgtctgtgtgtggtgtaatttcrgggttcaaagctcagtggaccaaacacatctgtttaccatggtctggagtaatgtaagtctgtttccctaggtggccccgggctgtttgctttctgctggtcaaagtactagcacatggtgaagctaagtgaggaactatgcccactacagttctgtaagtatttgatagaatgaagattttctattgactggggcttagtacattctgaaatcttagaaccacatggtcagtttccacacaaaattctcagacagaattttaaaactaagaaactctcatttgaatacaacagttttaaataacgagtaattgtagagtctcttgattgcctatttgcacccaatgggatgtaaaaagccatttttggtaaaagtttgtgtctaatttaaacatcataggctagagtaatattattttatttcatgt

SEQ ID NO: 469037 - DNA, 582 bp, Homo sapiens
gtttacaggctgtgtaaatcttccagttccagattttagtagcacataataccaccacagttatagtaaagaggcagacatgagtgatttttattattttatcattcccatatgaatatagttggactagtctgctgttaatagaatatatgcttcatatttaaaaatcatttcatatatattgatagagatggcattgattcagtcatactctttgaggtttgccaaatttcaggaaaatgacttgtcagagctagcaggaaagtctatggaaactgaagaaaatagtaatataggtctacagcaggataaaactcacacccttggcatcatgaataaatgtcgtaaggtaaacataaataaatacattctactacttttgtaaaccaaactcaactacacagaggagttaaacayggcaacctattaatttactaaacagttcccttaaacctctactgtctaccccctgttaattttccatttctctctgaatccaactcctaaagcagaactggggaggacaggctaggggaatgtatttgagctcacgatctaccatttgatttcctcactgccacc

SEQ ID NO: 469038 - DNA, 491 bp, Homo sapiens
tacccaagggtgatattccaaatatttaacaacctatgtggcataggcaccaaggattcaggactggaacagcatactgggcctgccctttcctcctggggtttcgctctttagttgtggagttgtggggaatwtagggcaggtggcttattcagggattctgggagaggagactgggaacctcgtgtgggaaaggggtagttgggccctctattaaacagcagctgatggccaagtagggcagaaacccatgtgtgactattgaatatcaaccttgcgtttacctgaatgtgtctacccaaaactggattcataatactggttttcaattttgtcttatggaaacttgttcttccttttgtttactttaatcagttgtaggagatagttgaaggaataacttaatataacatttaattcctaacgttggcagctgaatgtataacttagatgtaacattaaatttctaacatttttaggaaggtatacag

SEQ ID NO: 469039 - DNA, 601 bp, Homo sapiens
cacattgttcttcaaaattgccttgttttttattcttggccttttgcgtttgcatataaatttgagaatcagtcagtttccacagaaacttttttgtgaatttagactgggataacatttagtccatggtaatttggagaaaactgtcatctttatatttactcttcaatccatataaatagtgtatattttcatttatccaggtctttttaaatgtctcaataacattttatgaagttatctttagagatttttgtatgtcctttgctagctgtagtcccatttagcaagatttctggtatacaagattaaaataaaaattagttatatctatataatatcaataaacataataacatttttaaaatacagcattaattaaaaaaatattctaagcaatacaatagcatttattctaaatatatttaaaattaaggtgtaaatttctcacacatcgtgttttgtcctttgtttcttttttgagactacaacctctgcctcccaggttcaggtgattctcatgcctcagcytcccgaatagctggaattacagccagctaattttcacatttttagtagacacagggtttcaccacgttgg

SEQ ID NO: 469040 - DNA, 668 bp, Homo sapiens
ctggtctcgaactcctgacttcaattggtctgccagcctcagcctcccaaagtgcagggattacaggcatgagccaccacacccggtcgtattttgtcctttgaactctaaaagtttatggtatttgagtctacaaatacagtagtgctgcatttaccaattatttgtacatttgtatcaattattcagaattatggaatattctagtttgagaagtaagagatacttgattttatagtgttaatagcaagaaaaaatrctttactttcttgcctatatttttgtttaatctttttaacaaccttaagagtagagcattatgatttctgttctatagcagatgagacctaaatgcagggatgttaattaatttgcacaatatcacagggctagaaagttgtgagtaccatgatctgaaccaggctgtgtttaacaccaacatccatgatgttttcactataatattttgccacatatcaataactcctgagctcagtgcagtatttcagcatggggatggtaattgattatgataatgagaaatctgaagcatcaaaagactaattaatattcagtttattctgttttattaggcgtaaaagagggtactacatttttcagatttctattcaaaacattaaaatcaaagtttaagcctgctgagcttc

SEQ ID NO: 469041 - DNA, 645 bp, Homo sapiens
gagcttattgtataccacaactatccaacatctagtatacgcttcattggcatgacagacacagaggaggagggattctaatggtcagtttacaaaatcttagaattatttcatttggtgttagatagcttactaattaacaaggctctttttaacacaattaacaaacaaggaacatgtaaaaaattaaatctaactttttcctgaatactgtgtccacagtcagttaaaaaggctgacctgtgatttgtcagtttggagcagttaggtaataattgcagtagcaagatcctcctgtttgctcacacayttcccaattcttttagtacattcagtgacttacctgtgtgctccagccagtctgccacttagtgtcacttgtatcattacaggcaataatttattttctgaaattggcagccagtttctttgccaccttctcccagactttctcctccactcctaccccagagacactctccataattttatgtatttggttatcagaaggacccactgactgacaggagaagcaggagttaggagaggtaggagtaattgtgcgacaggtggaagaaataaattgcctgccactgagatactggctttctcatgcatttttctgtctcaatttctgctctgtcc

SEQ ID NO: 469042 - DNA, 595 bp, Homo sapiens
tctgtcttgaaaatcccaggactaatctcattatgttctttatccctgctgctttagctaccggtagaagctcaagttgccaggtcgtctcttctcctcccaccactgtaatcctgaaatggttctgcatgtctcccagggatttatcccactccttccctttctactaattcttggaaactcatgttctaccactagaaaatctccttgatcttctctaaacttttttttaaacttcttgtccctactaaaaggcagcaatcccctcaggactctcgaatgaagtcagttgtctctcccacactcttgtacaactggaattggaggtggtccttgcttctcattgtcatttgtagatactcgtcctctttcctcccaccacccaataccagtttagaactttgagtcatcagaatctgccacccactacttgccctagttgatgtcacctacggacttcccttcattatttaatgactttactttagatccatgaaacaggctctgtgtgggatattttcatgcagcaggtttattgaagcrtacactgtgaaacagagcctggaaggtagtaaagacagcaggatcagactaa

SEQ ID NO: 469043 - DNA, 548 bp, Homo sapiens
agccagactgctgaatgacaaaagaatacggtgggttgcatcctttatgtctttaagggtggtactaatctctgtagttgcctctagaatgtgacagtttaaatttattctcttggtttagtgagggggattcctcaagactcagccttactgctattgttcaataactcttcccctgaaatgccatgtctggtctctatgcagagcttgactgccaaatctctgtgtctagagaagctggcagtctgttacaatgtcagaagtctcagccatggctccatgacagaccttagccatggtgggtgctagtgatayttagatcaaagcctagatgggttagccgacttaaggatttagagacccaacttgtggaggacttgaaggcaatatagaggagtttagaattgatctaactcacagaggagaaacctttgaaaatttttgagcaggagcaatggatggaacatggcaaagatctgggccaagaatgatggaaaatattacagtaacataggcaagaagtgatagagtcatgaactaatatggca

SEQ ID NO: 469044 - DNA, 548 bp, Homo sapiens
agccagactgctgaatgacaaaagaatacggtgggttgcatcctttatgtctttaagggtggtactaatctctgtagttgcctctagaatgtgacagtttaaatttattctcttggtttagtgagggggattcctcaagactcagccttactgctattgttcaataactcttcccctgaaatgccatgtctggtctctatgcagagcttgactgccaaatctctgtgtctagagaagctggcagtctgttacaatgtcagaagtctcagccatggctccatgacagaccttagccatggtgggtgctagtgatatttagatcaaagcctagatgggttagccgacttaaggatttagagacccaacttgtggagracttgaaggcaatatagaggagtttagaattgatctaactcacagaggagaaacctttgaaaatttttgagcaggagcaatggatggaacatggcaaagatctgggccaagaatgatggaaaatattacagtaacataggcaagaagtgatagagtcatgaactaatatggca

SEQ ID NO: 469045 - DNA, 484 bp, Homo sapiens
tggcagcggcttcccacaatttttcctttatgctctttgcagcttttgagagtttatgatgggtgcttgttgatactggccatgaaagggttagaccagattgatgagatttatagcaggaaatgattcgctgcckcttagaggtttagagcaattcacaatggccttacctggaataggctttttactgcatgaaccctagtgggcccgacaaattcaagcaagggaggtcgtccacctgtgggcacagcgctgcctgtccagcactgtgcagcacttgtagcatttatcctggacagaggagtgaaggagcagagttttgtctcatttcaagaacatgctacagttctggctttggaaaagttaaataaaagtctaggatttcatttgtcttttaggagaggaattaatggtggtggtaggtccctcctccccccaccctctataattttcagagtattttcactcattattttgatgccag

SEQ ID NO: 469046 - DNA, 423 bp, Homo sapiens
atcacccagtaatagaaccaacctttataaggctcctatttattttatttgacttcatttctaagaatgacaaataaataatccccaaatatattcagaatcttaagaacaggatgaagataaacaacttggagcatttggtawagcttatttattatggcttgtattttaagtagaaaagactttattgaatgactaacatgaaattatgtcagagtcatgaaggaatcatagaaaagaggagctttaaaaaaggaggagccaattaatagccaaaaaaaaaaaaaaaaatgctaacctcatggcactatctaaattggcagatttctgaaaagccaagaggcagctccatcggttttctcaaaaagtcctccaggcaatgggactaaggcattggtcttgaatagagttccactgcttgcc

SEQ ID NO: 469047 - DNA, 494 bp, Homo sapiens
cctcatgccacctcatctttgccagcttctttgtgaggttgctgaatgccgtcttcagcacttgygaacagttttgaacagcacttgactgcaatttggcaatgtgttttaatttattccatccactgctatttgctgaatatctcttttttacctgtgagctctgcatacaataatagttggttacatacaaattattttcatgtctctatttaacattgagttagtaagaaagtaaatggaaaatatgttgaaccttagattcctttacaagtctttattttctaatttattcaaatgtcaaacactgtcatcacttgtgtattcgtcttaatgaaacataaatcactagacatttattactatatatcttgtttgtagttacaattgtgtttgtgtccagataatcaaaataatgtatttgggtttaagtaaaagtctattctataactttatattaatctatttttgacacgtgtaagcacgcattttag

SEQ ID NO: 469048 - DNA, 494 bp, Homo sapiens
cctcatgccacctcatctttgccagcttctttgtgaggttgctgaatgccgtcttcagcacttgtgaacagttttgaacagcacttgactgcaatttggcaatgtgttttaatttattccatccactgctatttgctgaatatctcttttttacctgtgagctctgcatacaataatagttggttacatacaaattattttcatgtctctatttaacattgagttagtaagaaagtaaatggaaaatatgttgaaccttagattcctttacaagtctttattttctaatttrttcaaatgtcaaacactgtcatcacttgtgtattcgtcttaatgaaacataaatcactagacatttattactatatatcttgtttgtagttacaattgtgtttgtgtccagataatcaaaataatgtatttgggtttaagtaaaagtctattctataactttatattaatctatttttgacacgtgtaagcacgcattttag

SEQ ID NO: 469049 - DNA, 488 bp, Homo sapiens
agcatagaggaccattaagttattataagagaaagaacccagaaattgtatggagaggacagtaatggtgcatggctttaatttttggatggcctatttttccctgtcctttcttcttctttcttatttttcttttgattttcttttaagtgagtgcttctgagttatgctaatccttccttggctgctaacggatatggtatttcaggatgcaattggaaaatctataccctacatcaatttgaaaggagataggaggccatagaaatattagacatatttaggacgtctctgaatgactgagatttctamattttatctcaatattttgacacagcctttaaggaaactcatatttttcttttgcctctacattgaggaagaataattaatataatgtactctatctttcagagaaaggtgtctaatggtctagtctaccaacttcactatgctgatttatgaaagaattgctgaaacccagtgaa

SEQ ID NO: 469050 - DNA, 636 bp, Homo sapiens
ggctgagagactagcggtcacctgcctagtcttctgtactttagtttcctcagctcaaaaatgaaggtaatgatgacaaaaataccagcttcactgggttttgtgaagctaagatgtgcatctatgtgaatgtgcttgacgaaaagtagttattttaaaataaatttgtgttgatattataaagagaaattgagacagttttgcatctttcaccccgctacccctgggggcaaaaaaactgtatttaactggctctttcccttttcatttgggtctctgctaaaatatcacctcattgaaagctttccctgacaattctgttcaaagcaacatacgtcactccgtggacactatcaatctgttttatttttcctcttggcatttactactacctggcattatactargcatttagattttagaatgttaggcagggcttgtttgttttgtaaacctgtgtttggcacacagtagatacttagccagtttttgtagaaagaaggacctgtcctcccaatgtgacacaacaagttaattgctctctttgctcattctctacctctagaaaagctttttttgggaaatatggccaagaccaggaggtgctgtattgccttgatgatatcaccatgaaga

SEQ ID NO: 469051 - DNA, 471 bp, Homo sapiens
tgtttctgaaacttgtaagagcactgatatgtaatatatgcatagtaaatatgtattgaattgagttgatgtggatcagtcagcttgcatggaaggacagagatgaggaagagaacaaggaccttctcagagatactcaggtgggagtctgtggataccttcagcagtttgatgtttggagacaaggaggcttgactgatcggtgtttccatgcatttttcttcctaaaaacctttaatggctccytatttcctagattagctcagcatttaagacccactaccatctgaccctaacttaattctccagtattgctcagagcagagcagcctttgactcaattgtgtgtaaaataggccaagtttgttgtcagaacccacccctccaccatcttccttatcttcagtcttagatctttcaggcccttgttatccaagatttctcagaaagtcatggattctttagccactg

SEQ ID NO: 469052 - DNA, 573 bp, Homo sapiens
aacatgcaagtgatcaactgtactctttataaactcaatgaaagcaagaacagagctcattcatttctggccaccaccaggaagctctcatttttttagcctgtgtctccagggaaggttgttattttcataaaaaatttatctccatattcattttatttctttaaaaataatggtggattgtttgaaaacttttctcagtctttttattagcttcttggaaagttagaagtagccctatgatctctaaaattggtttgaattaggtgcacaattaaaagttcatcaaattgggaaagatttgaactttctaacactggtttatcatcatttttctaaaaccagtatcaacaaaagaaaaagggaaagcctacttcaaggatcctatgcaaagagctctcagttttttttcttgtaattattgtcagcccttaaatgtacayatctgttgcaataagcaagagttgtggcatgctctgtgaagatgggccaaacctcctgcagaactgtgtgaatggaattcagtatacactgaagcctgaaaatatcataagagcattccattcttctcat

SEQ ID NO: 469053 - DNA, 523 bp, Homo sapiens
tggaggagagggtggattttctcattggagacctctccttcttgttcagatcttatcccagtactgctgaatctccttagtctgttccttgctgtttttcttacccttttcgttccatgtagttctgtttttccttttcttactgctttggtgtggcccaaggaccaccccattatgtcccttaaatctataccccatatatttgctggcatttgtctttaaaaccccataatttgctgcctaactgcaaaaggtccctcattggttactcttccatagtcactatgtcccctcccatttctgttgaagtgctgagtgtccccctgtttgtcgctgatatggtttggctctgtgtccccacccaaatcttaaattgtaatccccatgtgtcaagggagggaggtgattgggtcttgggggtggtttcccccatgctgttcttgtgacagtgagttctcatgagmtttgatggttttataaggcaattttccccgctcttgcttgctctctctcctgctgcctt

SEQ ID NO: 469054 - DNA, 592 bp, Homo sapiens
tacaggcatccgctaccgcgcccggctaattttttgtatttttagtagagacggggttttgctgtgttagccaagatggtctggatctcctggcctcgtgatccgcccgcctcagcctcacaaagtgctgggattacaggcgtgagccactgcgcctggctgtaccttcttattttctgtatctctccggagtttctgcagagtctgattctaaatgacttttatttcccacctaaaaaattattgagagtgatatcagcaagaatcactatttgatcatcatcaccccacggaagcatcaattttaatggccacacatggatgagagtacctttgagagagtctgggaatycagtggacaagttccagcttaccattgaagaagaaaatttgagaatagatgcattgaagagggtaagaaaaacagtttcatttacctatgtcactcctctaaggtgacatagctcaataccaagagagacccctttagtccatgatttatcctgtaggaaaaagtgagagtatagtcagtgagcagccagccatggggtgctgccaaagaggcccacttgtttttagccccacccagcac

SEQ ID NO: 469055 - DNA, 436 bp, Homo sapiens
ccagctgaaggactcccaacaggtgatatccacatgttgactgccatatccagattcggatccatcaccttgtccattctcccagactccatgccctaccacacacacacacacaatttttcagaaaaataaatatcaaagtgagcatctctttgtgggttgtaaggtatgacatttataaatgcattttacaagcatctgagtaatggtcatttcctatgaactgtgcaatagataaagtaggctgcaggagattcaaaaatcccactgggcttgctgtaacttgacgcctttttgtstcaaccaaccatccatatcaggtcacagttagtgagaaagatgtgattatggagaaaacctagtatctactctgattttaagtcagttgcaacagtcttatgatgctcattagcaaaaagcaaaaaaatgtacttat

SEQ ID NO: 469056 - DNA, 332 bp, Homo sapiens
ttaagcctgggccaaataaagcttggcaattatgagtaaccaactttmcattatatgctcatcttgctccctttcctggttatattttaaaagagcaaattttgcaagaaactgcaatgcaaagaaggacatttttaacttgacgcttttaagatatgtatacttattcaactctttctactattatttgtttcacatttgccttcatcttaaacagtgtaagttcagggaccctaagatatgaaacacacagtgcctgttgcatagagaatgtaaattaatgtttgtcaaataaatatagaatggattgctatctctgagaagtgatgtgt

SEQ ID NO: 469057 - DNA, 332 bp, Homo sapiens
ttaagcctgggccaaataaagcttggcaattatgagtaaccaactttccattatatgctcatcttgctccctttcctggttatattttaaaagrgcaaattttgcaagaaactgcaatgcaaagaaggacatttttaacttgacgcttttaagatatgtatacttattcaactctttctactattatttgtttcacatttgccttcatcttaaacagtgtaagttcagggaccctaagatatgaaacacacagtgcctgttgcatagagaatgtaaattaatgtttgtcaaataaatatagaatggattgctatctctgagaagtgatgtgt

SEQ ID NO: 469058 - DNA, 512 bp, Homo sapiens
ttatgagctattcactttttgtgagccattattctgaaaccttcatatgcattaccttatttaattatcttaacccttaaaggaaagatactattattatctctatyttacaaaggatatgaaattaataagtcaaatgcccaaacagagggtagttgaattggggattataccccggcatgccttcattaccactatctcccaagattttctggccttgagtctttccttcattagctggaaatgacttgccccttctggatctcaatttcttcatctgtgtaatgatggagtgggaaaattattatttccaatggatcttccaagtagagcattctgtgatttactgatttgtgatagtttacaatctcttgtggcagaggaaggaagccactttgcaaaagctaaggatgattttgacccaaattacaaactccagacctttgactatacagaggtttcagaataacagagagagggagtagttacaggtttgacacatctttaacctt

SEQ ID NO: 469059 - DNA, 628 bp, Homo sapiens
aatcataaaaacctacctgtgtctgaatctgtttcctcctccttctttccagttatgacagagttttagtcttaagactaatcattcatactttggctcctatctcctctgccttctcagggaccttacatcattattaccactcattctcttctgtatcttccatctttccctctcaactggatctgtcccattggcattgacacatcaaggcactgatgcccttcatggagccacccctgccagctcccttcacacacaaaagtggcctttgcgttctgtcttgatttcgccattgacttagttctcaacctattgaagtttggctcctgttcctgtctctctctacattcagtggacattttaaaattctatcttgatctctcagcagcacttagactttctcctatattttttgtatttgcttctgttatgtcacggtttgctgattttcctccagctctttggctttttcttgtgctgcccycgcctgtaaagttaagttcctcaaccccttatcacaggagtcagagatgatgtggacattcctatagttccacaaagccattttcaaattttttttattctcatgcaaactcctttgtcatttgagtttcattctgcataa

SEQ ID NO: 469060 - DNA, 564 bp, Homo sapiens
gttgtcccattaatgttttaatctgtaaatatgatgatgtttttagatcatcaacccataaataacatggaaagttatgccatgaacccaaacttaagctcatttgataacacatttaagagctagaaaaagggtaaatgcaaatacttaagtatctattagatactcttttttacacaccatatcttaattttcattaattatttcataatttggctttactttttatctcctgytttatggactgccattcattactggtaataaccattctttatttctccactcggcagtccagtaccaaatcccccagttgctactgtaagattcatgtaagctaactctaggattggtttctatccccttgtgaagtatatgtaagttctaaaatcttgctgtctgtggctatgtcttttttgctgcctaatctttgttttggtttatatttcctgcctaggcctatgatttttttacccagtttcctccctgcattacaaacctgttgcctacagctacaccttgcatccacatgttaaccttctgccctgggatttatccatagac

SEQ ID NO: 469061 - DNA, 516 bp, Homo sapiens
aactgttagcaataactgaagccaaccctcattgaacatttactatttgctgggtcttgttcttggagctttacatgcagtaactcttttaattcttaaatacacatgagattaatactattatatatgtgtgtaaaagtatctatatatacttacatataattatattttatatataatatatacttacacacacacttatatatagtgtgtgtgtrtatgtatagctctgtgaaaccatttgcaaattttttgaataggttaagttatagcagatacaacaggttgggcactggatatataaagataaacaaaatatagtacagttttctaagaccataataatatatggtataataatatttttggttaagggttttcaagccaaaaagtagaattagttacaatgtaatctctgcaatatattagaaaaacagcaaaaaaaaaaaagatcaatatacagatagtacctaacccattctaggtgcttaagaaattggatgaataaataaaaga

SEQ ID NO: 469062 - DNA, 516 bp, Homo sapiens
aactgttagcaataactgaagccaaccctcattgaacatttactatttgctgggtcttgttcttggagctttacatgcagtaactcttttaattcttaaatacacatgagattaatactattatatatgtgtgtaaaagtatctatatatacttacatataattatattttatatataatatatacttacacacacacttatatatagtgtgtgtgtatatgtatagctctgtgaaaccatttgcaaattttttgaataggytaagttatagcagatacaacaggttgggcactggatatataaagataaacaaaatatagtacagttttctaagaccataataatatatggtataataatatttttggttaagggttttcaagccaaaaagtagaattagttacaatgtaatctctgcaatatattagaaaaacagcaaaaaaaaaaaagatcaatatacagatagtacctaacccattctaggtgcttaagaaattggatgaataaataaaaga

SEQ ID NO: 469063 - DNA, 516 bp, Homo sapiens
aactgttagcaataactgaagccaaccctcattgaacatttactatttgctgggtcttgttcttggagctttacatgcagtaactcttttaattcttaaatacacatgagattaatactattatatatgtgtgtaaaagtatctatatatacttacatataattatattttatatataatatatacttacacacacacttatatatagtgtgtgtgtatatgtatagctctgtgaaaccatttgcaaattttttgaataggttaagttatagcagatacaacaggttgggcactggatatataaagataaacaaaatatagtacagttttctaagaccataataatatatggtataataatatttttggttaagggttttcaagccaaaaagtagaattagttacaatgtaatctctgcaatatattagaaaaacagcaaaaaaawaaaagatcaatatacagatagtacctaacccattctaggtgcttaagaaattggatgaataaataaaaga

SEQ ID NO: 469064 - DNA, 408 bp, Homo sapiens
ttaaatataataaaggagacaatttaaacctggtctttacaggggtaatgaaaataaggagttgagatctgaatcagcattgtgaaataaagcctatatagtttactaaaacaatttatggcaactttgaataatatagagataaatgtatgatttcagtgtcaatggccaaccctctttaccgaatctcttaggcaaaggatgatgcatccactaagctctggaatagactttttctttcactgacctgccactcactctttttttgggcccataatgaaatgtgtcctagccagatctaccctttccatgttccctgctggatagatccactgctgagaagtctaagtatmcttcaacaattgctcacgttttaaagtacagaattttcttcaaataaagtcctcc

SEQ ID NO: 469065 - DNA, 617 bp, Homo sapiens
gctgcatcttgcctcaaaatagctgccatttccagatagttggtcttatgctgggcttggccacagccctgaggaacagaccattttggaagacaaagctagtggctttctccactgcttacttctttctaaaatcaaatgtagaaccagaagagaaacatgttgatctagccagcatttccaytgctctagatagtattatgaatgatgagaaactctttagcagaacacaacagaaaaaaaaaaggtttaggtttcttatttctattatatttattattttctagatcaagggttttaaaaaaatttaatttagagagagaaatttcctttcttagtttagaggtatttcactggagacagcagcaaccacaattgccaagtagctagaggaaatggcttctcaaatagaagggaatgttattaattcctaagatagcagtatggtaaattcaaaggaattagtttgtaaatttgacttggtaatgaaccactgaagaaaaaaaaggggctaaaaatttctcctaaatcaatagctgacactggatacctgaaatgccatgacacttttacagaacattttaaatagctggtaaaaataaaatgagtcaattata

SEQ ID NO: 469066 - DNA, 479 bp, Homo sapiens
atttgtacatattatacatacagagttagacaaaactctctgctccatattcttttgtgtttagtaccagggttttggctgatcttgtatgggaaggcagtgtacatgaggcctagtgtgtgcttcccttctgtctgcagactattttcacctcacattcttcttgctttctcccacttcactgccaaatttcctttaaacatttcaagagtaacccatgattcctgtaaccaaaagtataatgtaaacacatagaaagaaaaataattaagaatttttccctatcgtctcttaccctgcactcctgttgtttatggccacaatccatcagcttctagtagataatgatgttaacagcctcgtgtgcatctttgaatacttctcttcatgctacacatctgtrtgtttattaaaacatatatgcacatgtataattttggctattttttgcttttataaatattgaattataccaaaca

SEQ ID NO: 469067 - DNA, 683 bp, Homo sapiens
agtaatccactcagagactggcccattaagatccagaacttctatgtccaaatggcaatagaacaaaataaagcacaccaaccaccctcagtggtgacttaagggaaaaaaaagacatggtgtatgtaggatggcagggcagtgactgattggggtagaggctaacaatgtagatttaaacagactgagaggccacagaagatagagataaaaagaaaaatatatcaagcagggatttatgtgactgtaagagacaatcactcaaggtaacccaggagtccaaatacaagttgagagaaagagtgaagtggaatcctgaacatacccttcaaccattattctcaccatccaactggcgcacacacacgcgcgcrcacacacacacacacacacacacacactgagagagagtgaaagagaaagagagaggcgctatgtggggttgaataggtcacttgaacctgaagtaaggtcgactttgtatgttctttcacatattgtgtgagtgcttgactggctaatgactgcaccagtttattttggactatactaccacatccctccatggtgaacaacattatagattacaaagaagaggaccggtaaaatatagttgatgcaggaggagggagaaatctaggctggactcattttaaacaaattatcttaattatatctcttaa

SEQ ID NO: 469068 - DNA, 617 bp, Homo sapiens
ttactgtatctggttttattgaatatttactataatttttaacatattgaagtgtatacagacttgtcacttaatgacaggtttgtgttctgataaatgcattgttagggaatttccttattgtattcatattatagggtatacttaataaacctatatggtatagcctaccacacttctaggctatataatataggcaacaaacttgtatagcatttgactgtactaaattctacaggcaattgtaatacaatggtaagtatttttgtatctttctatctaaacatagaaaagttacaggaaaaaatatggtataaaagataaaaaatggcacacctatacatggcacttaccataaatggagcttgtaggattggaagttgctctgagcaaatcagtgaatgaatggtgagtgaatgtgaaggcctaggacatgactatagactttatcattattgtacacttagactacactaaatttataaaaaatatttttagttttgatgatatattaatcttagcttactataacttcttttgctttacaaacatttcacttttttwaaaaaaatctctcttttttaataaagcagcttaaaatacaaccacattgtaca

SEQ ID NO: 469069 - DNA, 560 bp, Homo sapiens
ctctaccagaactaattagctaagcagtctggggccacgccaccacatcccaggaaacagatattggaatctttgctttttgaaaatctttgttttctgaaaacaaatagccatactttgatttcaacttaattcagcgagtttactggatatttactgtattttctgcatggtctcagtttaaacacaaatctgtattcaggagtctcttggtctcagttacgtagcaatactatttatgcytccataatataaattatttcatatagttgcctgagataatgggataatgttttaccaatcaaattgacaaagatcatattaagtgctggtgatagggaggaaaattggtataagctttctaaaatcacatcagtatgaatcaggaaacttgaaatgctcttaattttttttcaccatgtaaatagatttaattagtaaaaaataaccttttttagtcacctggtctcatatgtagcatcatggctacaatggtagtgcaagtccagggacaaagaactttgaaaggctctagtggtagccatcagatcagttcttca

SEQ ID NO: 469070 - DNA, 323 bp, Homo sapiens
cagtttaaagttgtttctttcaagagttaactcatttttctgggcttcagacattgaacaagtaatggcctggccttatccaaaacttgtgtgtatatatatatatatatatayacacacacacacacacacacacacacacatatgtgtatgtgtatgtgtgtgtgtgtgtgtgtatatatgaccaattttagatttcaagatacctactctcctgaataataacatagttggggaagtgaggatacacggacttcatcttgtaatggaagatgtctcccagttttgatgatgttttgtatatgactacagatagtatgaac

SEQ ID NO: 469071 - DNA, 623 bp, Homo sapiens
acagctgtcttttctgctttttagctactaatttattttccccttgctctttaaaaatgaatgtttatgtacaaattactatgtatatatgctaagatgtaggcataaatggtatagtctagagtkgttaaaatgtgttttacctaaatagttgttccaaggaagaagttaactataatatttattaaaccagaaatttgctgtgcttactttagctaatatcttttcaagattgtattcctaatgtcaagagttttgcaatagaaaattaaaattctgcattgttatttttaaaacaagcatttttccattccacttccattatattcccttttccattcaaataggctgctaattccactactgtgaagagtgcttcgttgaacgtatgcatccatgtgtctttatgacagaatggtttatattcctttggatatatacctagtaatgggattgctgggttgaatggtaattccgcttttaggtctttgaggaatcaccacaatgtcttccacaatggttgaactaatttacactcccaccaacagtgtgtaagcattcccttttgtccacaacctcgccagcatctgttatcttttgactttttaatagtagccattctc

SEQ ID NO: 469072 - DNA, 623 bp, Homo sapiens
acagctgtcttttctgctttttagctactaatttattttccccttgctctttaaaaatgaatgtttatgtacaaattactatgtatatatgctaagatgtaggcataaatggtatagtctagagttgttaaaatgtgttttacctaaatagttgttccaaggaagaagttaactataatatttattaaaccagaaatttgctgtgcttactttagctaatatcttttcaagattgtattcctaatgtcaagagttttgcaatagaaaattaaaattctgcattgttatttttaaaacaagcatttttccattccacttccattatattcccttttccattcaaataggctgctaattccmctactgtgaagagtgcttcgttgaacgtatgcatccatgtgtctttatgacagaatggtttatattcctttggatatatacctagtaatgggattgctgggttgaatggtaattccgcttttaggtctttgaggaatcaccacaatgtcttccacaatggttgaactaatttacactcccaccaacagtgtgtaagcattcccttttgtccacaacctcgccagcatctgttatcttttgactttttaatagtagccattctc

SEQ ID NO: 469073 - DNA, 583 bp, Homo sapiens
ttgattgggggccacttagtggtttattattttgggggtayaaaatatgagagtgagagaggcaggaggtaagcttacagtcatctccatgagtgtttttgcaaagtttgggtatcagaagtttgggttttgcagtgcagagggtggattggaggggcagcgagtggggcaagggggccagtgaagacctagataagagcccaggtgagagagaaagagggtctggagagtgggagtgtgggcagggagaaccagacagttttagcaggtggagttgatgggagctcttggccctaaggcatgaaggagaagtgaatgggaccacatgcccctcctagcccaccccatgtcccatgccctggatttctagtttgtgtgggtgatggtagcctaaactcagaaagttaccctccaggcggggcaggcctagatatcgagctcagtttgagattggtttaccttgagttccttgtgggaattccaggtggagacatcaagtgggaagttgggtagataatctgttgctcagggaaaatgcccccttgtcaatatggatcaggtggccacccagggctgcagtcca

SEQ ID NO: 469074 - DNA, 504 bp, Homo sapiens
ctattttctaattttaaaatttaagaaacttccattttttagtgttctttttttcttttaaacaaacttctagatattagcattctataccagacgcagaagtctgtttaaaaaaaagagctmtggaagaagaaaatacatgcattgtgtaggctagaacaattctattttatatttctctgctctaactttgtgtcagtataatactgaggcatcacattctttaatttcttaccatatatcaaaccatgctaagcactttatattcactattttatttagtccacactaccacgtaaggtatatactattattatcccattttatagataagaatattgaaacacccaggagtagaggagcttgccctagatctcacaggcagtaagtgagataacccagggaggcaggatataagccaagcctgtctgacaccaaagtcgacatcactctgctggtgtttttcatattagggtttgccagtctctggggctcatgttcctt

SEQ ID NO: 469075 - DNA, 636 bp, Homo sapiens
gttgcagtgctgtttgttgaaattctgcgaatcctccaaaaagaaggctaaattggtttgggtgtgctcacgatgactggcagttaggttttcagcacttaaaaccacttttccttgtcgttaaaaaccgatacacattcattttagaaaatgtgtgaagacacacacaaagaaaaaaaatcatcagtaaactaccttccaaaggtagtagctgctggtttttcccccgtacatatagaaatattgtttcttttctcagaaattctcaacaaaagcaatatggaaatgtagacaagggcacatgggagaacaggagcggatgtgaactcccaggatctagtacttcatgattctatgaccctgctttagtctctccatccctctcaggcccagttgctcatctgaaaagtagaaatatgaatactattttttattcctacaggggttttggaaatatcaaattataaaacatttgacagtattttatcaattaaaaaatactatatgcttggttttattagtatrttaactgaatagaagatgactctatagatagatggagtgatcagattgaatcctaaataataattccagctggatggacttctgcctagctctgttacctgagttacaaat

SEQ ID NO: 469076 - DNA, 612 bp, Homo sapiens
atcctctacatggcctagacttcttacttgtggcgtaggatgccaagatgaaggaggtaaaagttgccaaactagttaagaactacacctggatctcatcaaagcagttgcaggacctgcccagattcaagagagggagaagtmaactctgcttcttgataggagagtaacaaagtaacactaaaggagagcatgtagcaatagaaaatgttattattgccatctctggaaaacagtcttctacagtcttccctttggacacaacaattcacattccttccacatgggcaaaataaacccactctctctcccaggtcccctaaagtcttattccaatatggcattgtcttgaagtccaggaccttgtcatctaaatcaattacaaatgcagataaggctcctcaggtgctgatcctaaaatctttatgaaaatgcaataggcatagaacagtcatcacagttttggagaaaaacaacttgggagatttacattatgagatatcaagcttacttactctaaactgtaataattaggggaaggtgatatggaacaagaatagtcaaataggcaaatgaaaccaaataagagtgcaaaaatagacccatatatag

SEQ ID NO: 469077 - DNA, 600 bp, Homo sapiens
tgagatgagttgcaattatggttaatgttaagtagttttgtttatgtaattataaattggagggcttggagaattgagcagcatgaattctagcaataatttaactataacattggaggagttaataaactctctagatctcagttgccttatctgtaaattggagaaaataatgttttatccacctgacagcaacagtctgaactagattttttctcctagctgtagatcttcaagtttgaaaaatatggaagctgataattagtctggaaaggacactggacagggattctaatgccttgtgatccagactgtgttccaaatgatgtgtactaagttctgaaggtttatgttctcccaaaatccatatgctaaaatattaactcccatgttgatagtattaggaggtagaacctttgattaagtgttgaaggcagagcccttatgwatgagattagtactcttataaaacaggagcaagtgagctcatttgcccctcccaccatgtgaggacgtcgcaagaaagtgctgtctgctgtctgtgaaccaggaaatagccctcactagacacccaatctaccagcaccttgactttggact

SEQ ID NO: 469078 - DNA, 608 bp, Homo sapiens
gggatgtggtgggtttaaataacatgcctaaagtcatttgagagtgattctggtcctttgacttaagtctttgcactttacactttgcacacctggataatcaaggatcaggtcatatttggagaactaggcagccaggcaggcaaagtgcattaggctgctatcaaaactaagctgtatgtgaaactggaaagttatcctgacaagtccgagtgacctgaagtagggttgactgggtctcaggagcaagtcaggagcctgttttgagaagtgtggtcccaagtcacatcccaactagcaggtgatgtcatgctgagtcrcccaactgttggatcagggtttccaacatcctgtctgtctacagatggggttcattccacagtctcattgtggggtaggatgggatataaggagaaaaggagtctgaaaattaacctcactggtagggagagtaaggctacaagggcagagaaccagacagatcttgttaggtaggaaatcgtctaatatctaacatttagacctggacccactaactgacatcaagcaaatcacttcacgtttccaggtctaagttcctttatcaacaagacaagacaagagtggtg

SEQ ID NO: 469079 - DNA, 558 bp, Homo sapiens
tggtgggtttaaataacatgcctaaagtcatttgagagtgattctggtcctttgacttaagtctttgcactttacactttgcacacctggataatcaaggatcaggtcatatttggagaactaggcagccaggcaggcaaagtgcattaggctgctatcaaaactaagctgtatgtgaaactggaaagttatcctgacaagtccgagtgacctgaagtagggttgactgggtctcaggagcaagtcaggagcctgttttgagaagtgtggtcccaagtcacatcccaactagcaggtgatgtcatgctgagtcgcccaactgttggatcagggtttccaacatcctgtctgtctacagatggggttcattccacagtctcattgtggggtaggatgggatataaggagaaaaggagtctgaaaattaacctcactggtagggagagtaaggctacaagggcagagaaccagacagatcttgttaggtaggaaatcgtctaatatctaacatttagacctggacccactaactgacmtcaagcaaatcacttcacgttt

SEQ ID NO: 469080 - DNA, 596 bp, Homo sapiens
tagtttccttattaaagaaactttaggcataagtgatgtaggtcggggagacctttcatggctgggggcctctggaattataccatatggatagtcatcaagatataggtccakctcccaaattttcatatttgagagaacctcgtggtataatgtgtaggttaatttttttatatggtttgtagggtagctctggttttgtcaaacagtagtcattggaccccacaatcactgagatattttagtcactatggagcgttgtgataattacattaatttaatcttttttgccttaagaagattttaaatgtcctggctctcaaaggattttccactgagctcttttagcttcatacattctttgtctctttaacagagctgatacctcttcaaacacagtaaatctcatattatggctagaatctcttttaaattcaaagaactttaagatggaattgtggaaggagaaacactaacatgtgaaatggcatggatggggctgtatgatattaaagaatcagtaacagcagatttattcatgtgagagatagagaagagtcagcatggctaggctcaaaaatagaggacaaagaaat

SEQ ID NO: 469081 - DNA, 646 bp, Homo sapiens
aggagacaggaggacaacctgggatgggtaatgacaaagaacgatttccgtactcctaagcctctgctctctcagatctcaagccaacttttttcagtgtgatggaagttgttcacattatattattaaatgaaaaacaagtttcagagaagtatgcaatatatactgtcctcctattttttaattaaaaaatgatatatacccatactgtttttgtgtctatataaacaaagagtaacaactctggagttacctctgaagaatggggtagggtggagagattctcacatttcttttctttttctttctttcttttttattttctgagacagagtcttgctctgttgcctagcctggagtgcaytggcacaatcatgactcactgaagcctcgtcctcctgggctcaagtgatcttcccacctcagacaccaagcagctgaaactacaggcgcctgccaccatgcccagctatttttttttttatttttggtataaacaaagtcttgctatgttgcccaggcttgtcttgaactcctgagttcacgcgatcctcccaccttggcctcgcaaagtgctgggattacaggcatgagccactgcacccggccacatttcattttatacattctttatcacgcactttat

SEQ ID NO: 469082 - DNA, 398 bp, Homo sapiens
tggccagctccgtgtcctccagacctttactcatgkccccgcatcgccaggccgagctgcaccttcggtccccgcccgcggcagccgaggtagggcatctccagcgccgactccggggaaggtggacatcgcacggaagggggtgaagggcagggaggatcccagcttgggatgggggtagagggtggcggaccttgcgcggggcgggtgtggagggcggcccaactctcgtggcccctggtgcttccgggagctccgtcctcgctctcggatcccaaggaagaacttgacctttccctgacatcctccagtgcccatggcttctggcgtccacggatggcggggaggggaggggggcgcattcagcgactgcagagactgggggctgtgggccgggg

SEQ ID NO: 469083 - DNA, 381 bp, Homo sapiens
tgtagttactatgaggcacactgtcttcctggctagaggagattctgaaggtgggtggggcagcaagatcaccacgtgtatgaaatgggggcaggctggttggagactgagggcaccagccccaagcactgccatctgccctgtgatgggactctcctgtggcagtggcaacggtcccactgtggaagcaacacatgagctgagaggacttgcctgaactgagccacatgtgccctctgggcctggtcaccccaccacctgcccccagtgtgacccatgcagggcctgttcctgaccctgaacgagaccaggactccctgggctgcatttcctatctgtaaaattgtaggagggtggtkgtggtgggggctcgaacttgcc

SEQ ID NO: 469084 - DNA, 588 bp, Homo sapiens
ctgactctcctccacctataggggacatcaactactatttttttgttttgtttttgagacagggtctcgctgtcgcccaggctggagtgcagtggcacgatcatggcttactgcagccttgacttactgggcttaagcaatcctcccacctcagcctcctgagtagctgggactgtaggcacacaccatcatccctaactaattctaattttttaaattttttgtgcagacggagtctcactatgttgcccaggttgggctcaagcgatcctcccacctctgcctcccaaagtatcgggattayaggagtgagcaaccgtacctggccaggggatatagattgttaaagtgtgctcatctcttttggaagcatactaaagaagaaagggacaaaatataatttttaaacaatggcaggtgtggagtcagtgggattgtgacaaggttaagagtctcggcagagcagagctagcactgtgggtgtcaggagacatccccttgcgtggccccatggcacatgtccacagtccttcccccacaggccttgggaatggcccccagcctcacaacaacggagaactgaagcca

SEQ ID NO: 469085 - DNA, 343 bp, Homo sapiens
tgtctctatttcttttttttaagaagtggcaggaagatcagagagaagcaaagggcctctcctgaggcacgggcaagcacttgcattgcagggtacagcygcagaggaaggggattgggacgtgtgaataggggttctggaggctagggtgaggtgtgagggtgactctggcctttgggccatttcatgccttcatgtcagctgctggttgggctcctggtggccacattcatgctttggtcctgaccccaggcaggctggtggctgcctgtgtggcagccctggtgcccatatcagttggggagcctcctttgtggtcaccactcttgttcttgggcatcag

SEQ ID NO: 469086 - DNA, 343 bp, Homo sapiens
tgtctctatttcttttttttaagaagtggcaggaagatcagagagaagcaaagggcctctcctgaggcacgggcaagcacttgcattgcagggtacagccgcagaggaaggggattgggacgtgtgaataggggttctggaggctagggtgaggtgtgagggtgactctggcctttgggccatttcatgccttcatgtcagctgctggttgggctcctggtggccacattcatgctttggtcctgaccccaggcaggctggtgkctgcctgtgtggcagccctggtgcccatatcagttggggagcctcctttgtggtcaccactcttgttcttgggcatcag

SEQ ID NO: 469087 - DNA, 555 bp, Homo sapiens
ccctgtcaaaaaaaaaaaaaaaaacctctcacagagaacacagaccttacttccccaagtgtatgacactgcaaaaagtggctaggtttttgcaagtctatttgacccaaagtatagctgaaaacataaacacacaaaattaggggtgggggaagaacataatgctagcaataaaacaaaaccaataaaaagraaccaaacaatgatccaagatacaatggattgattatataatgaagtgattaagagtccccattcctggagtggaagagctagaactcaaatctggcagtccaacttcctagctgtgagactttgggcaagttacccttgtttagaattatagtgcatatttctccaataggttctttgaaagcatataaacccttcagagctaaaagaaatttgccaaacaagttagataccaatttacaagtctcctttttagtaaacacagcacctaaagggaaccttcccaagttttagctttatgtttactttcatcatattaaattctggactcttgtcctcaaactcatgaatttagaatgatgt

SEQ ID NO: 469088 - DNA, 555 bp, Homo sapiens
ccctgtcaaaaaaaaaaaaaaaaacctctcacagagaacacagaccttacttccccaagtgtatgacactgcaaaaagtggctaggtttttgcaagtctatttgacccaaagtatagctgaaaacataaacacacaaaattaggggtgggggaagaacataatgctagcaataaaacaaaaccaataaaaagaaaccaaacawtgatccaagatacaatggattgattatataatgaagtgattaagagtccccattcctggagtggaagagctagaactcaaatctggcagtccaacttcctagctgtgagactttgggcaagttacccttgtttagaattatagtgcatatttctccaataggttctttgaaagcatataaacccttcagagctaaaagaaatttgccaaacaagttagataccaatttacaagtctcctttttagtaaacacagcacctaaagggaaccttcccaagttttagctttatgtttactttcatcatattaaattctggactcttgtcctcaaactcatgaatttagaatgatgt

SEQ ID NO: 469089 - DNA, 632 bp, Homo sapiens
aaattatagctcttttctcaaactactcccacccctataatttatgccaaagtgttctgaaaagaaacacaggcaaaatggttatcctagggctaaaaatcctgattawacctaccttgaagcttttaatccaggaccctacttcaccacccgcctgctctgtcactttctctacaaaggaaggacacgaagtaagacttccaaaagaacaaaacgtttattttttaaatttaagaattatgggaaacctaagtaatgggaattgcatcctcatcggggtcttctggcaagtcggaagcaccaccctctcctgtagctcgatgcttctctagtttagcaatcaattctttcgctggattgaagacgccattggtctgctggtcacagacatagcagcgcggggtggtgcggaaatgctgcagtgcacagctctcgcagaaataatgcctgcacttggtgacaactgggttttggaagctctggcgacagatgaaacacttgaatggtatttcctcatcatcgcttcccacttcatagttttcatcctcatagacaccatagcgaccctcatcaagctcacgttcgatctgccacccatgcttgtaatctgaacggtcatggaggaatttgca

SEQ ID NO: 469090 - DNA, 543 bp, Homo sapiens
aatgtattcctaactgatacaaatgaattttccagccagcataataggcaatgtggctataagaagccagtcaaaagaccctagaaacttgccactgaaatattctggttcaaggaccaacaggattcacagcacctggaagctggttagaaatatatagtctcaggtcccaccctgaacctcctaacaaaatttacattttaacaagttctccaaatattcattccacaataataaaaatttagaaacacttctgyagaaaatcctcgtggaacagttagactttctaaccttttgatttaaggacatttgtccgaaaatgctctaaagctgcaaaaccagaacctatccgtgcaagcagattttttttttttttttttttgatgcttgctggactccattgtgagcctcataaggcaaccagaatttgctgttagcagctctctaaagtggttgcaagattacccaacacccagaaacgaagcctaaacatccatcccttgataaacacatctaggccctgaaaagttcaagctctgtgtt

SEQ ID NO: 469091 - DNA, 658 bp, Homo sapiens
tttcctctgcctaaagttccctcaccccaattcctccatctctgcacatctaaaaccactagggctacctcaagcttagcctgttstgtgcaacctttcctgatatctctacctaatccttcttctgaacccctatagaacttatccccataatgaggtcaccctaacaacaatcaaccaggtgctgccagctctgtcccacacatcaatatgaccttcagcccctgcctaagttccattgtagaagtgtctctagaagttcccagggtgcctcacatgtactccctgaataaggacacttctttcaggtcttgccagtgctctgccatcttcccccaagcatctgctgggcaccattgctcctgacacagctagggagctcctaccacgtcaaggtttacagtgttctggagtaagttgcagaatgaacctgcaactcctccttactgaggagtcagagtccactctatcagggagatctcaaaagaatgttgttgatgctctaatggtctttgaggtactgtaaaacagttctttctgcttattcccccaagccccatccctatggagccataggattccaatgttaggtaaatgtgacagagcattgtgctttacttggaattgacccttctgcccaaaatgctgcattcttact

SEQ ID NO: 469092 - DNA, 668 bp, Homo sapiens
aatacacacctacggttgcgtggtatagcctgctcagctagaatcacaatctcatgattactgttcatgtttgtaaactatgacacaggcaaattgcaggatcagcatcaaagatgttagctgtgactaagagattcctgctgtgcaagttgaaaaacaaatgagaacatattatgttctttttcattagttttgataaatcaatttatttttttcaacgtattctttttaactagcaataatattctcaactgatgaccctgccttatactctcgaactgtgctgcccaatacggtagccactagatacacatggctatttacatttaaattaatttaaattaaataaaatccaaacttcagtccctcagttgcaccaaccactgaccatgttcaatagccacatgtggctgttgtactggacaatgcagatataaagcatttctattattacaaaattttttattagatattccagctctaggggtgaaaatagtgtgattgttttttgatgtgtcaacttgactaggttacagtccccagttattcaatsaaacactaatctaggtgttgctgtgaaggcgtgatttagtaggtgtgattaaaatgcataatcagttgacctgtagtaaggaagattatcctagattattcaggtgggccaggtc

SEQ ID NO: 469093 - DNA, 599 bp, Homo sapiens
ttgatcctctccacaagatcagaactgctattatccctattttacagtggaaattcaagccccaagagcttcagtaaacttgcaaactccctgattttagagtctatgctcttaaccaacctggatcagcaaactgtaatccctatgctagaattaggcaaatatttccctggatgagacgctctaggtgcagccagctgagcactaactmgtcagatgtttcttttcatcatgtgttccctgggacctacctggaaatttcaaaggaaggtaagagagaacttctgcaacccagctcctctctccaggctctttaagcctcctcaccttattgctctgggttccaggggtcttctgtgagctcccaatcaagtttagcattctctcctgtgcttgtgatgttgtgcagaggagtcctcctgacatgatcagctgccaccccagccacctgggtcccagatctcaagataactggagtgacccaaatgcagatcttggtcttctgaatccagttgtttaataagtgatttgtggctggacagttacataactgtagagatcacccaggtttgtatggggtctcacttccctctccaccc

SEQ ID NO: 469094 - DNA, 312 bp, Homo sapiens
ttattgaatgaataagtaagagttttagttttctcttgtgaaaaatactgttcccaaataaatgtcaaatgaattctgtwgagttttttcattgagcctgaattctggacttcatgtctgaccttttgcagcctgaatttctaacaggtttcctcaaattagagtgtgtattagaatcacctgggggaactagcagaccatgcagactccttcctgggccatacttcctagatattctcattcagtaggtaaggtccagccatctgggtttttagtaagtgcttgaagtatttgtgtaaggtgctcatagga

SEQ ID NO: 469095 - DNA, 312 bp, Homo sapiens
ttattgaatgaataagtaagagttttagttttctcttgtgaaaaatactgttcccaaataaatgtcaaatgaattctgttgagttttttcattgagcctgaattctggacttcatgtctgaccttttgcagcctgaatttctaacaggyttcctcaaattagagtgtgtattagaatcacctgggggaactagcagaccatgcagactccttcctgggccatacttcctagatattctcattcagtaggtaaggtccagccatctgggtttttagtaagtgcttgaagtatttgtgtaaggtgctcatagga

SEQ ID NO: 469096 - DNA, 497 bp, Homo sapiens
tgccgctgctgccgggaggtgccggccccacgcggcgcctgagcctccagagcgcgaagcctccaagcctgctgcaggccccgcctccttgtcagttgcgcgtccagcgccacctgctggcgccccgcgtccgcagggttcgggaacgtccttggaggctaagactccccaagtcgcactccggcctctcccagtttcctctcaaatgccgtctgccctgcccttgaggtccgtttcgcgccctccaacccctcgccttttgtttaatctccactaaggaacgtttgtgcrtttctctagagcagtggttctcagacttcagcgtgtataagattacccgggggcatattaaaacaccgattgttgggctgtccacccacagtttccggttcagtatgtctgggatgaggtctgagattctcatttctaacaagttcccatgagatatggaagcattcccagatcacactttgagatagaccgtttagagcttacaa

SEQ ID NO: 469097 - DNA, 609 bp, Homo sapiens
ctgccgctgctgccgggaggtgccggccccacgcggcgcctgagcctccagagcgcgaagcctccaagcctgctgcaggccccgcctccttgtcagttgcgcgtccagcgccacctgctggcgccccgcgtccgcagggttcgggaacgtccttggaggctaagactccccaagtcgcactccggcctctcccagtttcctctcaaatgccgtctgccctgcccttgaggtccgtttcgcgccctccaacccctcgccttttgtttaatctccactaaggaacgtttgtgcatttctctagagcagtggttctcagacttcagcgtgtataagattacccgggggcatattaaaacaccgattgttgggctgtccacccacagtttccggttcagyatgtctgggatgaggtctgagattctcatttctaacaagttcccatgagatatggaagcattcccagatcacactttgagatagaccgtttagagcttacaaaccctcccacacgttagcttatttatttttattttattttatttttttttgagacggagtctcagtctgttgcccaggctggagtgcggtggcgcgatcttggctaactgc

SEQ ID NO: 469098 - DNA, 497 bp, Homo sapiens
tgccgctgctgccgggaggtgccggccccacgcggcgcctgagcctccagagcgcgaagcctccaagcctgctgcaggccccgcctccttgtcagttgcgcgtccagcgccacctgctggcgccccgcgtccgcagggttcgggaacgtccttggaggctaagactccccaagtcgcactccggcctctcccagtttcctctcaaatgccgtctgccctgcccttgaggtccgtttcgcgccctccaacccctcgccttttgtttaatctccactaaggaacgtttgtgcatttctctagagcagtggttctcagacttcagcgtgtataagattacccgggggcatattaaaacaccgattgttgggctgtccacccacagtttccggttcagtatgtctgggatgrggtctgagattctcatttctaacaagttcccatgagatatggaagcattcccagatcacactttgagatagaccgtttagagcttacaa

SEQ ID NO: 469099 - DNA, 455 bp, Homo sapiens
tctagcttctgccctcaggtaaacattccctgttaaaattctaaatgttcatctgcttcctctaaagagattggtaaaaaggcataaaacacctaagaatcagtgttacttgtaatgagcccagggctgctgcagggggcaccatatacatagaatagcaggtgagcggggtccccagggccgaagtattatgctctaggccagaaaaaggatatattttttttttatttctgggatacagataatgtattttcacataacatccacgtttcatgaattaagccaacaaatatttaccaagtatcctttaaatcctttagtatttaaagtatcattttttrcaatatatatatgagggccaacttatttttgcctgtcatgaaatcaaaggccaattaaataatcacttccaaatttatatttctgttttataggttttctttattcaaggcatt

SEQ ID NO: 469100 - DNA, 355 bp, Homo sapiens
tcccacatcccccacatgcaytgccatcctcaatacccacctgcctgcagggagtgccaagtcaagcactgggaaaagcatggaaagacttgtgtcctggcagcccagggtgacagagccaaatgagggctgcagttgctgagggccgaccacccatgccaagggaatccacccagaatgcacccctgaacctcaagatcacggtccagcctctgccggagccccagtctccgcagtggagagcagagcgggcggtaaagctgctgaccgatctccctcctcctcaccccaagtgaaggctcgagacttcctgccccacccagtgggtaggccaagtgtgttgcttcagcaaacc

SEQ ID NO: 469101 - DNA, 564 bp, Homo sapiens
cctgtttcatcaggacacccccagagagctgccccttgctgagcagaggtrtccagtgagccatccatcagaagcactggcagtgctggtaaaatcacagcttccatagccccatcacactctattctctaaatccccatgcagtaggcctgggcatgacctgggagtcagcattataacatatatcccaggaggccccactgcttagctgggtttgggaagccctgctcagtgaatttgcctttgataagcagcccagaagcctccttaaactgaagctattccttggccatctttttggtagataaaaagtggcagcaacagggaatttgatttcatatggatggatttacattaattggagaaaacaaagtctagacattttgaaaaaccaagggacaaggtggccaagaatgctaacattgtactgtggcctttgggctctcagcacctgattagagaccaggacaaacctgctcaggcctggcctgaggccgggatggttctaggttgacttcgaccagcaggtgatcttctctcgagcctagaataacatcttttgtc

SEQ ID NO: 469102 - DNA, 621 bp, Homo sapiens
aactttcaatttcctgaacaagtgtagaagggaaatttaaactgattttagttatctgacttttaaaaaataaaagtataataacaggacctggattaatttgggctaaatagctgaagggaggcagggcagagctgagactccttgcagaatccatgttactgatgttgctgatgcctgatgtgcagatacttgtcagataattataaatgtatacaaaacmtgaagacatttcagagctcttcatggccttttctaacttgattgaaaacagattcctatttttagtggccctgttcttgcttatgatcataataataatacactaaaactataagccaggtactgcagaccttaacagtaatagtgaaatagtcctacttcttttagaatttcaaattgttttgacatggaatggaatactaagctttgtttaatgtacgtatcctacttgcctacagataacactttatattttgttcatgtgcttttgttctgtgtgtaccaaaatcaaaatcttaacctgggtaaccagctcagcaatactgcagttaggaagatgtacagaaacggggagagagtaatgggagaagcagtgactgctttgtgccaggtgttttt

SEQ ID NO: 469103 - DNA, 613 bp, Homo sapiens
agtggccactctgcatgcacggtggtaacatcaaatgatcccccacaatactctgagctaatacatagaggatacccttttgtatattggattttttaaaccaaatacgtgtatttttcagaaatattttaaatgcaaaaaaaattgccaataaagtcttcgtcctttttttttttttttttttttgagacctagtctcactctgtcacccagcctggagtgcaatggcacgatctcagctcactgcaacctctgcctcccaggtttaagtgattctcctacctcagcctcctgagtagctgggactacaggcacccaccaccacgcccagctaattttttctattttttagtagagacagggtttcaccatgttggccaggctggtctcgaactcctgacctcaggtaatccacccacctcagcctcccaaagtgctgggattccmagcgtgagccaccacgcccagccactcctttccagaggtaaaaattgagaatagatggaccctatgtaacagacttacatgatcaaatttaatgtatacatttcagttttcagttacgacattatactcttgaagaatatatgacataaaaaccaaaatgaaagct

SEQ ID NO: 469104 - DNA, 613 bp, Homo sapiens
agtggccactctgcatgcacggtggtaacatcaaatgatcccccacaatactctgagctaatacatagaggatacccttttgtatattggattttttaaaccaaatacgtgtatttttcagaaatattttaaatgcaaaaaaaattgccaataaagtcttcgtcctttttttttttttttttttttgagacctagtctcactctgtcacccagcctggagtgcaatggcacgatctcagctcactgcaacctctgcctcccaggtttaagtgattctcctacctcagcctcctgagtagctgggactacaggcacccaccaccacgcccagctaattttttctattttttagtagagacagggtttcaccatgttggccaggctggtctcgaactcctgacctcaggtaatccacccacctcagcctcccaaagtgctgggattcccrgcgtgagccaccacgcccagccactcctttccagaggtaaaaattgagaatagatggaccctatgtaacagacttacatgatcaaatttaatgtatacatttcagttttcagttacgacattatactcttgaagaatatatgacataaaaaccaaaatgaaagct

SEQ ID NO: 469105 - DNA, 604 bp, Homo sapiens
aatatcaaaatgttgacagtaattgcctcttggataagattaacaattgggagaatgaaaggacatgagatacttctacattttattctattcacctacctgcaagcaacaccaacttgcagccctgtgagtgaaccatcttcagggcggaccctgtagccctatgtgttgcttgaatcttttagaagaaaaatatattcatgtcataaaaattaatatttgagtaatgttaaaagtagaaaaactttttcatgtgtataatttctcactgaacttaatgtaaaatgggatgtattcatagtaggacatgcctttctagaaaggtgattgtctcattctgttttctgttgcctataacagaatrcctggaactggataatttatagagaaagcaatttattccttgcagttatagagactaagtccacagtcaaggggcctcatctggtgagggccttcttgctgatggggactctctacagagtcctgagatggcttagggcttcacatggcaggagagttgaacatgctagcttctcttcctcctcttataaagctactggccccactcctatgatatgtatcaatccattaatccatgaat

SEQ ID NO: 469106 - DNA, 604 bp, Homo sapiens
aatatcaaaatgttgacagtaattgcctcttggataagattaacaattgggagaatgaaaggacatgagatacttctacattttattctattcacctacctgcaagcaacaccaacttgcagccctgtgagtgaaccatcttcagggcggaccctgtagccctatgtgttgcttgaatcttttagaagaaaaatatattcatgtcataaaaattaatatttgagtaatgttaaaagtagaaaaactttttcatgtgtataatttctcactgaacttaatgtaaaatgggatgtattcatagtaggacatgcctttctagaaaggtgattgtctcattctgttttctgttgcctataacagaatacctggaactggataatttatagagaaagcaatttattccttgcagttatagagactaagtccacagtcaaggggcctcatctggtgagggccttcttgctgatggggactctctacagagtcctgagatggctyagggcttcacatggcaggagagttgaacatgctagcttctcttcctcctcttataaagctactggccccactcctatgatatgtatcaatccattaatccatgaat

SEQ ID NO: 469107 - DNA, 623 bp, Homo sapiens
gcgtcctgtttattataagttacattcttaccaagcccaaagcaatggatgctgttttttgttttttsttttttcttttttttctgagggaacagaacaaataaatattcctgagagtctaagtcttagggagaaatcaaggaaatgactggacttatatgggaaacccatgaagggacctttttaataagcttcaaaagaagccagaggctgttctcctcagggggaaggataactagagtaagcgacctgcacatagagtcctattaacctgtgagaaaatgaccctcttcagatctccttgagagggtcagaggacaaaagtgaagtaattcaatagcaataaatgtgggtttcaagtgccacacaagaagtcttcagttactttatacccccacagtccagttgccttcggattcaattgacctgagataatatatggtctagtcagagaggagtgagacctgttatttctgacacttcacagtctcatccgtggtacactttttatttaaaaccttgttttttttcataattggtaaaataagggcagtgttcatgcaggttgtccatccctcccagctcagttccctgtaaggagtttcaactgtgtgtcccacaca

SEQ ID NO: 469108 - DNA, 568 bp, Homo sapiens
aggtgaagttgaaaatgaagatatacataccrtataaacacaaaggtttctattcataagtcttgagtaacacctgcaaaagaatattcattgaactgtgtctatattagcaaaaatgtaggaaaaaattccaaaagtctgttgatgagaggataatgatttattttagacaacagaatactatccagcattgaaaataagtaaatgttaactacatttttcaacctggataaatctcacaacgtaagtaaatgttagccacatttacatacaaaaataagtaaatgttagctctgtttatcagccaggatgactctcacaacataatggatatctaaatacatacatatatacatatgtacatagaaaaacagagagtgaaatacccattgtgtaaaattaaatgtgtctaaatattcctatttttgaaatatattaatatatagatagtataaaatatatacacaaatatgtgaataataataagccaagtgatatgaccactgatgttggttattttgatatttcattgggatttctaaatcttttaaattttaaaaaataaatc

SEQ ID NO: 469109 - DNA, 595 bp, Homo sapiens
caaaatgcacccaatttcaaggataagagaaaagccttcaatccygagagggcatagcagtgttttggaaaagcatgtagacctggaaatatggctgtgatcatttttcaaatatacaatatagtataactctaaacataaaagaacaatataaaaagcaaatagagccactttccatagctactgtgtctttctcgatataatcacactattagctgcatgagatcattgattgactcattgcttactaagagggggttactagctaaaagccaagaaaagaatttaagtcatatgccaggcatcagcatgagttatccatacagtaggctaagcacaggaaatactgtcatcactgcacaaaatgcttgttgtgttttcttggccacatggcaaataaccattcataaactttctgtaacaaagactaatctagaaattgtgtcagaaggccttgaatgtattcttgcaattgaaagaccatttcaagctatttgtcccagccaccacagggacctcttttactaaaggcagtgttaataaatcttgacgaaaactttctaatgattttgcagagccgtttcagtaaaggtcc

SEQ ID NO: 469110 - DNA, 523 bp, Homo sapiens
aaaatgcacccaatttcaaggataagagaaaagccttcaatcccgagagggcatagcagtgttttggaaaagcatgtagacctggaaatatggctgtgatcatttttcaaatatacaatatagtataactctaaacataaaagaacaatataaaaagcaaatagagccactttccatagctactgtgtctttctcgatataatcacactattagctgcatgagatcattgattgactcattgcttactaagagggggttactagctaaaagccaagaaaagaayttaagtcatatgccaggcatcagcatgagttatccatacagtaggctaagcacaggaaatactgtcatcactgcacaaaatgcttgttgtgttttcttggccacatggcaaataaccattcataaactttctgtaacaaagactaatctagaaattgtgtcagaaggccttgaatgtattcttgcaattgaaagaccatttcaagctatttgtcccagccaccacagggacctctttta

SEQ ID NO: 469111 - DNA, 595 bp, Homo sapiens
caaaatgcacccaatttcaaggataagagaaaagccttcaatcccgagagggcatagcagtgttttggaaaagcatgtagacctggaaatatggctgtgatcatttttcaaatatacaatatagtataactctaaacataaaagaacaatataaaaagcaaatagagccactttccatagctactgtgtctttctcgatataatcacactattagctgcatgagatcattgattgactcattgcttactaagagggggttactagctaaaagccaagaaaagaatttaagtcatatgccaggcatcagcatgarttatccatacagtaggctaagcacaggaaatactgtcatcactgcacaaaatgcttgttgtgttttcttggccacatggcaaataaccattcataaactttctgtaacaaagactaatctagaaattgtgtcagaaggccttgaatgtattcttgcaattgaaagaccatttcaagctatttgtcccagccaccacagggacctcttttactaaaggcagtgttaataaatcttgacgaaaactttctaatgattttgcagagccgtttcagtaaaggtcc

SEQ ID NO: 469112 - DNA, 629 bp, Homo sapiens
ataagcagactgcttaagattacttagtcctcaaactcaaccaaaaatcagatataataatcctttccagcctagtctcaggtttgctgtaaagycaagcctatgattatgtcaaagatgaccactttcagagattctgtccaataggtatcatgtggaaccctggtgtctgtattgtttaaatgctccaggattgagaggcattctggttaagttctgatcaatggtttccaaacctagccactcagaaccaagaaagctcttagaaaatgcatacttcttggccttatcccaaagattctgattcagtagggcttggttagaattccggattctgtattttaaaaaagatcctcaggagattctgatgtaaaactagatagggactccctatgctataggattctttttagcaacaaaattctgtaacttataatcagtaacttcccccctccctcgctctttttgttgtttttggagggaggaagggtgttctttggtgagcaagtctatgcaaacttaaccacaaagtccaccaagctgagaggccaaagaaagaggctgacatatctggtttctcagaaagaaacatttaatgggggcttatgaacagaggccacgtcacaggc

SEQ ID NO: 469113 - DNA, 670 bp, Homo sapiens
aataatttggacaaataatcaaatatgccacatttatcgaatataagcagactgcttaagattacttagtcctcaaactcaaccaaaaatcagatataataatcctttccagcctagtctcaggtttgctgtaaagtcaagcctatgattatgtcaaagatgaccactttcagagattctgtccaataggtatcatgtggaaccctggtgtctgtattgtttaaatgctccaggattgagaggcattctggttaagttctgatcaatggtttccaaacctagccactcagaaccaagaaagctcttagaaaatgcayacttcttggccttatcccaaagattctgattcagtagggcttggttagaattccggattctgtattttaaaaaagatcctcaggagattctgatgtaaaactagatagggactccctatgctataggattctttttagcaacaaaattctgtaacttataatcagtaacttcccccctccctcgctctttttgttgtttttggagggaggaagggtgttctttggtgagcaagtctatgcaaacttaaccacaaagtccaccaagctgagaggccaaagaaagaggctgacatatctggtttctcagaaagaaacatttaatgggggcttatgaacagaggccacgtcacagg

SEQ ID NO: 469114 - DNA, 669 bp, Homo sapiens
aaataatttggacaaataatcaaatatgccacatttatcgaatataagcagactgcttaagattacttagtcctcaaactcaaccaaaaatcagatataataatcctttccagcctagtctcaggtttgctgtaaagtcaagcctatgattatgtcaaagatgaccactttcagagattctgtccaataggtatcatgtggaaccctggtgtctgtattgtttaaatgctccaggattgagaggcattctggttaagttctgatcaatggtttccaaacctagccactcagaaccaagaaagctcttagaaaatgcatacttcttggccttatcccaaagattctgattcagtagggcttggttagaattccggattctgtattttaaaaaagatcctcaggagattctgatgtaaaactagatagggactccctatgctataggattctttttagcaacaaaattctrtaacttataatcagtaacttcccccctccctcgctctttttgttgtttttggagggaggaagggtgttctttggtgagcaagtctatgcaaacttaaccacaaagtccaccaagctgagaggccaaagaaagaggctgacatatctggtttctcagaaagaaacatttaatgggggcttatgaacagaggccacgtcaca

SEQ ID NO: 469115 - DNA, 474 bp, Homo sapiens
gtggaaccctggtgtctgtattgtttaaatgctccaggattgagaggcattctggttaagttctgatcaatggtttccaaacctagccactcagaaccaagaaagctcttagaaaatgcatacttcttggccttatcccaaagattctgattcagtagggcttggttagaattccggattctgtattttaaaaaagatcctcaggagattctgatgtaaaactagatagggactccctatgctataggattctttttagcaacaaaattctgtaacttataatcagtaacttcccccctccctcgctctttttgttgtttttgsagggaggaagggtgttctttggtgagcaagtctatgcaaacttaaccacaaagtccaccaagctgagaggccaaagaaagaggctgacatatctggtttctcagaaagaaacatttaatgggggcttatgaacagaggccacgtcacagg

SEQ ID NO: 469116 - DNA, 425 bp, Homo sapiens
accctctttttctttaagatgctggtccctggaaatcactttctgccagtggtgagcatgtaagtgttaagtttttgatctcctgggagtagggcacaggaagaaaatgtcaataatgctaatgcattttgcactgttgaatgaagaacactgtagcttcactttcaggagttaacatcaagcagtcagacctgggtactgtgcagaaaacatgtttggcacacactgaccaaacatcaggctgtgtcaccrttgtgtggtgttcctgccggaagaattctagcacgctatttggggacataatttcagtgggaaatatgccactgtccgatttttttttcctctttgcagtggaactaggacagttgattcaacggagtattttttttccttttgctcagtcctgatttaaacaggtcaaagat

SEQ ID NO: 469117 - DNA, 615 bp, Homo sapiens
ctcttgtgagacttttcctttcatctgggctgagatcagacggmgttctgcattcaccttgctaaatgtcttctctctggaaatggtctgtagagtttacactcacctcctcttcctctgtcctttcagcatgtagtaatttaaaaaacagactacatatagctctgtccagtatcacagtttggagacttttaaattcttatgggttatgtgttaaataataatttattcagttatcctcttaagttacaataaacagatcagttcaggattaagaaacatttgtcttgaggaaccaaaatgatctgctctttatactttgatccttgtttggcctttccattcttacagatttctcttctttccattaaattcatcttttgaatttgaggcattcataattaagacttttagctattcatttatttcatataaagtgaaatgtgagcatgaacgatttttcactcatccttgctcctcaatttatgtgtggctgggtatctggcttactaagcctaagcatcctcatctatatgataggagtaagagctcctagcttgagggattcttttcttatttgactttttgcagagatgagtctgtcttaaaatggac

SEQ ID NO: 469118 - DNA, 582 bp, Homo sapiens
ctgttaagagagaagttggctttaaagcacatcagtaagtagtagacacaggcaggattaggagtttggatttcattttcattgcagtgaggtcrttgaatgttggaaagtgacatgattagtctcacatttcaaaaagatagttctggttgtttggtagtaaatggctttagggcatcattagtggaggcagagaaaaccagttcagaggctatcatacattttgaaggtgagagataataatgacttgaataatgtaggtagcagtaaagaaggaggcagatagattttgatgtggtggaagctgtgctgtcccacccagattcccctcaggactgagacactcattccctcagctctggggagagtaggctgccaacaacccagagcttagtccacctccaagacttgtcctttcctaagggaagtgcctcatccatcatgcctctgggttggccacccccattaactgctcaatgagaaggaagtacaaaggcccttgccttaatttaggacaaccctgaaagaccttcctagctccatagcttcctgtggaatcagttgaggcctgtgtcgccactg

SEQ ID NO: 469119 - DNA, 647 bp, Homo sapiens
tacaattcatattatttgaaagacatctaaatgttgaaaagagcaaaatattattgaaagggaaaattgatgcatagcatgacaaaggaataatgtgttcaacttaatcaaatatttgtgaaatatttatctctcatatatccatatggatatatacacacatatgtacgtaaaatatttaattcattctttctttcctttattaactctttatsaagcccttatcatttgccaagtaattttctagtgaagagtgggatgcatttgcaaatgaaatggttctcttttctagagagcttatattcatgtaaaaaaaacagaaaataaataatatttgagtataaaagagttcactaaagatgtgtgggttggatacaaaaatttgaacattgtcagcatatagatgttatataaatgcatgatgcgaaattgcattctcaagaatattactgggtgtagaaaagaaaaggccacaggctaagcacgttggcactcaggagctaggcagaaatcagcaaagaaagctgataagaaccaacaatgaggtaagaggaagatgaagagatgatagtgttttggaagtcaaatgaagaaagtgtaagaaatgtgttgaatggtgcaaataatttggtaggatgaggactgaa

SEQ ID NO: 469120 - DNA, 647 bp, Homo sapiens
tacaattcatattatttgaaagacatctaaatgttgaaaagagcaaaatattattgaaagggaaaattgatgcatagcatgacaaaggaataatgtgttcaacttaatcaaatatttgtgaaatatttatctctcatatatccatatggatatatacacacatatgtacgtaaaatatttaattcattctttctttcctttattaactctttatgaagcccttatcatttgccaagtaattttctagtgaagagtgggatgcatttgcaaatgaaatggttctcttttctagagagcttatattcatgtaaaaaaaacagaaaataaataatatttgagtataaaagagttcactaaagatgtgtggrttggatacaaaaatttgaacattgtcagcatatagatgttatataaatgcatgatgcgaaattgcattctcaagaatattactgggtgtagaaaagaaaaggccacaggctaagcacgttggcactcaggagctaggcagaaatcagcaaagaaagctgataagaaccaacaatgaggtaagaggaagatgaagagatgatagtgttttggaagtcaaatgaagaaagtgtaagaaatgtgttgaatggtgcaaataatttggtaggatgaggactgaa

SEQ ID NO: 469121 - DNA, 647 bp, Homo sapiens
tacaattcatattatttgaaagacatctaaatgttgaaaagagcaaaatattattgaaagggaaaattgatgcatagcatgacaaaggaataatgtgttcaacttaatcaaatatttgtgaaatatttatctctcatatatccatatggatatatacacacatatgtacgtaaaatatttaattcattctttctttcctttattaactctttatgaagcccttatcatttgccaagtaattttctagtgaagagtgggatgcatttgcaaatgaaatggttctcttttctagagagcttatattcatgtaaaaaaaacagaaaataaataatatttgagtataaaagagttcactaaagatgtgtgggttggatacaaaaatttgaacattgtcagcatatagatgttatataaatgcatgatgcgaaattgcattctcaagaatattactgggtgtagaaaagaaaaggccacaggctaagcacgttggcactsaggagctaggcagaaatcagcaaagaaagctgataagaaccaacaatgaggtaagaggaagatgaagagatgatagtgttttggaagtcaaatgaagaaagtgtaagaaatgtgttgaatggtgcaaataatttggtaggatgaggactgaa

SEQ ID NO: 469122 - DNA, 647 bp, Homo sapiens
tacaattcatattatttgaaagacatctaaatgttgaaaagagcaaaatattattgaaagggaaaattgatgcatagcatgacaaaggaataatgtgttcaacttaatcaaatatttgtgaaatatttatctctcatatatccatatggatatatacacacatatgtacgtaaaatatttaattcattctttctttcctttattaactctttatgaagcccttatcatttgccaagtaattttctagtgaagagtgggatgcatttgcaaatgaaatggttctcttttctagagagcttatattcatgtaaaaaaaacagaaaataaataatatttgagtataaaagagttcactaaagatgtgtgggttggatacaaaaatttgaacattgtcagcatatagatgttatataaatgcatgatgcgaaattgcattctcaagaatattactgggtgtagaaaagaaaaggccacaggctaagcacgttggcactcaggagctaggcagaaatcagcaaagaaagctgayaagaaccaacaatgaggtaagaggaagatgaagagatgatagtgttttggaagtcaaatgaagaaagtgtaagaaatgtgttgaatggtgcaaataatttggtaggatgaggactgaa

SEQ ID NO: 469123 - DNA, 638 bp, Homo sapiens
agcagtgacattctcggccagacgctggtcctcccacacagccaggcggcagcagacccagctcccactaggctrgcccggccggcagctttccatgcccaaggacttgggaacaggcaaggagtcagtcatcctgtccctcccatctgccctagatccctcagcctaggtcactcaggcatccggaggccatggccttctccctaccacttaggcacagcactggctgggccatgcctccacaatgggcactaattgtcactgagaaaccacagggctgtcagccatgcctcccacagagactgctttttggggggacaggcagatggccagggtggggactggaggaacaagaatggccaggagccattctcttaagccatcacccactctgctgaacagcacccatcgtggcaaaactctggcagcgtggatgtgagcagggtatgccttaccatccttcagagggtcctgggggacatggaccactcagcctccaaccctgccatgcttcccaggcgctatgcctcagtcccactggagctagcagccatgataagcagaggaaccccaaacacagataacacctgaggccacgggccagtacacatggcctacggctgtgatcagagtacatt

SEQ ID NO: 469124 - DNA, 591 bp, Homo sapiens
ctcatgctaccttttctcagcaaaggctcttcaggatgggacactccaagtttttaactcccagcaacagttcagctcacagcgagacccggccctctgctgtcactgaagtgtgtgtttgtttaattagggcgccgagtagagcctcatcctggtggcagatgttgccatgtgtagtataataaataaaagtctttataggacccagcaggcagtagagccttcagttagcagatggcgaaatattaaactggcagagcaataacttaactgcctgaatcagctggtccctgcccggatttgctccaacatgaatcaacttcatataggaggtgtcgctcagcctcagatgtgtaccctcacctgccctcrctcctggtccctgctaggaccatgtttgccttggcataccactattaaagtcagattactgggtttaataccattattaaagtcagatacataagtttttttataaccttattagctggtcaaagagaggtgcttgctgggctggaccgtagggttcttttacaggggaaggaaatgcagtaagcctgtggatgtcctctgtgccagtttctgcttggc

SEQ ID NO: 469125 - DNA, 568 bp, Homo sapiens
cagacaaagttcacagctcttttttggatttttttttttgtgtgtgtgtgtatggccttattttaaaaacatatctctccaaaccatggctgtgtctgtacatctttttctcatcaagtaggttattagctctttaaggtcagggaccacatgttatccactttggtaccctgtccatttgcttctgtttctcagtctagcgcttgccttcatctccattgccactattcaagygcacaccttctatcaccacccacctagaacactgaaccagtgtcctacctgctgggactccctgcatctgctctcgtgccacttacaatccagttttcccatagcagtgaaagggattatttgaaatcacaaatcaaatgtgccatttctttccgtagctcagcaagatctggccctcgcctgcctctctgacatcatcccagtgaactcatccccattcctcacagcacttctctctgatcccttttatcacatcattctgcataacagtttggattattgcccagcaagtgttgatggcctccccgctccaattgtggatggtatttacttc

SEQ ID NO: 469126 - DNA, 568 bp, Homo sapiens
cagacaaagttcacagctcttttttggatttttttttttgtgtgtgtgtgtatggccttattttaaaaacatatctctccaaaccatggctgtgtctgtacatctttttctcatcaagtaggttattagctctttaaggtcagggaccacatgttatccactttggtaccctgtccatttgcttctgtttctcagtctagcgcttgccttcatctccattgccactattcaagcgcacaccttctatcaccacccacctagaacactgaaccagtgtcckacctgctgggactccctgcatctgctctcgtgccacttacaatccagttttcccatagcagtgaaagggattatttgaaatcacaaatcaaatgtgccatttctttccgtagctcagcaagatctggccctcgcctgcctctctgacatcatcccagtgaactcatccccattcctcacagcacttctctctgatcccttttatcacatcattctgcataacagtttggattattgcccagcaagtgttgatggcctccccgctccaattgtggatggtatttacttc

SEQ ID NO: 469127 - DNA, 251 bp, Homo sapiens
atgcatttgaggcagcaatgacttctttctagggggtttatgtgaggagggatttttctttttgggaaaaaccctgaggtacacgtattcaaakgaaatatttgttgacttggatggaaagggcctgtcttcagctttcgttctgctctgcctggctgcctctcagtgttaggttcaatgcttgaggctgtgccaagttgatttccctgtgagagcagacgcctgatagtagggcacagtgccagtcccgt

SEQ ID NO: 469128 - DNA, 599 bp, Homo sapiens
gctggggccctggttaattacactcccagtagagggaggtcgatgaggcccattctcagggccaccacrtggtgagccatgcagcagtggcctggcagaacatttgtctgggttcatacagtatttacattaaaaaaaatcagggctgggtgctgtggctcacacctgtaactccagcattctgggaggccaaggcaggcagatcacttgagattaggagctggagaccagcgtggccaacaagggggaaacctcatctctactaaaaatacaaaaattagctgggtatggtggtgcacccctgtaatcccagctacttaggaggctgaggcaggagaatttcttgaatgtgggaggaggaggctgcagtgagctgcgatcatgccactgcactccagcctgggcaacagagtgagactcttgtctcaaaaaaaaaaaaaaaatcagttgccagcattcaacaaactgtgtattttacatctttaaaaacccctggatttcctgcttctctttaaaaaatagtggcagtttggcaacattgggagtccattccacaaatcttgcaaaattgagtcctcgctgcctccttagataaggtg

SEQ ID NO: 469129 - DNA, 599 bp, Homo sapiens
gctggggccctggttaattacactcccagtagagggaggtcgatgaggcccattctcagggccaccacatggtgagccatgcagcastggcctggcagaacatttgtctgggttcatacagtatttacattaaaaaaaatcagggctgggtgctgtggctcacacctgtaactccagcattctgggaggccaaggcaggcagatcacttgagattaggagctggagaccagcgtggccaacaagggggaaacctcatctctactaaaaatacaaaaattagctgggtatggtggtgcacccctgtaatcccagctacttaggaggctgaggcaggagaatttcttgaatgtgggaggaggaggctgcagtgagctgcgatcatgccactgcactccagcctgggcaacagagtgagactcttgtctcaaaaaaaaaaaaaaaatcagttgccagcattcaacaaactgtgtattttacatctttaaaaacccctggatttcctgcttctctttaaaaaatagtggcagtttggcaacattgggagtccattccacaaatcttgcaaaattgagtcctcgctgcctccttagataaggtg

SEQ ID NO: 469130 - DNA, 599 bp, Homo sapiens
gctggggccctggttaattacactcccagtagagggaggtcgatgaggcccattctcagggccaccacatggtgagccatgcagcagtggcctggcagaacatttgtctgggttcatacagtatttacattaaaaaaaatcagggctgggtgctgtggctcacacctgtaacyccagcattctgggaggccaaggcaggcagatcacttgagattaggagctggagaccagcgtggccaacaagggggaaacctcatctctactaaaaatacaaaaattagctgggtatggtggtgcacccctgtaatcccagctacttaggaggctgaggcaggagaatttcttgaatgtgggaggaggaggctgcagtgagctgcgatcatgccactgcactccagcctgggcaacagagtgagactcttgtctcaaaaaaaaaaaaaaaatcagttgccagcattcaacaaactgtgtattttacatctttaaaaacccctggatttcctgcttctctttaaaaaatagtggcagtttggcaacattgggagtccattccacaaatcttgcaaaattgagtcctcgctgcctccttagataaggtg

SEQ ID NO: 469131 - DNA, 619 bp, Homo sapiens
tttagtcagccttctattgttatctataaaagagtgaataaataaataaaaatctctgcatagagatgaaatgaaccagcaaaataccaaaggaaactaacaccacagataagatttactgatcaaaattcactgtttttgtgtaggaacacagcatggtaaataggccttatataataaatacattattttctataacagatttctccaagaagacccaaaatgctataaagcagcactgcaataattctataaatatcattttgaagkactagcattccaatttcaagaaataattaaacaattctgaagttgatgacatttaggaatgggataaggacagtattgctattcaatagaaatgaatcaaatgcatatttatcaagttggctaaataggaatgctaagaaaatatacacataaatgataatcctttaagtaatttcattattatagcagcccatgaaatcatgtgagctttttcaatcctctctttaatttgaacttattgtaaacatttgacgttcaatactagaaatcagatcttttatctaagacttgattagtcagctttacttccttgtgacagacacactacatggtctactaatcctatcag

SEQ ID NO: 469132 - DNA, 619 bp, Homo sapiens
tttagtcagccttctattgttatctataaaagagtgaataaataaataaaaatctctgcatagagatgaaatgaaccagcaaaataccaaaggaaactaacaccacagataagatttactgatcaaaattcactgtttttgtgtaggaacacagcatggtaaataggccttatataataaatacattattttctataacagatttctccaagaagacccaaaatgctataaagcagcactgcaataattctataaatatcattttgaagtactagcattccaatttcaagaaataattaaacaattctgaagttgatgacatttaggaatgggataaggacagtattgctattcaatagaaatgaatcaaatgcatatttatcaagttggctaaataggaatgctaagaaaatatacacataaatgataatcctttaagtaatttcattattatagcagcccatgaaatcatgtgagmtttttcaatcctctctttaatttgaacttattgtaaacatttgacgttcaatactagaaatcagatcttttatctaagacttgattagtcagctttacttccttgtgacagacacactacatggtctactaatcctatcag

SEQ ID NO: 469133 - DNA, 489 bp, Homo sapiens
cagctgcatgtttgaataatttcagttctcaaagtcagtcaagcctttaaaactagttattgttttgtgtttttcatattagtacctactattgtaaatcctcaaaccaaggctcagggatgacactactagagtgacaatggagaagcagttctcctctttaaaaaaaaaaaaaaaaaaaaaaaagtgggccaggtgtggtagctcatgtctgcaatctcagcactttgggaggccgaggtgggtggatcacctgaggtcaggagttcaagaccagcctggccaacatggtgaaaccccgtctctactaaaaatacaaaaattagccaggtgtggtggcagackcctgtaatcacagctactcgggaggctgaggcaggagaattgcttgaacgcaggaggcagaggttgcagtgagctgagattgcaccactgcacttcagcctgggtgacagagcaagactccgtcttgaaaaaaagaaaaaaatg

SEQ ID NO: 469134 - DNA, 628 bp, Homo sapiens
agccttagtttcctctcttctaataataattatagtaccaacctcagagttttagtttttaaaggttaaacaaaatgtacgcaaagtccttatccttactgtgatgcctaaaacatatagtaaacactcaataaaatattagttatgattatcagctattcattccacacctatttataataaagatttaagctgttctgtaatcaaaagaaatttgcccaagttaatgcgatatctgtttaatggtatttataatcataatcattattgtgctatattgtaattaggcacaaatggtaaactgttggtataatttactgtaattagtatacagtcaaactacttttttttacrgtttttcacttctttgttcttgatctaacatgtgatcaatattaccaactgtttctcctcgtttaccagttgtgtgattttgatcacatcacctatcctctttaacatttccttttcctctttgtgaaatggtaataagacccatttcacagttaagattaaacatagtaaagcataaaaagtaaatataatatatatataaagatgcagtaaaaacataaagattacatagagaaatagcagaatgcctgacacagaactgatcaataaatgg

SEQ ID NO: 469135 - DNA, 199 bp, Homo sapiens
ctgcaactaattgttatttaagagagacagtttatcaaccacctgaccatcacctattggttgcctgacattcctggaggtgtgtatttggggtgagrggatctcctgtcctgctcatatctgcctaacaaattactgtaacatttcccccctcaagagtccaataccccaattctttgggaaaaattgatgaaactca

SEQ ID NO: 469136 - DNA, 594 bp, Homo sapiens
tagcttctatattattacaaataataacagatagccagtgcttttaagcrgtgtgtggtagagggaggtataatgcatatatgatcattttgggttccagttctttctttttcttgaagaattggtccacttgttttgttctgataattgctgtgggagtttgggtaactttaggcacatggaatgtttgagatgtgaaagccaaggggaattaaaggatgattgttagttaatggcaatgcaaatgatgcatgactcatccagttaaagctcagttgaactcatctctcttacattaagcacatgtattatttcctgattttttaaaatcaaaaagcgcacatttcacatagaagttctagaaaaattatttggaagtgattggtaaatatgcattttaatcagacaaacaaagcatagtttctgggccatctgccataaatatttttgtattttaattttatattgctaactacaaaatgtttactaaaaccttacctgtaatattcagttagttaaaataaaagtacatattgattttatttttaaactctatctttggagacacagtcctaagttgattaattagttgca

SEQ ID NO: 469137 - DNA, 594 bp, Homo sapiens
tagcttctatattattacaaataataacagatagccagtgcttttaagcagtgtgtggtagagggaggtrtaatgcatatatgatcattttgggttccagttctttctttttcttgaagaattggtccacttgttttgttctgataattgctgtgggagtttgggtaactttaggcacatggaatgtttgagatgtgaaagccaaggggaattaaaggatgattgttagttaatggcaatgcaaatgatgcatgactcatccagttaaagctcagttgaactcatctctcttacattaagcacatgtattatttcctgattttttaaaatcaaaaagcgcacatttcacatagaagttctagaaaaattatttggaagtgattggtaaatatgcattttaatcagacaaacaaagcatagtttctgggccatctgccataaatatttttgtattttaattttatattgctaactacaaaatgtttactaaaaccttacctgtaatattcagttagttaaaataaaagtacatattgattttatttttaaactctatctttggagacacagtcctaagttgattaattagttgca

SEQ ID NO: 469138 - DNA, 594 bp, Homo sapiens
tagcttctatattattacaaataataacagatagccagtgcttttaagcagtgtgtggtagagggaggtataatgcatatatgatcattttgggttccagttctttctttttcttgaagaattggtccacttgttttgttctgataattgctgtgggagtttgggtaactttaggcacatggaatgtttgagatgtgaaagccaaggggaattaaaggatgattgttagttaatggcaatgcaaatgatgcatgactcatccagttaaagctcagttgaactcatctctcttacattaagcacatgtattatttcctgattttttaaaatcaaaaagygcacatttcacatagaagttctagaaaaattatttggaagtgattggtaaatatgcattttaatcagacaaacaaagcatagtttctgggccatctgccataaatatttttgtattttaattttatattgctaactacaaaatgtttactaaaaccttacctgtaatattcagttagttaaaataaaagtacatattgattttatttttaaactctatctttggagacacagtcctaagttgattaattagttgca

SEQ ID NO: 469139 - DNA, 594 bp, Homo sapiens
tagcttctatattattacaaataataacagatagccagtgcttttaagcagtgtgtggtagagggaggtataatgcatatatgatcattttgggttccagttctttctttttcttgaagaattggtccacttgttttgttctgataattgctgtgggagtttgggtaactttaggcacatggaatgtttgagatgtgaaagccaaggggaattaaaggatgattgttagttaatggcaatgcaaatgatgcatgactcatccagttaaagctcagttgaactcatctctcttacattaagcacatgtattatttcctgattttttaaaatcaaaaagcgcacatttcacatagaagttctagaaaaattatttggaagtgattggtaaatatgcattttaatcagacaaacaaagcatagtttctgggccatctgccataaatatttttgtattttaattttatattgctaactacaaaatgtttactaaaaycttacctgtaatattcagttagttaaaataaaagtacatattgattttatttttaaactctatctttggagacacagtcctaagttgattaattagttgca

SEQ ID NO: 469140 - DNA, 595 bp, Homo sapiens
taagctcaactgttagcttcccctcctgataaactcaaaagactgcttggttgtatgattactgttgatcatccttattggagaaaaaaaaacaaaaagccaaaaaaaaaaaaaaaaaaccaaacaacaacaacccaagactgacactctttggactatttgcagtgttccttattcatgccaatattattttatgagaatacttggacaattcttaatataatcttctggataaaatcaatgcaaagatccaaaatgatgcacaaaatggaacttttaaaaattattatatcatgttaatttctcacattatagagttggttatttttagagatctgttaaagctgtaataaaagaaaatacagactaacgtaatagcaactgtgtaggtctttgtcacttatctagatggcactttgctgaagttgcagttattacataaayatatacatttttgtactggatcaaatctgaagaattggccctaatttaaaaagtaaatacctctattttctgctgttgtgaagagcagttggctgtttctcagtctctacaatattcccacaggacaaggacatttataagtatttctata

SEQ ID NO: 469141 - DNA, 643 bp, Homo sapiens
caggtgctgaacacacaccatcacatgccaggcctccttcaaagtacttgacacagctcttatatgggatttcacaaagggcggcacccaactctccctcactacaggagcagcagggtctcagcaatgtaggacagttcacagagttgcatgctctggacttggggtagagactctgccatgatgcctatcttaattgtagctggcagagaggcggatctacagtccacaacagcactttggctgggaaccaaaggatgaagactttataaccagaaggtcatgtgccatgtaacaggggtgtagggaagtrgatcatgcttctgttggcttaggacaaggagctggtgcaccccttacccctttctgtgtcacttcagagcaccccatcacgatctcttcctgccactcctgtcaaggaaggtgtgaccactgggccctggcctacctgccagctcttcttaagtgccatctactagacttcagcttaaattgcaccacgaaacaaaaatatattgctacaacatgcggcatctgagaaagcaaccgcatgaacctatctgcaaccaagaacttgtacagagccttggccctccgaaagcatccagaaatgaagccagttgatcatacacaacacacacca

SEQ ID NO: 469142 - DNA, 512 bp, Homo sapiens
tgctgcaagagatgtagcctgtggctgctctcaccaacagatacaagacctgttcctacaaacctcactgaggaccaggctgtggatgccgaagagttcattctacctgcttcattaaataactratgtgtttctgggcaatcaggcccaatctcagccctgccacctataattagtttgaactgcaggcaaatgctgaacagagcccagcagcagttcctcaagggaagggctgcaggagcagggttggggaatagaacctagagagtctgaggcctgtaatgggtaacctgaaaaagaatagggcgatgtgttcagaatgccctcaaaccattttttgtgagtttctatgattttgttacagtcatctctttttagttttgtgtattctgatgagttgagaaatgggtcaccttttctgttcttctaaagaacaattagcagcaggtggggatggtgattggttaaacctacttttaaaaattatgtcaataatcatggcttccatgagc

SEQ ID NO: 469143 - DNA, 629 bp, Homo sapiens
aaaaaaataaaacagaactttgtaaaaataaaaaaatttagtctagttttctatttttttgaaaatataagcaaatgtatatacatacacatatccccaactttattagataaaagttagaatactataatcttcttctgtaccttgctgttttcaccatacaatatagcctggacatcattccatttcagtatgtagatcttgtcctctctcctttatataactgcatactactcaactatgtgttcttaccatggtttattcatttggtcttctcttgatgggtatttgagttttttmtggtcttctgttattaaaataatgctgtaataattatccatgtgcatatatttttgaatttttgtgtgaggccatttaaatgaatgaattagccaactccaaagcccatctaatatattatgtctattacttaagtaattgatgaaaagagttaattttatcattatgttttaaattcataataaaaatcataattatgtttgttaatttcacaactacacaaatttgcacacacagcattgtaatgaaagtgaatataaactgtcaatgaacattcttactttagcattcataaagcagaagattggtgtgataccattagctgccct

SEQ ID NO: 469144 - DNA, 481 bp, Homo sapiens
taccaacttctactgtctctctcttcaatgtctcctagacctggccctttctttcccctcctgcagtcagcccagtagtttggcttagctcctcattactcttggcctgtttggaagacttctctgactctccattgctctcagttttgaatcctgaacccagcctgggatgcatgattctcagtaacatgcttctcacctagcttttcacattagtcctcrgactcccttacacacatcagccagaccctcacacccctgtgctttcacttccctgtgatgttcctgctactagcagtgcacttcattcattcattcattcattcattcaacagacatttactgagcaaatttcagagcactaggcactctggggtacaaagatgaattaaacaaaagtctctgcctccaagaggctccaagtcatgttgaggagacagacaaataaacatttgtgtgaaaagtgtgagttatgttatta

SEQ ID NO: 469145 - DNA, 461 bp, Homo sapiens
aaccctgctggtcctggtgttccatyactgccagggctgaagacagaggtccagtcttgccacttgttgaaactcaacaagactacagagaagtggcacaatacggccacttcaactgccaatgccgcttcactggcactagcactggaccaggtcctgctggttcccccaggctgcagtggttcctcaagggcaagagctctgtcacaagggcaccagttgcctggctatctcatttcacctacactgtctgagagcatcatcctgctgcccaccagcatctgccttggagcagattctagaataaagcacttcatggacctagactaatacacccttgaaagtctagccgttggtatagaggcagttcccttggtcccatctcctcctgccttcagggggattcttcccttaggcacctccgtcctttcttccatctagcctctgccaaggtatgttaa

SEQ ID NO: 469146 - DNA, 597 bp, Homo sapiens
tgagcactgtagacaaacagaatatcttgggcagtaatgtgatctggttcatataatttcaaatttcgtgacctataagagtctttagtctgagtgtttcatttaacagaggaggaaactgaagtacaaagggaaatgacctcccacaatcacacacttaaccagtagagagctktggatcctcaaaacccacattaccaccttgtcaaacaactaggatgaaatacaataaaccgagcataaaactttttgcacagtttatcttcttgatgctacagagctgtgccatggtgctaaaaaacagtagagtcagagtcagagagtctggctttgaattccagcactgttcataatcatgggcctcaggcacaccgtccagcttccctgagcctcagtgttcacatctgtggaatgagcgtgatggccacctcccaaagcggatttcagtgttcactgaaaccatatgtattaaaatattttgtaaattgtaaagcttcatgtaaatgtgaggtttcattattttttttttgttggaatcttcaattgcctcaaggcctaagaatatcagttacatggaattcctggtagcattacaca

SEQ ID NO: 469147 - DNA, 546 bp, Homo sapiens
gtgaagttagcataagtaaaaagttagacacaattctattactttaatacaaactctgttaacatttgggtatatttctttcagagattggtactcatattagagtggagttatttgggtttttgtttttcctttatgcctacttataatttacatgctcttatcctttgttttataatatttacaagttgcagttattattttaatatttcaggttaagttgacttttcaatatggagtcagttttaagtgtgtgcgttttaaaggggcatatttgcatttctgacccacaaagactaacatcacttgtgacaattaattttcactcatctaaattttgcaatgtttttaaacmaaaacaggtttaataatgataggtatccactaaacatccagcttttatcacatcacctgtagcttcccatggaaattttctacgaagcaaacattggctagtattacagatatttccttttcaagccctcatgtttaatcaactccgcttacctgtgtggctttaataagcgtaatgccaactccagctcc

SEQ ID NO: 469148 - DNA, 644 bp, Homo sapiens
gagagaatgacatgaagcaaatcccccagctaaccagctaacttgttacagataggtagtatgactggaaaaacaaaacaaaataaaaaacaagcaaaaacattctgtgttaagccctaaatttggggggctctttattattacagcataactttccctatcttgactgttatccctaccctatgtgtcttggtgggaggcaaatcctcttttatgtcatggaaatacaaaagacaagctagttgcttttacaaccttccttgtaggcacttgatctaaagctgaccaagcagtagattcatctaggtggataaattggaagccagaaatgcaaagaagtaggaacaatgaataactcatttccttttattatgatggcaacagcaatggaggatatatatatttctgggaagacgaggagcaggggttacaacagtgacatctggggtctgggactattattgaatgcttttgctaacagttgggcctaattttcaggacatctacagaagagtccctattggataacactagccctgatcaagttgttgtctagtctcctttgtcctgcctatttttcaaccttctgagcaactcaactstgcaagcagctgatataatttcagttcattcattttgattga

SEQ ID NO: 469149 - DNA, 623 bp, Homo sapiens
tgtttaatatttcccatgcttgattggtaggggcataatgcttctccataatttggttcctactgtttgaatctggtgtgcttcatgcaggaccctaccagggagattatagtgcaggtgttcttgttgaatgaagttcttgctgatggctcctgtctcacttttgtctctgaagttgacaaagattctccaccagagtggagtctggcccacacccacaactatgtgtctcctcctgttatttcsttcattaccctgattctgtctcttgacaatttctgagaggtgggttaaaaaacaagaagcctctcttccaaagaggaaatgttttattctggggagacttttccagatagtgtaacaaagtgtttacagtaggggcaaaccccagccaaccactatacccctgaaagccaagactgagaccatcatgtctcttagccatgcaaaagatagtgatatgtcaatagccagggaccttgacctttctctttaagtccttaaagtcacagaaataaagcccatgaaccaagacaaatcaacaagatcttctcaaatctcaaccatttatctccattgctcttagtatttacggaaaggtaatagctactcatttggtggca

SEQ ID NO: 469150 - DNA, 623 bp, Homo sapiens
tgtttaatatttcccatgcttgattggtaggggcataatgcttctccataatttggttcctactgtttgaatctggtgtgcttcatgcaggaccctaccagggagattatagtgcaggtgttcttgttgaatgaagttcttgctgatggctcctgtctcacttttgtctctgaagttgacaaagattctccaccagagtggagtctggcccacacccacaactatgtgtctcctcctgttatttccttcattaccctgattctgtctcttgacaatttctgagaggtgggttaaaaaacaagaagcctctcttccaaagaggaaatgtttyattctggggagacttttccagatagtgtaacaaagtgtttacagtaggggcaaaccccagccaaccactatacccctgaaagccaagactgagaccatcatgtctcttagccatgcaaaagatagtgatatgtcaatagccagggaccttgacctttctctttaagtccttaaagtcacagaaataaagcccatgaaccaagacaaatcaacaagatcttctcaaatctcaaccatttatctccattgctcttagtatttacggaaaggtaatagctactcatttggtggca

SEQ ID NO: 469151 - DNA, 573 bp, Homo sapiens
taaacatttgttcagacgttatctttgttctccgctctagcaagttgtccgggacagtccactctggcctcaaagytggagacaggaagtggcagttcttggacatcaaggaattttctgaattatttgctgtgtgtcttaacctgggttccctaaacaaagaagcctcaggcaaaactttatgggtcagagaaggcacatctacagaagcagaaaatagattagtggttgcctggggctgggagtgagaacgggaaatgactgcaaatgggcttgaggatgtgtttttggggtgatggaaatctactcaaattggatttcggtgagggatgcgcattgctgtagattttatggtatgtaaatgatacttaataaattacacttcaataaagctgttgggggaaaaaaagaaaagtgtatgagctaatgtttatttggggaatagcattgcagaaaggcaagagtgatggtatagggttgagttggggacagaggggatggcagctctgagaagtgttgccacaaggctctgtgaccagctgtgtctactcagcaatgcactccactccagtg

SEQ ID NO: 469152 - DNA, 573 bp, Homo sapiens
taaacatttgttcagacgttatctttgttctccgctctagcaagttgtccgggacagtccactctggcctcaaagctggagacaggaagtggcagttcttggacatcaaggaattttctgaattatttgctgtgtgtcttaacctgggttccctaaacaaagaagcctcaggcaaaactttatgggtcagagaaggcacatctacagaagcagaaaatagattagtggttgcctggggctgggagtgagaacgggaaatgactgcaaatgggcttgaggatgtgtttttggggtgatggaaatctactcaaattggatttcggtgagggatgygcattgctgtagattttatggtatgtaaatgatacttaataaattacacttcaataaagctgttgggggaaaaaaagaaaagtgtatgagctaatgtttatttggggaatagcattgcagaaaggcaagagtgatggtatagggttgagttggggacagaggggatggcagctctgagaagtgttgccacaaggctctgtgaccagctgtgtctactcagcaatgcactccactccagtg

SEQ ID NO: 469153 - DNA, 630 bp, Homo sapiens
atgtatgaaagcctccacattttcaaaccattaacaaataaaaaacaagaatggtgctactatcgtatcagatgaaataacagcaacatgggtcaacaatttcttagaaaaccccatgggacctgatgtcctttggaattcagaatgtcttggatctaagtaagttgtgaattatctcatgtaacaaccccaaggggtatggcagtagctcttaatgaaacgcattaatacttctaccatcctacatatgaatattcatgcaaagtgggataagtgaagtttataagttgtcacagatcagttccggtcagatcttrccactgaatgagtttgctacaagatgaaccaattgttttcagcttttcaatttcagaattgcacataagggattgcagacttaagaaaacaaacacttatattgcattaatcatgagccaggcatgttctaaatgctttacatatcaacatattgatccacagcaagcctatcaggtagacattatgattatccccatgttacaaatgagaaaactgaggcacaaaaaggttaagtaatttacccacagttgcatactgaataaggtgtataaagaatgaggattctgttctggagcttattccttaatcatc

SEQ ID NO: 469154 - DNA, 630 bp, Homo sapiens
atgtatgaaagcctccacattttcaaaccattaacaaataaaaaacaagaatggtgctactatcgtatcagatgaaataacagcaacatgggtcaacaatttcttagaaaaccccatgggacctgatgtcctttggaattcagaatgtcttggatctaagtaagttgtgaattatctcatgtaacaaccccaaggggtatggcagtagctcttaatgaaacgcattaatacttctaccatcctacatatgaatattcatgcaaagtgggataagtgaagtttataagttgtcacagatcagttccggtcagatcttaccactgaatgagtttgctacaagatgaaccaattkttttcagcttttcaatttcagaattgcacataagggattgcagacttaagaaaacaaacacttatattgcattaatcatgagccaggcatgttctaaatgctttacatatcaacatattgatccacagcaagcctatcaggtagacattatgattatccccatgttacaaatgagaaaactgaggcacaaaaaggttaagtaatttacccacagttgcatactgaataaggtgtataaagaatgaggattctgttctggagcttattccttaatcatc

SEQ ID NO: 469155 - DNA, 602 bp, Homo sapiens
tcagtacataaaggattacagttttccctaaggctgggagatgacggaagatggacctttaacggttaaacttagcacacagtactgatgaaaggagatataaaagcgagagatgaagctctcaggccaatgaaattgactgcatcctgagatggcattaactgttaaagaatgtttactgaacctgtttattttgttgtgattttatgttcatcaagtaagcttcaggtcataattgacatttcatgttcacttatctacacagacagaatggactgttcatagactatagttctctggttagtggaacacttctatttcccattaaaaattaatgaattggcactcaattttagacatcagccttgtgagtttggtttccatgaatctgtcactgagaaatgcatccattctcatgagtcgacaaaaactttagggcttcaagcctagacaagctcagggccatatcttttgataaattcaccaaagtaaagcccccatgcatggttctgcggggtatttagagagcyagctgctgccacctctcactgacagagtctgtctttgcattcctgcttctgagcaatggtgttaactatagc

SEQ ID NO: 469156 - DNA, 564 bp, Homo sapiens
gcttccacaaatagattagaaatctagaagacagggaagaaataggataaaatagttcatgaatgttcacatagaagtcagatctttaaataaaagtacaaagtagactttatagcttagcagtgcaattcgctttgccctaaggtaactttcactgaaatacttaaactactactgctgttttgggacaagattaagattgctatttggggctaattgccaggatgtaagatcaaattaatatggtacaaaactcatagcctcatccagtgttacaaactggaacaagtcattttagaactaatacaacctagcaatgtttaactgaatcagagtttagtaacatgagccagctcgacaacttccagggcagaagagccaatcatgaaataacatttactaactgaaccagacaaagggagaacaacctatcaggtgggatrcatcaccacacgattattgcaaaaccaccacctggacttacagatctaggccaactgggtaaccattttaaacacgatctaaaatgttaatactgtgtctcattgttcattgattcacttg

SEQ ID NO: 469157 - DNA, 618 bp, Homo sapiens
gccaaaccaaatgagaggaaaattggagactatgttttaaaagatcaatgtagccactttcttgaactgaatatcaaaaaataagactcttgtattgaatataaattaggtaaatactgtgacagttaaagcctctttccccctgcagctcacaattcctgcttttcttttaaggttggcaaagtatttcctttgtttctgtctaatctgcagtccttayttctatttatgctaagctcatattcttcgctcacatcatgatactaaacaggagatgatttcttaacagagataaatattatttttactaagggaattaaaactgcaaagcacaatcatacaaacaatcaatattaacaaaataaaaaagataaagtaagcaagcaagaaataattcaattttcatacttttacaaagctcttcagaattattattttcaagctgttagataaagccatgataaattagaaccactcttcctaatattcactttatctcctaaattgcattttgcctagaaaaaagcttaaatgtatcttaaaatattgtattaaagaatgataaaagaaatatctgttcctgggccctctataacttacatctaaaaaacaaatatc

SEQ ID NO: 469158 - DNA, 618 bp, Homo sapiens
gccaaaccaaatgagaggaaaattggagactatgttttaaaagatcaatgtagccactttcttgaactgaatatcaaaaaataagactcttgtattgaatataaattaggtaaatactgtgacagttaaagcctctttccccctgcagctcacaattcctgcttttcttttaaggttggcaaagtatttcctttgtttctgtctaatctgcagtccttatttctatttatgctaagctcatattcttcgctcacatcatgatactaaacaggagatgatttcttaacagagataaatattatttttactaagggaattaaaactgcaaagcacaatcatacaaacaatcaatattaacaaaataaaaaagataaagtaagcaagcaagaaataattcaattttyatacttttacaaagctcttcagaattattattttcaagctgttagataaagccatgataaattagaaccactcttcctaatattcactttatctcctaaattgcattttgcctagaaaaaagcttaaatgtatcttaaaatattgtattaaagaatgataaaagaaatatctgttcctgggccctctataacttacatctaaaaaacaaatatc

SEQ ID NO: 469159 - DNA, 535 bp, Homo sapiens
gtctagatcagatggtttaaggtatcacatcagaaacccttcttctctcctgaatgaatgcatgggcagggagaacactgatgattctgatggggtgtgcagtgaaggttgagtgtggctgagaaataatttcttctttctttcttagtctcacactgtagctcaggctggagtgcagtggagcgatctcaacttastgccagctccgcctcccgggttcaagagagtcttctgcctcagcctcagtagtagctgggattacaggtgggtgccaccacgtctggctaatttttgtattttcagtagaaatgggggtttccccatattggccaggctggtctcaaactcctgatctcaagtaatccacttgccttggcctcccaaaatgctgggattaccggcgtgagccactgcgccccgccgagaaacaatgtctttaataaaaaattatgtttctaaaacaaatggtttgttataataaaacaaaaaaaaagtttctaaaacaaatggtttaaattaatcttagagaaaagga

SEQ ID NO: 469160 - DNA, 615 bp, Homo sapiens
taacaagttggtcttagatgctttgaacaaaatacataacatggaagaagtaagtgaactagcactacctttaggggaaattctgcaattgcctaagtataaaaccatttctaaacacttctctgacatttcttctagtaccaagactttagcttataaaaataactaaaaacgtttgaaatcacacaatcatgtaattgatggaattaattgttgataaacatgaattatttctcaaaatkatgaatctggtcattaaccaatcttgtatgttatattctgaagttcactcttcagttttctatatataggatagttgtgaaaattgagtgggagccttggccacagaaatgcaaactgtgaattgggtcaaacacttcagtgaatgtaacaatatagacacaattagtaacaaaatttatttgaagtgaatatggggaagcctctgaaagaaaaaaatggtgatagtttttaataaattagtcaaatactttaaaataggcatagttgaattgaacaacatgtttttttttgttttgttttgttttgagttttaatagctataaaaggagagagagattgtcatgctgccatgaaatggatataaacaatttt

SEQ ID NO: 469161 - DNA, 616 bp, Homo sapiens
ataacaagttggtcttagatgctttgaacaaaatacataacatggaagaagtaagtgaactagcactacctttaggggaaattctgcaattgcctaagtataaaaccatttctaaacacttctctgacatttcttctagtaccaagactttagcttataaaaataactaaaaacgtttgaaatcacacaatcatgtaattgatggaattaattgttgataaacatgaattatttctcaaaatgatgaatctggtcattaaccaatcttgtatgttatattctgaagttcactcttcagttttctatatataggatagttgtgaaaattgagtgggagccttggccacagaaatgcaaactgtgaattgggtcaaacacttcagtgaatgtaacaatatagacacaattagtaacaaaatttatttgaagtgaatatggggaagcctctgaaagaaaaaaatggtgatagtttttaataaattagtcaaatactttaaaataggcatagttgaattgaacaacatgtttttttttgttttgttttgttttgagttttaatagctataaaaggagagagrgattgtcatgctgccatgaaatggatataaacaatttt

SEQ ID NO: 469162 - DNA, 432 bp, Homo sapiens
tgatcctgaaaatggttttaatttgtctctgtctcattagcttaatgctgatgctggtggcccccaggctgctgaccaagctcagtgactttcttttcaacttggcctgcagcttattatcagggccatagatgaagctgacagctcaggcaaccttccctttgtgaccctggccctgtrtgtctactccccaaggactttcattcatttctgggcccacagtaattaaaagctggaggggagaccgtcctcattggcatgacaggcaaaatcacataaataaatgcttacagtgcagaaaccaccttgtaaatgtagggctcgctttgatgaccacctgggagaattatccacctgacacatgctgcagtgaataggagtccagaggctgaatcgtcataaattgctttcaaaatcgaccccagaagacca

SEQ ID NO: 469163 - DNA, 610 bp, Homo sapiens
accaaaacacagctcatgttggcgcttcagaaatccgctggcgttaacttccagagaacttcttgacagttgtccccaattacttcatcaaggagtcaaaacaataaaaccgggataggataatggccaaatagtggattaaaacccacactacgaagtagtgtgtccaagagtttcattttcattggtatttttggccatagtaaggaaatagtttagtatgttgcaaattgtttactactgccttcagatcttcaaagagcttcagtgagggagggagctgattggttctatgcggcttccagagaagcattaattcctattagttctattcggaaggactgtctatcagtgtgcaaccaaccccacaaagcagsacttcaccacagagcacagccgagcagaagcgaggtcactggtcaggacttggctgctcattataatcccctgggaagttttaagaaagtctgatgccttggtctcacccccagaaattcttacttagatgatctgaggtggagccctggcgttaagatctttaaaacctcccctacgtgattccaatattcagcaaagtttgagaaccacagagttagatatctcatcaggg

SEQ ID NO: 469164 - DNA, 525 bp, Homo sapiens
ttcttcttctgcctcccaaactgctcttgtcccttaaacttcgctgcttgccaggattctctcctcttcactgctccccagctcctgcccttgcctctgctggcacctgcttttggtccttcctccgtaaaaccaccactatggactttcttttccaaaatgcaaatctgatcatgtcgccactctacctagtgcctccccagcacccactgaatggagacccttctcctcgttgctgaacacagggtttttctcaacctggctgccagcaatgtgtccagcctcatctctttttcctgctgaaaagcattctgtgctacagccattcagaaaaacttgcacaagccctgttaagcatggacaacctatgataaatactaatgaagtaatattaaataaarggacattctaataggaattacttacagagggttcaattaatgtctcctcatcttaatattatttaatatttaaatgatttttttcctccggaaaggttttttcatacttctttgtctttgcaca

SEQ ID NO: 469165 - DNA, 581 bp, Homo sapiens
tataggtcactgttgaaaaaacaaggtagatatatggaaaaaaaaataaaattgtccaaaacatattaaaaaattaaaaaaaacacaaagttccaaaaggtaataatgttactttcagartgaatcaaattagaatagtaacaaaaccattaatgatttatgcagtgaaatttcacgtttcatgttacatagtttagtaatgtttgaattttgtataaagaaaaggtttttttttctggttacaaaattataataaacagatatttctcatatgtaccatgtccccttcattcctaatacttctgccttttttaaagcccttacttaagtggcttattgacagccccagaataaagtccaagcgcattaggatggtatttaagactttccaggaagggctccttactgtcgtgtctggtctgggccttggccactttctacctcaccctcaggagcttcttgcacatttactgcgtgtcactcttgtgctctccctaccctgcccaggtgacccatttctgcaccatggtccctccacagactcctccctccaccctcagcctccaccagagtctaagtat

SEQ ID NO: 469166 - DNA, 581 bp, Homo sapiens
tataggtcactgttgaaaaaacaaggtagatatatggaaaaaaaaataaaattgtccaaaacatattaaaaaattaaaaaaaacacaaagttccaaaaggtaataatgttactttcagaatgaatcaaattagaatagtaacaaaaccattaatgatttatgcagtgaaatttcacgtttcatgttacatagtttagtaatgtttgaattttgtataaagaaaaggtttttttttctggttacaaaattataataaacagatatttctcatatgtaccatgtccccttcattcctaatacttctgccttttttaaagcccttacttaagtggcttattgacagccccagaataaagtccaagcgcattaggatggtatttaagactttccaggaagggctccttactgtcgtgtctggtctgggccttggccactttctacctcaccctcaggagcttcttgcacattyactgcgtgtcactcttgtgctctccctaccctgcccaggtgacccatttctgcaccatggtccctccacagactcctccctccaccctcagcctccaccagagtctaagtat

SEQ ID NO: 469167 - DNA, 635 bp, Homo sapiens
aagatataaacgtgttaccagatcctaggaaagaccagtttcaactaacactagtactgtaagcacatagtaaccatttggcctttgactttttatcacaagcttgcgttcagcttctatatgaggtgacttttccaggctggagtgtartagctactcacaggcatgatcatagcacaccacagccgtggactcctgggctcaagcaatcctcttgcctcagcctctcaagtaactaagactataggtgaatgccactgtgcctggcttaatgtgtcattttctaatatgtgagttttctaatagtcttccaatacttttaggaacaagacagactcgggtattggagtaatctggtaaaacaccctctttcggtcaagctctttagaagagcctttatgcttctacttccttattgcaatgcacatcttggctgctgcaatttgacttctatcccaaccacacaccaatgctacctaggcagacaccattagttgtacttcataccaattcaccacttcttacatggtattagaacccacgatttttaggaaggcatgacttggtcagaataaagactttatttttccagcctcctttgcagccaaatttagctgctgccaataggatgtagg

SEQ ID NO: 469168 - DNA, 635 bp, Homo sapiens
aagatataaacgtgttaccagatcctaggaaagaccagtttcaactaacactagtactgtaagcacatagtaaccatttggcctttgactttttatcacaagcttgcgttcagcttctatatgaggtgacttttccaggctggagtgtagtagctactcacaggcatgatcatagcacaccacagccgtggactcctgggctcaagcaatcctcttgcctcagcctctcaagtaactaagactataggtgaatgccactgtgcctggcttaatgtgtcattttctaatatgtgagttttctaatagtcttccaatacttttaggaacaagacagactcgggtattggagtaatctggtaaaacaccctctttcggtcaagctctttagaagagcctttatgcttctacttccttattgcaatgcacatcttggctgctgcaatttgacttctatcccaaccacacaccaatgctacctaggcagacaccattagttgtacytcataccaattcaccacttcttacatggtattagaacccacgatttttaggaaggcatgacttggtcagaataaagactttatttttccagcctcctttgcagccaaatttagctgctgccaataggatgtagg

SEQ ID NO: 469169 - DNA, 609 bp, Homo sapiens
gatagtcaaaataatttaggaaaattattttctggtcactatctgatttcactgatatgttactatatatttactatttactacctgatttgactataaagctatagcaatcaagacactgaggtattggtgaaggcgtagactcagctcagtgggattgaatagagagcccagaagtggatccatataaatatagtcaagtcaattttggcaaagatgcaaagggaaatcagtagagaaagggcagccttwtcaacaaacggaactggatctattggatgtccatatgcaaaaaatgaacctggacacacatatatcacaccttacacaaaaattaactctaaatgaatcatagaccttaacgtaaaatatacaactataaaacttctagaagaaaacagagaaaatctttgtgcctataggaaagccagggtcttcagcctcggtactgttgccatttggggatgtagctcctgtgtgggggctggtctgtgcaccagggaggtttagcagcggtgtgctccagttgtgacaactaacaatgtccccagacactgcccaatgtcctctgggggcaaaacaggcctgaattgagaagagaaagttctc

SEQ ID NO: 469170 - DNA, 609 bp, Homo sapiens
gatagtcaaaataatttaggaaaattattttctggtcactatctgatttcactgatatgttactatatatttactatttactacctgatttgactataaagctatagcaatcaagacactgaggtattggtgaaggcgtagactcagctcagtgggattgaatagagagcccagaagtggatccatataaatatagtcaagtcaattttggcaaagatgcaaagggaaatcagtagagaaagggcagccttatcaacaaacggaactggatctattggatgtccatatgcaaaaaatgaacctggacacacatatmtcacaccttacacaaaaattaactctaaatgaatcatagaccttaacgtaaaatatacaactataaaacttctagaagaaaacagagaaaatctttgtgcctataggaaagccagggtcttcagcctcggtactgttgccatttggggatgtagctcctgtgtgggggctggtctgtgcaccagggaggtttagcagcggtgtgctccagttgtgacaactaacaatgtccccagacactgcccaatgtcctctgggggcaaaacaggcctgaattgagaagagaaagttctc

SEQ ID NO: 469171 - DNA, 609 bp, Homo sapiens
gatagtcaaaataatttaggaaaattattttctggtcactatctgatttcactgatatgttactatatatttactatttactacctgatttgactataaagctatagcaatcaagacactgaggtattggtgaaggcgtagactcagctcagtgggattgaatagagagcccagaagtggatccatataaatatagtcaagtcaattttggcaaagatgcaaagggaaatcagtagagaaagggcagccttatcaacaaacggaactggatctattggatgtccatatgcaaaaaatgaacctggacacacatatatcacaccttacacaaaaattaactctaaatgaatcatagaccttaacgtaaaatatacaactataaaacttctagaagaaaacagagaaaatctttgtgccyataggaaagccagggtcttcagcctcggtactgttgccatttggggatgtagctcctgtgtgggggctggtctgtgcaccagggaggtttagcagcggtgtgctccagttgtgacaactaacaatgtccccagacactgcccaatgtcctctgggggcaaaacaggcctgaattgagaagagaaagttctc

SEQ ID NO: 469172 - DNA, 609 bp, Homo sapiens
gatagtcaaaataatttaggaaaattattttctggtcactatctgatttcactgatatgttactatatatttactatttactacctgatttgactataaagctatagcaatcaagacactgaggtattggtgaaggcgtagactcagctcagtgggattgaatagagagcccagaagtggatccatataaatatagtcaagtcaattttggcaaagatgcaaagggaaatcagtagagaaagggcagccttatcaacaaacggaactggatctattggatgtccatatgcaaaaaatgaacctggacacacatatatcacaccttacacaaaaattaactctaaatgaatcatagaccttaacgtaaaatatacaactataaaacttctagaagaaaacagagaaaatctttgtgcctwtaggaaagccagggtcttcagcctcggtactgttgccatttggggatgtagctcctgtgtgggggctggtctgtgcaccagggaggtttagcagcggtgtgctccagttgtgacaactaacaatgtccccagacactgcccaatgtcctctgggggcaaaacaggcctgaattgagaagagaaagttctc

SEQ ID NO: 469173 - DNA, 692 bp, Homo sapiens
ctgttaagtgttgacaactaatggctcaatgaagagctgtttagctaaagggaagccccacatccgggacgtgtgtgccctgggggacacacagcaaatgactgacaaggaggaacagaaggcagcctcttgcttccagtcctgggagaccatgctgaagccctgcctcctggcttatctgtatctcctgcacaagaattccagcycaggctctgtttctagggagtgtgccctgagatgccagcgcttgagcttcgagagcacgagggggtaggttctggtggacagggaccccggtgtgacgacaactgcaaggttcaccttggaccctggcactatcctcccaccaggctggaaaaggagaccaggacatggccccagcacagcccccaggtgggcaaaccggcaggctgggctggctaagctcttggtgttctttgtgtgggggtaggtggggctggtgagggcgggactggctgcaggtccttcagcgggtccctgctggacctccgtggcggggacagggatgaaattaaaacagacccgactccattcaatctcagcgatccatgactcagtgatgcccggagctgcctccctttctcctccctgggctcccaccccgccgcgccccaccccattatgatcccccccaaaatgcagagagcccactagagggaggaggctgaggg

SEQ ID NO: 469174 - DNA, 592 bp, Homo sapiens
gctgcttatgtgaaggaccagcttgtgtaaatcctgataccagctctttgtcagtgcctaatggttatcttcagctcaacatgaacatatctaaaactatcaccttctctctaaaacttatccaacattccccatctcagtaaatgtccccagcactcattcagttttacaagacagatgcctggtagatttcttaaccttctatcctttttcacattcaatccatgaccaactttttatgttcatttttctgagttaactatcatatttgtctatctctttctctattgactgtctcatcatagttaaaattatcttcctctttcctaacttttcttcatgtaccagtctaattccattgcagttcccygtaaatagggtgactgtatgtcctaggttgtccagggcagcaagagttttaatacccgtagtctcagcataattagcaatgacaccactttttattctccaaactgccctgatctagataataaattatgttattacaacacatacaaacagtgtctcctttcaaaactgcaagtctaattataccatttcctacctaaaactctttaatggtttctgctag

SEQ ID NO: 469175 - DNA, 643 bp, Homo sapiens
ctgctcttagtccatcacctgccttcccttatacaacaaaaggtaagcattcattaggggaaytgatcaattatttttttggaacagttgtcagcattactcagcatttctctttccttccttcatactttcttaactaacctcaggccaagtgagggaatttagatcttgatatgtgagggatttggaaaacaaagaggccagctcttgcctgcaaaatttaaagacaggagattggctggaaatagtcttgatggctgaacacggagaaaaagtggagccagtgtggaccctacagagggtagcgaggcataaattacctagaaaggatcccaacatgtggcttacctgcgagggctaacagacaacagcactaagaggctatagaaagattacccaagaagcagaggttcaggtggatggcattcatagccagctagttggggcactgcccaagacagtgaataatatagcagattgttttcactggcttttttgaagaacctacaaaatatcttcagtaggaagacagcatttaggtatctgtctggctccagattacaactgtgttgattgataaataacttttccaccctggtttctcttatctacccaacatcaccaagacggggtcaagaaataa

SEQ ID NO: 469176 - DNA, 241 bp, Homo sapiens
gctcaacaattgtaaacaagaaaaatcaagagctactacggcagaatcagaaggaaatgagaatggagagtcagtagcacacctggccccagcttcttcccattccactgctgctaaggccaaagagagcttcctttasacacacgaatgcattaggtaatgggttaattatacttaggcttcctagatagatgttataaaatagtatattcttggagaagctaaatttaaaaggtagagg

SEQ ID NO: 469177 - DNA, 630 bp, Homo sapiens
tatttccagtaaaaatagataaaatacccaacttacatgcagcggtagaaacaaatgatattaagcaaatgaaagaatttaacactggacctggcatattagtaacagcatcatgagrggagtttgcttctctccatccttcccttgtacactatacaagtctcagcatccacgtgcaagaaagatggttgtacagtgactgacccacaagtgccagatgcctatatctaccacctggtggctggctgtgtcttccccgcttcccagttcaagccctgtcctgccccttctctgtcccaaccacgccctctggaaaggactctcaaagactcagaagggtcttggagtcttcgagaaagaacaaatcataggctctaggactaaaatataatggctaaaacatagtgatacaatcatggaggaatacctgacaaagctcttcccctgttccaaagtgcaggccccaggcaccatgaaaaaatgaggaaagggaagcatgaaactaagccatttcagggaaaagcattattcatttgctgcctgggaccctggggctgtgacagaaactgtatctttcctcttgagcaggcctaagggattggttaagtgaccatgcacatcctgccaatc

SEQ ID NO: 469178 - DNA, 634 bp, Homo sapiens
ggtgccatggtcagggttccacctatgaccctgtaccactagaattattaaacagtaaagacaaagaatgcayatctgccaaatttttaggtaatacaaaatagaaggatatcaaagatattggtccactttctgaattcaaaaatataatagtttataatgttgagacaaatatagcaagataatcataacagagttaattagaaggccctgtgtgtaccaatagaaagacaaaatcagcacaactgatcatcaaggtatgaatttgtagtagcacctaaacaatacaaagaaaattttaaatcagcaatatgccaaccctaagcaaactccaaagtggcacatttctcttattataatttatgagaagtacttggaaaagaaattacaacataacctataactttcttatcacacatttatttgtattacttgctaatttctctacaatatattatgttgaggtgttagcagttgcctttgtacagatatattgactatacttgtatgaatttaatccccacctctcttatttgcttgaagaggaaggacaaatttatttttggcaagaaatttaaagcaagtgattccttatttattgtcttagttattagtcacagttagaaaatcagtg

SEQ ID NO: 469179 - DNA, 586 bp, Homo sapiens
ctgccttctcctacatcatagatccttagaaaaactagaaaataactaagaaaagaaaaagctagttagagtggatgggtggatattagatacaagatagatagtagaaaaaagaaggggaatttctagaggacgactagggaaattactctcaataatttctaaaacatgcacaggattgtacttgaataaggaaaccaaagtgccttagatatgagaaatggattggaggatctaaaaccaagtgataagtgaataattgggacagtgcaggaggaacagtcagatagaaaacatcctgtgttctatcccccagctccatctctcccaatagcgttgtcctcctgcaggtagraacattgagtgtggacttggttcagagtcaggaccacacattggtggctggtgatgcccaagaagaatgagaacacccttcttcttataaggccagccatacaataccagctctggctgggcttctctctcctctgaatcccatgaggagaggttggagcaaaactgcctcaactcatctctcaccttcccctcagcatgaatctcaagtaaaagataaacatacatgcag

SEQ ID NO: 469180 - DNA, 622 bp, Homo sapiens
tcctcaccagcaagggaaaaaaactggagaatgagtttgatgagttgacagaagtaggcttcaaaaggtcagtaataacaaacttctccgagctaaaggagcatgttctaacccatggcaagcaagctaaaaacctggaaaaaaggttagatgaatggctaactagaataaccagtgtggagaagtgtttaaatgacctgatggagctgaaaaccagttcgagaactttgtgaagcatacacaagcttcaatagctgactcaatcaagtggaagaaaggatatcagtgattgaagatcaaattaatgaaataaagtgagaagacaagattagagaaaaaagagtgaaaataacyagacattttttaagttgaatgtcagcttttcctcttattttagagaaaagatgagggtacacttttccatgaacaatctgaatctctgcttctctgggagcattgtgctgtcatttcagcagtgccattaccaacccattaataggtcttttgattaaacttctgtccctgaaaattcccagtgcatcatccaaaaatcaaaagccaggatgattttatacctctgaaatatcttgattttgttagcacagaatatttaaaaatggcc

SEQ ID NO: 469181 - DNA, 629 bp, Homo sapiens
tgaaacagggagctacaaagtcaagcagaatagttgtatggggatttaattttctcaaattaaattggcagaatgctttattaggataaaaagaggrggtgggttttcaggcataacacagtatggccaggtacctataggaaaggaaaattctgcagttgatccttacagataggcaggaaccactctggagaagtgtttgtgaaaatcaggtaactgtgatcccagccaaagtcacttacactgccattcagttttcacagagagccataacattcaattttagaaaagaggactgtggaagtgcttactatatgctaaatgcttgagaatgccacgaaccttgaagagtgtttgtttaactaggtaatttacagaggttttgcatttacatcattcactcttcctgataatattctgagttaggccggacagaggtggccatctcaatttttcaagagaggaaacaggttcattgagatcggtgtcttgttgaaggtcctgtggccactgttggggagccaggatgtaaacccaaggtcacttttccttcactgtactgaacaacagattaagaatacgaagattaatcatctctgaaacatttgtttggaagcccacaattgaaa

SEQ ID NO: 469182 - DNA, 576 bp, Homo sapiens
ttatgatgctttttacaagtaatttgatgcaaattatttattatgtaaaataattagaaacccagagaacatttatgtaaattatctgaatcccagtctcagtgataagaaaaacttagatgtaaatgttctacttttcagaagaccaaagggcctgaattttatatctgtaaaggcacaagggaagaatataaattgaattagtaattaaaggaaggtctgaatccacagacatagcaaagatggaggattatatatatataagggtaatagagagggacactgacattaaaaggaaatgtgtarccattactgtgccagaaaaagaaaaggaacaatatttatattggttgtcacttggaaaattaatatgtaggatgaagcttaagaatctaagcacattttcagattatatttctggattgtcctgattcaaaaggataacttgtgtgtgactgatttgatggtatatgagtcagaagctcaggctgccataacaaaatttcataggctgggtggctcaacaggaatttctttctcacagttatgaaggttgggaagttcaagatcaagatg

SEQ ID NO: 469183 - DNA, 380 bp, Homo sapiens
tgaacattgagaccagcttattctgtagacttttaaaataattttacctattttccccttagacttagaataattgatcttacaatatttrttctatgtcataatttccttctgtgttatttattataacattacattaaccatacatatattttaaaataatagtggtttagttttaaattactatttttattttgtttttttttttttcagaatgaagtgcaaacagcaaaagaatttataaagattgtagaagctgcagaaaatgaataccaggtatgattttttaaatattatataagctacactcacatatgaattaatgtcactgaaattttaatttcagccaaaggctgaatttttccattgcatcagttaga

SEQ ID NO: 469184 - DNA, 546 bp, Homo sapiens
tccattacccaggctggagtgcagtggcacaacctcggctcactggaacctctgcctcttgggctcaagcactaccaagcctggataatttttttttttgacacgaaattaygtgtttacatgcaggaggactgcaggatgctggcaactgggaaagaccaagtgtctacttaaatttgcaccggccagacaggtggctgttctggttaagccagtttgccaagaggccaggggcctggcactccttcacctccaaggcctccccatcctacctgcactggcgggtctgcatgctgaatgttgtcctgcaagtggctcatgagcatgaggtcgcgggcctggtaccagcgcgagtgcagagcatggtggtagatgtggcagaggatggcacatgtgcggatccggtctgtgcggtccttggcgtagatgtacttgcacagtctctccatcaacacagccgagtcctcgccctcattttctgcctggtcttgctcagactggggaggaagggaggttatttgcaaaggagatccagctttaaaaggc

SEQ ID NO: 469185 - DNA, 565 bp, Homo sapiens
ggcagtactacctcactgagaaccactgttcagggagttagctgggtcgcagaggcaaaatgttggactacagcgtgtggggccacactgagcgatgatgaagaggagaggcatcccaacacccaccgggctaacctcttccgctggcagcaccaagcccgggtggagctcatggagcagttccagaaggagaaggaggaactggacaggggctgctgggagtacaagtgcaagatggccgagtgccagaggaagctgaaggagctggaggtgtcagagggtgccagggtggaggtggagtggctacacgaggagctgagctgggagcaaaagctggaggagatgcccaagaaaaagagcatgacctggaacgtggacacgctcagcaaaagcagtttcaggctgggtgmggtggctcacacctgtaatcccagcactttgggaggctgatgcggggcgatcacttgaggtcaggagtttgagaccagcctgaccaacatggcgaaacctcgtctctacaaaaatacaaaaagtagctgagcgtggtggtgggcgcctgtaatcc

SEQ ID NO: 469186 - DNA, 421 bp, Homo sapiens
ggccagcaacctacagtgtggcttggagtgcaagtcaaaataacaagtcagactaaaccccatcaggtttcctgtctgaagaattttaactgaaaatwctgaatgactaaggcagctaagcagtagaacctgaagtcaacatgacagcatgtgttaggcagaaatatgacatattgcaacacaccaaagttatgagaaagcataatataaagtaatatgagcaagcagaaagtataaagaaaaacaatatgtaagaatacaggtgaatattgtattgattgatacccaaaagcagaaggaggcagagggagctgtgcaaagacacagaaaaaggaaaaacagccatgtgtcagggcctccatatgaccccccatacctgcctagtttcccagtggtttttcagttatgaatttaattcgtt

SEQ ID NO: 469187 - DNA, 421 bp, Homo sapiens
ggccagcaacctacagtgtggcttggagtgcaagtcaaaataacaagtcagactaaaccccatcaggtttcctgtctgaagaattttaactgaaaattctgaatgactaaggcagctaagcagtagaacctgaagtcaacatgacagcatgtgttaggcagaaatatgacatattgcaacacaccaaagttatgagaaagcataatataaagtaatatgagcaagcagaaagtataaagaaaaacaatatgtaagaatacaggtgaatattgtattgattgatacccaaaagcagaaggaggcagagggagctgtgcaaagacacagaaaaaggaaaaacagccatgtgtcagggcctccatatgacccccyatacctgcctagtttcccagtggtttttcagttatgaatttaattcgtt

SEQ ID NO: 469188 - DNA, 499 bp, Homo sapiens
gagtgactgagccctgcttctgatrtgagatagtttaacttaggtttaaaaatggatactgaggcaatgtaaaattataagcactcactacactcagtcccagaaatcctgagtctatagacctggagaagttcccatagtcagtgggcacaaagagaggtagattcaagattgatgagatgtttgaaaaatgtaattctagtgtaaataacacgaaagagggagaatggagcacggaatttgaagaaataagatgccatccagggaacattctgcttaactcatattttaaaaatgtaagcgtaaacatggaagggacaaaaggaagtatttattgagcacctatattatgctacaccctgctaggcttcttcacacacactgtgtcaatcgagtctcttaatgacctgcggagattgtacatcatctccagtttgcaggtgtggaaactcagtttaagataagaaactttctcaacattacgtcactaagtgggaca

SEQ ID NO: 469189 - DNA, 499 bp, Homo sapiens
gagtgactgagccctgcttctgatgtgagatagtttaacttaggtttaaaaatggatactgaggcaatgtaaaattataagcactcactacactcagtcccagaaatcctgagtctatagacctggagaagttcccatagtcagtgggcacaaagagaggtagattcaagattgatgagatgtttgaaaaatgtaattctagygtaaataacacgaaagagggagaatggagcacggaatttgaagaaataagatgccatccagggaacattctgcttaactcatattttaaaaatgtaagcgtaaacatggaagggacaaaaggaagtatttattgagcacctatattatgctacaccctgctaggcttcttcacacacactgtgtcaatcgagtctcttaatgacctgcggagattgtacatcatctccagtttgcaggtgtggaaactcagtttaagataagaaactttctcaacattacgtcactaagtgggaca

SEQ ID NO: 469190 - DNA, 443 bp, Homo sapiens
ttcagatcaaactgaagtacttactttttccatttctatgcaatcaccaacataatttacttcaatttggaaataaatgtcacagttctcttagttgttaactgtatccttggcttaggttatttgcattttctttctttctttctgtagtgtggtttatacacaaggagaatcacgaacccagacactagtcaatctctctattccctgacttgtactgagattggggaatttgggaggtcagacttacctcaaacgtagaagaaggcagatagagttcttaaccttttycaacttagccacctcaattatttgttcacattttaaggaagtaggaaagagtagtttgaagtcacaaaatttgttctcaggtgttcttaaagctccctgttctcactgcgacagaagactcaggcctactcattttgtgctgtcccacaaaa

SEQ ID NO: 469191 - DNA, 618 bp, Homo sapiens
atctccagctccccctcctctccaggaactcttctgtaaaccaatgaaacagcctgaaaaggagtagaacacttagaaccacttagggcaccatgatggtagcgtaagaaaaaaaattgtgctgggtgtggtggctcacgcctgtgattccagcactttgggaggccaaggagggcagatggcttgagtctaggagtttgagaccagcctgggcaacatagcaagacctcatctctactaaaattcaaaaataattagctggcagtggtggcatacgcctgtagtcccagtactttgggaggaaaaggcgggaagatcgcttgagcttgggaagtgaagtactgcactccagcctgatgacagagtaagaccctgtctcaaaaagaaagaaagaaaaagttgatttagagaccctcctgccgccaccgcccaatcccaaaataccgactctctgcctgttcaccctgaagaaaagtcggccagtggacaatcacccttcakgagcacccagtcagtgttttgctattcatagaagagacccatccagaaaacaaacccacaagtacagcagtagaagaaagccacatcagccgtgatactgtgatggttaattttcag

SEQ ID NO: 469192 - DNA, 618 bp, Homo sapiens
atctccagctccccctcctctccaggaactcttctgtaaaccaatgaaacagcctgaaaaggagtagaacacttagaaccacttagggcaccatgatggtagcgtaagaaaaaaaattgtgctgggtgtggtggctcacgcctgtgattccagcactttgggaggccaaggagggcagatggcttgagtctaggagtttgagaccagcctgggcaacatagcaagacctcatctctactaaaattcaaaaataattagctggcagtggtggcatacgcctgtagtcccagtactttgggaggaaaaggcgggaagatcgcttgagcttgggaagtgaagtactgcactccagcctgatgacagagtaagaccctgtctcaaaaagaaagaaagaaaaagttgatttagagaccctcctgccgccaccgcccaatcccaaaataccgactctctgcctgttcaccctgaagaaaagtcggccagtggacaatcacccttcaggagcacccagtcagtgttttgctattcatagaagagacccatccagaaaacaarcccacaagtacagcagtagaagaaagccacatcagccgtgatactgtgatggttaattttcag

SEQ ID NO: 469193 - DNA, 523 bp, Homo sapiens
gtgaatctgttgtgcagatcaggataaggggagttccacttgggtctgacaaatgttgaaatggtactaatgtcatttttaagccttcgaaaataacccacaaaagactagatgaccggggacgggggaacatggagggaatccgatttaattaaaaaaccctaagtcaggaaatgaagaaagttaatagtaatttacccaccttgcgtatttgtagcattcaaaatactgaacttcctggcaaagcgtgagaagcagaggaggaggaagttaacattccttgggtctggaagtatcattcattacttcccctcttccgcccaatgacaggagcaggtctgctgtcctttyaatagttgaggaaactgaggctcacggattacttagggccatgctgcaaggaagcagtctagcaggattttgaactcccgtgtgcctgcctttcaagcttctccactcttataagtgaacaagtttgttgttgtttttgttgtttttgagactcagtctcactctgtcaccc

SEQ ID NO: 469194 - DNA, 523 bp, Homo sapiens
gtgaatctgttgtgcagatcaggataaggggagttccacttgggtctgacaaatgttgaaatggtactaatgtcatttttaagccttcgaaaataacccacaaaagactagatgaccggggacgggggaacatggagggaatccgatttaattaaaaaaccctaagtcaggaaatgaagaaagttaatagtaatttacccaccttgcgtatttgtagcattcaaaatactgaacttcctggcaaagcgtgagaagcagaggaggaggaagttaacattccttgggtctggaagtatcattcattacttcccctcttccgcccaatgacaggagcaggtctgctgtcctttcaatagttgaggaaactgaggctcacggattacttagggccatgctgcaaggaagcagtctagcaggattttgaactcccgtgtgcctgcctttcaagcttctccactcttataagtgaacargtttgttgttgtttttgttgtttttgagactcagtctcactctgtcaccc

SEQ ID NO: 469195 - DNA, 486 bp, Homo sapiens
ctctagggggcagtatcaaccgttgctttaggtctttgttgcttggcttctgctggtgtgatgggtgcattgactgcagagtatatttctgttttcgaggatgggaatataactgatgtgttagcaaatgcagtcaaaagcaggctcaggtcaggtgcggtggctcaggcctgtaatcccagcactttgggaggccaaggagggtggatcacttgagttcaggagttcgagactagcctggccaacatgacaaaaccctgtctctaytaaaaatacaaaaattagctgggcgtggtggcagacgcctgtagtcccagctactggggaggctgaggcaggaggattgcttgaacctgggaggtggaggttgcagtgaactgagatcgtgccactgcactccagcctgggcaacagtgcgagactctgtctcaaaaaaaaagagaaaaagaagcaggctcagatactttctcatttaactcatgtgca

SEQ ID NO: 469196 - DNA, 638 bp, Homo sapiens
tatgcagtcggcgctcagtaaaagcttgctgattcagtgccttaatgccgactgcaaacctgggtcctgacacctctgcgaggtgagcagtagtgctaaagggaagacgggaaaaccacagacgagagagaggccgggcgcggaggctcacgcmtgtaatcccagcactttggggggccgagatgggtggatcacctgaggtcaggagttcgataccagcctggctaacgtgctgaaaccctgtctctactaaaaatacaaaaacattagccggacatggtggtgaatgtctgtaatcccagctactcgggaggccgaggcaggagaattgcctgaacgcgggaggcagaggttgcagtgagctgagatcgcgccattgcactccagcctgggcgacagagtgaggctctgtctcaaaaaaaaaaaaaaggagagagagagacctgggctttccttgaacattagagctctctttcatgctttcagttcaaatccaaggctagcagaattgttcatcccgattcttggttatcttaagttcaggcacgtttgggtccaggagctcaaacgatataatgacctattcttcatctctcaaccccccctgtgccccatgtggtaccaagacaagccaccag

SEQ ID NO: 469197 - DNA, 618 bp, Homo sapiens
ttcttttgtagcagtataatcaagagctttaaaacrtaaccacttactctatattgcttttaaaattacctctaaagtacatgattgaaatgacattcagcccttggaatatgtagccattatttctacaatgacgagtaaatctctgttaaatttatttgctctttgactgattccatgaggaaacatctgtaagtacatgattgaaatgacattcagcccttggaatatgtagccattatttctacaatgatgagtaaatctctgttaaatttctttatttgctctttgactgattccatgaggaaacatttgtaagcatctaaaattagtttatgtattgaggtaatttcaatctaatgtgtaatttcagtctaaacactatagtgttcaaactgattgagagtgtcccaggaaattagagactttgtaaggacttgactattaggcagtatccacttttatgaggaaaatttttagggaaataccttttcttatatttgggtaaatacttgtaatttgggtaaaagcttttaaatagaagtttgtacttaaaaatttcctcagttaaactttgggaaaaataagttctgcacgtgtaacaaagttttagttgaa

SEQ ID NO: 469198 - DNA, 517 bp, Homo sapiens
ttctgcgttatgtttaccaataaggccaagaagagggtgaatgtcaattaaaacagaagatcacttataacccaagcaatgacccagggtcaggaacggggcaccaggagcaagtttctgtgtatcagagtcacagagagaggcttgggtttgagagaggttgggtttgaggcctcacacctgtaatcctagcactttgggaggccgaggcaggaggatcactggagcccaggagtttgagaccagcttgggcaggacagtgagactccatctctctctttttttataacaaaaagaaatttaaaaagaaagaatcactgagagagctggttaaatgcagattcttggaccctgcctcaataatgcaaaaacacaacttctatgatgaatttttatctttggtaagcatttrtccatccaaagtgatgctgatgtgcacaggagtttgagaaacaatgttttagaggaaagactacataacatgacttggaatgaagcacatctagtgccaaataaa

SEQ ID NO: 469199 - DNA, 551 bp, Homo sapiens
gtgccttgaatggaaatggcctcttgaaaggccagtcctcccactgtgttcaggcattcctagcctgttattcaggctattggacattttagccagagtgagtcagtttctccatcctcatgcaaaggtggaaaccagaccctgggctttggtggccccatgagcttgctgcctctctgagwgtggtaggtagaataatggctctccactatgtcctaatccctggaacctgtgaataatatgttacactacatagcaagggggattaggctgcagatggaattaagtttgctaatccagtgaccttaaattaaggagattatctgggattatctgagtgtccaatgtagtcacaagggtctttaaatggggatgagaaggttgaagagtgagaaccaaagagatggcatggtgagaaagaacttaaccacccattgctggctttaaagatggtgagaggggccacaagccaaggaatgcagggagctttagaagctggaaaggacaaggaaacagattttcttcctagagcctccagaaggaaatgcaac

SEQ ID NO: 469200 - DNA, 565 bp, Homo sapiens
atagcaagggggattaggctgcagatggaattaagtttgctaatccagtgaccttaaattaaggagattatctgggattatctgagtgtccaatgtagtcacaagggtctttaaatggggatgagaaggttgaagagtgagaaccaaagagatggcatggtgagaaagaacttaaccacccattgctggctttaaagatggtgagaggggccacaagccaaggaatgcagggagctttagaagctggaaaggacaaggaaacagattttcttcctagagcctccagaaggaaatgcaactcagstgacaccttgtttttagcccagtgagacccatttcagacttctgacctccttctgaactctaaaatcataaatttgtgtcattttgagccattaaatttgtggtaatttgttctaacagcaatgggaaactaatgtaccaggcatcctgcctaaagatcccacctgggttgcctggagacatccctccctctgaatctaatagtagcctctggtggtggagtcacactgacctgggtttgaatcctgacctcaccacctac

SEQ ID NO: 469201 - DNA, 565 bp, Homo sapiens
cctctgcccaggtcactctgaggctggggtggcctcgaatctctgttgcaagggcaggcctccagcccctagtcagtcagccttgggtgcaggtgcctaggaaggggtgcaagacagaggaggggcagctctctctgtctggggcacacctaagggttgggaaagaagtccctcagccttgaggggatctgagtgagcatcacagagcccacccacagccttgcgtgccctattttggcccatcccccattggaggtgattgtgtctctccagcaagctctcaaggaacttgagagagcaaataggataagagcataggtaaaagggttttagaataaaggtgctccaggaaacagtcgattactcggaattaattagagaaaacaggagaccaagtttgaattagagaatattmttaaggaaaaagaattattttgcattcatttctgtactcatccggaaatatttactgagcacctactatgtgcctggtgcaggggatgtggtcctggacttcatgaatgcactttctaaggaagggaaccagccacgggttatacctgaa

SEQ ID NO: 469202 - DNA, 565 bp, Homo sapiens
cctctgcccaggtcactctgaggctggggtggcctcgaatctctgttgcaagggcaggcctccagcccctagtcagtcagccttgggtgcaggtgcctaggaaggggtgcaagacagaggaggggcagctctctctgtctggggcacacctaagggttgggaaagaagtccctcagccttgaggggatctgagtgagcatcacagagcccacccacagccttgcgtgccctattttggcccatcccccattggaggtgattgtgtctctccagcaagctctcaaggaacttgagagagcaaataggataagagcataggtaaaagggttttagaataaaggtgctccaggaaacagtcgattactcggaattaattagagaaaacaggagaccaagtttgaattagagaatattcttaaggaaaargaattattttgcattcatttctgtactcatccggaaatatttactgagcacctactatgtgcctggtgcaggggatgtggtcctggacttcatgaatgcactttctaaggaagggaaccagccacgggttatacctgaa

SEQ ID NO: 469203 - DNA, 631 bp, Homo sapiens
tccctcaccacctccatcccagaagaggtgaaagcaagagctccttagaaagagccagagacagtgtgattccaggactctggaaagtaagttctagcaattcccccactccaagtactggcatggtgtggcacagcggggcctgggaccctggctgctctccccagtgacctgcccccmacccccgagtcttctccaagaagaacaagtgcaatggatccttgactcccctgtcactgttgtagggacacgcccatcaggatttccatccctttgtccatccttccatccatccatttattcaacagatacctacggaatcttctgagaacctgaagttagaagacctgggtccaggtggtggcccctgccaccaacccactctggtagctttggacaggtctctgcctccttctgggcctccgtttgttcctttggaaagtgggagtgtctggaccagatggaggaatttccagactcctcctttcagaaacggcagcttccgtggcccaggtgggaaggtgtggcgggggacggggctgcagggtggctgactcagagcctagggaagccccagtcgctgcttctagcaagaagttggcgctaggtatcctttggcctgtggtcagtg

SEQ ID NO: 469204 - DNA, 631 bp, Homo sapiens
tccctcaccacctccatcccagaagaggtgaaagcaagagctccttagaaagagccagagacagtgtgattccaggactctggaaagtaagttctagcaattcccccactccaagtactggcatggtgtggcacagcggggcctgggaccctggctgctctccccagtgacctgcccccaacccccgagtcttctycaagaagaacaagtgcaatggatccttgactcccctgtcactgttgtagggacacgcccatcaggatttccatccctttgtccatccttccatccatccatttattcaacagatacctacggaatcttctgagaacctgaagttagaagacctgggtccaggtggtggcccctgccaccaacccactctggtagctttggacaggtctctgcctccttctgggcctccgtttgttcctttggaaagtgggagtgtctggaccagatggaggaatttccagactcctcctttcagaaacggcagcttccgtggcccaggtgggaaggtgtggcgggggacggggctgcagggtggctgactcagagcctagggaagccccagtcgctgcttctagcaagaagttggcgctaggtatcctttggcctgtggtcagtg

SEQ ID NO: 469205 - DNA, 383 bp, Homo sapiens
tacttaagcaagcaggccactcggttccacacagggtttaggaagaaacaggctgcagggcaagaggctgcaaaacaggatgattgctcttaaattcctctaatcctaggagaccatttctgtctgctgattctctcttctttttttttttttttttttttttttggagacagggtctgggctggacttgarctcctgggctcaagcaatcctctctcctcggcctctagagtagctgggactataggtacatgccaccacacccttctccccaaacttcctactgctgtggtcctcacccgcagccaaaaggcaggtgtgacagtgcgaaagattggtcctccctgggttctaactggtgaatcacaaactcggttttcttc

SEQ ID NO: 469206 - DNA, 511 bp, Homo sapiens
agcaactaaaccctctcatcaaagacccatcctcatccattccactgtcctcagtctgctgaccttattcctcggggttttcactttatgttcacaaaacatctgttatagctccaacaatcacctgtatccaaagaagaaagcaagaaaacaatgcagaataactctcctcacatatccctctctttttattcggaggtaagtcttctccagaagcctaaaaatgacttccctctatgtcttatcagtcagaaataaaacacacagccaacctcattgcagggagaactgtcaaatgattatctcttattttcagccactatcacgagagaaattttgtggcrttagaagggaaggaacaatgtcttctatagggcaggacaccaacatcttctacctcagtgaagcttgtgaaagatgttcataataggaaattgtgtttgttcaatttaactatagagtatacttgttatttgttaagtgagttactctctgaagctttaaatcaaat

SEQ ID NO: 469207 - DNA, 488 bp, Homo sapiens
ggcatccagggctggggtcgcagccgtggatggggccgggaccgaggccacggagctcgtggaggcaaggccaaggataaggagtagattcccatcaccaagctggggctcctggtcaaggacatgaagatcaagtccctggargagatctatctcttctccctgcccatcagggaatctgagatcattgactttttcctgggggcctctctcaagcacaaggttttgaagattatgccggtgcagaagcagacccgtgccagccagggcaccaggttcgaggcgtttgttgccatcgaggactacaatggccacgtcggtctgggtgttaaatgctccaaggaggtggccactgccatctgcagggccatcaacatcctggccaaactctcgattgtccccgtgcgcagaggctactgggggaacaagattggcaagccctacgccgtcccttgcaaggtgacaggccactgcggctctgtgctggt

SEQ ID NO: 469208 - DNA, 434 bp, Homo sapiens
acttgaacctggggggggcagagcttgcagggagccaagatcgtgccactgtactccagcctgggtgacagactgagactccatctcaaaaaacaaaaaaaagaaaaagaaagaaagaaaaagaaagaggtaattctgggtgccgccatggaaatggtaaactgacatggtgcactggtgagcgtgtcttatggaaagctgctttcaccctgtccctgtttcagctagtcatcaatttggtctggtgtccaagccccacctctggagtccagttccacctcctaactcagtgtgggctttattacctggcttgccttcttgaagtggcctygcatggcagagagaaagctagagacctctctggggcctcttctcataaatatactaattctattaaatcagggcccagttttatgaccttatgtgaccttaat

SEQ ID NO: 469209 - DNA, 429 bp, Homo sapiens
aatccacccaccaactgtttccatgccttcagggtctctcctctcaggcctctgtagggcccacacatcttatagccttcactggttaactccttcctttcacagtccaccttccagaaggagcatctatattcccacttccccttccttacctctcaatcagtcaccaccccagtgcccgtgccctccactgaaccagctcttcccaaatttgcagggactcccagttgctgaatgcaacagcaatggcaatctcttcatcttaatggctttgtattattattttatttataatattaaattgaaatatgtttataaacttggcataggatgaggcaggttaagagccagtagagaaaaaascgtaaaaagtaaagaaaaacatgtatgggcatgcccaggcacacagtaggagattaatatatggca

SEQ ID NO: 469210 - DNA, 577 bp, Homo sapiens
actcctacttgcatcaaactagcataactgttttagtttaagggcagaaaggtcactacatatttttggtattgacaaggagctctcatctcatgaagagatggatgctgctgatgtgttgtccctctggactgggacaaatttattctgatttctctaaccagctcagatgggctccatctgctagactcaataacactttccgtcagaggtttgacagacagcaaggtcatgtgataggcaactcagacccagaaatgacaagtccagatccatctctgtcttgctgtgtaatttctggtaagacagataagaatgctgagaaattctttcacttttctgccacagcrgcatggctactcctatacccttgaccaaagtcctacacccatcaaactgagaaggtcaacctctttctcttggttgacaaaggaggctcacccagatgggtgagggaggaaggagacctcttttgacattccagatcagccaacccaaccttggcaaccaagacagtagcagatgtcatggtagatccacttcctatcagagaaggcagacccaggaacaaccagtg

SEQ ID NO: 469211 - DNA, 462 bp, Homo sapiens
gacactctgggtggacaacagtagggggcaaacaaaaagatcaatcctcccaccrctgcagcagtcaatcggaaacggtgacagcatggtgagggctgaggcctgggtcctggacacaaactccactctccagaaacactcccactactggcccttattattcattgtaccgacagctataagagctcctatgtattgaataattttaggagccgacagttacagcactgacttcacaataactctatcatagctattatcagcagcgtctccactttatagatgaggaaactgaggctcaagaaagcttaatagcagtaatatcagtaataataacaataacttatatttgttgagtgcttattatataccaggaagtgcctatattatattgacttatttcactcattccttcaacagatacttactgagcacctactctgtgccaagtgccattttagg

SEQ ID NO: 469212 - DNA, 548 bp, Homo sapiens
acagttaggaacaggcaatacaatcagttcaaatattttacctcctcgtgcaaggaatagctctgttgcaatgggactgtttaaaagaggagatgaaaagagccatcctttggccgtttatgtgtccagcagggccccgaggggcgacgggttttctcaccaacttctcgactctttgaccttgaattaaagcctcgttaagagtcatatcttataaaaacaggagcagagtaaataaaggatttttttttaaggacacacatatacccatgccaaagtttccattctgctaagcaagcargaaatccaatgcagcaaaggctgcacttggcattattttggggcccgtagtcaacggctgacctgattagaaaggaggacttgggaggggaaaatataagactctcgagcagggctggaaacagactggaacctgggaggaggctagcccgtctgctgagtgatggagagaagggtgagttgtatctatgctctgagctactgagagaccccagaagagcacagaagctcccactggctccttggag

SEQ ID NO: 469213 - DNA, 480 bp, Homo sapiens
tgtgccatcagctcttgccattccttccactctcatcactgggaaaactcacgtggctggactgttcctgtgagcgcgggatggggtggagcatgggaccaggcagcaggcacatgtgtactggctgaacgtccgccccaaaaggatacctctgtgtcctaacgcctggaacctgtgaatgtgactttattcaaagtgtctttgagctgggcatggtggctgcacctgcagacccagccattcgggaggctgaggtgggaggatcacttgagctcaggaggtcaaggctgcagtgagccaagattgcaccactgtacttcaacctgggaaacagagcaagaccctgtctcttaaaaaaaacaaaaaacaaaaamcaaaaaacaaacaaaaaccaaagtgtctttgccgatataattaaggatcttgagatgaaatcaacctggattatccaggtggccccaaaatctaatgacaagtgtc

SEQ ID NO: 469214 - DNA, 480 bp, Homo sapiens
tgtgccatcagctcttgccattccttccactctcatcactgggaaaactcacgtggctggactgttcctgtgagcgcgggatggggtggagcatgggaccaggcagcaggcacatgtgtactggctgaacgtccgccccaaaaggatacctctgtgtcctaacgcctggaacctgtgaatgtgactttattcaaagtgtctttgagctgggcatggtggctgcacctgcagacccagccattcgggaggctgaggtgggaggatcacttgagctcaggaggtcaaggctgcagtgagccaagattgcaccactgtacttcaacctgggaaacagagcaagaccctgtctcttaaaaaaaacaaaaaacaaaaaamaaaaaacaaacaaaaaccaaagtgtctttgccgatataattaaggatcttgagatgaaatcaacctggattatccaggtggccccaaaatctaatgacaagtgtc

SEQ ID NO: 469215 - DNA, 524 bp, Homo sapiens
taaatcatatagtgtttatgttatttgttatggaacttgatagaaaacatgtgataccgaccgggcgcggtggctcacacctgtaatcctagcactttaggaggccaaggtgggcagatcatttgagctcaggagtttgagaccagcctggctaacatggtgaaacccgatctctactaaaaatacaaaaaaaaattagccaggcctggtggcgagtgcctgtaatcccagctactcgggaggctgaggcaagagaattgcctgaacctgggaggcagaagttgaggtgagctgagatcacgccactgcactccagcctgggcaacagaacaagactcagtcaaaaagaaaaaagaaaaaagaaaacgtgatactgagtgccatcttattggacttgtttttgttgttgttgttgttgttattgttgttgttttttgacagagtctttagctctgtygcccaggctggagtgcagtggtgcaaacatggctcactgccacctcgacctcccaggatcaagtgat

SEQ ID NO: 469216 - DNA, 516 bp, Homo sapiens
gtgaggtgatggatattttaattagcttgattctgttgattatttcacaatgcataatatgtcaaaatgtcaagttgtacaccttaaatatataatttttatttgtcagttatacttaaagctaaaaagatatgacccattttagaaaagcggttatttttttaaaattcctacttatatgtcaaaacaatgtagctatccaatacaaatgcaaagtccttacaaatattgtttaaaaattcatgagtctagtgtttaatatatttagaacaaagccagaaaatttttacagaagatgtaaaacaaatgtcctgttattattactattctgctttttccggtgtttcataacagctgagtaaacaatcaataccaaatagtaaagaagtgtcgctgagcagatratggacttgaattagataaacttggcctgggtagactgaatacaccattggggcgtattattctcacttacggtttaatctgatagctaccaacttgaagttgatagcttta

SEQ ID NO: 469217 - DNA, 624 bp, Homo sapiens
attgttttgtcaagaaaaaatgtagtttattgatttatatagtagccttcgatggggcagaaaaagacagaagaaggagataagagacaatgaaggatgggaaaggaagggacactaagttgagaaaacttcatgaacaagacacagaagtggaaaggatgatgggaaattcaagaactagtgagtgatgagactaaactgacgtatttgagttcagttgttttgacagcataagtaggtagtatgtgaatcctagaggtcttcccataatgtttcaatctctggtcagatctaccaaacccagctctggaatcccattgtttatagtggtctctggttcagagggagtcattaagcagtgtcttggattctaaggaaatgtctctcagcagaacaaaaaaattaactctctacttcttyacaatcacaagcttagcattgtattacattgtttcagaggcctttctttctccaggaaaggtaaacaggttttattgtaccttccctccattatatccccaactttccattatgttctgtatgttaatctgaggagtcatcaatcaagccctttgtattcatgtcaagaacagatttatgacctcccaaagatctcgccactgt

SEQ ID NO: 469218 - DNA, 671 bp, Homo sapiens
agtcagggggccaaggtgaaggaacattatgtcagaaagacagcataaaagtgattcgggatctgagaggtttaaaatgagtttgaaatattaaaatatgtctcagacaaatatgaggctttgtcggttatttgaatgttgcataagaattcaaaatattgttacagggtatgtcacattaagaattcatagtctgaaaattatacactggcagaatcttttaaatgacctcctccccgtgcctctccatacctcatcagacaagaggagattcagtgggaaagcagtaattataatcctacattggcagacttttggtatgtgcctgagcaaaacgggtgagagagggtggggttaaagaaagaaaggaagttaagtgacctaataaggcccaggggaaggcccatatagcaaacgtggttcttaaccttgaataaaggtcagctgctagggggctgagctaatcattgtgtattttatagatatacagttatctggtaaaagtttctgatattggatttgttcctgtagarcctagtcttcttgattacagaattaccaatgtagatggaatctcaaaatattatacatctcttggcccttaggaagattcacttgtgtatctgcattgcatcagaaggggaaggaaacgagaacaggacatgcacatt

SEQ ID NO: 469219 - DNA, 591 bp, Homo sapiens
agactagaatgcacaagagtgagttagccaggggaatacgtcttagaaggactgtcgctggaactctttctgagttagtgcttcacgggatggcaagatactactgctgagtaattgcaatgatccaactggagttgaagttggaaggggagagaggtgagcaacaaggctgggcaggaaagcaagagtttgattgagggggcttggaagcctcttgctccaggtctatcaccagaatgtgggtgtggagtcccagggcagccccagggctggtgctatgaaatgagtgctggaattcgtggctcctggggaggagcaatgatggacatgtgatttcaacgaagcccacagggtcaccaatgcaaaggcctgcagggctggttgcagcatgcccatgcccataggggatagccaggtgactaagtgctgtgggtgacccaacagccttcctcacccccgaaagtgggcagacaccacctggatccaggtaagtgtggcggtgagaaaatcaagaaaatctrgaaatctacattttattctgttttcttttcttttgagactgagtctcactctgtctcccaggctgtagtg

SEQ ID NO: 469220 - DNA, 597 bp, Homo sapiens
tattggataataaaaataaaataattatggataagcagagactgacaaaaaagaaaataaaataattaggaaaaaagtttattggataaattaaataaggaaaaatgaaaaagcaatgaggaggctgttgataaatatttcttctctgctccctcctactcttattggttctgttaattgcttcctctgggtgaatttattgcttcaaaaggagatgctcattcatggtgggcacttagttagagcttggagttagttaatgagatcccaattgtggtttgaggcccagggtgttgggagatttagttgcttccattcagaagcccctcctgtgggtttcctcacttcagtctgcagcccccaccagcccggtgacctggcagattaaggcagatgagggagggcaggcagaggaagggccatccatcaccattaccagccaagcctcttcacaagacacaggtatccttcagcagcactcagcagcagcagyagcctggaatgggaagacagctcattatgagtttattaatgcacagttcggcggggctggaagagtttgctgggtatcctggagggtccagccaggccatgctg

SEQ ID NO: 469221 - DNA, 508 bp, Homo sapiens
ctggctgcctgtttttgtaaacacagttttattggcacacagccatgtccatttgtttacatattgtttgtggctgcttttgagcttcaaaggcagaattgagtagctacaacagcctgcatggcacagaccatatgtcccacaaagtctaaaatatttactatttggccctttacagaaaaggtttgatgatctctctttatccctttctgtactatttaattaaaaaaaatgggacatagtatttaaattgttttgtttgcaagttaatgtgaccttattttgtagtaacaggatgctgaagccacggactaccatatccattatctgttgccacaataatgctgtaaaaaaaatattactccaaaactcagtggcttgaaacaaccaccatttatggatcattagggtggttcttctggcctctgctgggcttgtttacatatctgtgggttgtgtaggaggytctgctgattttggctgggctctctcacatgttggccttggc

SEQ ID NO: 469222 - DNA, 542 bp, Homo sapiens
ctgactgtgaggtcctacagaagtaaaaagtaaaaggtaaggctgtcttatgaactgcttaaagtttgaaggtgggccttcaaaggatatccttgaaaaataatagaaaagcattttaggaaatctgatggtctttagctgatcactaaattatagtgacccagaggggacygctagaaacccatgcttaaaaacaaaaacaataaaacacacacacacacacacacacacacacacacacacacattcaggagaactcagtggcagggaatagagaatctatacaattagttcaagaaatccttgaggagagatgaaccaaatactggagttgttacaatgtattctctaaaatacccagttttcaaccaaaaaaattactagatatgcaaataaacagcaaagtgtgcaaaatacacagggtaaaaagcagccaaagaaaatgtctatgagctggcccagattttttatttaatagaacatagtgatttccagggattaaggagggcgtacaggtagaaggtaagagggtgtggctataa

SEQ ID NO: 469223 - DNA, 542 bp, Homo sapiens
ctgactgtgaggtcctacagaagtaaaaagtaaaaggtaaggctgtcttatgaactgcttaaagtttgaaggtgggccttcaaaggatatccttgaaaaataatagaaaagcattttaggaaatctgatggtctttagctgatcactaaattatagtgacccagaggggactgctagaaacccatgcttaaaaacaaaaacaataaaacacacacacacacacacacacacacacacacacacacattcaggagaactcagtggcagggaatagagaatctatacaattagttcaagaaatccttgaggagagatgaaccaaatactggagttgttacaatgtattctctaaaatacccagttttcaaccaaaaaaattactagatatgcaaataaacagcaaagtgtgcaaaatacacagggtaaaaagcagccaaagaaaatgtctatgagctggcmcagattttttatttaatagaacatagtgatttccagggattaaggagggcgtacaggtagaaggtaagagggtgtggctataa

SEQ ID NO: 469224 - DNA, 596 bp, Homo sapiens
tttcaaaaaaccagctcctggattcactggtgttttgaaggtttttttgtgtctccatctccttcagttctgcttgatcttagttatttcttgccgtgtgctagcttttgaatgtgtttgctcttgcttctctagttcttttaattgtaatgtcagggtgtcaattttagatctttcctgctttctcttgtggacatttagtgctataaatgtccctttacacacttctgcctgttattttaatgtaaacgttaactgctgccactgccactctcataagtgttctggtttggacaagaaattatatggtcrccctacctcccgagtttgagatggtcactacttccagagaaacctgccttcactaactagctgctggttttttttttctgtaccctcatgtgcacatatgagtggagtgccacactcttatagccactaccatcgccactctttctgagaccggatctcaaaaataatctcaccattgccgttactctttggccctgccatctactttataattttctactctttaagttttgcttagaacaattttctatatctacctagttggatcaaggactgggtttgga

SEQ ID NO: 469225 - DNA, 601 bp, Homo sapiens
tactcatcatggcagagttgtgtgaccttcgaggatgtgttcgtgtacttctctcgggaggagtgggaactycttgaggaggcacagagattcctgtaccgtgatgtgatgctggagaactttgcacttgtggctacactaggtaagtctgtgttttagttatctaatgctacatggcaaattatcccaaagcttagtaactgcaaacaataaaaatcaattatctctccagtttcagtgcattggtaatctggttagagcattttttgttgtttattattttgagggtttttttttgttttttgttttttgttttttcagagagtcttactctgtcacccaggctacagtgcagtgttgtgatcatggttcactgcagcctcaaattcttgggctcaagtgatcccccccacctcaccctcctgagtagctgggactataggtgcatgccaccacgcccggctattttactttttgtagagataaggtcttgctacgttgcccaggctgatctagagctcctgacctcaagcgatccttcctccttggcctcccaaagtgctgggattacaggcttgagccagtgtgcccagcctgatca

SEQ ID NO: 469226 - DNA, 601 bp, Homo sapiens
tactcatcatggcagagttgtgtgaccttcgaggatgtgttcgtgtacttctctcgggaggagtgggaacttcttgaggaggcacagagattcctgtaccgtgatgtgatgctggagaactttgcacttgtggctacactaggtaagtctgtgttttagttatctaatgctacatggcaaattatcccaaagcttagtaactgcaaacaataaaaatcaattatctctccagtttcagtgcattggtaatctggttagagcattttttgttgtttattattttgagggtttttttttgttttttgttttttgttttttcagagagtcttactctgtcacccaggctacagtgcagtgttgtgatcatggttcactgcagcctcaaattcttgggctcaagtgatcccccccacctcaccctcctgagtagctgggactataggtgcatgccamcacgcccggctattttactttttgtagagataaggtcttgctacgttgcccaggctgatctagagctcctgacctcaagcgatccttcctccttggcctcccaaagtgctgggattacaggcttgagccagtgtgcccagcctgatca

SEQ ID NO: 469227 - DNA, 471 bp, Homo sapiens
gctgtatccgcctgtcgggtgtgcaggctgtgcactggttaagcctgagcgcagagtctgttcaacgagttcattgtgtggtatttgcttccgcttgctgttgagttggactggcctggatgctggccaggagcccaagtggacttggtgcttctctttgacagccaggattgaaaagcccagtcaagtgggcagagcacgagggtgagatttaggagacctggatgtcctcactttgccgcccaggaactgctgtgtgactttcagcaagtgggacaacctttctgaactatgtttacaccagctataaaatggaggtgttggattggctgccacaagtgtcctccacctccacaataccgtaactggagcgggttttcactcctttttcttgttagcataactgttggagctatagagggtttggagtggggtrtgggtttctgggccacagatgtgtgaggctccgca

SEQ ID NO: 469228 - DNA, 608 bp, Homo sapiens
gtttgagaggctgaacccatgaggtcgaggctgcacccatgaggtcgaggctgcagtgagctatggtcatgccagtgcactccagcctgggtgacagagtgagaccctgtctcaaaaaaggaaacaaatcacccataaatggataattaagatttggttattatagacacttaatacttaggtagctaaggtagttttaccaataaattataktaatttaatatttcagtattgcaaaactgatgcatactcatttacaattttgacatggaatggttctgttttgttttattaaatttgaacttaaagttctctgcaagaagagatttgtataataaattccctgagcctcccaaattaatattttagccatagactcatatttagagcagtgtttctaatgtaatgatacaaggcccagggttattcatagtttcaccctttctcttattcctcattaaagcatgtttgaatccaggtaagaggcattacaggggaaaaccttgaatttatttttgaagggtaaatcatttccaagtggtattaaccattagtatggaaagcaacatatcctataactgctctgtgacagtgagactatctttgct

SEQ ID NO: 469229 - DNA, 608 bp, Homo sapiens
gtttgagaggctgaacccatgaggtcgaggctgcacccatgaggtcgaggctgcagtgagctatggtcatgccagtgcactccagcctgggtgacagagtgagaccctgtctcaaaaaaggaaacaaatcacccataaatggataattaagatttggttattatagacacttaatacttaggtagctaaggtagttttaccaataaattatagtaatttaatatttcagtattgcaaaactgatgcatactcatttacaattttgacatggaatggttctgttttgttttattaaatttgaacttaaagttctctgcaagaagagatttgtataataaattcyctgagcctcccaaattaatattttagccatagactcatatttagagcagtgtttctaatgtaatgatacaaggcccagggttattcatagtttcaccctttctcttattcctcattaaagcatgtttgaatccaggtaagaggcattacaggggaaaaccttgaatttatttttgaagggtaaatcatttccaagtggtattaaccattagtatggaaagcaacatatcctataactgctctgtgacagtgagactatctttgct

SEQ ID NO: 469230 - DNA, 608 bp, Homo sapiens
gtttgagaggctgaacccatgaggtcgaggctgcacccatgaggtcgaggctgcagtgagctatggtcatgccagtgcactccagcctgggtgacagagtgagaccctgtctcaaaaaaggaaacaaatcacccataaatggataattaagatttggttattatagacacttaatacttaggtagctaaggtagttttaccaataaattatagtaatttaatatttcagtattgcaaaactgatgcatactcatttacaattttgacatggaatggttctgttttgttttattaaatttgaacttaaagttctctgcaagaagagatttgtataataaattccctgagcctcycaaattaatattttagccatagactcatatttagagcagtgtttctaatgtaatgatacaaggcccagggttattcatagtttcaccctttctcttattcctcattaaagcatgtttgaatccaggtaagaggcattacaggggaaaaccttgaatttatttttgaagggtaaatcatttccaagtggtattaaccattagtatggaaagcaacatatcctataactgctctgtgacagtgagactatctttgct

SEQ ID NO: 469231 - DNA, 608 bp, Homo sapiens
gtttgagaggctgaacccatgaggtcgaggctgcacccatgaggtcgaggctgcagtgagctatggtcatgccagtgcactccagcctgggtgacagagtgagaccctgtctcaaaaaaggaaacaaatcacccataaatggataattaagatttggttattatagacacttaatacttaggtagctaaggtagttttaccaataaattatagtaatttaatatttcagtattgcaaaactgatgcatactcatttacaattttgacatggaatggttctgttttgttttattaaatttgaacttaaagttctctgcaagaagagatttgtataataaattccctgagcctcccaaattaatattttagccatagactcatatttagagcagtgtttctaatgtaatgatacaaggcccagggttattcatagtttcaccstttctcttattcctcattaaagcatgtttgaatccaggtaagaggcattacaggggaaaaccttgaatttatttttgaagggtaaatcatttccaagtggtattaaccattagtatggaaagcaacatatcctataactgctctgtgacagtgagactatctttgct

SEQ ID NO: 469232 - DNA, 488 bp, Homo sapiens
ccactgcactccagcctgggcgacagagcgagactccgtctcaaaamaacaacaacaaaaaagaaagttcagaggattagaggtaatgataatttttttccttaaagagaaacttatcggtaaagctgagttatgggctttgtcagatgtaattactttttggacgtttagtttttgactttttttttttattttttatactgtgtgtgtgcttcgtgtatcttggtgaaaatctttgtgcctgtagcttttattgttggtatataacttttaaaaaactgatttctttttatgttttcacaagtggaatgaattcaaaggctatgtatgctgtttgttaaaatagagtgtttgaagccttagacttatgatattatagaagctaaacagcgactctaaagtagttcagtagagaattcctcttcttcaaaggctcagggtcatgtagtttgctagtgacagaattgtaagtagagcctaatttccca

SEQ ID NO: 469233 - DNA, 511 bp, Homo sapiens
aaatctggaatcatgtggaaagtttgttaaaatacagattgctgggctctgtccccagagtttctgatccagcaggtctgggagggcctgacaatgtgcatttataacaagttcttaggacatgctgatatttctggtctttggactactcttygactacttcttccctagagaccttgaatagtaatcttccgtgatttgaaaatgtgcacgtctatcatgcatgctaaggaactcaaaagtttaaaaccaccaagcaatgcatgcttatcctgaagccagcgctgtgctaggttcagcacagatgatacagaaaaggctgcatcctgcttgtctctggagctctacctttcatgatcccatatccctgcatttgttccagttctaccaaaccatttacagttctccaaattcaaagctcttctgcacctccacttctttgcacatagtttttcatgtgtccagaatacacttccctactcttctgtttcatcctgcaaaacccagttca

SEQ ID NO: 469234 - DNA, 511 bp, Homo sapiens
aaatctggaatcatgtggaaagtttgttaaaatacagattgctgggctctgtccccagagtttctgatccagcaggtctgggagggcctgacaatgtgcatttataacaagttcttaggacatgctgatatttctggtctttggactactcttcgactacttcttccctagagaccttgaatagtaatcttccrtgatttgaaaatgtgcacgtctatcatgcatgctaaggaactcaaaagtttaaaaccaccaagcaatgcatgcttatcctgaagccagcgctgtgctaggttcagcacagatgatacagaaaaggctgcatcctgcttgtctctggagctctacctttcatgatcccatatccctgcatttgttccagttctaccaaaccatttacagttctccaaattcaaagctcttctgcacctccacttctttgcacatagtttttcatgtgtccagaatacacttccctactcttctgtttcatcctgcaaaacccagttca

SEQ ID NO: 469235 - DNA, 216 bp, Homo sapiens
gttcagcacagatgatacagaaaaggctgcatcctgcttgtctctggagctctacctttcatgatcccatatccctgcatttgttccagttctaccaaaccatttacagttctccaaattcaaagctcttctgcayctccacttctttgcacatagtttttcatgtgtccagaatacacttccctactcttctgtttcatcctgcaaaacccagtt

SEQ ID NO: 469236 - DNA, 506 bp, Homo sapiens
aggaacacgaagataccaccaggcttccttccttaaatgcacagagaacaggtgacttgcaggttgcaggaggtgcatgggcttgcatcaggctgcccaggtttaaattttggccctttcttactgactgtttaactttgaacaagttatctaatatctctgaaccactttcctattcttgaaggaggtgtatatttatgcctgctttgtggagtcaatgggaggatcaaatgagctaacactatattgaattactcttcagacacatgtttaccacattttatcatctctggaattggaatgtgacttacaattgagggtatatcctaggttattggatggagggttttttttcttagtggtacatgaaacaaaagtgaaagttattgawgtcattttagattcggtgatatagtatgactggaacatggtactggcttaaaatatcaggaatgatggtttccatttttactgccaccttgtagcacatcagaattccatgattg

SEQ ID NO: 469237 - DNA, 565 bp, Homo sapiens
ggatggagcggacctcattttgcaaaggaataaagacagtaattaagttgccgtttrgtcttttcctttctgggctaactaatcccaattatttttaaccttttcacataggccttttattttctgaccttttaatgaattttcactgcttacttctggttcttctccagcggttacatagtcttcacagtttgccaaaacttttcagtagtcataatgaaatgattattttccccctatttgcaacagcaaactcccatacatttttgagaaataccgaataacaatgatatgtctaatttttcagttacatttctgtaaggacattttctctccaaagtgtcagctatgctctctccttttctttatttttgtagcttaatgtcttatgtacaaaataaaatgattatttaagatttgttcaaatagctatcaaagcactactagatatgtaagagtgtgctagctactgttagagatagaaaataggtagatgctgttaggtctctgtgatacaaacgccacaatgatgggtattggggaactgatactgtttgagcacctc

SEQ ID NO: 469238 - DNA, 495 bp, Homo sapiens
tgccagcatggccagaataaaagcaggcagaggaatgtggaaagagtagactggctgggtcttctggcctccatctttctcccgtgccggatgcttcctgcctttgaacattggactccargttcttcagctttgggactcttggatcttagaccacagactgaaggctgcactgttggcttccctacttttgaggttttgggactcgtactgggtatcttgctacttagctttgcagacggcttattatgggacctcaccttgtgatcgtgtgagtcaatactccttaataaactgtctttcatacatacatctatcctattagttctgtccctctagggaaccctgactaatacacacaagcaatatcaccaagctgacaaaaatcagacaatagatggtcaaagccaaagcacaccagggctgcctatcctggggatacaaggtaggttagtcagtggacaaatccttcctccaagctcagttccaatgcta

SEQ ID NO: 469239 - DNA, 519 bp, Homo sapiens
acattaaagtataatagacatacatttaaaagctaaatgagatgatataagaaatagcaatgccatttatgtgtgtagacctagttaagttccattgccagcctggcatctctgcatgtcaagccattcagtctcagacactattagggctcagtcccttaatgtcggactttgcagaaaggaaacctcaatttcagccatatgagaccttgagcagaggacttatgctgtgcatagactcttgccctatgggctatcatgagataataarttggtgctgttttaagtcattagattggcaacctttctttggtctaccccagtttctgttgagcactgtatagtccaagtctgcacggttcctgaagttcatttgagctgttgtttccatgacatgtggcaacaggcattcttgatacccaagagcccagaaattgggactcagctcctcgaaggtgcaccagccctccaaattcttatggcgagcacaggtctgcatattcatgaaacctgccaacc

SEQ ID NO: 469240 - DNA, 511 bp, Homo sapiens
aaatctggaatcatgtggaaagtttgttaaaatacagattgctgggctctgtccccagagtttctgatccagcaggtctgggagggcctgasaatgtgcatttataacaagttcttaggacatgctgatatttctggtctttggactactcttcgactacttcttccctagagaccttgaatagtaatcttccgtgatttgaaaatgtgcacgtctatcatgcatgctaaggaactcaaaagtttaaaaccaccaagcaatgcatgcttatcctgaagccagcgctgtgctaggttcagcacagatgatacagaaaaggctgcatcctgcttgtctctggagctctacctttcatgatcccatatccctgcatttgttccagttctaccaaaccatttacagttctccaaattcaaagctcttctgcacctccacttctttgcacatagtttttcatgtgtccagaatacacttccctactcttctgtttcatcctgcaaaacccagttca

SEQ ID NO: 469241 - DNA, 375 bp, Homo sapiens
tcatcttcctcatcatacagtggaagaaacagaggttcagaggaatggagacacggctcaagtccttttagctactgtgtgtaagagacgagttcaacctcagatctgtctgcagcatagaaccagcccttaaccattacttgctcacatgtgacattctgtgcgctcaaaagttaggccacagcggggcgcagtggctcacgcctataatcccagcactttgggaggccaaggtgggaggatcgcttgagcccagggttctgagatcagcctgggcaacatagtgagacctcgtctctaccaaataatgctaaagataataaaagtraaaataaaaagttaggccacctcagagagtgaagcctaggaccttgc

SEQ ID NO: 469242 - DNA, 690 bp, Homo sapiens
gtgcacacacatagcagcagccactcatgcacaygcacactcacccttacccgggacacacgcacacatgcatgtgcacatacacaggccctgctttctggaagccagatttggagcaaagttgacccaggagctccaaggccttgggaattatgggatgcacatcccagaggactgcacatcccagagggctgcacatcccagaaggctgcagacagtggagaggtgtgaagcgcaggcctggatttcacccagctctgcctctcatgaggtgtgagacctaagtgacttcatctctctaagccttggtttcttcatctgtcaggtgggagtgagaatgacagccccttcctcaaggggttgtggggaggtttctcagttgatgcttgcgacgtgcttggcactgtatccggcacatagtaactgttcaacaaatatcagccatgcagtggtcatattattgtgtttcccagtgatctcaatttggaagctgtggcttgagccgcccagccaaatgttttggagatggtcacatgtagcaattaaacagaacacagccatggggacatcaaagaaatggaggaggcggtcctgactgccaagaggctgctggggggtagggagtccttgtcgctttctgggaactgagggcccggtgggttccctgtctcttgcccctcaacttcacca

SEQ ID NO: 469243 - DNA, 639 bp, Homo sapiens
gctggatttcttctagtgataacctctgcatttgtcatgagctaagctagccttagcaccgcaagtaccttaacctacacatggagcaatgaaaaaacaaccttagcatcaggaaggacattgaaaaagtagacatcggggtaaggggagggagagcattaggacaaatacctcatgcatgcagggcttaaaatctagatgacaggttgataggtgcagcaaaccaccatggcacatgtatacgtgtgtaacaaacccgcaaattctgcacatgtataccagaacttaaagtagaattaaaaaaattttaaattttttaaaaagtagaaattgtgttctgggcacggtggcttacgcctgtaatctcagcactttgggaggctgaggtggatagatcgcctgaggtcaggagttccagaccagcctaaccaacatggtgaaaccccatctctactaaaatacaaaaattagccgggcrtagtggcgggcgcctgtaatctcagctacttgggaggctgaagcaggagaatcgcttgaacccaggaggcggaggttgcagtgagcccagatcgcgccattgcactccagcctggcaaccaagaaagactctgtctccaaaaaaaaagaaaaaagtagaaa

SEQ ID NO: 469244 - DNA, 477 bp, Homo sapiens
ctaaacttgccaggtcaatgccaggccttgcactgttctgatgtgtggttacactttcttatcaaaggaaaacacaggggcctcatcaagctctctgtgtcagtcataattacagaaagaaagtttgattctatcttgatttattctctctctctctcttttttttttttttttggtcaaaaggtcaacaacaacaaaaaaatgtttgctcagagagaaaggagattatgtaaataattagcccattccaagattatgttgcatatatatagtacaatggaaagyttaaaaaaggactggaattcacagggggggccagacagtttatgaatttgggaaatagaaactgtctataggtctgcttatctgaatgcatggaggaagaattgggctggttaatggaatgagccctcccccacaagcccacaccaggattctcaacttgcaaagaatcagaaatcagtgaaggcgacctaa

SEQ ID NO: 469245 - DNA, 423 bp, Homo sapiens
tgacccctagcctgattgctaaaaattagctccctacaaagcattttctctgagttacttctgggagtccccaaaggagtgcttcacacgagccaasgagcccagttggtgagctcccatcccacctgctgtctgccttcctctgcgcgtctagcgctggctcccacttgcccatgtctactgtcaagacacagtattgggaagccacactgctgccaccaacagtcaagaataccctgaggaagtcaacagaaaaactatcgtctcttgggtggaaaaagagtggtgccaatcccataaactctgccatgcctgttctaatgttgcaagaattttccacactgcatgcagtgactcacatctgtaatccccgcactttgggaggctgaggcgggaggatcgcttgagcccgggaatttgaga

SEQ ID NO: 469246 - DNA, 554 bp, Homo sapiens
caacttaaactgaaaatgccacacatttttcccatgctttgtattttgttacattccaggtttccacccctgcaaatcgcagccgcttggtcagcttttgcacccagatccactggaatgtgcggagcagagcttgtcagttataggcctgagcctcactgcttctaaagaattcccagagggatcccaaggatgaatggctatctccctgcttttataggaatagaatggacttcttgtgaaatgactctccaaygtgtttggagagtcatttcttgtgaaatgaatagatggacttcttgtgaaatgactctccagtgtgttctctttggggttttaaatcgtatttgagagagcaaaaataaagtacagcagaacaatctggagaaacaagcaggggcttcctgggaaagtggcttcaggtccacaggctgagccctcccgtggccatggtcaagcaagacccaggccaggccgctgctgccactcatgtgcagagagtcacgatcgggagtgggagtcccagagtagggctcacacaggactgcaagagt

SEQ ID NO: 469247 - DNA, 522 bp, Homo sapiens
aatacttgtgaaaattactttaccgtgctgtgcaaatattaggtgttgtcctgagagggaaataactctttattctttcccccagagaaattcccagcctcaagtagtgtttagtttttagctcttattcaaaaaaattgcaaataatgcatgaatcatcagagcatttgctttctgcagggtcatttttttctgtttctcctctttccactggcaatgaggccttttgaagactggcaatttcctgatcagttggttcactccttcatgcccagtcagaagttctttagaaagcagtgaaacgtgtcttctttcagtaccttgagaaaggaaagctgacatgagataactcaaaatcacaggcaactcacttaacacttttatgtctggcttttgatsatatgctcaccctcaaaaatctcagaagcaaacaaagcacatacttctgcacacgtgcacacaagatacgcaccctcagtgtgatgagaaattcctgccctaccccatgcttcctgttaaagc

SEQ ID NO: 469248 - DNA, 609 bp, Homo sapiens
aattccgcctgcacagataaaaccccagtgatttctgcctgcaacccagaaaaaacgtgtaatgggaagggagtttgtaatgatttagggcactgccactgtaatgaagggcatgccccccctgactgtgttactgcaggaagtggaggtagtgtggacagtggccctcctggtaagctaggtgggacaccttcaggagaaggtgaaaatcacaatatgactcattccagacgtgaagaacatgctgtagacakgatgatattatcattcattatactttttataatattattattaagtacaattatttgatctgcttgcttaaaaaatcaccagaggctgccccggcagaagctcctccagcagtggctccaccaccggccccagaaataaagccagaagcagcagaagtggccacagaagaaaaagaagagaaggaggaagaaaaagaagaggaggaggaggaagaagaggaggaagaatcagattcctaaggttagaaatagggagatgaagccaagtatatcaaactcctcaagtactgagtgggaatgagatgtttggtgaagtagaaatagatagctttagtggctctgactcagatatact

SEQ ID NO: 469249 - DNA, 587 bp, Homo sapiens
ccctgcttctctgaggggacaacccctcttatcaggggctcccccgcctctctgaggacccctgccggagggaacccccacctctctgaggaatcctgcctttgacaggaactaactcccttctttggggatccccaactctttgagaattcccgsttatctgaggggactcccttcttcactgagggtccctctacttttctcaggaacccatccttttgagggacccctgcctccctagagaccccttcctatctgaggacccccgcctctgaggggagtccctttctctgagggacccctgcctctttgaggggaatccccatctctctgagagaccctctgcctctctgagggtcccccgctttctttgaggggccctggcctctctaagaccctatcctcactcctctaaggagagacccctgattctatcagggtgtactttctctgagggatcccccaccttttgtggacccctggggaaccccttcttccccgggggacccctcttttcagaagacattgctgcttctcggaggaagccttgcctctctgtggggatctccccacccccacctctctca

SEQ ID NO: 469250 - DNA, 505 bp, Homo sapiens
tgccccagccccagggctttggtgggtagccacctgctaaggagggccrgcagcttccttttctacataagactgttggaaagatcagcctgttcctcacctgacaagtctgtacagtttctcttcttaatctggttcctaatttcaattgtagccgaaatctgccttcctcccacctcagaatgatgacgggtaaggtggcattggcagcagggaatgtgtgtgcttcacaccctgatgcctctctctggtctgagaacataaaagaagggaactggcgtctgatttgagtgtttagaattttgaactgaaactactttcagtccagttgaatgagaagttattttaagagtgatgcagaaacttcccagccagtgagtccaataaaatatctttttttacttttaataaagtaaattggcaaccccaaaaaatcctttggtaagcatgaacaggaactgccttctggcaccacagctgctgctaaggaatccagcttgattgc

SEQ ID NO: 469251 - DNA, 505 bp, Homo sapiens
tgccccagccccagggctttggtgggtagccacctgctaaggagggccagcagcttccttttctacataagactgttggaaagatcagcctgttcctcacctgacaagtctgtacagtttctcttcttaatctggttcctaatttcaattgtagcygaaatctgccttcctcccacctcagaatgatgacgggtaaggtggcattggcagcagggaatgtgtgtgcttcacaccctgatgcctctctctggtctgagaacataaaagaagggaactggcgtctgatttgagtgtttagaattttgaactgaaactactttcagtccagttgaatgagaagttattttaagagtgatgcagaaacttcccagccagtgagtccaataaaatatctttttttacttttaataaagtaaattggcaaccccaaaaaatcctttggtaagcatgaacaggaactgccttctggcaccacagctgctgctaaggaatccagcttgattgc

SEQ ID NO: 469252 - DNA, 595 bp, Homo sapiens
atcttcccttagttgctggggrgtgatctactcctaggggtgtgttaacgagggcaagtcttaaactggcaggaacagacatccaggatttgacaaaaatgtttcaaattagccttagactttttcactacaataatatgtattcatttccctgttatttgtgtcttcagggtgcatgagagttgtggggctcatttaacctgaatcagacatagtaaacaagctagggttttcatccagacctctacaactccatagctcacaattgtaaccactgtgcatagccataagttggcatttgacctggtgaccaatgtctcacctggctcttgtcttccagacactctccagttatccaatcaagagtatgatgggtgcccccattgtttaccggatgttgctacagcaggatctttccaggtgatggggctttgaggattggtaagagagtctggccccatccccctgactccctcacatacattcatgcctatctatctgaatctctcgcacacagagagccccatgaagccatttgcatcatcaaagcacccagaaacccagtctagtcctgagtggactttggttccaggga

SEQ ID NO: 469253 - DNA, 495 bp, Homo sapiens
ttttattaattcaagaccatctaacacttaaaccaatggcatggcaactgagccatatcactggaagcctcaatgaggcatcttcaccatccatatctttggatttgggaatataagagatagaggatcctcaacttcaarcattccttttaacaagatcaaatagtgaaattggagagattttatagttttgcttagggtacattgataggaaatgattgatgtggaattcaaaatgaggtatcctaattcttagatgtctaaagacctcagattaacccagattaataaccacagctaatatttttcagtggttactccatgccagtaacttagcctgcataatctccttttgtccatgtaatcacccaatgaagttactattatcctccatcttactcagtgggaaaactgagtcttagcaaagccaaggacctggctaaagccagatgattggtagaggaggagctggggtccagagagactgatgtcaag

SEQ ID NO: 469254 - DNA, 200 bp, Homo sapiens
ggggctgttggctggaacacctacaagaggcacctgcatgtggccaggacttcctcacagcacagtggcctcagacttttactaggtgatttgaacctacaaatacaattaaggttaaatcacctatgaagatttagtctcagaaattacctaatcaatgagccrctaatgtcaattcagattccaggagaagggacaga

SEQ ID NO: 469255 - DNA, 540 bp, Homo sapiens
cacagcaccattcccccaagggctgcctttccctctcccctaggtatcatccccatgctctatgccattgatcttctttagagccatgccaggcactttacagtaagacttcaccatctagttggaggaatccctatcttcagatcttgggaaggtaaagacagataatccttgaatctggccacctcacttgacaggtgaggatggtggagccagagattacaagacttgctcaagctcacaaccattagaaagtggacagagaagaccccaagggcatgccttctgatccctgagagaattgattaataaactaaataaayaataaatcaaataataatagtttctaccatttattgaatgcataccatgaggcaagcattgtcctataaacacatttaatctttaaactttaaactcatttaaactttaaactcgtttaatcctcccagccaccctataaagtttttggactcagtttgctcgagttcaaaaccctgctctactatgtattgcatgatcttagggaagttacctatc

SEQ ID NO: 469256 - DNA, 540 bp, Homo sapiens
cacagcaccattcccccaagggctgcctttccctctcccctaggtatcatccccatgctctatgccattgatcttctttagagccatgccaggcactttacagtaagacttcaccatctagttggaggaatccctatcttcagatcttgggaaggtaaagacagataatccttgaatctggccacctcacttgacaggtgaggatggtggagccagagattacaagacttgctcaagctcacaaccattagaaagtggacagagaagaccccaagggcatgccttctgatccctgagagaattgattaataaactaaataaataataaatcaaataataatagtttctaccatttattgaatgcataycatgaggcaagcattgtcctataaacacatttaatctttaaactttaaactcatttaaactttaaactcgtttaatcctcccagccaccctataaagtttttggactcagtttgctcgagttcaaaaccctgctctactatgtattgcatgatcttagggaagttacctatc

SEQ ID NO: 469257 - DNA, 397 bp, Homo sapiens
gaccccttgctaacaactaatttgttctctatttttataattttgctgtttcaagaatgttatataaatagaatcatacagcatataactgtttgggactgtttttttttttctcagcataatcccccagagattcatccaagttgcatgcacaaacggtttgatcctttttgttgctgaacagtattccatgttatggatgtagctgagtttttgtttaaccatttacctgttgaaagccatctggattgttgtcttcaggttttgactatttagagtaaagctgctatgtacatttgcatacatgtttttgtgtgaagttggcactttttttgtmgcccattttaaataagaaaaaaacctaggcttgagggaggcacatttgcttgctcaaagt

SEQ ID NO: 469258 - DNA, 558 bp, Homo sapiens
tttataccagagcagattggttatggcactagcagcaacagcatcaaggaagcttgccttaaatgcatatccatgggcctcactccagacctgctgaatcggaaactgtagaagtgcagcccaggaattttacaagctttcccggtgatctgatgcttgccaaagtttgaccaagtgactagaggagcatcagttctttcgaagtgaggaggttcttagagttcagcctgaactctaagaggtccacagcagtgctagtaaaagcctgactcacagattggcaatatcacccacatcactttgagattgttagaatgcagattcacgggccccatcccagacctgttgaatcagaagcctatattttaacaagcccttcagattattctgatgcacactaaagtttgagaagcactgctctggtcataatagaaaccatctataagggactacagcaaagccacctgctgtgtggctttagagtcaaaatggctgcctcacattgctctstatctcaagttagctgtgtgagtgtgggcaagctacttgtctgcccag

SEQ ID NO: 469259 - DNA, 422 bp, Homo sapiens
acattcccaggttatcttgggggtggagactcccccagggtgagaacccaagttagggyagttacacaggcccagagccactccctcttatgtggcagaaaggccctcaaattccttacgtaaaagtcctgacccccaaatatctgcagtgccttcgctacgtaatcacaatttagagtctgtcttcatcacatcatggcccttgggtgggcctctcggagcctcacctccaggtggcctccaactcaaaaggccacaattagaaaaggtggaaagaaaacagttgtgttcctctaggttagggtcagcaaactgcaacccagtatcagtgtctataaatagggttttcttggcactcagccatgttcatacatttctgtagggcctacactgctttcacactgcaatggcagagtacagca

SEQ ID NO: 469260 - DNA, 419 bp, Homo sapiens
catgaaaaactccatgcactgaatactgagcattttctgaagctgatgacaaacctgctaggacacagacacagtcagtcttttgtcttttcctctccaggttctgatgccagcacaattgaaattcacactgcaagtgaatcctgcaacaaaaatgagggtgaccctgctctcccaacccatggagacctatgaaggggatgtgctgggggtccagaccccatattcctcagactcaacaattcttgttctttagaactgtgttctcaccttcccaacactgcactgccgaagtgtagcggcccccaaaccttgctctcatcacsagctagagcttcttcccgaagggcctttaggataggagaaagggttcatgcacacacgtgtgagaatggaagagccccctccagaccactcta

SEQ ID NO: 469261 - DNA, 419 bp, Homo sapiens
catgaaaaactccatgcactgaatactgagcattttctgaagctgatgacaaacctgctaggacacagacacagtcagtcttttgtcttttcctctccaggttctgatgccagcacaattgaaattcacactgcaagtgaatcctgcaacaaaaatgagggtgaccctgctctcccaacccatggagacctatgaaggggatgtgctgggggtccagaccccatattcctcagactcaacaattcttgttctttagaactgtgttctcaccttcccaacactgcactgccgaagtgtagcggcccccaaaccttgctctcatcaccagytagagcttcttcccgaagggcctttaggataggagaaagggttcatgcacacacgtgtgagaatggaagagccccctccagaccactcta

SEQ ID NO: 469262 - DNA, 624 bp, Homo sapiens
ctcaaagtgtcatggcccaatatagctgctggtgctccagtcatcacacctacattctgggcatcaggaagtgggaagagagcaatgcaatgcaatagaggcctgtgttcccctgagccagctttaagtagtgtcttgggagtttcatacaatgccagttacatattatcggtcagaagttagttttttttttttttttttagatggagtttcactyttagtttcttttttcttttcttttttttgagatggagtttcactcttagggtgaaaaagatagagtttcactctttttgcccaggccagagtgcaatggcacgatcttggctcactgcaacctgcaccgcctgggttcaagcgattctcctgcctcagtttcccacgtagctgggattacaggtgcctgccaccatgaccagctaatttttgtatttttagtagagatggggtttcgccatgttggtcaggctggtctcgaactcctgacctcaggtgatccacccgcctcggcatcccaaagtgttgggattacaggcttgagccaccatgcctggccagaacttagtttcatgccacacttagctgctaaaggaggtaggaaatagactctgtgagccgagcatg

SEQ ID NO: 469263 - DNA, 665 bp, Homo sapiens
ctggcgctaattgcagaattttatattctatgggtgtgttgaggacagaaaaacagattgagaaccactgaattagatgatccctaaagacactttcagtacccaactatttttcagtgattcgaatagcatctcacataatctatggaatgttataaacaccaacggaaaacgtcatggtttrggaacatttctttatgcagccagggcttattataaagcccactttcttgcagaagccatttggttaacaagcttggtatttaaaaggctttcaatcataacagatcttccaatgtacatgcaaaactctggaagggaaaattaattaccttccattttctttcactcaaagcctccgaggatatagagaaacacttacacatttctgtttcgccctagtaaatgaaatcagaagctgcatctgtcacatggtttctaactgagccagtatttggcggttcaaactctgtcctctcagccatttctgtattctttgttcagcggctctgtgcacactgccgcattatgcccaggctctcggcgagggcaaacaggaaatacattcttttctctagcagaaaaagatgtaacttgtcttttatttttcttctgcatgagacaagactattttattctatccatttggttcctgcagtccctcg

SEQ ID NO: 469264 - DNA, 575 bp, Homo sapiens
gcattgggggaaattgatcccctaatcagttcatatgatttaagtctgcttgtctctaggttttgcaaagcagtgaggctggaggaaggcaaggaggggargattagaacagtaaggggtgaagcaaggggttacagagagcacggatgcactgctgtactcagggcagggaaaaaacagaagaaaagtatgccagtcactgcataatgaattctccactggctgccaaataggagtcacagaacaatgaacaatctgagcagcttctgttcccacaatgcagccttgtgaaagtccacaggcagaaaattctgcctaccatgcactgggcatgtttcttgctgggctcggctctagacctggacagcaaattgtgtacctaagaagcatttcatttcagggccagaaaaatgaacatttgaacctcctgtccagcatagctcttggtgctatgacagaatttctttttctggaaatccctttctcaaggaaaagcgagcgttcaaaacaatagcggttgtccacgtagctgaatattgacatagtaaaatggtatcaagaatctcctaggcaca

SEQ ID NO: 469265 - DNA, 496 bp, Homo sapiens
ctgttgagctaagctttctgtatcctatacctgctcagttggttttatttaaagtaactaaaaggtttgccttccccttagattcactcatctttccctcctacccgtcaataaggcctttggcacctgtaacctaacagctagtctcccctttcaggtgaaccgcgttatccatgggtctgatcagtatactttgcactgattcctattactgataaaactgtggaactggacaagacccggagaaaagccaccagctacctccaccctggagggtggtgtggctcccccttaaccggcaatgtttgggccatatttcaaaaagtatcctttccatatcactcagtgcaggccatcctagcacttctcaaccctggctgcacatcagaatcatttgggaagctttyaaaaatccccaagcccagtcagcaccctgcacaattacatcagaacctctgtgagtggggccaggcatcggcatttttaaagctctcta

SEQ ID NO: 469266 - DNA, 258 bp, Homo sapiens
tacagctgtgtgacaaacaacccaaacaacaggcatcttattgtttcttgtgattctgcctggttgggctcaactggatggttcttctgctggtatcgcttggggcctcttgatggcaggtagggctggaatgtttaatatgtctgcatttatgtgtgcagcccttcggcagggacactgagttgtctggatctctctctctctctctstgtgtgtgtgtgtgtgtgtgtgtgtgtgtgtgtgtgtgtcagtcttcca

SEQ ID NO: 469267 - DNA, 514 bp, Homo sapiens
gttcaagtggtttaagctattacactgggaatgaaatagcactttttttttttttttgagacaaagtctcactctgtcacgcaggctggagtgcagtggtgcaatctcggcttactgcaacctctaccctccaggttcaagtgattcttgtgcytcagcctcctgagtagctgggattacaggcacccacaatcatgcccagctaatttttgtatttttagtagaggtggggttttaccatgttggccaggctggtctcaaactcctcacctcaggtgatccacccacctcggcctcccaaagtgctgggattacaggtgtgagccactgtgcctggcaggcacagcactttttacccaaggtggcttgatggtgtcttcacaggaggcaaaatcatctctagcctccaagtcagtaaaataactatgtcttacatgttgtgcaaaacatagatacgtggagtttcctaatctgcttaaatttgcagttgggagctgggacagagtataccttc

SEQ ID NO: 469268 - DNA, 361 bp, Homo sapiens
ctgatcaagacaagcaaggtgtaattgagaaggtaggattttggttggctactgatggaacaagatttggatacatggagagggttagctgtaaatttcattggttttatgtgtgtgtgtctgtgtgtatctctaacttggctgctttgattcataaatgagctgtagagcaggggttctcaactgtggctgcttgtaggaatcacccaggaaggcttctttaaaaattaytctaatttaattgatatgggatgaggcctgtgtaccaagagttttcaaagcttctcagtgattccaatggcagccagggttgaaatcctatagcaaaaagcagagcatagcaaactacccaccatgggcc

SEQ ID NO: 469269 - DNA, 603 bp, Homo sapiens
aagcaaatacaaagtcctctggcatgacccagcaatcatggcagtgttgaattgaagaaattgacattaacccctccaaacaaacactccatgcccaatgctacatattcccatcaacacaacagtccattttccctgaatttgtatcataatggtgcactgatattatataaaagggacctacagtctcatttcagtctccccattttcgtaacttgcacagcacgtttaatttcacagcttttagtttcatgacattcaaataccaacaattgattggggggaagggaaagacccatgtttattggaaatatcagtcactgtaaaaaatcctgaaggaaaacttgccacattgtaaaaggtcaccagataaataaytgccttctgaattgggatgattcctgttgtcattaagccccagcagcgatctaatacactttaatacttccactaaattctgggagacaactttgcaatcacagtcacatagacaattaaagctaagcaattggtgcctgagtcagaaggctttttcttttttccccccatttttaatgcataagatgaaacgatacccacttctcaactcttatcctccctttt

SEQ ID NO: 469270 - DNA, 590 bp, Homo sapiens
attaaccctctactgcctgcccaaccaccaccaccaagtgtctcatatcctcacaaacaagtttggtcagctactgcaagggttcaaccatttttctctttctttccattctagttcccttatgctaagtgatatgacttctgcaagttcttccatatctttttggcatggctgctgctctcatgagaatcacatactcaccccaccacttgggctttttcactaagtaccaccactgagttgctggagactaggcaattgcacagacatctgtaaaaataggcaacaatgtctttattgtgtcatgctctgctggaaggggacccaaaaatatttccttacttgtggagtttcgccaaggacaatgtcttattgaaakaaaccatatcattcattaaatcattcttgccttctagccatttagcattttttaaagcatctatttactgagcacatttatcagcaccagccttagtgctgtatatgcattattttctttttatccttgaaataaccttgagaaacaagggttattctcctcaattttatagataaggaacccaagagcagagaacttaaatacttgccag

SEQ ID NO: 469271 - DNA, 518 bp, Homo sapiens
caggtaaagggattttaaataagtgagtccactaaagcttctgggtttaatctgcagcctcttgatgcacatgttgttttttgaccccagtggaataggtacacagttgcatctgaaatcgatctctaccagatggtccagtctgtgaaaggacgctggggagatgtctggtatgtggttaatggtgagggtgaggttcgtggtgttcgtgggaatacctccaggaatttctgtcaaatgcttgtctgtgcagtccacgatcacatggttctttggaacatccagagtgacatcacagggcagagttttaggaaaccatctagccccaaggagtttggaaattaggattatgttaaaaaggataagaattwgtctcttcagtgtccacattggaaacacctgaaagtataagaaagaacaaatcattgttctaaaacataccaagaatcagaattaaaaattcccatttgctgcctctcttttgcaacattttaaaaataaacaattcaggtcttatt

SEQ ID NO: 469272 - DNA, 485 bp, Homo sapiens
ggtgtcagcagccccctgtggcctcaggaatgtttgttaagggagggaaggaatgaagccccagcctctcctgttcactatttcttagagtccgctccctcccccaaaaagaatgccagaagcctkagcccgaagctccaaagaagacagtaacttgggcctggcctagccccaagggcagctcctttgggaacccattgattttcgggttgccattgggcaccagagctgttgtgtgcgacaagactgctgtggtctgggacgcttggaggtccccccacctgactcacccaccccagggcttcagactctgagaacatttctctggattggagacagagctttgaaatgtcctttccagtgtgaatgccaaagacggaatcagggcatattttggggggcgtgcagccaggtggcaagtgtcttatgtaaagtgttagctgagtccttgattgcagagggcacagggctgagactggtggttg

SEQ ID NO: 469273 - DNA, 341 bp, Homo sapiens
ctgccctgccctaggggggtactgggtgcagaagcccagcactgcttttgccygacctcactggctctcttcatgtttttttttttttttggttgttttgagtcaggctctcgctctgttgcccaggctggatggagtccagtggaaccatcataggtcactgcagcctccaactcctgggctcaagtaatcctctcatcactggagtagttgtgtgccaccacgcccggctcagttttctgtttttgtttggaggctgaacacagaggttccctgaagaaagttggttggagctggagttgttctagaacctctcactgtcaagtaaagaaccctgctga

SEQ ID NO: 469274 - DNA, 387 bp, Homo sapiens
gggccaggaggattctgattttagaaaaccaaacttttaaggctttgggagagcacctgccctgccctaggggggtactgggtgcagaagcccagcactgcttttgcctgacctcactggctctcttcatgtttttttttttttttggttgttttgagtcaggctctcgctctgttgcccaggctggatggagtccagtggaaccatcataggtcactgcagcctccaactcctgggctcaagtaatcctctcatcactggagtagttgtgtgccaccacgcccggctcagttttctgtttttgtttggaggctgaacacagaggttccctgaagaaagttrgttggagctggagttgttctagaacctctcactgtcaagtaaaga

SEQ ID NO: 469275 - DNA, 654 bp, Homo sapiens
gcgtctcccctgccggcttcactgtattggtactagaaatgccagtgtttgaagacggctcaaacgccaggtactttaattcgttctttcgtttgccttcgtaagacacagcgaaatgttcctgcgtcagtggattcagggaatcctgtgtgttttgctgcccccttgtggctattttaaatgtctctcaagtgatttataacctggattaaaattttccaattcaaactcctcacggcggaaggttaagtatgcattcttggtaccattgcctttgatgtaaaacatgcacatacactagcacactgaattttaatttatctctgaatgatagagttatggctaaattctcaactgcacttgaaagagatcttttaattcaaacttccacaaggtaggatattacttgtctccaaagtttaatattggagcttgatcattcaccatattaccaacataaattgacccctgtatacaaagggacaggaggaagattgtaaacttaccattgtgttacctgcttcctagaaagatgttaaacaattttaatackttaaattgagagagaagagagaagaccacacaagacacaagatacagtcattttaaaagggttttttcatcaatgctgtggagatgccagagatcgcagcc

SEQ ID NO: 469276 - DNA, 621 bp, Homo sapiens
gactgggatgagctggagacaaatcagcaacatttccatgctttgtgtcacagcctgctggtgagtacccatgtccccaggtgaaaaagaagaatcgtttttaaagtaccaaccacagaaaagcagctaactaactctgcccaatcctaaatctgcctcaaccctcaagaagacagaaaaaactggaaatactctgaaatttggagtaaatatgacttgccttttgttggtttcatgctatagagaataattcctgaattcagttatacaacactaaacttgaaaatccccgattggcaagcttaacatttaaatggcaacagggaattttccgtacgtacctgtattttaaaacctacttccttcctaacactgatagacgttatggttcatttaaatgaagagcayttagtctatgccagacattgtgtcaagccctagatatatattctgtagtgacctaaaagacattacctatgaccttaagaaacccactctccaatggaagaaacagaaatgtatatattcttaattatgagaagtttataaaggaaaagaaaaagctgctataagaaagcctgtctatagaagtgacatttaaactaagacctacaagataag

SEQ ID NO: 469277 - DNA, 582 bp, Homo sapiens
gtaaagaaaatgatatacacatgctctcctcctaaaaatgtcacctcttttgtaaagctgtcttgattcccaattcagaatgtgtagcttccttctctacattctatcatatactttatacctccattagtatcacagatctccctctctcactaaactgtagaattccatagtttggggaccaagtcattacctctgtgatccccgcagtgcaargtagagtgctttattaatggtaggtacaaaataaatgcttgatgaatgaatgtggtggtgtcaacttcataactggacattatgcttttcagagttccaataaatgttgaaaacaaataaagaaactacccttcctacttagctgctccctccatcccaatctctttttctctatatttggtatcacgattgtgtacactgaagagggagacacatctaatgggaaatatcctcctgggaagatattttatattcaatatttctattttgataaccctccaatgaaccattttttgggggaggatttccaaggttaaactgaacttgatgagcagagttccgatcattttaggtaggcaaaagata

SEQ ID NO: 469278 - DNA, 360 bp, Homo sapiens
ctgggcctgggcttgctcacattcttggtcaccttgtggcccttgttgaggcccatggctgtaggataaagcagaaccatggctgctgctctccagtgacagccaargcctgtaagtatttgaaatttccgccactgcttttccccactttctccatctatgtcttctttttactcctcaattcctgttcctttaagaaatcttgaggtcaggaagccttacactggattatttagcaaattcatacatttctatttccactgcacatttgttacttatgatttattcaacactgaccagagggacctagggatacaaagataaaacagaagtgggaaagagcttgtaaccatggcagaa

SEQ ID NO: 469279 - DNA, 615 bp, Homo sapiens
gggacctcgaaaagcagtctgcccttaattttatatctcaaggggtcacatgatttcctgggctaaagcatttgagggacaagtattcatcatttagaagacatttgaaagtagcctgtttcwctatctatttaatagtggaattaagtgggatggttacaaataacttatgtggcagtcacattagggaccagtagaagtcatgtgcttggtagaaagccaaatttctgctgggcagggcaggggagactgcaacagagcttgggctattctagccagtccctccctatcacagagtgttgcattcccagcacattctgcagaactttaaaagaaaagggtgggggatggggaattgaatcaatccaacgccacccagagaactgtcctgcatatgtgtgtgagtgatgattgtttggattttaaatatctttaaggagttatcaatattaaaatgtgagttacttaggccgggtgtggtggctcatgcctgtaatcccagcactttgggaggccgagctgggcagatcacttgaagtaaggagtttgagaccagcctggccaacatgacgaaaccctgtttctactaaaaatacaaaaattagctgggcatgg

SEQ ID NO: 469280 - DNA, 615 bp, Homo sapiens
gggacctcgaaaagcagtctgcccttaattttatatctcaaggggtcacatgatttcctgggctaaagcatttgagggacaagtattcatcatttagaagacatttgaaagtagcctgtttctctatctatttaatagtggaattaagtgggatggttacaaataacttatgtggcagtcacattagggaccagtagaagtcatgtgcttggtagaaagccaartttctgctgggcagggcaggggagactgcaacagagcttgggctattctagccagtccctccctatcacagagtgttgcattcccagcacattctgcagaactttaaaagaaaagggtgggggatggggaattgaatcaatccaacgccacccagagaactgtcctgcatatgtgtgtgagtgatgattgtttggattttaaatatctttaaggagttatcaatattaaaatgtgagttacttaggccgggtgtggtggctcatgcctgtaatcccagcactttgggaggccgagctgggcagatcacttgaagtaaggagtttgagaccagcctggccaacatgacgaaaccctgtttctactaaaaatacaaaaattagctgggcatgg

SEQ ID NO: 469281 - DNA, 568 bp, Homo sapiens
agtgatttcacaggatctgtagcacctcactggggcagaaacagtcaaaataaggacaactgagaagccagactcaggtaaattgaagaaatgaaataaaaacagacctgaagggcataataacaccttcatttagaaaaagtgttatgttataagtaagtacttatgtttctyttgcggtctttctagtaaattccatccagtttttacccaatcgcttttatcctaaacatatgactggagttaaaaaaaaaaaaaaaaaaaaaaaagctccaaaatgtttagcttagttggtacttcataaaaatcgggaatgataatgttctccaagataatgtcctatctctcatctgctgcaagggaattttcactgctgcaagggaaagcttcaatcagtcttgaaagaaaagtgttgggggtggtggaaagcctgtaggcgttgcagttggcagatgtgtgtttggttcctggctctctcctgctattgtttacctcaaattttctcctctgtaaattggggataataaaatactttttcagtagggttgtggtgaggactaagtcaacg

SEQ ID NO: 469282 - DNA, 628 bp, Homo sapiens
tgggatggttagctcagtgggcagaggcgcagcactaagtttgcagaggtcaagagttcaaacatgcatggatcagttagtctcatatggaggaggtggagaagcaaaaccwgttcaagtgccgtggcctgttcttcccaaatgtctacaaaagggtcaccaagaagtgagaggctgagataacaatagtgatcagttgatgtgttctatgtgccaggccctgtattaggtgcagtcagtgccagcacataataacctacttaccaaatccctctgtgtctccgttttcttatttgtaaaatagggatactattatgattcctatttcacagatgaggagacttcggcacagagaggttaagttacttgcccaaggtcatgtaaatcataaatggcaagaccagcattcaaacccaagtagtggggtgtgcatggcacaaccacagcatatcgctctagcaggtcaaaccactcaaagataaatccagttgcagataatgagggcacatggcataagcctcaacctgagttattggtcccatgccaagaaagaattaaccatgatgataaccacactcacacatatcacagcatgaggtgtgtgtaccaccatagctactcaatttgt

SEQ ID NO: 469283 - DNA, 444 bp, Homo sapiens
ggcaatgggttgagcaggcaccagagtgggggaaggaggtgctaagaataatagcatttctagttctcctttgttaaatcctgactcctacaggtcrgttgaactccctcttctgcactctcatcgtctcccttgagactggatctcactttcacggagatgtgtagttatcagcttgtgtctgcctgccttgaaggccacatatcaagagctaacatttattgagagtcaaccgcgtgctaaatgctttatagctagcttctccttccatcttcacgacagacctatgaggtagttgtcattattcttcttcctattttgcagactagagaattgaaattcagagaaattcagtagcatgtccaagatcatgtaggtcttaatgtaaagagcagacagatgggatggagctcaaattcaaaatcccacgctctcgactactat

SEQ ID NO: 469284 - DNA, 532 bp, Homo sapiens
gaccaaggatcatgggcaatgggttgagcaggcaccagagtgggggaaggaggtgctaagaataatagcatttctagttctcctttgttaaatcctgactcctacaggtcggttgaactccctcttctgcactctcatcgtctcccttgagactggatctcactttcacggagatgtgtagttatcagcttgtgtctgcctgccttgaaggccacatatcaagagctaacatttattgagagtcamccgcgtgctaaatgctttatagctagcttctccttccatcttcacgacagacctatgaggtagttgtcattattcttcttcctattttgcagactagagaattgaaattcagagaaattcagtagcatgtccaagatcatgtaggtcttaatgtaaagagcagacagatgggatggagctcaaattcaaaatcccacgctctcgactactatgtgatctcctagagactacatcttttcttcatttaggactcctcaacacctagcgtagttccaggcaagatagg

SEQ ID NO: 469285 - DNA, 484 bp, Homo sapiens
taggagagagactgactgctacaaagggacctgtgcagcttcactcttatmgccactgtctgtgtggatctcttttgacaatcatcttttatcaagcaacataaaaatatcagtactattaagtatccataagaaggcaccaatcatgagtggatatttccatatataaaacctaggtttctttcctttcaatatgtgcattgagttcaattctcatctggaaacagggaatgaaagccgcttgtatggatagttgtcaggaagacatatacaggatataagttaaaagcacagacaagcatgttctgtgtttacagggggcaggaactctctcagcaagaagtcctggtacgacaagacagttaaaggcattccaggaatatactgttttcatttggctgtgagtcttcctagaaaatgtaaaagaaagttttccctgttaagataacacattttctctttatggtttcatgagggcagaagg

SEQ ID NO: 469286 - DNA, 479 bp, Homo sapiens
tgagaatggatatgacagcaaggaacaaaaaccaagccaacacctggatgcggggttggagaaaaggttaggatagcatcaggtttttagcttggaaaatcatgtggctggtacagccaatagcagagagaggaacaagagaagatgcatgcttggggaaatacaagaattaatgatatgtgctgaaatcaaggtgactgtgagacatagcggcagaaacttctagtgggcagttggacatctggatgtggaggttagaatagaaagctgagtcagccacactgacgtcaagtgtacatcaaccactcaaycagagcatgaaaactgatcatagaggacagaaggctgaagttatggacgagatggggaagacttaagcatgttcagagcctatggtgaaagtatctagaaaaaggagagggcagaaaacatagaaaagaaaggaaagaatcaattatgtaagcttctggagtagaaaa

SEQ ID NO: 469287 - DNA, 466 bp, Homo sapiens
tgacagcaaggaacaaaaaccaagccaacacctggatgcggggttggagaaaaggttaggatagcatcaggtttttagcttggaaaatcatgtggctggtacagccaatagcagagagaggaacaagagaagatgcatgcttggggaaatacaagaattaatgatatgtgctgaaatcaaggtgactgtgagacatagcggcagaaacttctagtgggcagttggacatctggatgtggaggttagaatagaaagctgagtcagccacactgacgtcaagtgtacatcaaccactcaatcagagcatgaaaactgatcatagaggacagaaggctgaagttatggacragatggggaagacttaagcatgttcagagcctatggtgaaagtatctagaaaaaggagagggcagaaaacatagaaaagaaaggaaagaatcaattatgtaagcttctggagtagaaa

SEQ ID NO: 469288 - DNA, 515 bp, Homo sapiens
ctgctgattcttattttctagcacttcaattgcattttccagaggactcatttctacctgagaagcaaatgaacataaatatatattgaatttgtgacattcaagaagaaagacaaagtagtttatccatgttctgaattatctgtgctcccccttggcttccatcaatatctctaccaggggccattccgtagaatagacaaggatgtggaagtcaagtgggatgttcattagcaaggtttggaaagggcaggtaattatacttattcattgaaatgtggtttggataatcatcarttctacattagcactgcaacaaccaatttaatccttaaaataatatccaagcatctcatgtcttttaaaactagttttttttttcttttgaagggttaaatattcagagaccctgaatattatcccctttctcatgcttatttgatacaaagcaccatgggagatataaagatgcatttatggatcctctgatgtcaaggagctttcagcccagttgg

SEQ ID NO: 469289 - DNA, 636 bp, Homo sapiens
tggataactagtcagaaacataattgagactgtctttcaggccatgatccccttattacatctccattctagtgtaagctgcttcaaaaaacccagttatgagtctgagtaggctaggttatattgctgtaacaaattagcttacaaaatatggatttaacacaayaaagttcttattttcttgcatgtcccacatggctgatgctggctaggtgagggctctgctgcagggaagccaggttgtcagaggctcttctgccatcttacgttgctgtgacttctatagttgctacagcagagagagcaatgaataaagcacactttttacactctctggaactagaagtgacacacatcattttctacactcaggccattggccagaataagcacatagtgccattacttgcaaggaagctgggaaatcttcccatgtgcccatgacagaaagaataactggatataacgaagctggtactgctatcacacgcagaaattaaaactcattttaacctttgttttcttgtttattgacccaaactcagaaatggtctctgtcaatcgtaaggtcacataggaggactgctgatggatggtcaagccaaaatatctctttaaaagcttttggtatgccat

SEQ ID NO: 469290 - DNA, 622 bp, Homo sapiens
ctgcccccacactctctcaagggtttgatcagaatcattttgctttgggactaactggagttgagaaatattctactttgcccttgtgccacactttaacacacccatcttcagtagcttaatatagaaatgatcgttgaaaaaaaaattcttaatttctttgctgatttggctctcacatctcctcacttatttaagtgactggagaaataaagaattaagatctatgcctttgacattattacctttaaagtcctgactacaattagttgcatgattacaaatttggggaatttttctttcaatttttttatgattatatttaaaaaacttaaaaaatatgctttagtggcatattttaaaataaaagttgtttgagaaccatgatgatgtgtttatttaccataatgaagtgcaattgaaaaatgaagacattccaagattaatcatgttatgtgattactgtattctgatcattatcattgaaaatactcttctattctaatttgagtaattaatacttcatgtytttttgctttatcagtctttctcctgttaaaccatttatggaaggagctcattgtctgtttgcttatgttatcatttgctatccagttaaaaa

SEQ ID NO: 469291 - DNA, 622 bp, Homo sapiens
ctgcccccacactctctcaagggtttgatcagaatcattttgctttgggactaactggagttgagaaatattctactttgcccttgtgccacactttaacacacccatcttcagtagcttaatatagaaatgatcgttgaaaaaaaaattcttaatttctttgctgatttggctctcacatctcctcacttatttaagtgactggagaaataaagaattaagatctatgcctttgacattattacctttaaagtcctgactacaattagttgcatgattacaaatttggggaatttttctttcaatttttttatgattatatttaaaaaacttaaaaaatatgctttagtggcatattttaaaataaaagttgtttgagaaccatgatgatgtgtttatttaccataatgaagtgcaattgaaaaatgaagacattccaagattaatcatgttatgtgattactgtattctgatcattatcattgaaaatactcttctattctaatttgagtaattaatacttcatgtctttttgctttatcagtctttctcctgttaaaccatttatggaaggagctcattgtctgtttgyttatgttatcatttgctatccagttaaaaa

SEQ ID NO: 469292 - DNA, 644 bp, Homo sapiens
aagctgccagaaatatcaaattctgggtgatgggtaaagacattctgtcatcacgtattttttattttaaaaagtagtgacgtgttatctgctttttcggtacttggtgtcttgaatttttcacatgatgtgcaggtcagacaaatttgccagaggaacaaaaagcattctccaggatgccatccctgatcctcctcaatataaatcatcttgcttctctctcaactccgaaggcactctattgagcccattcttctattgcttctcactcttaactcatgttatacactcccatacaagccattacaaggccactgtaacacaatactcttgtaattaactgctcaatgtccatgtcctccctgtggctgtaagtgcccaatcacatggctgtctgcctgtgtatccctaacagccggagaatgcatgaatgaatagcttgatttacacatgttaatttttgtggatctsaagaggtagattctgtacaggcgatacaaacacttgaggaagtcagtgtaggaaggaaaagtccacccaagtcaataaaattatataagcaagttattaaacaagtcaaatctcatgtagcaaagaagagacacagcgcctttttgaactgattgtcacagggagaaagtcac

SEQ ID NO: 469293 - DNA, 562 bp, Homo sapiens
atctaccaagttcttccatcactttttctcttctctgattatgagcctcttatcatctcatttttaacacctttctttcttctactacattcaatttatacctgcatactgtcctgctgcttcatgactagactatggctaaagtatttattatctaataaaataactcataattatttctagatgttatgaacttctttatagttgctctcaagcctcagatctagaaagacaggctaaactaaaatcgggagattaaaaatatatggaagcagagagcaagtaactttaggtaagagtccaagatagagcctataatcaatccaaacatgccagaaacatgttttactgcggagctggtcrtacagtgtgggtagggccttaggaacctaaacacaagtcttgttaagaaagatgcattttcataaagtctgtaataacataactcagtggagtgagtaatattgtaatttaagccaatatggcagtatcaagtgcgaaagcggcttcagagccaagcttgggtagtgggttccttaaggttatttcaaatcctgataaa

SEQ ID NO: 469294 - DNA, 629 bp, Homo sapiens
acaaataattcaaagccagttagctggccaatgaaaaaatttaatgctttaggaagtctcttctaaacacttatgttgggccaccatgcatgtctgtatctggtttttgaattaaacctccgtgtagaatattctatgttaggccacaactagaaaaatgaatagactctgtgtcacacaagcgattacaatgatttaaatgatccatcagctattttcattgtgttttctttgtgtgcatagaaacaacttgcttggagactgagctcaaaaagaaagaatcaccttatattttaaytgtatatttcatggcctttaatactgataaacaattgttatatatactgttaaacaattgttatataatcccatgggatcctcagaaaaattctatagatcttcacaagtaataacaatagctactgtttatttagtaactgaaatgttactaaatatgctaggcatactaaacatgctaggcatacacacaattttttaactttcttaacaattgtagtgtgcactatagtgtgcacctagacttccccttcaggaccaaggcatttgtttgcaagctgtcaggagggttacctttcaaactacatcctaggaatttcctttggccaaag

SEQ ID NO: 469295 - DNA, 577 bp, Homo sapiens
cacatcagtatatatttttcatactgacatgaaagaatatgtgtgtggctgcgtatgtatatgtaaacatatatacatatgtatggtacatgcatatatacatttgattcagttacacaaatatatattgaataccttctgtgtaccagtttatatatgcttataagctgagatccatgattttttaaagctcacagtcaaactacaatgttggctaccttcttgagttaaaagtttgcctgatgtaattttattttgtttcgaaaatagaacataacttgagcttaattggaaaaaaaaatgtgatgcactagtcaaaataatgggtagattttcttctataaagtttcctatgatttgttgaaaacatctgatgataaaatcccaattcccttaaattcattcacaaatatgaatagcttttctttatttatgtacaaatcaaagatttgaaatgttgkgccgctcatcagtttcacattcatctagatacctctctcgttaagacatctgtccaagtagtaaggaggaaatgctttaaaaacttgctcattattagccacctttagtctcaccc

SEQ ID NO: 469296 - DNA, 577 bp, Homo sapiens
cacatcagtatatatttttcatactgacatgaaagaatatgtgtgtggctgcgtatgtatatgtaaacatatatacatatgtatggtacatgcatatatacatttgattcagttacacaaatatatattgaataccttctgtgtaccagtttatatatgcttataagctgagatccatgattttttaaagctcacagtcaaactacaatgttggctaccttcttgagttaaaagtttgcctgatgtaattttattttgtttcgaaaatagaacataacttgagcttaattggaaaaaaaaatgtgatgcactagtcaaaataatgggtagattttcttctataaagtttcctatgatttgttgaaaacatctgatgataaaatcccaattcccttaaattcattcacaaatatgaatagcttttctttatttatgtacaaatcaaagatttgaaatgttgtgccgctcatcagtttcacattcatctagatacctctctcgttaagacatctgtccaagtagtaaggaggaaatkctttaaaaacttgctcattattagccacctttagtctcaccc

SEQ ID NO: 469297 - DNA, 344 bp, Homo sapiens
cttaaaaaggaccaagagggttaaattgaaaatgccattacaaaaatttgaaagtaagaaaaatctgttaaagtaatctggttcagtaaaacagacgagtttcaataaaagagaaatgtttttggacatttttggtggccagagatatactcagattaatcaacacccatgaagtcttaatataaattattttgcagaaaaaatgtatgaagagatggttctaaaagtttgtgaagataaattatctggccaacttggaagtgaaacagaagcacaaatatgaacaatttggccaatgagttaagttgcatggatrgaattttagataatctgtgtattagtaa

SEQ ID NO: 469298 - DNA, 552 bp, Homo sapiens
ttttatctaaattgagctgacacagcttctgaagtaatttttgaaggaccttaatttctcacaactctctttttacatcctttgcattcaattacttcctaagttaaagcaaggaracatcagagtggaatctgtattagtaggaccaaatcatactctttataatgcaatgtctgggcctggccattgggatctgttggcagtagtataacagtcaagctaatgatttagtgttccagttcacttcagtttaggggattgatagctaagcagcaggaaatcatatttcagagctctctgcatatctgcaaattcaggagtggttcctgtaaagcacctgcctacattttagtcatatattcgtttatttatatcctgactagttttaaaaagaatttaagacagcttgtagatataaaatacatcaatagaggatgaaacctaaaaaaaaaagaaaaaacagattgatcattaagtcaggcacattatgggtgcaccacaagtttggcactaagatgtctaagcaggtcaaatggaagataatcgtagctc

SEQ ID NO: 469299 - DNA, 518 bp, Homo sapiens
tctgtcaaattcactgccacagtgtataatttcagaatataygtatctaacagtataaatatatgccagaggcagatcaagtataaccatttgttttttccagagcccagctcccgctctatttcataacagctcggtctaagcaacattgtcttttattttccatcacaccaccaattcccagttagagactaatttacatgaggatgcaattcccttattttcaatattaccccaaatctcagaatcctgaagaaaagtctctagttgctaccatccagtctgatacaagcatctgcattcgatgtcccaaaccttattgcccttgacttgtctgcaatttgcctgccctgtgtcatgttaccacccgagacatgctccttgataaacagtagctaataaataatctcaagcaattgtgttctcatgattttgccttactgagagccagaaaaaccaaggcagtctagctcaagctttttattatataaataaggaaattttagcccaagaatttt

SEQ ID NO: 469300 - DNA, 518 bp, Homo sapiens
tctgtcaaattcactgccacagtgtataatttcagaatatacgtatctaacagtataaatatatgccagaggcagatcaagtataaccatttgttttttccagagcccagctcccgctctatttcataacagctcggtctaagcaacattgtcttttattytccatcacaccaccaattcccagttagagactaatttacatgaggatgcaattcccttattttcaatattaccccaaatctcagaatcctgaagaaaagtctctagttgctaccatccagtctgatacaagcatctgcattcgatgtcccaaaccttattgcccttgacttgtctgcaatttgcctgccctgtgtcatgttaccacccgagacatgctccttgataaacagtagctaataaataatctcaagcaattgtgttctcatgattttgccttactgagagccagaaaaaccaaggcagtctagctcaagctttttattatataaataaggaaattttagcccaagaatttt

SEQ ID NO: 469301 - DNA, 518 bp, Homo sapiens
tctgtcaaattcactgccacagtgtataatttcagaatatacgtatctaacagtataaatatatgccagaggcagatcaagtataaccatttgttttttccagagcccagctcccgctctatttcataacagctcggtctaagcaacattgtcttttattttccatcacaccaccaattcccagttagagactaatttacatgaggatgcaattcccttattttcaatattaccccaaatctcagaatcctgaagaaaagtctctagttgctaccatccagtctgatacaagcatctgcattcgatgtcccaaaccttattgcccttgacttgtcwgcaatttgcctgccctgtgtcatgttaccacccgagacatgctccttgataaacagtagctaataaataatctcaagcaattgtgttctcatgattttgccttactgagagccagaaaaaccaaggcagtctagctcaagctttttattatataaataaggaaattttagcccaagaatttt

SEQ ID NO: 469302 - DNA, 546 bp, Homo sapiens
tagaagagagaagagcatgaggaagaatatgtgcaaagttttcatgggctaggattggaagagggagacattgcttcttctcatatgccattgaagatagtcaaaggaccacaactaagtgtaagggagactagaggtatgcctgaagaagggaagcaattctggtggacagccaggcatctttgccataggactgacaacttcttagctgtgcatttcctgttggcagtgacatagaggttcaaaaattgccctaaacaatgagttatgagttatcttgtatctctttcagccagacttgttttgtgttttgtttatttgtttgggagtgatgatggtgacaatggaacttccttaaamtcccagtggtttgcttgtttaggaattccttttgctagtaactgatgtcagagcaagatgtttgaatctgggcctctgccccttcatggttttggtttcttggtgactcttcagtggtgctacccatcgttatgggacttgatttggtctctgtctgcatgatggcattggggatgaggcaaggtt

SEQ ID NO: 469303 - DNA, 480 bp, Homo sapiens
tcacgaaccagagacaaactgtacctgctgtaccctgtcgtcattcctgagccacagaatagtaagtgggtattgcataccactaagtcttgggaaagcttgtaacacagtcttaataatgaaaactctcatttttcttttatctctgtcttgcatttggtacttaacctattctttcactgttgtyattactaaacataccctatctcccatcctagatcactaggtctttgatggcagaacctacagcttattgatttttgtatcttccacaatgccttgccctaaaatgtgctcaaaatttgagtgaatttgtaaattccagcatagacaagaattagccctgtgaaagcatcattctacttttgtctgtctccaaattcctggctataattgtcaactgaattcacctgctttaattaaattaaaagcatcttgttacattgagataatacaaagactacaaaaggaaatgttgag

SEQ ID NO: 469304 - DNA, 520 bp, Homo sapiens
ttagcctccagttacttgatttgcttgggtctaaattttgaaatgactaagaaatcactgcctttattggaggctacctagaaatgactagattatatcttcctcaactctaactggaaataagagtcagatattatagcaagcaatgaaaaaagtaaaattatatttttgctcaacaaagcttgtgagtatgaaaatcttgttacatcatctgtcttgaagatggctgcagatcaatacatgtagattaatgacattttttagctggctgtataatgtatccacacttttttcttcctacttaggcacctccatttttcattgaaaacttggaaagaatcatttttagaagctgcacaagatttcattgtatgtatrcaccatgatttatggatctacagctccatttttacacatttctgtaacacattttgtactatactaaaaacgctgtactaaaaatacttttgacattttgaattatttcctacaaaatattcataattaaattttatgttaa

SEQ ID NO: 469305 - DNA, 567 bp, Homo sapiens
tactatcaagtgtacaataactaaattgtacaatagtatscaagctccccatgggcagtgcaaccggccagtgtacatcaattaatctcaccaccagaggcaaatgtgtcagaatgctcactgtgacttgctccaacccactgaagcaactgcacttcctatgtttgaattgggtcatatttcagtgcgtctgtgacccactacctatttgtgtttctattcttggatattttaaaggtttgtcttgaggggtggatgggggagaccatgtaggcctgtagtggagttttttgttttgttgggttttgttttgttttttagagcctgaagaccaggagcagaatgccctcattttacacagagagacactgaggaaggaggactttggtacctctgagccaggcagtggcgaagaaatttagaaatatgtctctcctggatgtttttgcttgtatatgtgtcagcattttactgactcaaacataaaattgagcttttatttacttggggcaagccattattctataatatttgatgtgtctaactcatttaaaatgaaagggaaat

SEQ ID NO: 469306 - DNA, 662 bp, Homo sapiens
tccaaataagaaatttaaccacccttaacacatctagtatgccaatcagtgaaagaaacctttgtgtattagtcagtgttttctagagaaacagaaccaacatgatatatatgaggagatttatgttgggaayttgctcatatgattatggaggccaagtagtcccactatatactattggcaagctgcacaaccaggaatattggtggtttaattgcagtctgagtctgagggcctgagaaccagtggaactaatgatataactctcagtttgaggctgaatgtctgagaacatggatgggggtaaacactggtgtaatctgaaggctcaagaaccagaagttcagatgtccaaaggcaggagaagatggatgtctcaacttaagaagaaagagaaaagaattcaccttttctctgcctttttgtcctatcaagcctctcaacagatcggatgatgcctgcccacactggtgggagcagatcttccttacctagtctgctgattcagatgctattctcttcctgaaacaccttcacaaacacatccagaaataatgttttaccagttatcttggcattacttaacccaatcaagttgacacataaaattaaccatcacacagtggttaacaaaagctttaaataaaaaaatatatatatat

SEQ ID NO: 469307 - DNA, 567 bp, Homo sapiens
tactatcaagtgtacaataactaaattgtacaatagtatccaagctccccatgggcagtgcaaccggccagtgtacatcaattaatctcaccaccagaggcaaatgtgtcagaatgctcactgtgacttgctccaacccactgaagcaactgcacttcctatgtttgaattgggtcatatttcagtgcgtctgtgacccactacctatttgtgtttctattcttggatattttaaaggtttgtcttgaggggtggatgggggagaccatgtaggcctgtagtggagttttttgttttgttgggttttgttttgttttttagagcctgaagaccaggagcagaatgccctcattttacacagagagacactgaggaaggaggactttggtacctctgagccaggcagtggcgaagaaatttagaaatatgtctctcctggatgtttttgcttgtatatrtgtcagcattttactgactcaaacataaaattgagcttttatttacttggggcaagccattattctataatatttgatgtgtctaactcatttaaaatgaaagggaaat

SEQ ID NO: 469308 - DNA, 662 bp, Homo sapiens
tccaaataagaaatttaaccacccttaacacatctagtatgccaatcagtgaaagaaacctttgtgtattagtcagtgttttctagagaaacagaaccaacatgatatatatgaggagatttatgttgggaatttgctcatatgattatggaggccaagtagtcccactatatactattggcaagctgcacaaccaggaatattggtggtttaattgcagtctgagtctgagggcctgagaaccagtggaactaatgatataactctcagtttgaggctgaatgtctgagaacatggatgggggtaaacactggtgtaatctgaaggctcaagaaccagaagttcagatgtccaaaggcaggagaagatggatgtctcaacttaagaagaaagagaaaagaattcaccttttctctgcctttttgtcctatcaagcctctcaacagatcggatgatgcctrcccacactggtgggagcagatcttccttacctagtctgctgattcagatgctattctcttcctgaaacaccttcacaaacacatccagaaataatgttttaccagttatcttggcattacttaacccaatcaagttgacacataaaattaaccatcacacagtggttaacaaaagctttaaataaaaaaatatatatatat

SEQ ID NO: 469309 - DNA, 375 bp, Homo sapiens
gctggttatgagcttgtttactccagaaaattgaccctaattggtactacattacacggtgcttcattcaatagttcatttgtttgatatgcaaactaattacatataggctaattggctagtttccaattaagagaaggaaatgactggccatgcatgaagtactggctaatggagaacagttatgtaaatcattcattctgactctcagcagactgcctgattctccttaacaactgcgttggaaaagctacttgcgtaatgagatcaaacccatatattatcacatgtcttatttgtaaktaagtagtaagtatcaacgaggtctaaataaatcagttcagaggtggttagtaaattaaaaatatgctacca

SEQ ID NO: 469310 - DNA, 597 bp, Homo sapiens
tttttctgggaaaaaaatatatctttctaaaattcatcctttagattttcttttactgagaatctgttggtactaaactcagtttttgttcatctgaaaatttctttttttactctcctttwtgagtgtttgttttgagtatacaaatgtaaattgacagttattttctctcagcagattggtgctactaattcccctgttttctgcctttcatttttgctcttgagaaagcaaccattagactaaatatagtttatttttagctagcctatcttttctctctggctgcttttaggatcttttattttctctttggatttcactgcaatgttttaatattgaatttaaaaaatttattctgttttgaattcgttaggtttactcaatctaaagatagatgtattttcaattctggaaagggctcagtaattatcttttaaaataacatctcttcccctttcttttaattctctccttctggatctccgatgggacatattttaggcatgtattctctgtgtctcaagttctccttcatagcttttatctctttttctgtctgtgctgcattctggaaaaatttttggaatctatttt

SEQ ID NO: 469311 - DNA, 348 bp, Homo sapiens
tcccctgcccccacttttcattatgtatagaagaaaaagtgatttcacatcattccaaggccagctcctagaatacttgaccagtgcccttaatcccctcccatcctatgtcttttcgtttatctagggttttggtctgttattcgctttctcrttcttactttttctgtgggacctttcaactctgccttcaaacatgcacttgttttcctaggcttgagataaaagaacaacatctcttgatcttgctgctagtgcttgactattgttctgttttctccttcctaagcttaataaacttttagaataaatgtcctatcatttcttaccatgtattctgctctttac

SEQ ID NO: 469312 - DNA, 506 bp, Homo sapiens
atcttcactcatcttttcttgcatcctccatttgagatgaaaatgttatctaggcatcaggagatgaagatctagaaaaagttgttttaaacacttaattctagacctagagatgtccacatttcctcttaatttatgctcatccctgggcactcttggaatgtaaatctgattagtgaatggcttcctactcttcctcaaactttggtcatggcctacaagtctccatatcactgcttacttctacagatacaacctggcaactctggagttcactcaagrtgatccagccccatgctagcccattctcaatctcttaagtatgtaaatttctccagtcttacggcctttgcacttgctggttcttccacctgaagtattcattccatggttcatgacatttttgttgtcttttgcttcaggtcaacagaatggtctttcctaatcatcctaggctctcatttccaggtgccaccattgccctttgattccactataactaccag

SEQ ID NO: 469313 - DNA, 603 bp, Homo sapiens
tatcctgacaataatccttttaaaattggtctgtgtggctgctcctgtttcccgcacaaccaagacaataaccaccctagtaactgtagttgctacctttgcttcttggtggcttatggagagttcaggtaacaggccaaatacaggtaaaatgacagctcactgtcaggaacaaggaaaagagaaaagtgattcaggagtcaaaatgtcacgactgagactgaattagtctkaaggaattgtatctagaatgatcatcacctaatagggtgctggggaatacaaacaagacaggaagactcagtgtcaggtcttcacaatgggggctgaactgcacacatttcctcattctacatgactttgtcatcctttcctagcatctcttcttacattcaggattaatatgcagtgttgaccagtgcttatttgtgcaagctgtgtctgtggcttgagggtttagttgttgctgttgtttttcttttctctttttttttgagatggagtctcgctgtgttgcccagggtggagtgcagtggcgcgatcttgactcgctgcaacctccgcctcctgggttcaagcaattctcctgccttagcctaccaa

SEQ ID NO: 469314 - DNA, 603 bp, Homo sapiens
tatcctgacaataatccttttaaaattggtctgtgtggctgctcctgtttcccgcacaaccaagacaataaccaccctagtaactgtagttgctacctttgcttcttggtggcttatggagagttcaggtaacaggccaaatacaggtaaaatgacagctcactgtcaggaacaaggaaaagagaaaagtgattcaggagtcaaaatgtcacgactgagactgaattagtctgaaggaattgtatctagaatgatcatcacctaatagggtgctggggaatacaaacaagacaggaagactcagtgtcaggtcttcacaatgggggctgaactgcacacatttcctcattctacatgactttgtcatcctttcctagcatctcttcttacattcaggattaatatgcagtgttgaccagtgcttatttgtgcaagctgtgtctgtggcttgagggtttagttgttgctgttgtttttcttttctctttttttttgagatggagtctcgctgtgttgcccaggstggagtgcagtggcgcgatcttgactcgctgcaacctccgcctcctgggttcaagcaattctcctgccttagcctaccaa

SEQ ID NO: 469315 - DNA, 475 bp, Homo sapiens
aaatggtttgatgcaagtaacaaaactgttagctcatggaggtagctcatctccccagtcagatgttcttattgttcctttgggcagatgggaaaaatagactctctgggtaggttattctacctgaaaagacaaatacaaacaaaactaagaggtttgattcccctggttgaaaataagggaagaggtatcttccctccctctctttttctcagggcatctattttraaaatgctttagaaactttgtaattataaacattttctcctctctttgaaatgtaaacatcaaaggagctaacaccactatctcccagtttgtgtgggaggggaggaagctaactttggtgggtgctttgctccaaggtgcaaaactacctcctgtcataaagacatagaagcttatttttcctgtaaagacaattagctttagatgttaaacccaattgccaggtaaagttaggatgaactatgtg

SEQ ID NO: 469316 - DNA, 626 bp, Homo sapiens
ggttaagacatcttatttgtgtgagagatgtgtcctgaccaacctgggtagtaattatataattcagctagtcctaacaatgtgtgttacagacttccagtggtcagagccccgtttccctagattttatgaatatacatatgtttggaatgctgagacatgccagtcagtcttgattactttgatcagcctccttctgtttcttgtggaggggtgggtaaattggagtggggagagaggcattttttcaacaacttccataagcttcaaattaagacacattgccttctctctttaatagacttcttgtaagggtaatcaatgagctagattctgacctatggattactctgtaaaacagataggagtgtgtgtgtgtgtgtgtgtgtgtgtgtgtgttaaacatcagcactttggaaggctaaggcgggaggaaggcttgaagccaggagttcaagaccagcctgggcaacaatgcaagaccacctctctacaaaaaataaaataattgcagtyatggtggtgcacacctgtagtgccagctattcaggaggctgaggtaagaggaaagcttaagcccaggagttcaaggctgcagtgagcatgatagtgccactgcattccag

SEQ ID NO: 469317 - DNA, 626 bp, Homo sapiens
ggttaagacatcttatttgtgtgagagatgtgtcctgaccaacctgggtagtaattatataattcagctagtcctaacaatgtgtgttacagacttccagtggtcagagccccgtttccctagattttatgaatatacatatgtttggaatgctgagacatgccagtcagtcttgattactttgatcagcctccttctgtttcttgtggaggggtgggtaaattggagtggggagagaggcattttttcaacaacttccataagcttcaaattaagacacattgccttctctctttaatagacttcttgtaagggtaatcaatgagctagattctgacctatggattactctgtaaaacagataggagtgtgtgtgtgtgtgtgtgtgtgtgtgtgtgttaaacatcagcactttggaaggctaaggcgggaggaaggcttgaagccaggagttcaagaccagcctgggcaacaatgcaagaccacctctctacaaaaaataaaataattgcagttatggtggtgcacacctgtagtgccagctattcaggaggctgaggtaagaggaaagcttragcccaggagttcaaggctgcagtgagcatgatagtgccactgcattccag

SEQ ID NO: 469318 - DNA, 200 bp, Homo sapiens
tgattggtatgacaagttatgacagaataggtgccataaggaagagtcagarcactagtgcccaatgcttgctcttctaatagaagttaacacaaatctaactttcaacattgattgagcacccattatgtaaactagacatgtatatgattggctgctatcagtgaaggaaacattgaaataatcttgttgctttggaa

SEQ ID NO: 469319 - DNA, 582 bp, Homo sapiens
tctcacccaaggttacaaagctcaaagtagcagagtcaagagaggagtggagctcttgactcccaatttcacatgcatcaaggaggcaggcttgcatgaggtacacccaaggagcagcagcctctcccgttcccacctctcacaggccctctgagggtgtttctattctatcgctcatcaccttgacagaaacctctggagaagctatggtcatctactagcaggatctgtgggtcgtctaaggtagaaacatgtagaacggccatgttattcctcccctccgtgaaactttcctgcyaaggtgtgtctgatttttgctgagtgtgttcccaggctaaggatgctgagaacaagtgcaaaaccataacaggatgctgggagcctgggccagccacaaagaaggccttgacatttgcagatctgaagtcttggaccttcagactgctcggatccttaaataaccaggggctggtaagggagatctggcaaaggcaggtagcaccagtgtgcctcagtgctctgatatgccatgtagaaacacggccacttatgtgtgctaattgatgggcatgaaacatacat

SEQ ID NO: 469320 - DNA, 540 bp, Homo sapiens
agaaaaaataacataaaaataacatagcaaatatatatataaagtactatcacactataatggtgtaatggattaaaaaatgatgtaatgaagactcatttatgccatcacaatctgcatttttttaccacaacactaaccatttagagctcatgtgcctgcagacagttacttaaatttgtacttatgtcttcaaaattacgggtaattttttttcttttaaaacaagatgttcattgcagggagcaatgtgcacactgacccttttaaamtctgccactgttgcaaaggttttcagtaggattctcatagcggtctgaagagatagggaatgttagttaacaaaactgaactgtcctcatttcaaccatgcataaatgctcactctgttccttttaccgaaacttttcctttagaaatacaacaacacagctaagagcatggcctctggaggctacctgccttggcttgagtccagcttctctgcttactgactgtgagactgtgggcaagctacattagctccccgggatttagttt

SEQ ID NO: 469321 - DNA, 540 bp, Homo sapiens
agaaaaaataacataaaaataacatagcaaatatatatataaagtactatcacactataatggtgtaatggattaaaaaatgatgtaatgaagactcatttatgccatcacaatctgcatttttttaccacaacactaaccatttagagctcatgtgcctgcagacagttacttaaatttgtacttatgtcttcaaaattacgggtaattttttttcttttaaaacaagatgttcattgcagggagcaatgtgcacactgacccttttaaactctgccactgttgcaaaggttttcagtaggattctcatagcggtctgaagagatagggaatgttagttaacaaaactgaactgtcctcatttcaaccatgcataaatgctcactctgttccttttaccgaaacttttcctttagaaatacaacaacacagmtaagagcatggcctctggaggctacctgccttggcttgagtccagcttctctgcttactgactgtgagactgtgggcaagctacattagctccccgggatttagttt

SEQ ID NO: 469322 - DNA, 414 bp, Homo sapiens
ggatctcatgcacactgtctctactctcttgctgtaagagaactgaatgcaggagaaccaaggaggctggtgtgtgtttgctcagctagcagcctctaatcatgcactggtctcttccttgggtggcactcatctgccttttaaccttggctgtacttattatattctattctgacacgcagcctaacacccagggaactgtttatgaagctgctatgctggggatgactttttggctactttcatgcattcactcttctttgggtacgcacggattttctcctggagagatactcttggctccagcagaaggcatgtgactcaggactggcccattagagcatcccattccacgtaagagctgggcrtgtgatccctcagagccatgtgctggaaaagacttgcttataccat

SEQ ID NO: 469323 - DNA, 621 bp, Homo sapiens
tattttacaccataatcagctctgcccccagtcctctgactcaggtccaacatgactaatgtgtctctatgaggagtgagtcctccccaccatcttctctcactggaaaaaggggagaaggctctccattccgccctaagaaataatttatccttccgagaccacaggtaatcacattcagttgatgacatgcttcatatttcacttattcattcaacgagtatttgtgtgtttattgactctaaatgtaaataatatcatgttaaacatttgctcaagggaaccrgtacctattttaccctgtttctgacaacagcagaaagttcctgctgaaatgtcaagatctcagttcaaaagaatcctgctgttgaaactcgagaactgagctctggagcatctactcttcagaatcctttacccacgcccagaagctaatgatttccagaggtggccacagcaaagaattcataggaacattggttattgtgtcaagagtcatgtcaagaagggaaggtcactggttccaaaaattccagaggtgaaaagtcactcttacaaataccgtgtcctccacattcagcacatcatggtatgtgctttatcataatttggtgggccacc

SEQ ID NO: 469324 - DNA, 532 bp, Homo sapiens
gaagggaaggtcactggttccaaaaattccagaggtgaaaagtcactcttacaaataccgtgtcctccacattcagcacatcatggtatgtgctttatcataatttggtgggccaccagctgtcaccaaggcagacatcatccaaatgaaattcttcaacctcactagccaggtgtcacttttacagctggttgacactttctgccaggcatggacakgggtcaggtttttgcctcttgaatggactaagtcagtggttcccgaagtgtagtctaggaacaactgggggttcctgagacacttcttgtgggtttatgcagttaaaatattttcataataatccaaaatgttatttgtccttttcactcttctctcacgaatttacagtgtagttttctagaggctacataacaaatatttcgttgttctgatggctaatggaatgggtattcttgtattttgaaaatttttcaattttaatatctaatatagttaatatttatagatatagcccagataaacataagctctc

SEQ ID NO: 469325 - DNA, 558 bp, Homo sapiens
gctgaagctccctcactgcccccttcatcagttttcagtcctctcattcctatcagtggaatatggtgaaacccaacaaagcagactgcactgccacgtgttgggggctcacataaggcggattggctccccacatgaaaagcaatgtttggtgcaaatcctccttgtcttccatatcagcaaaatagcaggattctcttgcattttccccgagcaacaactggmgcatttatttctacagggcacaggaaattgcttcctccacattctctttggacttgaaaaagattcttagatctcccccttttctgggaactctgggctcataatcagacaaaaaaccttttagtaataccaagctgtgatgcaagataatcatcccaagtgtaggagaacagcagagagagactcaattgtgttttaaagcactctgaaaaatagcaaacccattcatttgaactcttcaaaagtattctgcattatagtttctctagctggtgttttagctgaatatggcattaaatcttcattgtatggcaaagcctctaacaagcaaaa

SEQ ID NO: 469326 - DNA, 571 bp, Homo sapiens
actgcccccttcatcagttttcagtcctctcattcctatcagtggaatatggtgaaacccaacaaagcagactgcactgccacgtgttgggggctcacataaggcggattggctccccacatgaaaagcaatgtttggtgcaaatcctccttgtcttccatatcagcaaaatagcaggattctcttgcattttccccgagcaacaactggcgcatttatttctacagggcacaggaaattgcttcctccacattctctttggacttgaaaaagattcttagatctcccccttttctgggaactctgggctcataatcagacaaaaaaccttttagtaataccaagctgtgatgcaagataatcatcccaagtgtaggagaacagcagagagagactcaattgtgttttaaagcactctgaaaaatagcaaacccattcatttgaactcttcaaaagtattctgcrttatagtttctctagctggtgttttagctgaatatggcattaaatcttcattgtatggcaaagcctctaacaagcaaaatgggaagaggctaaatgtgcattggct

SEQ ID NO: 469327 - DNA, 503 bp, Homo sapiens
ttggatctcagcatcagcaatgagctgcatcatctctgacaggaatgggtgataagaacatttcccttcaccatttttaaaagccaggtccttgatttgcatgggcaggaagggggaacatggttgtgggggtggttagtttaccacatcacattttcacattttcatctatcataatttagatctttacatttcttgagttggtgactgatagcctccaaacacataaacactctccacctgtacagaatgcaccagggactctgctctcataaagtcaggaccaaggtagaagtgaataaaattctaaagcccactccttagcagtagtaagtcccaggatcggccacggctacagaaggtgacagtttctggatgctgtyagtttgcagcaaattgaagttttgtggttttatctattaccagaaaagccctccaaaaaaatgtagccagtggggaagaaagcaggagtccaccgtctcatttttaacaaggaccagctg

SEQ ID NO: 469328 - DNA, 613 bp, Homo sapiens
ttcagttgttatgtcatttgttctatccaacaatattgactttctctataactgcgatagaaattaggaagtttctccttttggcacttacacttttttttttttacccccataccatggaatgtgaaggcatttgtctttgggtccccaytacctcaccaagcctccattctctcccttttcatcttcctcttccctcccaagctatgtttcagatgtgctgcaatactcaaagcttacattcagaggttaagtgtacactacgtagggtcccagttgggtattcagtttgactacagcattgctcaaatatggtgatgctaggaagatttttagccaggaagatgttgaaaaaagcagctaaaagtggaaaatatttatggcttcattaagattggcctgaggcaccatggaacattttctctcttaatcttttttcattatgtaatctgttcatggaattcctaattctgcatgacatgccatatgagtaaatgggttttgcttatggatgtaaagatggaaattcaatttaaatttaaggataaataaagagagggaagagaaatagaattccatagaatagaatggtagttccccagaggatagggga

SEQ ID NO: 469329 - DNA, 613 bp, Homo sapiens
ttcagttgttatgtcatttgttctatccaacaatattgactttctctataactgcgatagaaattaggaagtttctccttttggcacttacacttttttttttttacccccataccatggaatgtgaaggcatttgtctttgggtccccactacctcaccaagcctccattctctcccttttcatcttcctcytccctcccaagctatgtttcagatgtgctgcaatactcaaagcttacattcagaggttaagtgtacactacgtagggtcccagttgggtattcagtttgactacagcattgctcaaatatggtgatgctaggaagatttttagccaggaagatgttgaaaaaagcagctaaaagtggaaaatatttatggcttcattaagattggcctgaggcaccatggaacattttctctcttaatcttttttcattatgtaatctgttcatggaattcctaattctgcatgacatgccatatgagtaaatgggttttgcttatggatgtaaagatggaaattcaatttaaatttaaggataaataaagagagggaagagaaatagaattccatagaatagaatggtagttccccagaggatagggga

SEQ ID NO: 469330 - DNA, 600 bp, Homo sapiens
cggttgccacctggaacaacttcggttcctttccatacagattcccctcattcagaaggctagaaccacttccttacagcatggtagtgggtttcaagagggaatgaaccaagagaacaagccctagcttacaaattcctgtcaagtccctgcttgcatcaagcttactagtgtttcactggccaaagcaagacagacagatggccaagcccagrcacaatttgggagaagactgtacaagggtgcatattccaggaggcatggttttttggggatcatcagtttaacagtctaccgcaattactgtgaaaaaagaaaaagaagagtaaaataggataaccattgttttaagtgtttgcacagaaaatatgtggaagaatacatatcaaatagtgtttgaaacagcggagtgaaatttgcatgggaagtagtagtaggaaacgtgagatttttaaattcatgtatgtatgtgtgtttcttgattttttataataatcatatacctaaatatccatatacatatatttatatatataagagacagggtctcactctgttgctcaggctggagtgcagtggttgtaatgagcaatcacagct

SEQ ID NO: 469331 - DNA, 519 bp, Homo sapiens
tggaacaacttcggttcctttccatacagattcccctcattcagaaggctagaaccacttccttacagcatggtagtgggtttcaagagggaatgaaccaagagaacaagccctagcttacaaattcctgtcaagtccctgcttgcatcaagcttactagtgtttcactggccaaagcaagacagacagatggccaagcccagacacaatttgggagaagactgtacaagggtgcatattccaggaggcatggttttttggggatcatcagtttaacagtctaccgcaattactgtgaaraaagaaaaagaagagtaaaataggataaccattgttttaagtgtttgcacagaaaatatgtggaagaatacatatcaaatagtgtttgaaacagcggagtgaaatttgcatgggaagtagtagtaggaaacgtgagatttttaaattcatgtatgtatgtgtgtttcttgattttttataataatcatatacctaaatatccatatacatatatttata

SEQ ID NO: 469332 - DNA, 643 bp, Homo sapiens
gctgcaaataacagaacacctyatagtgcaggatcaaggttgcccccagacgactgggagctcactccagacaacaaactatctgagattggggatcccctttctctctgagggtgaggcagcactccagcgtggcccctcactagtctcatgacttcctccattttatggatcttaagggagctctgttcgcaaacaacccctgcaggcacctggcatccccaaggcccagcagcctgtgtattatcccactaccgtcaatccatgtgcttctaggagaggaacccacacagcatcttcaggagattgccagcctccggcatgtttcccagtgtgatgatgagagaaggagaactggtctttctattctcttgtcaagcttggtgggagacaaggactgctggcattggttccatggctagactacatcaggaccaatatttctgctattttcttggcctgtttcttatgcttattgtgtagtgctcacatgatgtctgctattttctatcttgattcgtaattataaaaatttagatatctgatgcaaggacctccaagaccttgtccttgatcctgcaagggttaagaaggagcctgttggtttctacccctccatgaaataacttgtcaaggccaccaa

SEQ ID NO: 469333 - DNA, 643 bp, Homo sapiens
gctgcaaataacagaacaccttatagtgcaggatcaaggttgcccccagacgactgggagctcactccagacaacaaactatctgagattgggratcccctttctctctgagggtgaggcagcactccagcgtggcccctcactagtctcatgacttcctccattttatggatcttaagggagctctgttcgcaaacaacccctgcaggcacctggcatccccaaggcccagcagcctgtgtattatcccactaccgtcaatccatgtgcttctaggagaggaacccacacagcatcttcaggagattgccagcctccggcatgtttcccagtgtgatgatgagagaaggagaactggtctttctattctcttgtcaagcttggtgggagacaaggactgctggcattggttccatggctagactacatcaggaccaatatttctgctattttcttggcctgtttcttatgcttattgtgtagtgctcacatgatgtctgctattttctatcttgattcgtaattataaaaatttagatatctgatgcaaggacctccaagaccttgtccttgatcctgcaagggttaagaaggagcctgttggtttctacccctccatgaaataacttgtcaaggccaccaa

SEQ ID NO: 469334 - DNA, 643 bp, Homo sapiens
gctgcaaataacagaacaccttatagtgcaggatcaaggttgcccccagacgactgggagctcactccagacaacaaactatctgagattggggatcccctttctctctgagggtgaggcwgcactccagcgtggcccctcactagtctcatgacttcctccattttatggatcttaagggagctctgttcgcaaacaacccctgcaggcacctggcatccccaaggcccagcagcctgtgtattatcccactaccgtcaatccatgtgcttctaggagaggaacccacacagcatcttcaggagattgccagcctccggcatgtttcccagtgtgatgatgagagaaggagaactggtctttctattctcttgtcaagcttggtgggagacaaggactgctggcattggttccatggctagactacatcaggaccaatatttctgctattttcttggcctgtttcttatgcttattgtgtagtgctcacatgatgtctgctattttctatcttgattcgtaattataaaaatttagatatctgatgcaaggacctccaagaccttgtccttgatcctgcaagggttaagaaggagcctgttggtttctacccctccatgaaataacttgtcaaggccaccaa

SEQ ID NO: 469335 - DNA, 643 bp, Homo sapiens
gctgcaaataacagaacaccttatagtgcaggatcaaggttgcccccagacgactgggagctcactccagacaacaaactatctgagattggggatcccctttctctctgagggtgaggcagcactccagcgtggcccctcactagtctcatgacttcctccattttatggaycttaagggagctctgttcgcaaacaacccctgcaggcacctggcatccccaaggcccagcagcctgtgtattatcccactaccgtcaatccatgtgcttctaggagaggaacccacacagcatcttcaggagattgccagcctccggcatgtttcccagtgtgatgatgagagaaggagaactggtctttctattctcttgtcaagcttggtgggagacaaggactgctggcattggttccatggctagactacatcaggaccaatatttctgctattttcttggcctgtttcttatgcttattgtgtagtgctcacatgatgtctgctattttctatcttgattcgtaattataaaaatttagatatctgatgcaaggacctccaagaccttgtccttgatcctgcaagggttaagaaggagcctgttggtttctacccctccatgaaataacttgtcaaggccaccaa

SEQ ID NO: 469336 - DNA, 392 bp, Homo sapiens
tctctcatctacaaaacggagatgataatagtatttgccccatcaagttttcatgaaaattggatgagttaataattgttaagcactaacactgtcagcccatagtaagggctatataagtgtgtgttgagtaaaagtattaaaaacttctttaagacccgggagttcttaagaaagcacattcrtactctgtaaattgagtaactttttcaggtgacaacattttcctgcatggtattttccttgctcactttccaagggtccccatgacgaatttccacctaccagtcaacaaaagcagccagagctccatcagtgaaagcccagtgaacccatatgttgcaaatgagtgtcagtaatgacaacagcagcaagggtttcacaatctgtgc

SEQ ID NO: 469337 - DNA, 616 bp, Homo sapiens
gcgtaagtcctgcctgattcaaggaaaacagggaattttggggtcctgtggctcctccaacgttcttttcctttacctccttgtgtaaatgtggcctgatttgtacttggagcataagtagacccctacagagcgtgtgtgtgtgtctgtgtgtgtgtgtgagagagagagagagtgagagagagagagasagagagagagaaagggacctatttccttctatccctctgtctgtcttactctcagactattaatacaagccctgagtctggctgtacccccagaacatgtgccccgccccctacaacaaaatgctgcccctcccagctaggtctgttgtttgttccttttctgattggcgccaggcttatagaccccatgtaggtagaatataactttccataaataacctctaacccgacctacaatttagccttcaggtttttttccccctcgtggtaatgggattgcagcctgggctgatccatcctgtatcttcaggtcccagaaagcagaccctaggtttggacattgcttggaattcctggtacccccatgttgccttgcacatggcaaggactcggtacatgttgaggaatggtggattctcttctac

SEQ ID NO: 469338 - DNA, 616 bp, Homo sapiens
tacaataataagatgaaagggtgacccctgcattcacaaactagggcttaaggtcactgttttacttggcatgtgactgaccttggacaagtcccttcatctctctgagcctcaatttccttacctgtgaaatgaagatatgaatctacaamtactatgtgtggtcctagattagatcctggaccaagggaaaatgtcataaaggacatgatggggacaattgttaacatttaaataacagcatataacagatttggatacattttaaattctcagaatttgatcactgccctgagaaagtccttggccttaggaaatacatgctgagagatttagggttaaagggacacgatgtctacaactaagtctcatatgactcaggaaaaaaaaattcagagatgtgggaaaggaaattgagcaaacatggcaaaggagcaactggtgaatctgggtgtggagtatatgagagttctttgtataattcttacaccttttcagtaagtttgaaattacttcaggacaaaagttaaggggctgggtgcagtggctcatgcctgtatcccagcactttggtaggccaaggcaggcagatcacttgatctcaggagttcaagac

SEQ ID NO: 469339 - DNA, 616 bp, Homo sapiens
tacaataataagatgaaagggtgacccctgcattcacaaactagggcttaaggtcactgttttacttggcatgtgactgaccttggacaagtcccttcatctctctgagcctcaatttccttacctgtgaaatgaagatatgaatctacaactactatgtgtggtcctagattagatcctggaccaagggaaaatgtcataaaggacatgatggggacaattgttaacatttaaataacagcatataacagatttggatacattttaaattctcagaatttgatcactgccctgagaaagtccttggccttaggaaatacatgctgagagatttagggttaaagggacacgatgtctacaactaagtctcatatgactcaggaaaaaaaaattcagagatgtgggaaaggaaattgagcaaacatggcaaaggagcaactrgtgaatctgggtgtggagtatatgagagttctttgtataattcttacaccttttcagtaagtttgaaattacttcaggacaaaagttaaggggctgggtgcagtggctcatgcctgtatcccagcactttggtaggccaaggcaggcagatcacttgatctcaggagttcaagac

SEQ ID NO: 469340 - DNA, 547 bp, Homo sapiens
ggctaattttttttttttttttttttttkagtagagacggagtttcaccatgttggccaggatggtctcaatctcttgacctcaggatccacccgcctcagcctcccaaagtgctgggattacaggcataagccaccacgcctggccggcatttgcaatctttaagggacagtggtagcagtagcttggcctttttctgggtcctgagtgttacacatacatgcgagtgcatatgcgcccacacacacgtgcttgcacacacacacacacagacacacacacacaaacacacgctgtcccctgaacgcagacccactgcccggctagagccagcggccccatgatttaggattttgttctctgcctgaaagaacaacaactacagacaacaggaccaccctcaccaacagcacccaggctggtttctgaggggagccccctatgctgaatgtcccttacctcctcacttcttcgcaggaaccctcattctccacccaccccaccctctccaaggtggtcagacattctcagtaggaatgtccccagc

SEQ ID NO: 469341 - DNA, 641 bp, Homo sapiens
tgagcaggctagaggtgctgggggacagtctgggtgtgcacagaagcagctcccgagctctcggtgctaatgtgaggatgaaaggcccccaccctgctgctgcccagtgggagagcctgacgctcaagttggcgatgagccttgcaggctgggcctggatgtgtgtctgaaacagggagccttttcaggtggggaggcgccctggctgaagccctcaaatgcagagtcacggggccgggcgcagtggctcacgcctgtaatcccagcactttgggaggcagaggtgggtggatcacaaggtcaagagattgagaccatcccggccaacatagtgaaaccccatctctactaaaaatacaaaaaattagccgggcgtggtggcragtgcctgtaatcccagctactcggaaggctgaggcaggagaatagcttgaacccgggaggcggaggttgcagtgagctgagatcgtgccattgcactccagcctgggcaaaaagagcaaaagtctgtctcaaaaaaaaaaaaaaatgcagagtcacagaacaggaaaggggctgcccacctgaggtcaggtccccagaccttggctgagcaccgccctgggctcataaagaaccactgtgcagtgccgcgtgatgag

SEQ ID NO: 469342 - DNA, 544 bp, Homo sapiens
aaatacctttaagatgaacataacgtctgccttccgcgcgtgttgggagcctggtgcattgtttgcccaggtgtgctcttctcagaacactgatcccttgtgttgttaaatgttaaataagaagggtcctgtccaagcccagttgccttaaggaagcctggggttaaaagctagggaggcttctctcctgcagaggtgcctgtgacatcttcaagagggagtgaagaatttcaccggctgatttgaccacagatcaatttcttgctatcagagtgggatggggtttccacaaaacacgtctttgaagacaacaaatactgcttccttccctccctccctggagccctggcctcatactgcttagcttatctggtrgcagccagggaaatggcaggatgcatctccctgggcttagaactggggcaggaggcagcagccaagtcaacagcaggtagtggccagtcctcagctctaagccagcaggtaggactgcagaggtgcatgtggcaaatcatagacacctgatgtgggctgccactgactg

SEQ ID NO: 469343 - DNA, 640 bp, Homo sapiens
ccagcttagtgcagacccctagacacatccccactggcgagagagggcttttggatccaagagtcattcccattttttttctaaataaaaaattgggggccaggtgcggtggctcacrcctgtaatcccagcactttgggaggccgaggcaggcagatcacttgaggccagttcaagactagcctggccaacatagcaaaaccccatctctactaaaaatacaaaaagttagctaagtgtggtggcatatgcctgtaatctcagttactcaggaggcggaggcacaagaatcacctgaacccaggagacagaggttgcagtgagcaaagatcgcaccactgcactccagcttgggcgacagagggagactctaaaagaaaaaaaaagaaaaaaaaaagaaaagaaaaaaaattaggaatgactttcctttggggtcaagaggcctctgcagtctcagagtcctgcctatttgcttggtagtcccttccctaagccactgcttaagtcatcaaatactgaatttaccacctgggatgaaagctgagatttaagagttgtagctgaacttcctgagcgtggagtcaatggacctctgagagagaggtgagagaggacaagtacttgtggtaaagtcctagcc

SEQ ID NO: 469344 - DNA, 115 bp, Homo sapiens
ggtgcagccagtggctccgactgtggccctgggaggggttgttgytggggctggagttggcccctcagtcccttccttccctcagatcatcaagaagctgattgagcgcaaacag

SEQ ID NO: 469345 - DNA, 526 bp, Homo sapiens
aggcaaaattcactgagcagccccagaatagaaatggttagaggcagacaagtcaggcagggcaagtttcagagaagtgacttggaaaggaaagactgtctatgggagatgggggcctggaggggccacttgagggtcccgaagagacagaaagtgtgtgtgtgtgtgtgtgtgtgtgtgtgtgtgtgtgtgtgtgtgtgtgtgtgtgtatgtgcgtgtgcgcgcgttgggggacagggcgggggcaggggcgctgtcttcagccgacccaggcagcaaggctcaggtctctaccgaaaccaccaactgttgcctcggcctctgttgccaagacagcagggggcatctggagccacgtggagcaggggttgggatggcttcacacactgtcaccatttgtgaatgtcaccctgctgggtgcagggcacaggaaggttgtgtttttggctggcggctgctgcgtctccagtaagcgccacatgcctggctgtcacaggattgccagcgcttgctgyggagctgagaa

SEQ ID NO: 469346 - DNA, 324 bp, Homo sapiens
tccaaataagattagttctgaagtaccaggtattaaataattaaacatctctttctgtagggggacacaattcagccccgaacaaaggcacgattctatttttagcctttgcaaagaaatacactgatcttctaaacattattgggcaattaactcaattttgacagaaatctgtaacgacatctagcccactgtgcatctacaagtccatcaacccagcctttatttttgtcacatttctttagaagtcctatccttgrctcatgagaaaaattagctctgctcttatttgttaggtatataccactctcatgcttggatttt

SEQ ID NO: 469347 - DNA, 413 bp, Homo sapiens
cggggcctatttatccccaaggcacggccggccccagggacggcccaccacagccctgcccaacgtccagcctcaaggtaaacagatggcgctggcccctgcgttcaagtccccgcccggaatgccccgcgaagtcgcccgcggctgaatccgacatggtggggaaactgagtcccggggtctgtggagagagctggtggggcagggagtcagggggtactgcccccactttcattcactgtgtgtgtgcgtctgtgtgtgtgtgtgtgtgtgtgtgtgacggggtgtggctgtatcgcatcctcttgcttcagtctcccatgtagctgggactacaagccygcaccaccaagtccagctaatttatttttatttttatttttatttttagagaccgggtctggctatgtcct

SEQ ID NO: 469348 - DNA, 506 bp, Homo sapiens
aaaaaggagtgaaaccctgacttgcttggtggaaatgtggagtcctgagctccatttttctgcacatggtcattactctgctctaaaagaagatgcatgacagtatagggacaggtgtttcatggttgttgacatcattgacaagagggtcagagcatcttgctgtgccagggatgcaggctaaggccccagcatccacagagactggcatgcacagtgggaagacgtgtgcctggtttctgctgggatttcactggaggcattgggtacagaggtgggcttctggcttcagtgcctgcgtctcctgtttcagggttgtgtgaacttgagcctcagtttctccacctgtagaatggggctatcgtagaccctgcctctaagggtttctggagaggattaaatgagaggattcataggaagtataatgtctttccttttctaagagcttgctggcaggattaaagtaaaygaccttgaatagtgcttggcacaaagtaagtgctcag

SEQ ID NO: 469349 - DNA, 465 bp, Homo sapiens
tgtgtttaatttgaaatcctctgtttaaattctctctctctcacctcaccagtgggcagtaactcatctctgagagactgtccaagcccagctctgggtagaactcagagatgtcacatccctaggaaccgagaactgtgtattgtaaacagtctctgagatttggagttgttagctttttccagccttgaaatctcatgggggcagttgtttaagttggaactctcacaaagggcatatgaaaatcgcagagcgaggtgtcaggaaatggaattccacatacatccagttgccacgtttggtgtcagcactattgtttttacagcttacattcccgccccsccccccccccacaaataacatttgggctgtaaggggatgtttcgcaaatcagacacgttgtttacttttaggcctgtaatgctatggagaaacttggtgactctaacaatttagatgttgggt

SEQ ID NO: 469350 - DNA, 642 bp, Homo sapiens
gccaggcacaggctgttaacccccagtgtcccgggctccaaacagtctcctgacctagcacagttcctcactgtggcatgaatttggagatggctgttctttatcttggaatactctgttgagagatttgctttactcttcaaagacactttgagataaagtgtgaagtgctcaaccttgctctttagcaggaaaatacctcagagaggaaaaagcaaaggaggatttacaactggtttctaggccagcgtggtagctcaggcctgtaatcccrgcactttgagaggccgaggcaggtggatcacgtgaggtcagaagttcaagaacagcctggccaacatggtgaaaccccaactctactaaaaattcagaaattactctggacatctgtaatcacagctactcaggaggctgaggcacatgaattgcttgaacctggtaggtggaggttgcagtaagccgaggtcataccactgcactccagcctggtcgacagagagaccctgtctcaaaaaaaaatttttttttaattgtttctattatgggaattctcaaaaactcacaaaagtagaataagcccccatataccccatatatacccccatatacctgtccatcagtgaattctctaccttctgccat

SEQ ID NO: 469351 - DNA, 606 bp, Homo sapiens
tatagttcttctatagagaagaattcccccgtcatgtttgcaaaggcaggataaatacttgattccttccccttattggtatcaaattaatgagttgcttccttaagcacctttaactatgaaaatatttttggaatatcattacgaactcatggatttttctatgtttgatgtgtttcaatctttgcagtcctactttctaaagctaaagttawcccaagtttaaccaatgatagccttttccaccgggcatgatgccttgcgcctgtaaccccagcactttgggaggctgaggtgggcagatcacttgaggccagtagtttgagaccaggctgggcaacatgacaaaagcctctctctactaaaaatacaaaaaaattagcggggcgtggtggcgtgtgtgcctgtagttccatctactcgagaggccgaggcaggagaatcacttgaacccgggaagcggaggttgcagtgagccaagatcacgccactgcactccagcctggacaacagagtgagactctgtctcaaaattaataataataataaaataatagccttttcaaatttgttctgtcaggacccctgctccttttttttccagct

SEQ ID NO: 469352 - DNA, 521 bp, Homo sapiens
taataagtctttttttctgagttgcacactttttttttgtttgttttttgagactgagtctcactctgtcatccagcctggagtgcagtggtgtgatctcggcgcactgcaacctccgcctcccaggttcaagtgattctcctgcctcaaccttctgagtagctgggattacaggctcccgccaccacgcctggctaatttttgtatttttagtagagacaaggcttcaccatgttggccaggctggtcccgaactcctgacctcaggtgatccacctgccttggcctcccaaagtgctgggattacaactgtgagccatagcacccagtcgagttgyacacttttattaacaccattgatgtttaactaccgcaccccccacccccaaatttttttttttttttttttagaaagggtctcactctgtcacctaggcttgagtgcagtggcaagatcgtggctcactgcagccttgacctccccaggctcaggtgatccttctgcctcaggctcccaagca

SEQ ID NO: 469353 - DNA, 618 bp, Homo sapiens
gcagctgggagacacggatgagctggggaaactccagcgtcacccactgggaggggccctggaagcagacagggaaactgaggcgcaagctcactgcaggcacagagccctgctatgcctgtctcattcacatagttcttggaatggaggggaagaaggaaattcggcacatgttcctttcctggccacccatgagggccccctgacgttctcaaggcatgagatctgaatctgaatcaccctagagatggagggtcgarggaggcgcctcacctggtctgagttccaacatgtctcctcatcctggtcgaaaagatgtttttttccaaactgccgagtgttgcgattcagcactgaactcaccctggaggcaccaggatcaaggcgaagagaggggctgagaccagctctcagctccgcggagggcctgacccccagatctgtccactgagggctcgaccccaggcttagggcctcgccactgcctgtccccacagactcttacctgctcactgtctctggacaaaccaaagagtgggtcatgtcggttccacaagacctcgcagggcttaggattgggcacagccttggttcgaatcccggcgcctcctcaagcta

SEQ ID NO: 469354 - DNA, 612 bp, Homo sapiens
gttacataaataataaaaatggttctgaggtaaagtgtatggtacgcttagttttttccccctttagcaatggcagtttattaaagaacaaaagcctgtagcctatggactgtgacgtttacacactgtctttatggttttcatagacgtctaaggatgattcatgcttgctagcatgtagctaactctcaggtccagcaagaatgtctttggacagtcttctgttaaagcaaattttcttaggcaaattcatctgccgctcatgtcaaacaaagcttattgctcattaagrgggaaagtaacacatagataatgaaatgtcagttctcaatgacagggaacaaaagagggtttatgtatagcagcttctaaccctatcagtgacatggatgatttggagacttttcctgagggttgccaggcatgaactattaatcagaaacaataactaatatgtctgagaagaaagcaacaagaaaactgtcccgtagcaattagacaaggccagacaacaagacttgactccttgagaggtcaaattaggaaagaagtacaagacagtttccaatagaggtagcccaaatagagacactctggcagcagtttacaaat

SEQ ID NO: 469355 - DNA, 612 bp, Homo sapiens
gttacataaataataaaaatggttctgaggtaaagtgtatggtacgcttagttttttccccctttagcaatggcagtttattaaagaacaaaagcctgtagcctatggactgtgacgtttacacactgtctttatggttttcatagacgtctaaggatgattcatgcttgctagcatgtagctaactctcaggtccagcaagaatgtctttggacagtcttctgttaaagcaaattttcttaggcaaattcatctgccgctcatgtcaaacaaagcttattgctcattaagagggaaagtaacacatagataatgaaatgtcagttctcaatgacagggaacaaaagagggtttatgtatagcagcttctaaccctatcagtgacatggatgatttggagacttttcctgagggttgccaggcatgaactattaatcagaaacaataactaatatgtctgagaagaaagcaacaagaaaactgtcccgtagcaattagacaaggccagacaacaagwcttgactccttgagaggtcaaattaggaaagaagtacaagacagtttccaatagaggtagcccaaatagagacactctggcagcagtttacaaat

SEQ ID NO: 469356 - DNA, 612 bp, Homo sapiens
gttacataaataataaaaatggttctgaggtaaagtgtatggtacgcttagttttttccccctttagcaatggcagtttattaaagaacaaaagcctgtagcctatggactgtgacgtttacacactgtctttatggttttcatagacgtctaaggatgattcatgcttgctagcatgtagctaactctcaggtccagcaagaatgtctttggacagtcttctgttaaagcaaattttcttaggcaaattcatctgccgctcatgtcaaacaaagcttattgctcattaagagggaaagtaacacatagataatgaaatgtcagttctcaatgacagggaacaaaagagggtttatgtatagcagcttctaaccctatcagtgacatggatgatttggagacttttcctgagggttgccaggcatgaactattaatcagaaacaataactaatatgtctgagaagaaagcaacaagaaaactgtcccgtagcaattagacaaggccagacaacaagacttgactccttragaggtcaaattaggaaagaagtacaagacagtttccaatagaggtagcccaaatagagacactctggcagcagtttacaaat

SEQ ID NO: 469357 - DNA, 550 bp, Homo sapiens
ccaacatggtgaaaccccatctctgcttaaaaaaaaaaaaaaaaaattatccaggcatggtggcacatgcctgtaatcccagcttcttgggaggttgaggcaggagaatcactgaaacctgggagggggccaagatcgccccactacgctccatcctgagggacatagggagactccatctcaaaaaaataaaagcctattatgcctgccaagaacaacggctcttcccacaagcttattttggcatgacgtcctaatcaaaaatgtgaagacggatttgtttttatgccctgggtaggggaattcctgtttcccactctcctggcacactggtagcttcagtcaagcatattccaytggcacctgcccacacagacgaggaattccctacttctattacaagtataatcacaagccttaccagctaaaaccaacaggcagcataggaagaatggagagtcattctgagccctgccagggactgggctgcaggaacaatatgagttcaatgtgctgagcacatggagagaggcactgacttgggtagaag

SEQ ID NO: 469358 - DNA, 626 bp, Homo sapiens
aaatagtattgccattttaatttgcatttctttgattactattaaggttgaatatgttcccatatgtttttaaagccattttgattcctccttgtgatttttattttcctatctaatttagctttcaggatcttagtgatttttgtaataattctatagsctcttgatgttaaaattagcaagtcttggtttgtcatcttagaatatggtcccacttggcttctttttaaacatttttaaagttaaagacatttttaaaaatacaatcaactacatccatcttttattttgtgattttatccacccaaagtcctctttttcagcaacttgataaatcttcaattttattttgtcctggtgattatttttatttacaattttaagccgttggctttatctagaaggcataggttttcttttttcagtgttgaatctgatgcaagaatcaacatgaatttttgccaaatttgtcccagcagtgggtactaaataatccctgccttccccaccgcttgttgtcatcatatatgaaggtcttattcctaagagtaactgtttttcatccttccctccttgatgtgcaagggcctctgcagatgtccttttttctctctgttccacccacc

SEQ ID NO: 469359 - DNA, 586 bp, Homo sapiens
tgttatttactgactacctaagaaatgttcaaggggcttgggatataataatgaatcaaataaatgccctgtcctcatggtgcttacattctagtggagaggcagcaaacacacacacacatttctgttaaccagtgagaaatactatggagaaaaactaagcagtgcaaagagataaaggctgaccaaggtgctcttttagtgtggtggcttctaaagtactaccatttaagcagatacctaaaggaagtgagggagaaaacctgcggggaaagtgttctcagcagaggcaactgcaagtacaaggacccccggagcaggtgtgtgcttggtgtgtctgaggtgtcaacgttcctatcactctgtggctcactccctcattcacggggcaggtagacgccttcagggtctttcctggttggggatgtgggagtagaaccaacccactcaccagcgcacgtcaccacaggcctttaggttgrgggtgagctgctggagtcaagtggactaaagtaatgcaaaaaccggtcctatatcttcctccttccccatacatgcacagaacaaatgcgtggggcccgcattc

SEQ ID NO: 469360 - DNA, 394 bp, Homo sapiens
cttggtctcctctgtagggcctggaagaacagaaagccttccagggaccaccatgtgggaccctagaccctagaagacttcaccccaggaggctctgcccatcccaagcatccgtgggtgactgggtctccacctcttggcaagcgctgactcactccctacctctgagagtccatgacccagggctccagagagactatcctcctgcccacctaaccaggtggcgaaatctctggggtcaggtggggccttatcaccctccttggtcaaggagccaggtacctgcacaggcatgcagacctgtgtagaccagatgcctgtggggtgggttgtggaccccagccccattcacccatcccygccctgctgagagagtttgttcatcggctttaca

SEQ ID NO: 469361 - DNA, 394 bp, Homo sapiens
cttggtctcctctgtagggcctggaagaacagaaagccttccagggaccaccatgtgggaccctagaccctagaagacttcaccccaggaggctctgcccatcccaagcatccgtgggtgactgggtctccacctcttggcaagcgctgactcactccctacctctgagagtccatgacccagggctccagagagactatcctcctgcccacctaaccaggtggcgaaatctctggggtcaggtggggccttatcaccctccttggtcaaggagccaggtacctgcacaggcatgcagacctgtgtagaccagatgcctgtggggtgggttgtggaccccagccccattcacccatccctrccctgctgagagagtttgttcatcggctttaca

SEQ ID NO: 469362 - DNA, 339 bp, Homo sapiens
taactctccctccatggcctcaacaccagcacayacctgcactgtgaggcacctgcagagccccttcctgcccaggcagcctctggaactcaagatggtgtccacgtgcaggagccgcatccccaggcgcccagccccctggacttacagcagcctgtagagagcacctcaggccagcagccttctagtactgtcagcgagacagccagagaagtgggccaagggaatggcctgcagaaggcccaggctcatgacggagctggtctgaagctggtagtttcctcacccaccagtccggtgagtggtgcaagccgttcagggggcggtcttgggaaatgt

SEQ ID NO: 469363 - DNA, 339 bp, Homo sapiens
taactctccctccatggcctcaacaccagcacacacctgcactgtgaggcacctgcagagccccttcctgcccaggcagcctctggaactcaagatggtgtccacgtgcaggagccgcrtccccaggcgcccagccccctggacttacagcagcctgtagagagcacctcaggccagcagccttctagtactgtcagcgagacagccagagaagtgggccaagggaatggcctgcagaaggcccaggctcatgacggagctggtctgaagctggtagtttcctcacccaccagtccggtgagtggtgcaagccgttcagggggcggtcttgggaaatgt

SEQ ID NO: 469364 - DNA, 616 bp, Homo sapiens
gcccagctaattttttgtatttttagtagagatagggtttctccatgttggccaggttggtctcgagctcctgacctcaggtgattcgcctgcctaggcctcccaaagtgctgggattataggtgtgagccaccatgcccggccaggacaatcattctaacttggaaatattgaagaagatggaaatgcrtaagaattcggctatggaaggttaataataatattaaataaatggaacatcaaagtgagtttcaaaattagggttttaaatttccacttaaaaaaaattttttttttaattcttattgagacatggttttattctgttgccccacctgaaaaacagtggtgctatcactgtattccagtggctcactgcagccttgatctcctggactcaagtgatcctcctgcctcagcctcctgagtagttgggactacaggcgggtaccaccatgcccggctaacgcatttacctctttcagagatttgaattagccatttaaccaggctgagtagttgaataagtaaagctgcttcactcaaaaatctctttcctttgatgataacgatcagtggtatttgttaccaaatgttgcacaaaattcttttccca

SEQ ID NO: 469365 - DNA, 616 bp, Homo sapiens
gcccagctaattttttgtatttttagtagagatagggtttctccatgttggccaggttggtctcgagctcctgacctcaggtgattcgcctgcctaggcctcccaaagtgctgggattataggtgtgagccaccatgcccggccaggacaatcattctaacttggaaatattgaagaagatggaaatgcataagaattcggctatggaaggttaataataatattaaataaatggaacatcaaagtgagtttcaaaattagggttttaaatttccacttaaaaaaaattttttttttaattcttattgagacatggttttattctgttgccccacctgaaaaacagtggtgctatcactgtattccagtggctcactgcagccttgatctcctggactcaagtgatcctcctgcctcagcctcctgagtagttgggactacaggcgggtaccaccatgcccggctaacrcatttacctctttcagagatttgaattagccatttaaccaggctgagtagttgaataagtaaagctgcttcactcaaaaatctctttcctttgatgataacgatcagtggtatttgttaccaaatgttgcacaaaattcttttccca

SEQ ID NO: 469366 - DNA, 615 bp, Homo sapiens
ctggattttggagtcagaagccatgagttctgccactcaatagtgatgcaaattagcaccagcctgtagtcccagctactggggaggctgaggcaggagaattgcttcaacctgggaggcggaggtagtggtgagctgagattgcaccactgcactgcactccagcctgcctgggcaacagagcaagactctgtctcaaaaaaaaaaaaaaaagaaaagaaaagaaaagaaaagaaaatagtgatgcaagcagcaaaaagacttgacacttcagagccttgagcctgcttgcctgtgacatgacagtaagaagtaatacccaagagaggtgaggattaagcaggataayggatgtgaacgtacacacggttcctggtgcccaggggcaggacactttgtgtattttcatccctgttgctcaggcactcaggggctttgtagatgagtggagatgttttcgttgaatacgttctgtgaaggccactcttccttgtgaatataagtcatccttcactgcagaactggagttgggaccccagggttcctgtcacaggcccacatgacctgcttcagcaagacaggaggcccctgactcacttgttccctggggccagc

SEQ ID NO: 469367 - DNA, 555 bp, Homo sapiens
gtaccgaggcaggccgcagctcccaccattgcgtacagccctggcgtgacacagtctgcaccgggtctgcaccagttcctgaagatgatccagtcatggtgatggtaggccagctgctccacgccaattcccaccatcctgcccgctatcgcgcccacagccatgctggggatgaagaggcccgacgggatcttgaggagacacagagaaaagcaacatgagggaaaaagaccaagtccccgcttcacracccccaagaaacacattccccctcgacgggcttgcatttagcttcagtcttcagaggaggtgcaactctgcaaaataggtcagctggggaaaggtgggacaaataatttgacctgcctagtcagtcatatctactgcaacttagagaggacgcaattttatactttgattccctctccttcaaaagctggctgggtttgcctgctgtggattaaagaatgataagccccactgcaaataacattcaaagtgagcatctgtcagttgagacaccactttctctcgccccttgccatgtcattcaga

SEQ ID NO: 469368 - DNA, 596 bp, Homo sapiens
aataacaaggccatcagcaaagaaagacgttcaaggggaaagagtgggcaatgctgagtccagtttgggtcattttgagttggatgtgtatatgggactggagatggagctttctggaagagactgggtggctcagtttggagtatcagagggagtcctaggagagagaatgcaaacaacccaggtggtagaggaagcaggagtatggttgagatctccaagatggggagcagagcaagacacaaaatgggctgtggaaggaattccagcaacctctgacattgaagggtggtgagaagagagcagggtctctgcacagagcacgttaacagcccttgttgccagagtctggtgttcaaatcctagctcttctaattcccagcaatagaattttttttttgaagagttttatgctttttttttcacatctgtatttcacccccggagtactgagaccrtcatcaattttcaagagttttcgaattttcaattttcaaaattcttcactgcatacatttcaatatgaacacatgttgggatgggcaggtatacctatggctggcatgcagatatcacctgactatagcaccatcagt

SEQ ID NO: 469369 - DNA, 482 bp, Homo sapiens
gaggcagaggtggtcttgtttctccaggagtattctttctaaccttctctgatgttttaaacagaggaaagttgaacatgaaagaaaggaggatgtttttcatcttayagtggacaactgactctaaggagggaagcgtggtgcaaagagagactgctgatccctcaaatgtggttgagataaattatcaccatgccttctggctatctaattcctccttctcacccaacagcctggggattttagaagagtaaaaataacaacatttaaaacgtgtgtggcatttttccttctaagcactcagaatgtttcctatgtattttaacaacagtagttgccacctattgaagattgactccatggcagacactggctttgcatgcatgatctgacagcatcctgacctaggtgctgttatgcttcccattttgtggatgaggaaactgaggtttacagaagtcaaatgaccttcttcaaggcta

SEQ ID NO: 469370 - DNA, 617 bp, Homo sapiens
taagcagttggcagaggccattgttgaaagctctttagctcctgtggattctgaaacaggattcttctagggataccacagtccactattttctttgtttaatgctatgcagaggatattaaagtcgggcattattggattttctttttgttgatatactagagctgacaagtgcgtctttcttcctagagaaccctttctcagaaatgaatgagcatgcccagtggattgaatggttgatgtacaccagacccgggtgggaccaacacagtttggtccacatatgtgctccccacatagtttgaagccttgcttgatatttgcatataaggtgatatatagctgggcttgggctgctragttctgccctgtgctcagtgaagcaggagtggctagtctgcaagtgaaaaggagccaaatagtagatacgcagacacatgaatgagagataccacagtctgaaagagaagattcagtgggttcagattctgactttccgtttactagcctcagtcactcgtgagtccctgctgtagtttcttctcctggtttctatgagatatttatccttttacaaatgctccctttcctttattctgttttgagtggctgtttct

SEQ ID NO: 469371 - DNA, 617 bp, Homo sapiens
taagcagttggcagaggccattgttgaaagctctttagctcctgtggattctgaaacaggattcttctagggataccacagtccactattttctttgtttaatgctatgcagaggatattaaagtcgggcattattggattttctttttgttgatatactagagctgacaagtgcgtctttcttcctagagaaccctttctcagaaatgaatgagcatgcccagtggattgaatggttgatgtacaccagacccgggtgggaccaacacagtttggtccacatatgtgctccccacatagtttgaagccttgcttgatatttgcatataaggtgatatatagctgggcttgggctgctaagttctgccctgtgctcagtgaagcaggagtggctagtctgcaagtgaaaaggagccaaatagtagatacgcagacacrtgaatgagagataccacagtctgaaagagaagattcagtgggttcagattctgactttccgtttactagcctcagtcactcgtgagtccctgctgtagtttcttctcctggtttctatgagatatttatccttttacaaatgctccctttcctttattctgttttgagtggctgtttct

SEQ ID NO: 469372 - DNA, 479 bp, Homo sapiens
gcacgaggcaagtgtattctctgggtgggctggaaggggtctcaggcacatccggggtgattactgcatcaccactgggacaaagcttttttgagggaaagcaactggtacagagcaggagagaatggtcctcagcccctgccctaaaatgtttgtaatctaaaacatgcgggtgccaaacaatttactgaacaacttacatacagcagtgttctaagaacactataaatattaacttacttatgcatcaggaaacacactgaggtaagtactatcattgctgaaactaacagaagagtaaacaaggactcagaaaggttaagtgacttgtccaaggtcmcatagctagtaagaagtagactagctagtgccagcgtccctgttcttaactgcaacactatggagctcctcgagtagaaaataagtagcagaaaacatctaaccacacgtagagaacacataatggacactatcccatc

SEQ ID NO: 469373 - DNA, 597 bp, Homo sapiens
agggttgagaatctgcattcctaacacattctcaggtgatgttgatgctgctggtctggggaccacactttgagatcactgacattgtagttaaaagcagtgactttgctatcagactgatttggtttgagtcctctaactttggatacattttgtaacctcttgccatttcatttcctcatctgtaaaattatacctccaacattagctattttggggattaaatgatatatatgtgtagtgtttagtacagttttttatgtgttagaactcagtaaatgttaactgctactactgcagcaattactacartgctactgttactactaaatagaattagaaaatgactgatttcaaaatcatttttaaattgtcaatgccacctcttctctctacctagagctgagtgccaacatctgttatgacatcataatgagattaataactaagaccctaaggaataatatattggatttttcatattattatgaaggttctccatcacaacttaagaaaaatatgtaaactatgtgtcattttatattttaaaattattattattattagttattggagacaggttctcactctgtcagc

SEQ ID NO: 469374 - DNA, 554 bp, Homo sapiens
gggaattccggcccctggatcccaggtcatcttaatgccaccagtgccccatgatcaaacgccttgtttacaccagttctctgaatagctccccgagtttstctataacatacgtgatgagtaatgttctcatgtgcactataccagtaccaacctactctgatattcacataagccctccaaaatgttgtgaagaaaaagaacatgacaagttttattaatcacaggtatcatcagtcattcattaccggctgcagtatgattatgtacaattccctagtttttctcccagtgaagaaaagtatcggaacgtgtgattgtgttttatgggattccttcatacagtcatatgtcactgaaggacagggatgcattctgagaaattcatccttaggccatcttgtcattgtgtgaacatcatagggcgtactcacctaaacctagacggtacagcctgctacacacctaggctaagtgggatgacctgttgctctttggctacacacctgtacagcatgtttctgtactgaatgctgtaggcagttttaacacac

SEQ ID NO: 469375 - DNA, 628 bp, Homo sapiens
tgggacaaattctcgattctgcaaggaaagtttctctcttccattcgccttggcatagatgctcttcttggtctagctttcacagtaccactttttgttttccattctattttttttttttgttacggtaaaatatgcataacataaaatttaccatggtaaccattttaaagtgctattaaatacattcacattgttgtgcaaccatcatcaccacccagctccagaacttttccatcttctccaactaaggctctgtacccatcagacacaaactccttattctgccttcccccagcccctggcaactaccattcccactttctgtctctataaatttgacttcagtttcactgtgcctcttatgatacagagagagagaattatttctctaccttagaagaggaggaggaggagcaacgatggaagaatattggggagaaaagcacaggtgggctagccaatgataaatgggaaattgacyttcagccccatgatgcagagtctgagaagtggtggggatatagggtggccagacccattagttttcccagtgctgaggggtttcccagaacaccaaactttagtgctaaaactgggacagtcctaggaaaactgggctggctgg

SEQ ID NO: 469376 - DNA, 525 bp, Homo sapiens
gctgtgatgagtgaagagtgagctagatgtagctgtctgccttgtggccacagcccttcagccctggatggctgtgttcctcgccaaatgccacccctgcacccagccaagtcccgctggtacccaggggagtcatgatccaagggcgcccacccraaggctcagcaggaatctctgacacatgtggagaggtggaaggagaaactgtctcaggagtaatggtcaggaagagctggtgggggtgagctgagaacctagatgggctggaaatcccaggaagcagcaacaaggggtaagctgaggggatgcgttggcagagaggagaacgcagtggacgtgcagaggaagcagttggtggactgcagcctcagctctggagaaggggccggctgcatttactaccctttcacaaaccaggagtgaatgctcattggtgtgaagtgactcccgcagggtggcagggcttgtgagccagggagctggggttagaatccagatctggcctaacgccaaaagtcatgccag

SEQ ID NO: 469377 - DNA, 525 bp, Homo sapiens
gctgtgatgagtgaagagtgagctagatgtagctgtctgccttgtggccacagcccttcagccctggatggctgtgttcctcgccaaatgccacccctgcacccagccaagtcccgctggtacccaggggagtcatgatccaagggcgcccacccaaaggctcagcaggaatctctgacacatgtggagaggtggaaggagaaactgtctcaggagtaatggtcaggaagagctggtgggggtgagctgagaacctagatgggctggaaatcccaggaagcagcaacaaggggtaagctgaggggatgcgttggcagagaggagaacgcagtggacgtgcagaggaagcagktggtggactgcagcctcagctctggagaaggggccggctgcatttactaccctttcacaaaccaggagtgaatgctcattggtgtgaagtgactcccgcagggtggcagggcttgtgagccagggagctggggttagaatccagatctggcctaacgccaaaagtcatgccag

SEQ ID NO: 469378 - DNA, 578 bp, Homo sapiens
atgtagcatatattggaataactctttcactgcagacagctataaaatctggattaaaaataaaatgaagcgtatgaaggcattggagccagagcaaggcaggcaggacttgagggaccgcactccaagaaagcaggaaagtgcatgtaaatgccttgctactcacctcggggcacctgctgattcacagtatgggaggtagggttgggtccacagcagcccagggcttatgcagactctgaggcagcacagtggcgtggattaagaaggtaagatcttggagaggtaggaaacacaggattgaggcagaactcctgcttgcaacttccctttgagggattggctaccttccaagctgtatgttcttgcaacaaggcactgagrgtccaagatgaaaggagcagcacggagatgaatatctgagcagagattcccacaggctcatggtgctgggaacagggagtgtggaggggccctggtgaacacagaaggctcccactgggaccagggaagactatgccctgggagtgagaattatgccttaggagtaaggctaactgggaaggcaaccatgccca

SEQ ID NO: 469379 - DNA, 653 bp, Homo sapiens
atgagattttttttttgtgaggccaaaaggactcccaggaatttctggggccagaatcttgtgataacaggtggaggtgagagataaccaaatgcagtctggtcctgtaaaaagtggccacattttaaactccacacaagagtagcccacagaaacgcagtttacatagctgtgttcatttttgtgtacctgttccagtcttcmttcacttgcacacataacaatcatggtgtatacttttctgtaatttgctttttaaatgtatcactatattacaaatcagggatgaagagacatgggagaaggatttccatgcagatgaaatgatattactttagagcactggttcttaccagagtatgatttttgtcccccaggggttggacctttggtaatgtctacagacatttttagttgttatgactggggacagggtgatactactggagagaagtcaagatgctaccaaacatcctgcaatacacaaaacggctccctcaacaaaaaagtatctggctcaacatgtcaatcatgccaaggctgagaaactctgttctaagtacagagatcagaaagtatgattacaggagtaattataagtagcctgatttgacttgaatgtaagatacatgtagggaactcagagaaggaaa

SEQ ID NO: 469380 - DNA, 548 bp, Homo sapiens
agtggccacattttaaactccacacaagagtagcccacagaaacgcagtttacatagctgtgttcatttttgtgtacctgttccagtcttcattcacttgcacacataacaatcatggtgtatacttttctgtaatttgctttttaaatgtatcactatattacaaatcagggatgaagagacatgggagaaggatttccatgcagatgaaatgatattactttagagcactggttcttaccagagtatgatttttgtcccccaggggttggacctttggtaatgtctacagacatttttagttgttatgactggggacagggtgatactactggagagaagtcaagatgctaccaaacatcctgcaatacacaaaacggctccctcaacaaaaaagtatctggctcaacatgtcaatcatgccaaggctgagaaactctgttctaagtacagagatcagaaagtatgattacaggagtaattataagtagcctgatttgacttgaatgyaagatacatgtagggaactcagagaaggaaaaccagga

SEQ ID NO: 469381 - DNA, 550 bp, Homo sapiens
tcccatgcctgggattgttgctgttgttggtgttatcattaccagcttcccaggtctgtccactctacctgtttaattatggacttagcagaggtctgaatccaacactaccattacaaccagaccccagctcaataaacgcagtttcagcatctggcaagcaatccctctcagagccctgagctggcagatgtcttgagatgatttcctgatctgtggcaggagaatgttccaccarccccactgcagttgtggaatagccctggattccacacgctggtacgcccacagaggccagagggcagagtcacaatcactagagttttcctgcagacagaggacaccttcagaggccagccccaggaatcctgttcccatgtggaacagagacatggggggccaccgggaagaaggatgggtatgtggagtcagaggagacacagatggaggcaattagccattgtcataaaacaaagctgcagcaacagcagtactcactgcctgggtgacacttgtcttcctcccatgaataaggaattcatctggctcc

SEQ ID NO: 469382 - DNA, 550 bp, Homo sapiens
tcccatgcctgggattgttgctgttgttggtgttatcattaccagcttcccaggtctgtccactctacctgtttaattatggacttagcagaggtctgaatccaacactaccattacaaccagaccccagctcaataaacgcagtttcagcatctggcaagcaatccctctcagagccctgagctggcagatgtcttgagatgatttcctgatctgtggcaggagaatgttccaccagccccactgcagttgtggaatagccctggattccacacgctggtacrcccacagaggccagagggcagagtcacaatcactagagttttcctgcagacagaggacaccttcagaggccagccccaggaatcctgttcccatgtggaacagagacatggggggccaccgggaagaaggatgggtatgtggagtcagaggagacacagatggaggcaattagccattgtcataaaacaaagctgcagcaacagcagtactcactgcctgggtgacacttgtcttcctcccatgaataaggaattcatctggctcc

SEQ ID NO: 469383 - DNA, 638 bp, Homo sapiens
taaaagttaagtaactgcagttgagacaataaaaaagcaaaagttaaattataaaaaacatgtgaatgtggtatctctctaaatatcttactgtactattcacccttgtgatgaagaagggactaaactcgatagagtgagatttcctcacactacttasaatggtgcactgttggccagcgcagtggctcacacctgtaatcccagcactttgggaggctgaggcaggcagatcacaaggtcaggagatcgagaccatcctggctaacatggtgaaaccccgtctctactaaaaatacaaaaaattagccaggtgtggtagtgggcgcccgtagtcccagctactccggaggctgaggcaggagaatggtgtgaagctgggaggcagagcttgcagtgagccgagattgcaccactacactccagcctgggcgacagagcgaggctccgtctccaaaaataaataaataaaataaataaataaataaataaataaaggatggtgcactatttaaaacatgaattgtttatttctggaattttaatattactattttcagactgaagttgaaatttaatacttataattttcacactgaagttgagtgtgggtaactgaaactgcaaatagcaaaaca

SEQ ID NO: 469384 - DNA, 638 bp, Homo sapiens
taaaagttaagtaactgcagttgagacaataaaaaagcaaaagttaaattataaaaaacatgtgaatgtggtatctctctaaatatcttactgtactattcacccttgtgatgaagaagggactaaactcgatagagtgagatttcctcacactacttacaatggtgcactgttggccagcgcagtggctcacacctgtaatcccagcactttgggaggctgaggcaggcagatcacaaggtcaggagatcgagaccatcctggctaacatggtgaaaccccgtctctactaaaaatacaaaaaattagccaggtgtggtagtgggcgcccgtagtcccagctactccggaggctgaggcaggagaatggtgtgaagctgggaggcagagcttgcagtgagccgagattgcrccactacactccagcctgggcgacagagcgaggctccgtctccaaaaataaataaataaaataaataaataaataaataaataaaggatggtgcactatttaaaacatgaattgtttatttctggaattttaatattactattttcagactgaagttgaaatttaatacttataattttcacactgaagttgagtgtgggtaactgaaactgcaaatagcaaaaca

SEQ ID NO: 469385 - DNA, 638 bp, Homo sapiens
taaaagttaagtaactgcagttgagacaataaaaaagcaaaagttaaattataaaaaacatgtgaatgtggtatctctctaaatatcttactgtactattcacccttgtgatgaagaagggactaaactcgatagagtgagatttcctcacactacttacaatggtgcactgttggccagcgcagtggctcacacctgtaatcccagcactttgggaggctgaggcaggcagatcacaaggtcaggagatcgagaccatcctggctaacatggtgaaaccccgtctctactaaaaatacaaaaaattagccaggtgtggtagtgggcgcccgtagtcccagctactccggaggctgaggcaggagaatggtgtgaagctgggaggcagagcttgcagtgagccgagattgcaccactacactccagcctgggcgacagagcgaggctccgtctccaaaaataaataaataaaataaataaataaataaataaataaaggatggtgcactatttaaaacatgaattgtttatttctggaattttaatattactattttcagactgaagttgaaatttaatacttataattttcacactgaagttgagtgtgggtaastgaaactgcaaatagcaaaaca

SEQ ID NO: 469386 - DNA, 570 bp, Homo sapiens
tgtcaatatggagatgcaactgcaataagaacactataaggacaccagaggaggtcaggctgaaggcttggttcaaaaacctaaaccttgtacatgagctaaaatcaagacaaaatgtagacaagagttggaatctgggtccatttactgaatgcaaaatggaatgaaggcatggatttgaaagcatagatacatcctaggtgaagatccccaaggccttgaccagccccgcaagctgggaaacagcacagagcatgctagttgaagaaatcttcacctaagtattrcccaagtgcaatggggtttctctagaagatcatggctttggaaggtcagactgggtcttgaagtttagagaagaactagagtaaaagttgtgttaatagggagcaaatattttttagtatctttccttaagaaaataatccaaaaacaaaaaatattaagcacagagactcatctcagaatattactaatgatggcaaagaattagaaataatctaaacatagaaaataaaggtatcaccgaacaaattgtggttaatccacttgacaggcaagtatatagaa

SEQ ID NO: 469387 - DNA, 570 bp, Homo sapiens
tgtcaatatggagatgcaactgcaataagaacactataaggacaccagaggaggtcaggctgaaggcttggttcaaaaacctaaaccttgtacatgagctaaaatcaagacaaaatgtagacaagagttggaatctgggtccatttactgaatgcaaaatggaatgaaggcatggatttgaaagcatagatacatcctaggtgaagatccccaaggccttgaccagccccgcaagctgggaaacagcacagagcatgctagttgaagaaatcttcacctaagtattacccaagtgcaatggggtttctctagaagatcatggctttggaaggtcagactgggtcttgaagtttagagaagaactrgagtaaaagttgtgttaatagggagcaaatattttttagtatctttccttaagaaaataatccaaaaacaaaaaatattaagcacagagactcatctcagaatattactaatgatggcaaagaattagaaataatctaaacatagaaaataaaggtatcaccgaacaaattgtggttaatccacttgacaggcaagtatatagaa

SEQ ID NO: 469388 - DNA, 619 bp, Homo sapiens
aattgaactttatggctgtgcttaactgggctttcttacgttgtttatcattgtaccccttggtggctaccaagcaatcctgcagtgtaaagcgcttcacatcttcctggactaattctttaaactggaagctataataccacctcttagcctctggcctctcaccactatcccacagatacctcttgggtattgctcttctgccttttcttaagagaataaggtgtcatgccaacttttaaggggcaacccaatytgatcttgatttcttccataatttaccttgggctgtctcacaagggcagcccattagctgtgggcctcagattctaggacttgggaaaggccaggactacagtagctcaagtgatacagactgcctaccatgaaggcccctttctcactggttggccaatgtctttctatttttatgaattaccatttcatatctgtggcatccagcctccacaatggcctccagtggtccctgacttctggtactcatgtccttgtgtagtccctttccacctcacatctctgtgacccatagaatattacagaagtaacaatggcttctgacttgctcttgctctcttggattcctcactctcagtgaagg

SEQ ID NO: 469389 - DNA, 394 bp, Homo sapiens
actcccatcatccaggccacgaacattttcattgcgaccttgtcagtcaccttctatctgctattattatatccactcctgcccctctaaatcattctccacacagcaaaccagagcttcaaaatacataaagcaaaaactgttagaactgaaaggagaaatagacatatctgcaattatagttggaggcatcaatagcctctttaaacaattgatggagcaactagacagaaaatcagcaaggatatagaagaacctagcaacaccatcaaataacaggaatgaattgacacwtacagaacactccaaccaataacagaagaatacacaggccaggcgcggtggctcactcctgtaatcccaactctttgggaggacgaggcaggtgggtcac

SEQ ID NO: 469390 - DNA, 471 bp, Homo sapiens
gaaggaaatgtgcacctttagaaagactcattcttcacatgtaaatgtttttsagataaaaataatgaaatacaaacaaacatttacaccaagataaatttcttaccaagatactgaaggtcttcctatttgttaaatcatccaaaatcctatcaaaagaatttttattttattttttaaagtttcaacctctgggagcacagaacaaggaatttttattttagaaaatttaaagtagaaactcttcaaagtgataggatatgacaggcagctactattatttttcctccaaatttataagtgtaaggtacctgtttaatcagctggaggttagaaaaaaagaatataaataaattatttttcatgaaaactgtttctttatattggctacaaatgatttatgtcctcacactaggatgaaggggaacaaaaaatattttaataatagaaattgcattgcaaaaatttttt

SEQ ID NO: 469391 - DNA, 578 bp, Homo sapiens
gtgcacatgtatgcagcactattcacaaaagcaaagacttggaaccaacccaaatgcccatcaatgatagactggataaagaaaatgtggcacacataccctatggaatactatgcagccataaaaaaggatgagtttgtgtactttggaggaacatgggtgaagctggaaaccatcattctcagcaaactaacacaggaacagaaaaccacacactgcmtgttctcactcatcagtgggagttgaacaatgagaacatatgggtacagggaggggaatggcacacagcagggcctgtcagggggtggggggcaagagaaggaatagcattaggagaaatacctaatgtagatgacgggttgacgggtgcagcaaagaaaccaccatggcacatgtatacctacgtaacaaacctgcacgttctgtacaggtatcccaaaacttaaagcatcacaaaaaataaacaaaactataaaaacagagaagagacaccagaaagtctgccaaaaaaaaatctgcaacctaattactaattctaatctcatttctcagttgaaaaacacacttaattattagta

SEQ ID NO: 469392 - DNA, 578 bp, Homo sapiens
gtgcacatgtatgcagcactattcacaaaagcaaagacttggaaccaacccaaatgcccatcaatgatagactggataaagaaaatgtggcacacataccctatggaatactatgcagccataaaaaaggatgagtttgtgtactttggaggaacatgggtgaagctggaaaccatcattctcagcaaactaacacaggaacagaaaaccacacactgcatgttctcactcatcagtgggagttgaacaatgagaacatatgggtacagggaggggaatggcacacagcagggcctgtcagggggtggggggcaagagaaggaatagcattaggagaaatacctaatgtagatgacgggttgaygggtgcagcaaagaaaccaccatggcacatgtatacctacgtaacaaacctgcacgttctgtacaggtatcccaaaacttaaagcatcacaaaaaataaacaaaactataaaaacagagaagagacaccagaaagtctgccaaaaaaaaatctgcaacctaattactaattctaatctcatttctcagttgaaaaacacacttaattattagta

SEQ ID NO: 469393 - DNA, 554 bp, Homo sapiens
aatggagaaatacattgtggcatatttatataatggaatattcaatgataagtggaatctgctacaatttatatataaaatttaaaaccctactgagtaatgctatattgtattaatgaatacataaataygtaataaaagtgtaaaaacatacataggaatgataaacactggattcatggtaatagttacctctgaggagggagaggaacaggggtaggagtggaatatgcggagatcttcaattatatcagtaatattttatttctttaaatgagatctgatgcaaatatgacataatgttaagatttgataaagcttaatcgtgggtaaataggtattcattatgctcttttctattcttgtctatctttgaaatatttcatgacagaaaaattaatttaaaaaaaagcaaagcaaagggaggaacaagttttttgaggaaagaaaagaaatcatcaatttcaaaacatgccagtaacaaagtgaataacaggcaaggtaatcgggccatctcacagatcctggcttcctcaggcttcttcagcccacca

SEQ ID NO: 469394 - DNA, 553 bp, Homo sapiens
ttaggggctctgagtagcacactcacctcctctcctccatgcaatgaactgggaattccttggtgtgcattctttcccagttcttcccttactggctgcatgagcttggagcgtgagtttcccttcctaggcctgtttcctccttgctaagtctcattttcctaactaaaaaccagtaataatagttgctacccctccagatctcccaggctgttttaaggaatccacagactccagtaagatgagtgtggcatgtgttctcctgaggagaggagatggggaatgagcaaagtcctaccaggtcaggacagagtgatcagtccaacaacamcaccaactaagagaaaggatgtcccagaggccaggaagggtacagggagaggggcatgaagagaagttgattgatgggtacaaatatagacttagatggaaaaaataagatctagtattcgatacatcagcagtgtgactatagttaacattaatcaattgtatatttccaaatagctagaagagaataatttgaatgttcctcgcttaaaggaagataaat

SEQ ID NO: 469395 - DNA, 634 bp, Homo sapiens
gcattccagcctgggtgacagagcaaggctcactctcaaaaaaaataaaaaaataaaaaatatttattggacacatagaaggtggatgggtggggggcatgggaagatggatggatggatggttggatggatggatggatggatggatgratggatggatggatgggtagatggatgaacagatggacagataatgggtgggtgggtggatggatggacagatggaaacaaaactgcagaggctcttatgacatcaaagcttaaaggattctcgcagagctccagaggcatatctagagccagcaaggcccaagataaaagtcgtgttagaatgagtcaagttatagtctttcaaaaaaaaatcctgttgcttttttgcataaccaattcacattttctgctcttatcacattctctcccactcatagacatttttgcaatggatatgagcttattattttattcatcacaaaccatgggtagttcactttttaaattgatttttgttgctcatcaaagtgctatatcagctactactgcaacttcgcttccaaccagcacaacaatcagctgtgtgtgattccagggcaggaggagggcatccccagattctgatggggtgattccctgtgtg

SEQ ID NO: 469396 - DNA, 681 bp, Homo sapiens
ggtcactcttccaggccaggataaccccaccctaaccaccaccttgtttttctccacctggtctctggccagaccaacccagcgcccctgttaacagccccaggaagaagggaaagggggctcactgatcaggggtgctccccgcagagctgagaccatggtgacaatggcagcagcagcagtggctcaaaaccctgcttcagctcaagatgtcccccacaaccttgccagggccccaggcacccagtgttaagagaacaatggggaaggcaggctccaggccaacggagggccttctagaactccagctctgtgagctcatcttccacaaacagcgccaccacagagctttgactagcccacctgagcccttccactcagggtccagaggcagagcaggatatctaatcccagcccccttgcacatctctgccccacacacacacacacatacacacatgcgcgcgcgcrcacacacacacacacacacacacacacacacactacactgagggatgacacttcctctcccaacagatctttcagatgattatccagggataatggtagacacctagggatggtgatggatgtacagagatggtgatgggtacccagggatgttaacaggtgtgcaaggacagtggtgcgtgtgcaaggatggtagtgggtgcccagaga

SEQ ID NO: 469397 - DNA, 681 bp, Homo sapiens
ggtcactcttccaggccaggataaccccaccctaaccaccaccttgtttttctccacctggtctctggccagaccaacccagcgcccctgttaacagccccaggaagaagggaaagggggctcactgatcaggggtgctccccgcagagctgagaccatggtgacaatggcagcagcagcagtggctcaaaaccctgcttcagctcaagatgtcccccacaaccttgccagggccccaggcacccagtgttaagagaacaatggggaaggcaggctccaggccaacggagggccttctagaactccagctctgtgagctcatcttccacaaacagcgccaccacagagctttgactagcccacctgagcccttccactcagggtccagaggcagagcaggatatctaatcccagcccccttgcacatctctgccccacacacacacacacatacacacatgcgcgcgcgcacacacacacacacacacacacacacacacacactacactgagggatgacacttcctctcccaacagatctttcagatgattatccagggataatggtagacacctagggatggtgatggatgtacagagatggtgatgggtacccagggatgktaacaggtgtgcaaggacagtggtgcgtgtgcaaggatggtagtgggtgcccagaga

SEQ ID NO: 469398 - DNA, 681 bp, Homo sapiens
ggtcactcttccaggccaggataaccccaccctaaccaccaccttgtttttctccacctggtctctggccagaccaacccagcgcccctgttaacagccccaggaagaagggaaagggggctcactgatcaggggtgctccccgcagagctgagaccatggtgacaatggcagcagcagcagtggctcaaaaccctgcttcagctcaagatgtcccccacaaccttgccagggccccaggcacccagtgttaagagaacaatggggaaggcaggctccaggccaacggagggccttctagaactccagctctgtgagctcatcttccacaaacagcgccaccacagagctttgactagcccacctgagcccttccactcagggtccagaggcagagcaggatatctaatcccagcccccttgcacatctctgccccacacacacacacacatacacacatgcgcgcgcgcacacacacacacacacacacacacacacacacactacactgagggatgacacttcctctcccaacagatctttcagatgattatccagggataatggtagacacctagggatggtgatggatgtacagagatggtgatgggtacccagggatgttaacaggtrtgcaaggacagtggtgcgtgtgcaaggatggtagtgggtgcccagaga

SEQ ID NO: 469399 - DNA, 562 bp, Homo sapiens
ttcacctgaaaaattggtatcatatctaccttagggttattcacgaagattgaatgagataacattgccaggaaaacagtacagactaggcatggtgactcaccctgtaatgccagcactttgggaggccaaggcaggaggatggcttgagctcaaaaatttgagaccaatctggacaacagtgagatcctatctctacaagaatatttttttcttttttatctttaacacaatgatgtttcagtctgaagaaaatacttaaaaatttgccaggtgctgtgtcgcacatctgtagtcccagctactcaggaggcggaggcagaggcgggaggatcacttgagctcagaaggccgaggctgcagtgaaccatgatcattgtgccacagagtgagaccctrtctcaaaaaaacaaacaaacaaaaacacacagtacagaatctgccacatagtatgttagcaatgaaagcttctgttatcaggaagtactaccagccagattgcctctgttgcacaactggactctgtgtgcccctaaccgtgtaatttgccagttatttaagt

SEQ ID NO: 469400 - DNA, 610 bp, Homo sapiens
ctggagcttcaaagtgtgagcattgggccaggaggaccacagcctggctgatccaggggagagaagtcgtttctgaggttctggaaatgacagccattgggaagcaccacaccgccactcatccatgaactcaaccatccgatcacccatcagttcatgcagtcattggatacagatttttgctattcatttatctacttacttttgtagagatgtggtctcactatgctgcccagactggcctcaaacacttggacttgagcaatcctcccacctcggcctcccacagcactggattacaggcatgagccaccacagccggcctggggagagatttattgagcgacttctatgtgccaggcactgtgtcagggggagacacagacaacaagcaaggggatacgtgagaaagaaggaagatcaatcgatgattaagatggctatggagaaaaataaagcaggggaggyccagcggctgcaagattttatttttaaatgggcgggtcgaggaagaattcatggagaggctgccatctgtgcaaataactggacgaagggcggcccatctgctggtctatccacccactcactcacccacccactcatgcac

SEQ ID NO: 469401 - DNA, 664 bp, Homo sapiens
ttctgatgccactcccaccccacgccaagtcccagaggctttgggagcgggtgaaggcggtgggtggcgggtggcaggtgcaggcggtgggtggtgggtgtggcaggtggcgggccccaccgcaggtgtcatccctgcgaagcacctgtcgccagcactcagagcgctcatgaggtgcccagtccccatgtggcctccttagtctccgtcctgtgtcatggaagaggtaactgaggcacagaaaactcaccaggccaggctgggatgtgaggtcccttgctgctcatccctggcagtcagcaaccctacatcttcccagctgggcggcccgtggtgggttcggcacccaggaccctccggggtcttgggctgtggcgagtgtgyaggcacccacctggtgtctctctccccgcaaggcatctacatcctcatcgctgtgggcgctgtcatgatgttcgttggcttcctgggctgctacggggccatccaggaatcccagtgcctgctggggacggtaaggcagggaggcgggcctgtgcctgggccggggaggggctgggggctgcgtctggccctgaggagggggcagagctggtgctcagggcggagcctagaattctgggggaggtggctcctgtgccctgcttttcccgtttggttttta

SEQ ID NO: 469402 - DNA, 597 bp, Homo sapiens
cccaggtatagaaccaaaaggtcacaggctgaaccccaaggagactctgagcaattgggagattctgatatggctaaaactgtagcccacgccccaagatgtattttcacagtggtgaaggaaaaagatgagttaagtgtctgagaatctgagagcgggggcttagccacgcctgaggaaaagggtgacatgtcaggtggtgaagtatagttttggcttttgttttttttcctacttgctctgaaatcagcattccaagctctgtcatcagaacccctgaaaggctgcctgattccttcatggaaatggctccttctgcttttaagagctcctggtgttctgagtggatgagtcttcacatttcaaaaatcagcgtgatttccctttggtaaccttggcattcattgcacctgatcagggaggttttctttttcagtcctgatgccttaaaagagggaatccagattgtttttctgtgtttcatgtgctttrgggagttttctttttttttttttctactcatattgttactcaaacagggaccactaggtgtggacagaaataaaggttgtcttatttcctccctaggtcaattgt

SEQ ID NO: 469403 - DNA, 544 bp, Homo sapiens
gcgcatgcctgtagtcccagctactcagaggctgaggcaggagaatcgcttgaacccaggaggtagaggttgcagtgagccaagattgcaccactatactccagcctgggtgacagagcaagactctgtctcaaaaaattttaaagaaggatgattaacttaaaatgaggccattagggtgagccccaattcaataggactggtgtccttataagaagaggaagaggtgtcagagatgtggttatacagaaagacctcatgaggacagtgggaatttgttcatctacaagccaaggaaagaggcctcaggaaacatgtaagctgccaggacttggatcttggacttccagcctccagaactgggagaaaataaattcctgtttaagcaccmaatctgggatattttgcagggcaggcccagtaaactaatacaagaggctcagtctggagccatgagtgggtgtccagtatgaaacacactggacacagctcacctgctcttggcagagctgtctgtgggtcagtgggaattcccatagcattc

SEQ ID NO: 469404 - DNA, 573 bp, Homo sapiens
agaatggtcacagttgtcatggccagcacagcttgtgcttgcagagcccaagctgatgagcacctgcattgccagtgtctagctatactcttgaactgtgcctttattgaggccacttgtgtttgcctaacaaagcaggagtgctgggcacagtggatcacacctgtaatcctagcactgaggcaggagagaccacggcattgatggtctgtctccggggctcctagagaccagatatgtattcatagctagacaaatatgtcctggcttctcaaagggtggtccgtggaccagcagcgccagcattgcctgagaacttgctaaaaatgaagaacctcaggcccttcctcaaacccactgagccagaacctgcattccaattaaggcattcatatgcctgtggcattttgaaaaacaccaaaatacgtggctagtaaatttggtgctactttctacttcctgtgagataggaaacccaraacagatattggttgcaggtgtcaaaccatccctgtgtacttcatatgttttactattaccagtaccaccttagccataggttcctaccggttc

SEQ ID NO: 469405 - DNA, 602 bp, Homo sapiens
ctgggcgtgatagcgcgcgtctgtaatcccagctacttgggaagctgaggtgcgagaattgcttgagcctgggaggcggagattgcagcgagccgagatcgtgccgctgcactccagcctgggtgacagagtgagactccatctcaaaagaaaaaaaagaagatattctaaatctcagagattctctgcttagtcatgttcagactactcatacgtctatcaaaggcattcttcatttctgttacagtgtttttatctgtagcattttttttattgttcttaagatttccacctttctgctttcattgcccgtctgttcttgcatgctgtctgcttaaygagaacccttggcattttaatcatagttagttgttttaaattccttggccgggcatggtggctcaggcctgtaatcccaacactttgggatgctgagtcgggcagaagatcacctgaggtcaggcattcgagaccagcttggccaacatggtgaaacctgtctctactaaaaatacaaaaattagcccggcatggtgtcgcacacttataatcccgtctactcaggaagctaaggcaggagaatcacttgaacctgggaggcg

SEQ ID NO: 469406 - DNA, 628 bp, Homo sapiens
tgttttgtcacagcctggcctaggtcagtgtctcatctctctaactcacaataaatatgatgggtcaggcygactgaagcctgcttacttgtgtcattttgaatgagttaaatttactcccaacatttcagattcttcatctctgctacatggtgacaaaaatggaacctgaacactcaggttctggggtgaggatgaaatactatatgcaaaggtacctagtagactatctgactagaaagtgattgattgatattcatttccttactaccttactgtctgggcactagttttctcctccataaattcaggtccttctagctttagagttctttgattgtaggaaactgaatttacttctgagatgaacttttacaggattaaaactcatggttagaagggtagtctttcttctaagttctaaatcacttaggtcatgtgattatgcattttaatttgcttagatattcagaaaagacaatctagtttccagtttggatcaattatgcaaaaggacgattatttccctgtggagaaaaataaatgagtaagacttggccttagttcaggaaggtaccatagagattagctgggtgctcaaaggcttgggcagagaggcctttggagg

SEQ ID NO: 469407 - DNA, 416 bp, Homo sapiens
tctatgttggaggtctctgatgttgcgaataagttccacagaaggttcttgggggttaggactcttccctgaattatgtctgggcggggcagggggtgatttatgtttattttatgcatcctccccrcttttttttttttgctttcaaaacacttttacctctgtccttgatctctgtaaaagggctctgtatgttacagtggttaagagcatggaaaaacagatgtggtactgagtgccaggtccacctttgctaagtttgtcactttgggcatgtcccctaaccagcctgttccacagtttcctcatctgagaatgggtatgaaaatagtagctactgcaaagggtgctgtgagaataaatatgataatgcacccaacacaattcctgacccagagtacagcctccctgaaggt

SEQ ID NO: 469408 - DNA, 623 bp, Homo sapiens
accttggccatgcaaaggggcctttgtcatcactgtttcctcccctaggagccaggaggctggggtcagtctcctccttacctgccagccaggggcctaagctggtcacccttgcttgaccttcgtggtctcacctgtataattcagttagttatattattcctgcctgaagggaaagaggaagaaagaaatgacttattgagggtcatttctatgttggaggtctctgatgttgcgaataagttccacagaaggttcttgggggttaggactcttccctgaattatgtctgggcggggcagggggtgatttatgtttattttatgcatcctccccgcttttttttttttgctttcaaaacacttttacctctgtccttgatctctgtaaaagggctctgtatgttacagtggttaagagcatggaaaaacagatgtggtactgagtgccaggtccacctttgctaagtttgtcactttgggcatgtcccctaaccagcctgttccacagtttcctcatctgagaatgggtatgaaaatagtagctactgcaaagggtgctgtgagaataaatatgataatgcacccaacrcaattcctgacccagagtacagcctccctgaa

SEQ ID NO: 469409 - DNA, 304 bp, Homo sapiens
gcctaagacttcacatactcactgcctaccctccatcagggattagattgaagggcaggagaaaaagaagtcagagctgctgcttgttctgggtggtatcactttcctcccgtcagtccactctaccttgctctgcaccacctgccatcacccactaggagaacccagatggaagccacaggtggctagccacctcaatccaaatcttaaaaagggctggtccctgaaggagctggaaaagtccatcctgtctatycctctgttcccaggtgaagctattcttgagaaatccaagtggagcttc

SEQ ID NO: 469410 - DNA, 600 bp, Homo sapiens
aacaggatgtgttattgccttcacagtatcctaccataatccctggatttgaactctaaatcggtcaataattccttcagtaactgacattaatatttttataaatatgcaacatcctatatcttcttctcaatttttgctgtctgcaccttcaattgtttggaagaagtctattcgcattatyaaggataatagtttttcttgaaggcaactgatataacacaaaaccacaagtaaccacatctaaaattaccttcacaccaacacctagattactgtttatcttagtccatttgtgttgctataaatgcattcctgaggctgagtaatttataaagaaaagagggtgatttagtttacagttctgtagtatgtacaagaagcatggcactggaatttgcatctggtgagagcctaaagctatttccactcatggtgaaacaggaagaggagccagcatgcatacattagattagtgtgaaagtaattgacaaaaaacaaaaaaggcaaaaaccacaattacttttgcaccaacctaatagctcacatggcaagacgggaagcagggtgaagggaggtgctagactctttttaacaacc

SEQ ID NO: 469411 - DNA, 470 bp, Homo sapiens
acctaataatttgtccttcttcttccggagtagctggtcttaaccccagaactatgtgacacacctagggaaaaaaatggtaaatcaaagtttattaactgcataatatttcacattatctgcatgagacccatttcctaaattggaatctgaattagcaacagttttcaactcatgaattatcaattattcacttgagcaaattttaactttagccttgtggttttggggttttgtttgctttttttaaacaagccattccaatggaagctaactttcaaatctctaggtaagaagggaagagaaagggragggagaaaaagcgaaaggggaagacattacctcaggaacagatttcagaataattcttctgacacttgcatatgctagattttaaataaccaaaacactcagccatgtgtgagatcttggcaaataaaagcataattcaatattgtatcattaaccta

SEQ ID NO: 469412 - DNA, 470 bp, Homo sapiens
acctaataatttgtccttcttcttccggagtagctggtcttaaccccagaactatgtgacacacctagggaaaaaaatggtaaatcaaagtttattaactgcataatatttcacattatctgcatgagacccatttcctaaattggaatctgaattagcaacagttttcaactcatgaattatcaattattcacttgagcaaattttaactttagccttgtggttttggggttttgtttgctttttttaaacaagccattccaatggaagctaactttcaaatctctaggtaagaagggaagagaaaggggaggragaaaaagcgaaaggggaagacattacctcaggaacagatttcagaataattcttctgacacttgcatatgctagattttaaataaccaaaacactcagccatgtgtgagatcttggcaaataaaagcataattcaatattgtatcattaaccta

SEQ ID NO: 469413 - DNA, 589 bp, Homo sapiens
cagctgcgtttcactcacagtgcctgagtgcaggccccagtaaggccccttcctccttcctcagacatctgtttctatgtcccagggatcacatggccattctccttctccgcctgagggagagagtgaagcaagcctttcagaagcctgtcacttgtcagattgttagcccaggccagggtgggggttctgtaccaatggcaggattttcttttcttttttctttttttttmttttcataaagacacagtcttgttatgttatacatgctgatctcaaactcccaggctcaagtgatcctcttgcctcagcctcccaaaatgctgggattacaggaatgaggcactgtgcctggccagtgccatctgcccctactctgcagcttctgccatctggaactttacccccaagagtctgggaggaatgtggaattataccccgctcactcatctgagaatttaaaccctgggggtatatgaggatcaagcgtgtgtccatggtctgatagctgaacttcatctgcagcctcctctcctgggactgcctgacttacgctttactcactgacaacttcaagctgctggtgatt

SEQ ID NO: 469414 - DNA, 547 bp, Homo sapiens
acattaagatcttgtgttggacttggctctaaactatataatttatttcaaaagacagagttgttttctcattttgctggctagctagcactgatgatggcgtagtcagttatctacattcgctttcactgttggaaagtcttccttagagacatcatttccccagggcagtgcgcagaatgacctgctagggttaggcatgctgtctttcgggctgctccagaatgcagccaaygagtgactagagccagatttattttaggaaaaataaaagtcattcatttcaccaagtgtcactgtttcttcacttggccaaattgatagccaaagtacatgcttttttctttcttatcccctgctgatctgaacactctccattctcatttactctcctcacatctggatggtaagatatgtaaattgcagcatgccacagttaagccagccctctttcaattggattttcagtacccatgtatattagcatgtcgaagatgataatgcaatttacatttccctcccgcccatcatctattaatctggctgc

SEQ ID NO: 469415 - DNA, 548 bp, Homo sapiens
tgtccaattttggagacattaagatcttgtgttggacttggctctaaactatataatttatttcaaaagacagagttgttttctcattttgctggctagctagcactgatgatggcgtagtcagttatctacattcgctttcactgttggaaagtcttccttagagacatcatttccccagggcagtgcgcagaatgacctgctagggttaggcatgctgtctttcgggctgctccagaatgcagccaatgagtgactagagccagatttattttaggaaaaataaaagtcattcatttcaccaagtgtcactgtttcttcacttggccaaattgatagccaaagtacatgcttttttctttcttatcccctgctgatctgarcactctccattctcatttactctcctcacatctggatggtaagatatgtaaattgcagcatgccacagttaagccagccctctttcaattggattttcagtacccatgtatattagcatgtcgaagatgataatgcaatttacatttccctcccgcccatcatct

SEQ ID NO: 469416 - DNA, 594 bp, Homo sapiens
caaataatagatggactgcaattatttataaggaattcactttgtcaagatactatggtcacagcatacagctcagatgayacttgtgtcaaaaaacattgactggctcagatgactcagaagttcgtggctggatctaagaattcaaatgatggcctaagaagtcagtctgttggcactgctgtcatttgtgtggctttgttctcagacagcctctcccctcctaggggcaaaatggctgccagcagcttcaggctcaaatcccgatttcagcacctcaatacaaagaaagcattgcctctcttgcagcagttcaccccaaaatcagaattaagcctcattggctttggtgggcttggcttgggtcatgtgctgtgttctgaaccatatagctagggaggtgcaatactgggataggccactcctggattggagtgaggggtttccttagggaaacccatgacattgtttccagcaagaggttggggggatggatgcaggatagtaaaaaccaataaatatctgcgaaattattctttttttaaatgaagatatctttgagaaggaaaatgtaatgaacagatcagtgattca

SEQ ID NO: 469417 - DNA, 628 bp, Homo sapiens
ctgcattacacaaaggtagggccatgtgactaatggcagccaatgagctataactaaaaacggtgcatgtcttttgtgggcrgaagcactgaaaagcagataagagtaacaatatggaagatatttatatgtctgtgaggagcagatgtccctaccaatacaaaatggttaagttgcatacgtaagatctaggcttttgttttcttgagctcctgagatttgaaattatttgtcactatggcatagtctatcccatatttcctaatataatgaatatcaaatgcatacaaaacagtattgataataggattataaatattttaatgcgttttctctttctgtatataaacagaaatacacacacacacacacacacacatatatatatgtaagatttatataaaagaactggcttatgtgattgtggaagctggaaagtttgaaatttgtagggcattcgagcaggctggaaattcaagtaagagttgatgtcatagtcttgagtttaaaatatgtaggacaggccagataaaactcaggcagagttctacattgcggtcttgaagtagaattgcttcttccccagcaaacttctcttttctcaaggccttcaactaattgaaagagg

SEQ ID NO: 469418 - DNA, 311 bp, Homo sapiens
acctgtttcacccacgggtataaggccccagggagcagggccccatcaccctcgaatcttcccatctgacccccgactgataacagtgacagaactaggcctttctttcgggttctaacacagagaaaaggcaaaaggcacagatacacaggtttcsccaaaggtctgttctttgggccttgcgctccttcctcaggagccaaagtctcagaagcagaaaaatcctcgatacccccaggatccctttgggaagtggttaacagcacaggctttgaagccaggcctcactgagtttgggtcttttcttcacc

SEQ ID NO: 469419 - DNA, 629 bp, Homo sapiens
cctctgcaagctggaaggtgataggtactgagtgatgggcaaagggtgagcctggtgacatttatatgtcttacaactcctcttcccccaactctctctctgtgtttgaggtgtcaccatccccagtcttgatgccccatccctcctcaactactccctagtttcctagggactccctgagtcctccccgccccattctttgtcttttctgcactgattcagtatgtttctcctgatgggatcaccctcctgcctttcctgcttatcaaaatcctactcatcccacctcctctattcagccttctggggtgaatcacccatgtaaatcttcctccttgctactttgtatcaaatggtcaggcctgcagttagtacagaaggggtctctgcttacttcacttgtgtatttctcattttcctctgaagaatttagagtggtcattacagggctcaaaaaaaaaagtactggctcaatacatgtttgttgaataattatcattttgtctgtttaagccttctcgmaaataaacagggaagtccctgtgtaattttcagagtggctttggagacatcatactacttgcctgagtctcaatttcattatatataaaaaatggagtgttgaagtt

SEQ ID NO: 469420 - DNA, 602 bp, Homo sapiens
ttttcggaataatacatctagcatcttcaaaatgcgaccactgaaaaaaacaggagagacaaattgagtagctcccaggctgaggactggaaacagtgctgaggttgaggacagccaggctactgacagcaagcacagarggtgcggggcagaggagagtcctgcttctctaacccagctacttgcgctttccactggtcggggatgttgtgtgtgctggggttattttaagccacacagtgaatgtggttcatcttctgggggatatcaattttacttgaagagtgggggaaacgttttctacactcaaataaatacagaaactttatggaataaggtagaaaaagcacatgcattttaaagtgaaaaacagatttttctcttttgctgtaggtctttttatgcatgattttcagacctcagggatttgtcttctatcttctgcttgtgggaagcgctgcaccagaacattgctgtgggtctgttcagcctgaagggccacaggccgaggagacaggccaactctagccccggcaagcatgtcagagaagccgacttggcctccagcacagcaccctgggccaggagcacattctgggtgt

SEQ ID NO: 469421 - DNA, 440 bp, Homo sapiens
gcttcaggaaacttacaatcatggtggaaggcaaaggggaagcaaagactttctggttgtggctggagaaaaagctacaatatactgactggtctcattcaggatgttcttgacattcaggataggtggggtgacccygcaatcatatggacactatccattccagtgacgctcaaacttcagcacacatcagagtccctgcaaggcttgctaagacacagagtgctgagcccacctctaagacatttttctttttaaggaataaagagcattccattgtgtaaatataccactttttaaaattcatgtacctgttgatgtacacttaggttgatttcataccttagttattgtgagtaatccactttttttccttttcttacttatgtatctctttttttatttctagaaacattttaattttatactataaattatga

SEQ ID NO: 469422 - DNA, 440 bp, Homo sapiens
gcttcaggaaacttacaatcatggtggaaggcaaaggggaagcaaagactttctggttgtggctggagaaaaagctacaatatactgactggtctcattcaggatgttcttgacattcaggataggtggggtgaccctgcaatcatatggacactatccattccagtgacgctcaaacttcagcacacatcagagtccctgcaaggcttgctaagacacagagtgctgagcccacctctmagacatttttctttttaaggaataaagagcattccattgtgtaaatataccactttttaaaattcatgtacctgttgatgtacacttaggttgatttcataccttagttattgtgagtaatccactttttttccttttcttacttatgtatctctttttttatttctagaaacattttaattttatactataaattatga

SEQ ID NO: 469423 - DNA, 427 bp, Homo sapiens
ttaaaaatgcagttcccattctccagttccctatcaggggtctttgttcaacttactctgtttgttcataacacttgtatttagggaatgttgggcatgattaaacttcgtttagctttgggtttctagaccttgagaaacaattcagtgcaggcaaatattgtatgyccctatattttttcctgaaagccaataaagaaggaatgatgacaccttcactgcgtctatggggacaaaagctgcttgtgtgtgtgtgtgtgtgtgtgtgtgtgtgtgtgtgtgtgcgcgtgtgtgtgtgtgagagagagagagagagagagaaacagccttgtcaaaaagacgtgtttgttgctgtaccctcattatatgaaagccatcatggcatcaaaacagtataagccaggttgagctctatcctctctgcatc

SEQ ID NO: 469424 - DNA, 642 bp, Homo sapiens
ttagagacaagtatgttactgacatggatcatggcaaggatttatgtaatagctgccatcgtaattccatggtagtagtgtacttaaaatgtatgggttaagccactacttawaatgcacagaagttacaatgttgacatagtgcctgctgtcaaggaacttatttctcgcagggaagctaaggaatattaacaggtataagaaacaggtaacccagtcttatggtaagttgaaatgcatattagaggtaatgttaaattgctcatgataaagaggtagtgggagataaaggaggaaattaaccaccagagaaatatcatgtgctaacaccaagagctaagagattatggttcacctataggatgtggcatagcatagcataaaagttgttgtgccccctgttagctcccacagggatgatgccaagctgagaaggcctaagaagagacccagagccaacaaaggagacatacgttttattagcaggagacttacagacagggagatccagtgtaggcacgctggacaggggaaccacatagcccagtggtgatcggcggggcaagagtaccatagttgcttgcaaaaagcatgcactttatatggcattttcacttagcaccctctcctaacaacctccag

SEQ ID NO: 469425 - DNA, 616 bp, Homo sapiens
tgcctgggtgtggagcagatagggccttgctgtaccacaatcaatgttcaggaggagtggagtggcttagactgctgaaccagatgagtgggtgctctgaatgtctggaaatctgccggggtattaagtagagaatgcctttctgcatcaggatttctgcatgagaaagttgggacaggtcagcttgctgaaccaggtgagtgggtactctaaatgcttgaagacctgcctgggtgtggagtgaagagggttcccctgcagcaagatctctgcacaggagtggaggtgacttaggttggtgaaccaggcagacaggtgttctgaatgcatggagatctgcctgggcatgtagcagagagcccgctcccccaccatgccacaccacgccctgcaccaggatctcttcacaggaagggtaggacagcttaggctgctgatccaggkgagcttatgctctgaatacctggagatctgcctgggtgtggagtgtagagggtctcactgcatcacgatttatgtccaggaagcgtggggttcagttttgcctattcttaaacctagaaaaaatgaatagtacattgcaatgtcttactgcaatcttaatgctcaggtccca

SEQ ID NO: 469426 - DNA, 144 bp, Homo sapiens
cctccaacacttcttttttaagaattctcagactccatgaccatataaacctaccttaatttcctagggcacaggcaycagctagctgggacaacacctgtgctcagagcccatgaagttagtcaaattaatcagtccacagag

SEQ ID NO: 469427 - DNA, 400 bp, Homo sapiens
ccgacccacaccagcagaccagggacacagtcagactggaaagacctgcaaaccctcactctagacatatttctaaagttttttttttccccaaagtgagtttccagtgaccctgcaaacacctccacggagattgcaaactggggcaaacctttctttttcttcttttccctccttccccatccctttccctgtcaccccttttctcatctcctttctcatctccttcctcctccctctactttctttcttctgttgcttcttccccgcccctctacaaaaaaaaagaatcatttcactctctatcacaacaacttttggtttctccccatttttgatccccccaagtttgatcccccagttrtggatcacacttcccaaatcatcatccaggatgcag

SEQ ID NO: 469428 - DNA, 400 bp, Homo sapiens
ccgacccacaccagcagaccagggacacagtcagactggaaagacctgcaaaccctcactctagacatatttctaaagttttttttttccccaaagtgagtttccagtgaccctgcaaacacctccacggagattgcaaactggggcaaacctttctttttcttcttttccctccttccccatccctttccctgtcaccccttttctcatctcctttctcatctccttcctcctccctctactttctttcttctgttgcttcttccccgcccctctacaaaaaaaaagaatcatttcactctctatcacaacaacttttggtttctccccatttttgatccccccaagtttgatcccccagttayggatcacacttcccaaatcatcatccaggatgcag

SEQ ID NO: 469429 - DNA, 498 bp, Homo sapiens
actcaaatgacttgagaggggctatatgtttgaagcctttgttctccttcatgtggcttctccatgaggctagcctgggtttccccacagcatggtggtctacagttccaaggggcagtgtgccaattgcaaatgtgtatcaagttctgcttgcatcaaacttgcaaactggccaaagcaagtcacatgggtcaagcccaaaatcaatatgggagaggtaaggggtgaacaccaggaattatggttcacctggggccaccaatggaatgtcttactacagtagacaagtgggacataaaagtggggtgagaatagcaggtcttggcttaggktttctgcttcttcattttcctgtatttccttttacaaagaatatgctccctacaggacaggagcttaaagctagcgcatattacattacaaatagtgaaaaagtggccatccagcctcagagacagttgtcattttaggagacaaagggcagtatcaatcgattca

SEQ ID NO: 469430 - DNA, 428 bp, Homo sapiens
cttgctaaggaagaattgtgaatcatgatagataaaaggatgtgggcaagaatccatayatttatcctttattaccagccacactgtatcattttcttaatttattaaaaatatttattaagtgccttctatgtttgaagcatggtgctttcttgtcagcaataaacactctcacctcttccttcataaacttgatctaatttgtggctaagtcaccccttacccttcctattcaattttcctccttctcattttgttaatgttgacagtactgctcttattgtttcactctacattctccatgatggtaattaagaaattatgcaaaagatctttctgcagtggtggaagaactgatgtttaaatctctttccagtccctctggaagttaactaggctgcatagaaggtggacctgaggaatagcag

SEQ ID NO: 469431 - DNA, 525 bp, Homo sapiens
gtggataaactgacattttaatacagtcatggcagaaatgtaaatttttcaacctttttagatactaatttagcaatatctaccaaatttcaacatgcacataaaatttggcccagaaaatccaccactaggaatttatctcatggatgaatttacacaagtattaaaagatacaaggatatttactgcagtattgttggttttaacaaaacaatgaaaagaaatgttcatttgtaggagaatggttaagtaaactactttttgtaaaagccagctaatgaaatagatatttatgtggtgaccatgatgaaaataaagtatgcatatgtactcatatgtatgtgcttgtatgttcacagawactttcttgaagggtgcatatggaagagttagcagtagatataacgggaaagaaaagaattgaaattttcttgaagggtacatatggaagagttagcagtagatataattggagagaaaggaattgaatttttcttgaaggtacatatggaagatttagcagta

SEQ ID NO: 469432 - DNA, 606 bp, Homo sapiens
caaaagattggaaaaaccaacatgatcattaagaagagactggttaaataaaaatcagcacacttttataatgaaatatcattgtgtaaacaggtaattgtatgcacatattgttaaaatgaaccttggttacaagttttacctgtagccacaaacttcaaacttctgccatgtgtccaagtaccttaaatgaatggaaaattattgacacaagtgtttcaggagtgtttctcagacgtttttcttgaaggcacaaagcattaaascaaatggatttttagaagccattacttttagtgtttaagtaatgtattagtgttacaggactaggtaatacagtgtttaggtagtatattattagtgatactaggacatacttcagtgaaagtaacatttggttgaagttaagaagccttgcagtcccattagtctcaatgttgtcataattttggacaagtcactgaatttctttgtactgtatttttctttgtacaattacacacatggattgtataatctctaagaacccattgctatcaaatgttttataaacttttatagcattgccacctcaactatttcattaatattaatactttgggagat

SEQ ID NO: 469433 - DNA, 606 bp, Homo sapiens
caaaagattggaaaaaccaacatgatcattaagaagagactggttaaataaaaatcagcacacttttataatgaaatatcattgtgtaaacaggtaattgtatgcacatattgttaaaatgaaccttggttacaagttttacctgtagccacaaacttcaaacttctgccatgtgtccaagtaccttaaatgaatggaaaattattgacacaagtgtttcaggagtgtttctcagacgtttttcttgaaggcacaaagcattaaagcaaatggatttttagaagccattacttttagtgtttaagtaatgtattagtgttacaggactaggtaatacagtgtttaggtartatattattagtgatactaggacatacttcagtgaaagtaacatttggttgaagttaagaagccttgcagtcccattagtctcaatgttgtcataattttggacaagtcactgaatttctttgtactgtatttttctttgtacaattacacacatggattgtataatctctaagaacccattgctatcaaatgttttataaacttttatagcattgccacctcaactatttcattaatattaatactttgggagat

SEQ ID NO: 469434 - DNA, 605 bp, Homo sapiens
taagtgaatgtaccaatcagaaaggggatgaatcagactgaaatcttgattgatgatagattcaatcaatcataactccaatactacttccttcaagaactctctgattatttaaccaacagtagactctgtttctgaactcctgtgtaatttgttaaactccatgtccaactgtcatactaaaaaaaatgtcattagcaggcttgtattgacagaaagacaagacataaataccctttgagtacataaaatgcattttactcgtagtaagaatgcagtagaaaacaatgttttgataaatgatagcaagatcagcggcagcatctgagacaaatattcaaacttcctatgactttatctagccaggagtttcacaattgtgagcacagattacaagtccttctgaaggtgtaacttgtccccttccatgcccaatgcttatgtataaggctagagaagtcttatacattgtctagtctgtatatgtgcttggtacttttttgcttggtccaggtatacmtcttcaacctcagcattatttgatgaaacaacacaattgtggcagtacgttcattcattactctgagactcttgagactaattca

SEQ ID NO: 469435 - DNA, 623 bp, Homo sapiens
tccaaccacattcttgaactcagggctgtagaagcagaataggcatcagtatcccagaattatttggattcacattaagaaactcttaaaccatctaaaagattttcccctagaattcttaaagcactttaacaaaaacatagagccttgtaatattcattggtgtgctatttccctcatagattataaatttatggaaagaagagattatactttatttatttttaaatcttccatatgcccagcgtaaagccttgtgtatagctataaaaacaaaaattattaacaaataaatcttcattattaatatctaaaacatggatacctacgtaatccttttgcctttcctgttttctgaagactcctacttgttctttaaaaaacttagatcatttatcaccttgtgtgtgacatcttcctgacattctgcaagaagctagtcatcagtctctcccaccstatcctcaatggcactttagacacagctttacaaggactgttttaactgtgttggaataatatgttctccaccagactgtgaatgtatctaaggcttggaccatgatttattcatttttgtggtcctttccagtggtgacaagtagggcatggcattgagactg

SEQ ID NO: 469436 - DNA, 661 bp, Homo sapiens
gaacttacagacatacatttggcatgagtagaaaaagatgaacaggcaggtccaccatatttcaagtgatttcatgctataagtactatttatatacaaatacacttaatctggcctggcatctgatgtccgtacaaaatgtcaactcctaaaaccttggaatatgtttaattgtcaaggattaaatcagatgctgtgctgtgtgctgctttggccacaaattggrtaaaagggcaggggttgttatttctgttctggggctcggctcttcttagctcccagaggtttaatgaccccttcttgctataacctcatgtctcccatgtccataataggcagaagaactttaggtcatagagaggcctttactttcccatgttttgcatggtcagagaagtgctgagaatggtgaatagttgacaccaggattacagatcagggtagtctaatgaagttggaaatatgcaagaaggtctggaagagtctctgtttcccttcataccaagccagagttttgatggcagtggctgctgccgtgatgcccatgggctgcggcggggaatcatggatggggctgcacactccatggagccagtgagagccctgccccttctgaattgggatgggagctccccatgcttctgcagccacccaaactgca

SEQ ID NO: 469437 - DNA, 661 bp, Homo sapiens
gaacttacagacatacatttggcatgagtagaaaaagatgaacaggcaggtccaccatatttcaagtgatttcatgctataagtactatttatatacaaatacacttaatctggcctggcatctgatgtccgtacaaaatgtcaactcctaaaaccttggaatatgtttaattgtcaaggattaaatcagatgctgtgctgtgtgctgctttggccacaaattggataaaagggcaggggttgttatttctgttctggggctcggctcttcttagctcccagaggtttaatgaccccttcttgctataacctcatgtctcccatgtccataataggcagaagaactttaggtcatagagaggcctttactttcccatgttytgcatggtcagagaagtgctgagaatggtgaatagttgacaccaggattacagatcagggtagtctaatgaagttggaaatatgcaagaaggtctggaagagtctctgtttcccttcataccaagccagagttttgatggcagtggctgctgccgtgatgcccatgggctgcggcggggaatcatggatggggctgcacactccatggagccagtgagagccctgccccttctgaattgggatgggagctccccatgcttctgcagccacccaaactgca

SEQ ID NO: 469438 - DNA, 584 bp, Homo sapiens
ttcatgctataagtactatttatatacaaatacacttaatctggcctggcatctgatgtccgtacaaaatgtcaactcctaaaaccttggaatatgtttaattgtcaaggattaaatcagatgctgtgctgtgtgctgctttggccacaaattggataaaagggcaggggttgttatttctgttctggggctcggctcttcttagctcccagaggtttaatgaccccttcttgctataacctcatgtctcccatgtccataataggcagaagaactttaggtcatagagaggcctttactttcccatgttttgcatggtcagagaagtgctgagaatggtgaatagttgacaccaggattacagatcagggtagtctaatgaagttggaaatatgcaagaaggtctggaagagtctctgtttcccttcataccaagccagagttttgatggcagtggctgctgccgtgatgcccatgggctgcggcrgggaatcatggatggggctgcacactccatggagccagtgagagccctgccccttctgaattgggatgggagctccccatgcttctgcagccaccca

SEQ ID NO: 469439 - DNA, 575 bp, Homo sapiens
tggatgaactagtagtaaaacgcaaaacaccaaaattagaatttaagcatttttaacattaaaatactattgaaagtaactagatgctatgaaaaaaaattagtattaaaataaatgtaatgcaatttctggaaagaacttaatttattgacagtttagatctataaagatgaaaagctaatatgagttctaaattagaaaatatgttaggagatcaaaagctatcattgtaatcactacctaccacaataaaagaaaatagtagtccagaatcaacttaaattttcaaaaaatcataatgattatacmcatactaaaaataatacagaattgtcatttttacatataaataagtttactgggaaagaaaatgtcaaattttagaactgtgttactattagaaattactcatttctaaggcagaaccaagtttcattagccaatagctgctctgaagaataaagctaatttacatttaaaatagaagtacagtctactctttaaaagcacaatggtaaacacaccaatttgacaattacattaatatgagtatttgcataatctgttttctacac

SEQ ID NO: 469440 - DNA, 620 bp, Homo sapiens
ctcttagatacctttgctagtatgagggtccaccttacaagtattctgatttttctcatgttaaaacagcacctattactctagtgttagtctcagtaatgaagaaaaataaatacctgccactcttagcatgataatctttttaatgtaaaaaaattattaaaatacttttytacatttttctctctctttttttaaaaaatatctggtaacccttttgtgatactctcccattttccttttaatcacctctaatcatattacttacctcagacttgttttcatacttaaatatcccttttaaattctggaactcagacctaaataagttttaaagaaccacaaacaaagcctctggaggcagaaaaatgaagactagcttattctgctcatctgtaagtgatgggtaattcactaaacacaaaaaagagaaacccaatttattccatagaacactctaaaaagccataactgtcaagcagtttttttttaacctcaaaccacgagttttgtttaaaatggcttagaagaatggttattattctgaatttttatctagccagattgtcaactccctgaggataggaacatctttgaatcccctatggtacctggtgtct

SEQ ID NO: 469441 - DNA, 620 bp, Homo sapiens
ctataagtggagataatattgtcyccatcttattccaaaggatcattcttaggataatatgaaatgatgaacataaatgtcatttgaacactataaaattgttctcttacctttagaagaaaatatactttaaagcatgtggtcttcagtaaaatatatgaatacctcttggtcactattaaactatctaaatgcaacttttatttatttatttatttatttatttatttatttatttatttacttatttattttttagatggaggcttgctctttcacccaggctagatagagtgcagtggcacggtctcagctcactgcaatctctgcctcctgggttcaagtgattctcctgcctcagcctccatagtagctgggattacagatgtgcaccaccacacctggctaattttttgtatttttagtagaaatgggtttttgccatgttggccagtatggtctcaaagtcctgacctcaggtgatcctggtgcctcggcctctcaaagtgctcagattacaagcgtgagccagcatgcctggcccaaatgcaacttttaaaagtgacctttatgtattttcttaaatatatgtattcgaccccaaaattttaaaaataact

SEQ ID NO: 469442 - DNA, 545 bp, Homo sapiens
tgcctttcaaggagcctttctcttgaatagaagaattctatttagtatccagttatttcctctttgaccccctttcagtcaaaatatgcaaggtttattcctcacctcttgacatccaatgcctgttagagccttattagcatttattctcattgatgttcattgcattttaaatctggcagggacgtgattaagaggtggaaaatcaccggactcggtcggcgtgtgactgtctgatcgtggcatgatgaccagctcagcatgtaatcacatctcttgtgttttcagtttcctttcatacccctggagggaaaaagttcaattccgagtcatgctctggctcggcagaggtaggcagcgggtgagaagggtgcagaatcggttggtcctgagtgtgctgagaggcagcctaggtcctaggagacgaattctacctacattcaccctaggcaccatccttgcatcactcgctaccagaataagcgggccagctaggcttattcttataaggaggtgtacytgtgggatcccagtaaatcacggca

SEQ ID NO: 469443 - DNA, 610 bp, Homo sapiens
aacatgtaataggatatcttattataagatcttaccatatctaaattgactwggaataacttgtgttatgccatttattcatatggaattttagcgggatgtgtatcttttggattttaagtctttttcatattttcaagaggtcattgtatatttcacatatttatgagcaaactacagattcagagttcagaccattttattgccctagcctcctctgaggtaacttccagtgccttacagggcaaatgagggagcactgaactgctcttgatgtgatgtttaagtgtggctgaacagcactggttgtttacatgaagttacatcagttgttgtgtgttgttagcaatcgttttgttctgctcaatattccatcagtttctttttcaaagtttaattttgacgtttctaatttgaactaaatcattaaaatttcttggtgaaattgttctggtaatgacaactcttagttgggagaaaaagagaccatgtacgattgggctatgtcagctctggcagatcctgcagtgagatagcccacacagtgaacatattaatgaattgccttttgatgtcttgcttatagtaaatatcagtttctatatttgtc

SEQ ID NO: 469444 - DNA, 731 bp, Homo sapiens
gactacccagaattccttgccaccagatcaatagtgcctttgggttacctgatagtaggaaaaaaccaatttgttctacaaaatcattttgtttttaaaataatagcattgcttataatatgattttatctttgccacagcccacaacagagctctcctcctgatatcttgtacctttgttgatatctgatgctggcaatgaatgtaaaaactcggacacagatttttttctactattcttaattattacttcatttctccttcatttttatctttcagacttttccctcatgtatattccacagcacctggcagagtgtattaaacatgttggaagacccaatcaatactgaccgaggagaaacaaagggaattcctcagcatcattaagattaatattaatagtctgaagtttaacagaccctacctgatttaaaccgtaaattgttattctgccacgagaatgcaaacatataaaaaattaaaagttaaaaagtyctattattactcgaaattgaatgattctattccaataggaatgccatacaaattgtaaaagtatttacgtattcagagcagtcttcaatcttctgaaagaaatacaagtataatcctttaaaatattttctaacctttcaatgtatttttattcacaattacctgccaaaatcttcttatttggatgtccttgccttagcagaggaaaaactaaaagtacagtagctttagaa

SEQ ID NO: 469445 - DNA, 731 bp, Homo sapiens
gactacccagaattccttgccaccagatcaatagtgcctttgggttacctgatagtaggaaaaaaccaatttgttctacaaaatcattttgtttttaaaataatagcattgcttataatatgattttatctttgccacagcccacaacagagctctcctcctgatatcttgtacctttgttgatatctgatgctggcaatgaatgtaaaaactcggacacagatttttttctactattcttaattattacttcatttctccttcatttttatctttcagacttttccctcatgtatattccacagcacctggcagagtgtattaaacatgttggaagacccaatcaatactgaccgaggagaaacaaagggaattcctcagcatcattaagattaatattaatagtctgaagtttaacagaccctacctgatttaaaccgtaaattgttattctgccacgagaatgcaaacatataaaaaattaaaagttaaaaagtcctattattactcgaaattgaatgattctattccaataggaatgccatacaaattgtaaaagtatttacgtattcagagcagtcttcaatcttctsaaagaaatacaagtataatcctttaaaatattttctaacctttcaatgtatttttattcacaattacctgccaaaatcttcttatttggatgtccttgccttagcagaggaaaaactaaaagtacagtagctttagaa

SEQ ID NO: 469446 - DNA, 533 bp, Homo sapiens
gctgagtgccaaataggaattttaaaaacactttcccatttctcttgaactgaattgtgcctcaaaacaaatgagtcagatgatttcatttcagtgcaagctgcttatttaactttcccaccttcctaatttgttgcgcaggagcaataattataattcagagtacaatgtgtccatggtcttctaaaaacstgtggtgtcttttctgtagaggtcaaaaacagcttttaagttttttgaatgagcactaatttgatcactttcttagttttaatttccttttttaagactgaaagttatcagcataatttaggcacttcttaattattgacgtcatttgctgagtgtaaggtgcttacacaaggtgaccccctttggccacagagaaaggagtcgttaaaggcaagcagttttgtgtgtgttggcgtgtaattttccatcagtacacactcagcacccaggggtacgggttgactgcatctaaattaatgtttgtgctatttttctgttgcctaatattgaactaaatgaca

SEQ ID NO: 469447 - DNA, 601 bp, Homo sapiens
agctgcactcaatacactcaacagggtaaagataatttattggtccctgagtttcctcaaagtaatatttaaaggttattagagtttgaataactgagctgagagagtagcccattacagccaaaaagtattttaaaaggaaagaagcacccatgaaatattaaagttgaaacaaaccattgaggtcatcattatagttcaacttcttttccccatccaggaccctgttctacggcaccccaataagcagtctccttttgaatatttccaacagtgtgggatttatactcttaggaaaggcaactggattgttggtaactggatttgacccaaatccaatttttcatatcatgtgttgctttaagaactaggcgaaggattctttatttcctctggaatataaagagtagcattgatgagagaccctcatggaaagaacaatgggagcaaagatacctaggtttggtccccaccatttcttcgagcttcatgttgtttgtgaaacctccctaagcgttcacattcttataagagaaagtaagctgtgtkcatcactagcatattgttagggaaagtgaaatggggggcaatgttcttttaa

SEQ ID NO: 469448 - DNA, 570 bp, Homo sapiens
taagtatttatctgaagactttgtgtcaacgcacactacctctccaaggagattttgaaatggagatgggaggaggtgtgtaaggagggagagaaggaaaagccatctgggtaaacctgggaacagtgttggaaaggctgtgagaagctcgttggagagagaactgtgtgaagagcttagtgattagtacayggtttctacaacgaaaaatcaagagaagctgcggtgttgaaaaacaagtgatgtttttgcttttcaaggtaaaatgaatcatagacatctttgaaagcagagccagatgaaaggagaagttactgaatggaaatgaaacagtgagctgtctggtgaaggagtgagatgtttgttggatggtgtagagtagatctgagcaaggtgaaagaggtcatctttgggggcatgttgaccaaccgatgagttaaaatcctctgtccttatgtggtgccacttaaaagtaatgacacaaactccgtatcatcagctttttcagggaaaagcagttattccccatgcaaccacctcttcaattgttgcagtttggtagcttgtgaa

SEQ ID NO: 469449 - DNA, 570 bp, Homo sapiens
taagtatttatctgaagactttgtgtcaacgcacactacctctccaaggagattttgaaatggagatgggaggaggtgtgtaaggagggagagaaggaaaagccatctgggtaaacctgggaacagtgttggaaaggctgtgagaagctcgttggagagagaactgtgtgaagagcttagtgattagtacacggtttctacaacgaaaaatcaagagaagctgcggtgttgaaaaacaagtgatgtttttgcttttcaaggtaaaatgaatcatagacatctttgaaagcagagccagatgaaaggagaagttactgaatggaaatgaaacagtgagctgtctggtgaaggagtgagatgtttgttggatggtgtagagtagatctgagcaaggtgaaagaggtcatctttgggggcatgttgaccaaccgatgagttaaaatcctctgtccttatgtggtgccacttaaaagtaatracacaaactccgtatcatcagctttttcagggaaaagcagttattccccatgcaaccacctcttcaattgttgcagtttggtagcttgtgaa

SEQ ID NO: 469450 - DNA, 657 bp, Homo sapiens
tgtttgtattaagtagaaggtaacamactaaagcacatacctcttgcagatagaagattgcttattctaaaagatcaaattgcctatgtctctaagggaactatgtatcaagtcagatatcaagacttgttcaatatcactcggagatagggtttgattcatttttaagataacattgtagtcagaggcagtaagaatattgtgctacttttcctatattcgtatcaaattgcatcccagccttaatgtgggaatcctttcagcattttgttttgaagctctgtgacaaaccaatgaaccaaactgttaatgctgatacagcctcccctacctactacaggtagggttcttactacagtctcttatggaggcatgcttccatgttaaccaccccaccaagctagggggctagctaggttttcatcctgcacattttggtgtctctagacagtgtttcatgtacgtagaaaatgctcaataaatgtttggtgattgatgactggcggagtgaacatatacattctttaatacaatttttgccacaacgttatttattgttgtcaatttttataaagaagtatccttattctttaaaatggattgctctctccaccccacttgcccctccctcctcgattgcccctccccaacccctta

SEQ ID NO: 469451 - DNA, 657 bp, Homo sapiens
tgtttgtattaagtagaaggtaacaaaytaaagcacatacctcttgcagatagaagattgcttattctaaaagatcaaattgcctatgtctctaagggaactatgtatcaagtcagatatcaagacttgttcaatatcactcggagatagggtttgattcatttttaagataacattgtagtcagaggcagtaagaatattgtgctacttttcctatattcgtatcaaattgcatcccagccttaatgtgggaatcctttcagcattttgttttgaagctctgtgacaaaccaatgaaccaaactgttaatgctgatacagcctcccctacctactacaggtagggttcttactacagtctcttatggaggcatgcttccatgttaaccaccccaccaagctagggggctagctaggttttcatcctgcacattttggtgtctctagacagtgtttcatgtacgtagaaaatgctcaataaatgtttggtgattgatgactggcggagtgaacatatacattctttaatacaatttttgccacaacgttatttattgttgtcaatttttataaagaagtatccttattctttaaaatggattgctctctccaccccacttgcccctccctcctcgattgcccctccccaacccctta

SEQ ID NO: 469452 - DNA, 657 bp, Homo sapiens
tgtttgtattaagtagaaggtaacaaactaaagcacatacctcttgcagatagaagattgcttattctaaaagatcaaattgcctatgtctctaagggaactatgtatcaagtcagatatcaagacttgttcaatatcactcggagatagggtttgattcatttttaagataacattgtagtcagaggcagtaagaatattgtgctacttttcctatattcgtatcaaattgcatcccagccttaatgtgggaatcctttcagcattttgttttgaagctctgtgacaaaccaatgaaccaaactgttaatgctgatayagcctcccctacctactacaggtagggttcttactacagtctcttatggaggcatgcttccatgttaaccaccccaccaagctagggggctagctaggttttcatcctgcacattttggtgtctctagacagtgtttcatgtacgtagaaaatgctcaataaatgtttggtgattgatgactggcggagtgaacatatacattctttaatacaatttttgccacaacgttatttattgttgtcaatttttataaagaagtatccttattctttaaaatggattgctctctccaccccacttgcccctccctcctcgattgcccctccccaacccctta

SEQ ID NO: 469453 - DNA, 517 bp, Homo sapiens
tgaagtgaaatccttgttattaaggttctgactctattatgaagacttaaaatttttatcagtgaaatgcatgttctctgagcttcaatttcaactttcaatagcacaatttaggtgtaagcaatttgatgactcttattacatatatagttggataatcagaaatttccaaaggctgataaatttgagtcatgattctcagtatggacgtagttaactatcagtgaggattctagaggtcttcaattttagaaacagattttacatagagcttcmagtctttatcacaaaatatcaggccagaacagtttaattcaaattaataatatttactgaatatgtactctctgttaagccttgatgaattgatcatatcattcttgcatttcttttaaggccaagaagattaaagataatctgttaagaatgtaacaaatggtgctgattgcatgcagttcttaccttaatcctggctcctaaacccttatgtgtgggaacaaccacttgtttgagggtg

SEQ ID NO: 469454 - DNA, 517 bp, Homo sapiens
tgaagtgaaatccttgttattaaggttctgactctattatgaagacttaaaatttttatcagtgaaatgcatgttctctgagcttcaatttcaactttcaatagcacaatttaggtgtaagcaatttgatgactcttattacatatatagttggataatcagaaatttccaaaggctgataaatttgagtcatgattctcagtatggacgtagttaactatcagtgaggattctagaggtcttcaattttagaaacagattttacatagagcttcaagtctttatcacaaaatatcaggccagaacagtttaattcaaattaataatatttactgaatatgtactctctgttaagccttgatgaattgatcatatcattcttgcatttcttttaaggccaagaagattaaagataatctgttaagaatgtaacaaatggtgctgattgcatgcagttsttaccttaatcctggctcctaaacccttatgtgtgggaacaaccacttgtttgagggtg

SEQ ID NO: 469455 - DNA, 598 bp, Homo sapiens
tgcatcaccagccacgtgtgtgcaattttcccaaagacgtctgagcattattgacaacactttggtaaattatgtgtgactttcctaagagttggtgtagctcatttaattcatattaattgatttgtaggcttcccttgattaaytgaacctggttcatcttgtacagaatgcaataaataatcattaaaatgagggagatgtgactctgcaaattaaaaagttaactacttcagaagtcatagaggacaaaatggaaagaatgtatagtggggggtcttccagtaactcattgaaggagagttgctctttttgtgggttttctttcccaaatatgaatagaaatgatcatgatatttttctcccagaagcagtgacatttataccctactatccagtttgtttttacatgagttctcataaaactgtgagtttctaagttttggcttttttttttttttcagtgactttgcagggttattgcttctctttgtctaaagcttagtttgaaagcaatggcagaaatatttctcaggatattgtgtctgtttctccaccttctctttcacacactcggtagataaaaatcaagttgtga

SEQ ID NO: 469456 - DNA, 582 bp, Homo sapiens
tgcaactttacaggaatcactggtttggaattttgaatgttactctggtttactaggtagcatttctctctacttttactgcgtaatttccaaaaagataattttaccttcatactatcataaagagaagtatcaaataaaaattgtcgaccttgcaaatttaattgatatttggaaaaaataataactgttatacacatgttagcagttatatgattcacagattggttaaaaataaatttcaaaatcataccctcatttgtttgtggtctaataagtatcacataagtaacataggcaatagtttctaaatgaagggaagggaaaagagaatatccattcaattatttatcagaaggcgatgttttttggtatacatgcaaaccagagttgacttttagtatatcagagactttcttgaactgtctcttaattccacgtgttgaatgacactgtatttcaaatcatgtctatayagtaacatgggatgaattagtacgtttcccagttatgtttggaaggcccgtaagatgcttgttattttttctgaccctagtagtgttatcatgaacagaagctgca

SEQ ID NO: 469457 - DNA, 659 bp, Homo sapiens
tacacaagaggaaatatctaattaaatgccatcttgccttcaacagctaaaagctatgtgaaatcaattctatctccatgtttctgtatacacattgttttataaaactgatatacttcaagaaaggaagatagctatctaaagccatcagttactgggtgtcaaaactgagatataaagtttgtatcgactgttctaaattcatttattcattctttccttcatatgactactagttccatgctacaagttaccacccagaatgcccagctccaaggatatactggtgcacagcaaaagtagactagtcaatgtcttctgtaacataatttacgtacaacgaaatattcaatcttaagagtaacgtcaccctagaaagttctctgatgcctctttctaatcartttcctccccatcctttgtgagttaaagaacattgtgattttttttctgctataacttagttttacctgttctagaacttcacataaatggaatcattcatgtattctttatacacatggaattgtttgtggcttttgtgtgaggcttttaaaaaaaaaactgagcataatatttttgagattcattcttgttgtacattaatcatttattgctgtgtaacattccattgtggatacagcacaatttgtttattc

SEQ ID NO: 469458 - DNA, 398 bp, Homo sapiens
gggcgggagaactgagagagaacaaatctggggacagagcacaggggcaggagaaacaaaatgtggagagaaccgcctgctatctgtttgctatgtgggttgaaaatttttgaatacttgtaaactggaaagttgagtcaacaatgcaaggaattgctcctaatattttcagatgctgtaactccatttcacaagtagttatggaggtacctgtacgtgggctgaggggacatggagatggggacaggktctctgctcttcaaatgctgctaacagcctggaataggcacctgagggagggcacaaaaaattctaaagccaactgtggggagtatgttatgcacagcgtgaggcccgaagcagaagaccactgtgtatggttgggccgggggctgtac

SEQ ID NO: 469459 - DNA, 559 bp, Homo sapiens
taagtctcaaacccaacatttcagtgatggttcagggaaaagaaaaaaaaaaaatgtaaaagggatcagtggaattttttttctccttcaaataggattatttatactaatatgaatacttgttattcatagtactaagtttctttgaaaccaagttagtgtatactgaaccattgctcctaggggaaattcaaggttaggttcctgcaagcctctggccacaacattttcctcaatggaytaatacatgaccttgttttaggtgtgtttctgtttaaacataccttctgtaaatacatattgttgattccttgaactcagggccaacagtactatgactcatgctggtgtaaacttacctgacacatattttctccttaagtcacctcacagccttcttgtgcttagggactctagatagcacttcagcgctatgcttggtgccatttttaacagcaagatcaccaataaaaagctcaaaatgcaaacaacatggcactaaatacagtgtgaaaaggacatgcatataatataagagctgaaacaagaaagcagagca

SEQ ID NO: 469460 - DNA, 623 bp, Homo sapiens
gccaagcaagctattttaagatccctggaaggtaagctggagattttcatgctatgacaagtttgcatagaccgttttatttactctaagcattgtattctggctaaagattacacagaaagatgtggcastcactgatgctctttcccacatatttctgactctccacttttgggccacatgatggtactgcacttctttgttccccttgaggttacatacgggcagatgacttgatttagagaatgcacaagcgatgatgaactacagtggcacttcctgctatagtgattacagaatgtgggttgagataaagcttctatcagactaggttcctgagtgaaggagcagggcctctctaatgaaccatggtggacacgcagagtaagcaaaaaataaactcctgttgtgttaagtcactgaaatttggggatttgttactgcagtataatcaaacccatcctaatacaaaggatgtaaaacttttatactgcactttaattattcgtttttttcctttaagctcaaatgcccctttaaaaaaaatcctgattacccttcaagctctggcttgagttacatcttcatcatcactccagccaacatttatctctttgtgtgaa

SEQ ID NO: 469461 - DNA, 623 bp, Homo sapiens
gccaagcaagctattttaagatccctggaaggtaagctggagattttcatgctatgacaagtttgcatagaccgttttatttactctaagcattgtattctggctaaagattacacagaaagatgtggcagtcactgatgctctttcccacatatttctgactctccacttttgggccacatgatggtactgcacttctttgttccccttgaggttacatacgggcagatgacttgatttagagaatgcacaagcgatgatgaactacagtggcacttcctgctatagtgattacagaatgtgggttgagataaagcttctatcagactaggttcctgagtgaaggagcagggcctctctaatgaaccatggtggacacgcagagtaagsaaaaaataaactcctgttgtgttaagtcactgaaatttggggatttgttactgcagtataatcaaacccatcctaatacaaaggatgtaaaacttttatactgcactttaattattcgtttttttcctttaagctcaaatgcccctttaaaaaaaatcctgattacccttcaagctctggcttgagttacatcttcatcatcactccagccaacatttatctctttgtgtgaa

SEQ ID NO: 469462 - DNA, 623 bp, Homo sapiens
gccaagcaagctattttaagatccctggaaggtaagctggagattttcatgctatgacaagtttgcatagaccgttttatttactctaagcattgtattctggctaaagattacacagaaagatgtggcagtcactgatgctctttcccacatatttctgactctccacttttgggccacatgatggtactgcacttctttgttccccttgaggttacatacgggcagatgacttgatttagagaatgcacaagcgatgatgaactacagtggcacttcctgctatagtgattacagaatgtgggttgagataaagcttctatcagactaggttcctgagtgaaggagcagggcctctctaatgaaccatggtggacacgcagagtaagcaaaaaataaactcctgttgtgttaagtcactgaaatttggggatttgttactgcagtataatcaaacccatcctaatacaaaggatgtaaaacttttatactgmactttaattattcgtttttttcctttaagctcaaatgcccctttaaaaaaaatcctgattacccttcaagctctggcttgagttacatcttcatcatcactccagccaacatttatctctttgtgtgaa

SEQ ID NO: 469463 - DNA, 649 bp, Homo sapiens
ccaactaaatgacaattaagttgcctggccaataaattcttgtggtttggtctacayaaatttcttaaaaagtatattagtcttttacatgttcaacattggtttctgccagatttgtgaagtaatagaaaaaagtggtcataaatgaaacacatcctttgtagctcatatgaaaaggatgccaacatgcattccctgaattcagtgtgtttttagaaaaagcagtataatttatatcatttcatttacaacagtgctaagttaatgctcttggctgattttgacagaggcctttccaatcgaactgcaatgatttgtttcccttaaacacttaccgtactgaaggacttttaattagctttctagcgtgttttcctgatggacatcacctccctaaagccttgtaagtttcctggcttctaaaaaagaacaagaagttaaggggcattctttgggtttcaggctttctgtgagtcaataacaaatcgttgtttcgtgaaattgggtgcaactgcttactgggaatcacggagaggcttctttctccaccctctcagtccagtccccaaacctgctcagcaatttgactatattttattttacaactcattgtgacagtgtcactaaaaggcaagtttttacacaataa

SEQ ID NO: 469464 - DNA, 608 bp, Homo sapiens
gctgtatgacaaactctattttacagcatttatttaaaggataaagccgtctaagtagttatgctgagtttccttgatatrgttcatcctgatttctaatccgattttgagaagatcagcttgcatgatagacttcttgaaaccctaatgtactttgtgctactccctagtggttgggggccaaaagatagatatgtttttgataacacatgcagtatatgagggttgttttccatttaggcacagcaggtactctattctctaccagtaaatgaaggtgttttgttttgtgttgttgacactgttcatttcacttatgttctattcccggctattattgtgtctttgatctgaggaactcggttatctgtcattaaagcttaaaactcagacacaagaaaggattataatgaaagggttattgcttctgagacatccagcaaagcaggcttacacttgtcaataagatcagtgttgaacatgccatatctgtgtaatatttgaataaaaatttgttgagatgattgatactggtgtttttaaaatgaggcctgtattgaagtggtgagatttaatttttcatgtaaaagactgctccaatatgacct

SEQ ID NO: 469465 - DNA, 575 bp, Homo sapiens
ctggctgtagctgattgtctaggagtgaacatgtagcctaggctgggcccatcattccatctcccaggaaactgaatctggaatggaggccttgactcgatcctgatcaatggcagaacttgggagaaagaatctctgacttcttgatgccaagtccccagggactgccctgccamcctcgcttctcctggcttctgctgagatacccctatgtctttccaataaattcctctctcctcataccctggtcagagtgcacctctacctttcacagaccaaaggaacctcagctgaggttgccaagaaacaatgacagtgaggtcttgcacagagccacactatttgatttcagatgacttgtctgtcactacagcccagcacttactgatcatctctttttgactccctgggactttcaccacagcagcagtggtttaaaattttctccactcaggcctcacccgaccctcctccacctcttcacctgctctttagggcagtggttctcaaccctggctccacactggaatcacccccagggtgcctgaaaaatcctggtgcctgggtctcagtgg

SEQ ID NO: 469466 - DNA, 449 bp, Homo sapiens
agaatacagtatcaaaatatcacatgtatcccataaatatgtacaattattatgtatcagtaaaaaagaaccccttctagtttagaagatatccctgtgtcttatcatttagggtcgcatatactttcttttttataacattcattcatcttaattttttggttgttatatatttcttaaagagtgttccattagcccagaaactattgtttattcactattgtatttttcatgccaaataagtcaaaataaagattcaataagcatgaaaaaaaagaaaatttatgtttctaggataaattcctagaaacacataatctcccaagattgatttagaaagaaattgaaaccctgaacaaaccaatattaagtcctaaacttgaatcagttattttwaaaaaaaaaaaacctaccaaccaataaaaacctccagaccagatggattcaca

SEQ ID NO: 469467 - DNA, 645 bp, Homo sapiens
tgcaactctttcagcagatgtatgctgtgcccatactgtatcatatacaggacctttaaccctccttggctagagctaggaaggaaaaattgtcagtccctgagtgggcaatgagagagtcaaagaccacatcactcaccctgtctattggtaacccaatactggatctttgaaattattctgcaacatttagggaatgagatatttatactgaaggctcaagggagagcttattttttaaaattatcactatgaagacaaatagagcaatgctttatttatgaaacaatttcttcaaagtttttactagctaaatattctcaggctcttttagtgtttggtggccatttcccggttgattccactcacatgggatgttttgatcatagcttttcacaaaaatttgccaagataccgtattaactagtgtaactatatcacccttaatggttctgtcaactggcatatagcagatataattcgtcaactttgcagcagaatgcattcttaatttgaaagtaaaaaccaartggaaatccttgttgtgttcaataatgcattagacacagtatagactgttaccagaaggatttggttctgctttctcttcaataagtcatgttaaaagaatgactgcaatattcc

SEQ ID NO: 469468 - DNA, 656 bp, Homo sapiens
tctattcttttctgtgtctcttttaaggatacttgtcattgaatataagacccacctagacaatccaggatggtctcatcttgagatccttaattaattacatctaaaaagactatttttccaaataagggcatgttcagtttccagagattagaatgtggacatatattttggggagtcaccattaaacccactgcagtctcaagtcttgtcaatcattagaaccacctagataacttgataaagtacagattctcaggtcccatccttagccattcgaattccatagaccgggtttgtatgcatgtttgtgttttattgtagatmagaactaaatctaggtttaaaaaagaaaatcactaggtgattctgatggttattgtcccctattctttcaagatcttaattttggaaaatgtcattgttatctgttacatcatcaatgcagtgaaagacaatagcatatcaagaatggcaagatggtatgggggaaattgtgggcttggaaatcaaccaaggctgaacctgaaatttggcgatatcttgtgttattacttaaattctgtgagcatcagttttctcacctgtagaatggaagtctttacattatagtgttattgtgaagattaatgagataacgtatgtaaaaccccagc

SEQ ID NO: 469469 - DNA, 608 bp, Homo sapiens
cagaccatctgttaattctaccagacagtttaatgtgcaaatgtaaataaaactaataacatctccatggaaaattaaaaaatgcttaaccaacattgatttgatattgagagtcttcgtctgttttgtgttgctgtaacagaatatgcaagactaggtaatttgtacaggacagaaatttatttctcacagttctggaggctggaaagtctaagattaaggtaccaataggtttggtgtctgaggagggtccagtctccactgccaagatgatgccttgaatgctgcatcctccagaggggagaaactctcttctttacatgacaggagagcagaagagagagaacccactcttgaaagttattttggtagttgcatcaatcattcataaaggtagagtcctcacagcctaaacatctctcattaagccccacctctcaacacgattgcattggggattaagattccagtacattaatttggaggggccaaaacattyaaactaaaatattgaatttctgctagaactaataactgtgttagatgaataatagaaagtagatcagtaccaataagcatttcactcaagtcagccccaacccctttca

SEQ ID NO: 469470 - DNA, 643 bp, Homo sapiens
tgacaactgggaggtcagtgttgtcctctgagagagcagctttggtactgcaggaatagaaatcaaggctggtaaacacaggagtctccatagcatcttcccagtcgttgtcttgtttgtctttctagacaaataacattactaaagtgtcttgaagccgtctctttttgtctgytggaacatctctctcctgcctctctctgatattttttaacacaggttcttttgttagattatgatatacagagacttcaactttgtcttccttctctcactgagtattactcctaggacaaatgtatctacttccaaggtttcaactctcacctttctacaaatgactcctaagtcattgcagacccaaaattccaacagttgactcatcttcacaaatcccattaacacttcagactaatcatttttcatccctactctgtatactttttcctgattttttagtatttttcttaatgatttctctgtcacctaagaatcatctaagctggaagcccagagtcatcttacgcatatcttctttccttgtcttcttctacattgtcttctccaacctgtgctttctcaattttttctcctttaacttacctctgcattgctacaatttgcttcctgatgcacatatttg

SEQ ID NO: 469471 - DNA, 619 bp, Homo sapiens
gaaactagcagtcaggtaacctccttatattgctaatatgtactgagtttgaagtacaatatactatcccactctctcgactgagctaattttgatattttcatggatagctgtttggcattttcaaagcttgaatgcatatgcatcttaattatccctttggttgtatgaaagttgtatagtataaatgattctatactgaattcctacatgatcctgcttttgttttgttttggtttttgcttatttcaggtatattagtatttaatttttgtgatttgtactttcatatatgaaaacaactgttaatactttttgtttcttaaccgctattaagtacttttgacctggatctcagccagtgttaatgctgttgctactacttgataccattgtaaattataagcagtttagttaatgcaacatagtatttgtcttttgataagcaacgtgaaaaatgttaaataaatcagaagtggtcagtggttccaataggctacttgttcttaacaggctactagagagaaacttctccaaaatttgttaatgctgccaacagtcaagcatgtgggctcctcctgaaacattcayttccccaggccaagaccacagctcatag

SEQ ID NO: 469472 - DNA, 652 bp, Homo sapiens
tccgactctggcataacattatgaaacgaggaaaaaaatacttaatcccaaaatgtatttatttgccataccttgaaattgccctgcaaaatctcttgtgagaaaaatccacattctatagagaatcctcttcccactttgttttccttccttccttcccagacccwggagataatcaactaagagccaagcacccttttaagtccaatataaaacaatttacaacccactctctctcaagtctgctaagagcttcctctgcacaataaaacttaatctccacaatcctttatcttcaatccgaacattcctttctattgatcccaggtcttattgtcaaccagaaagtgcttaaatttacctatagcctggaagcccaccccccatccccccaagccccactttgagttgtcctgccttcctaaaccaaaccaatgtatttcttaaatgtatttgattgatgtctcatgccttcctaaaatacataaaaccaagcagtatcccaaccacattgggcacatattctcaggagctcctgagggctgtgtcacaggccatggtcactcatatttgactcagaataaatctcttcaaatattttatagagtttgactcttttcatcaatgataccctgaaaaaaagaaggcatct

SEQ ID NO: 469473 - DNA, 501 bp, Homo sapiens
tgttaattgacaaggtaagtaattgtcttctgattacagtagttaaaggctgttctctaatggattttacttgtcacttttaattctttttaatctttgtctgcatttcattagaatggctttatcatttggattgccctcctgttggttattctgataagatttaatgggttatcttccaactatgacaatccctcaaaaatataatagagtgatatttagattcttccgggattttyaaaacacgattgcttttccaacccattttttctcttttacacttcacatttttgcaaatcaagtattttgcattttctacatgccctgagcaagtttctgctttaatcttccatgacttaatctattgactaaataggagatagttggtgaggcagttaggaaagagcctgttatcattttctattctgcttacctgctgtgattttatttatttatttatttaatttacaagcaataggctttaactgcagttttctaaga

SEQ ID NO: 469474 - DNA, 549 bp, Homo sapiens
gctaggaaaaaaaaaaaagtaaagtctttcaaattaagtgacttagatgtaaattagatgtaaatcacacatcattttaaagagagaaaaacaatttcctttcaaacatggtgagacctagccaagtcagcaacagaaacaaatatgtagtaacaggtggcaaaaagtttattattttacaatatttctctattagatttgcctcartttcttgggttgagtattttcagagctttgaatgaatactggaatttaaacaagttttctcggtaaaagtcgaaagtagataactagcctcaggaaagctaaaagtgtgtgcaaaagggaatgaaagcatgatatggtggtcttggtcataatcaaaagcaaataaacaagcatttgattcctgaggattttaaatttttcaaggatagacaatacatcccacaaagagcacaaataaaacatacttttatctttccactttcccttgtgtggctcattctccctctcactgtaaccacctacaaggattcagtgcctttctatggcacttcatactgaggg

SEQ ID NO: 469475 - DNA, 639 bp, Homo sapiens
gttggagggttatacagagattagtgtcaattttcaccaagagaaaatgaaacagaaaagactactggagtggttttcctggccacagagtgaagagggaggatctgcatcccaattgaaaggtggctgcgggtccctttatcttgcaggctgtatgagagagttatgtttggaagctgactgtggcccatttgccatcctaaaagggacttgctcctggagaatggctgaaacagaagttacccaggaaaggagtaggaagccagcttggaagaaagcagctttctgaaggagacattgaccatagtaagggaatagttatatggaagatgacctataggaaatgttccttagaaaccccagatgaaccccaagaaggaactagagagggggcatctgtcacatctgcctatgatgcaactgacaaccactccagctccatgaaactttgctcatcttcgtgaatcttctatttctccttgttctgaccccygaaggttagaaatagcatcatgaaggataaaaggggtgaaatgaatacgagagaagacacatctccaaatacagcattacgagactgggactggcccatgctgaggagaggggacgcctttaaagaatacattgaacatttttaat

SEQ ID NO: 469476 - DNA, 639 bp, Homo sapiens
gttggagggttatacagagattagtgtcaattttcaccaagagaaaatgaaacagaaaagactactggagtggttttcctggccacagagtgaagagggaggatctgcatcccaattgaaaggtggctgcgggtccctttatcttgcaggctgtatgagagagttatgtttggaagctgactgtggcccatttgccatcctaaaagggacttgctcctggagaatggctgaaacagaagttacccaggaaaggagtaggaagccagcttggaagaaagcagctttctgaaggagacattgaccatagtaagggaatagttatatggaagatgacctataggaaatgttccttagaaaccccagatgaaccccaagaaggaactagagagggggcatctgtcacatctgcctatgatgcaactgacaaccactccagctccatgaaactttgctcatcttcgtgaatcttctatttctccttgttctgacccctgaaggttagaaatagcatcatgaaggataaaaggggtgaaatgaataygagagaagacacatctccaaatacagcattacgagactgggactggcccatgctgaggagaggggacgcctttaaagaatacattgaacatttttaat

SEQ ID NO: 469477 - DNA, 555 bp, Homo sapiens
caggaggctgaggcaggaacccaagaggtggaggttgcagtgagccaagatcatgccattgcactccagcctgggtgatggagtgagattctgccaaaaaaaacaaaacaaaactgaaaaygaaaaacaatgggctctccaagcctggctaagagtctggtttgtgtgcactgagtggaaataatcaggccactgatgtgattagacatggaccttgcaaaggcaattggaagccatatggagaatggaacaggagtaggagagaggagaagcaaggcgacaagttaagaggctactgcaattgcccaggggataacaaacgggatgaagggaaccaagacaacagacgcggggaagtgagtgagcccagaaatactaaagaagaagaaataggcactaggtcaactaggtgacaagttagatacagactgaaaaagaacgaatttatgaacaatgtcagatttctctaacttgcaatgaatggtggtaccaacagagaagccaggaaatagaaaaagaacagcaagaggatcccatctggctgctgcactgagg

SEQ ID NO: 469478 - DNA, 549 bp, Homo sapiens
catgttatttctcagaatcaatttttcaaagaattattaataaccttcaaggcaaggcaaaatatatattacctaattacaccaacaagtaaggaaacctctgttttttctacattaagggtactgcataccataatttagaaaacttttgagctaatctaattgttttaattttcattaggctgaatagtttttcctttttaaaaaacaagcttgtagagatgttattytagggagaggctggatgaaggctgcatgggacctccctctgcatttctttgtactttcctgtgaatttacaaatattgcaaaataagtaaaaaaaaaaaaaaaaaaaaaaaaaaaaaagaaaacccatacctatctgtatttgtgtgtatgtgtgtgtgtgtgtatgtgtgtgtgtgtgaattatggcctttttccatttacttgttaaagttttaagttacttgatattatttgtttattggttacatatgaaaaacattatcattgatttagcattatctcagtctgtcaatttcactgaaaatatttttcccagtc

SEQ ID NO: 469479 - DNA, 571 bp, Homo sapiens
ttctatgcatttttctctcctcctaatgctctgttcggtaagcagggtctcttagactattaaagatgaaaacatccagcccataaatgtcattcctctctggccatgcagcccactggggtggtgatggggtttttatagttgctattgtggtagtgattatagttataaaagtgacaactactatttttttaatatatgtaccttgtggtgattctataatgaaagcattattatcctcattttacagatgagaaaaytgaagctccaaattagtttgtgcaagatcacaaactattaagaggcagaacccatttgcagactgcgtcttgagatcccacgcagaacctcgcagctgagtgtccactgtggataagatcacctagaagcaaactagcactcagctgagcccatccagggccacctactgaccctcccctaccagtcctgcctctcacccccctactctctcccccagcggaacaagtctgtcttttgttccaggggcatgtttctgccctccatacacttgtggcttagtcaataaagacaagatagctctgtccaccca

SEQ ID NO: 469480 - DNA, 510 bp, Homo sapiens
ttttttcttaggatttagcagtactccaccgcgctacagcagttagcatttctaaagcacacactccaacacccttcggccgtagcacattcaatccctccgccggggcgtgggggtctcctcccctccgagcacagtccccggcttcccgatytcctctgccccatccccccgccttccaagcacattgtgctcactcttccaggcagctctttcagcggccgggcagtagcagggttccgagcccgtcttctccggggcggtcacacgtgtccattccctggggttggggatcgctcttcccgcttggctgctgattggtgcctccccctaccccacccttcccgccgctctccagcctccatcctacttcgttccagctcaatcagccccaccgccttcttccctcggagaaaaaagccacttcagagctccttgggcgccgttctcggctggaataaaagcgttaagaaacaggtggaaagcacttcacttctctaggcttcatat

SEQ ID NO: 469481 - DNA, 272 bp, Homo sapiens
catggtagccagaatgccatttttktctaagtaagatctttaaagtctgaaattctagcccacatgttgtttgctcagcatttttgttggacatccgtaacaacatttttaatcctacactgattgctttctcacccaagatgtttccgaaacaccattccaggtcctgcattagtgtcctgggattggtgtgcttggaatgagaagttaatgctactatcagttcacataaaaggttagcgaggtaaagatgccaccaacatgttagttca

SEQ ID NO: 469482 - DNA, 561 bp, Homo sapiens
accaggctagtcttgaactcctgggttcaagcaatcctcctgcctcagcctccccaagtgctgggcttacaggtgtgagccaccacacccggccatggttactttttttttttaagtttggtaaagttttaatgaccargtctaagggttggagtgagtagggattactctgttagcaggctctgggaatctcatggtcatgtagaaaaagggattcctccacaatggggagtgtggtcatctccctcaattgcagacacaccttgagttcagggagacatctctccacacttggaccatcttcacagaccctggcagcagtcgatgggcaaagctgtgtaacagtgatggccgtttaccattgcctggtattcattgtccagcacgatgatgtggagctcaaatactctgccatcctcagcgggcatattgttggatctctcctcacacttccaggcccacactcatggctgttcatgatcacccaatggccaaagtacactcagaaatggaaggcgatgtctgagtgctcatcgtccccctgtggaaatgcacctgcag

SEQ ID NO: 469483 - DNA, 423 bp, Homo sapiens
cattaagtggtggcatttgacaccataaagaggtttagggaagatgtggaatctattaggtgttacaacagaagatggtcatgtgagcatccactgccacccagcaaagcycagggccctgtggcaatggggcatcagttcaaaggtgaggagggtgagagcagggggttctgcccaggaggactgggagacaggtgtgagagtcccagcagacactgggcaccaggtatggtgtgaccaaaaagagataggggtggagatggctgatggattcaaaaaaaaaaatagaaagaatgaataagacctactatttgatagcacaacagggtgactatagtcaataataacttaattgcacatttttaaataaccaaaagagtataattggattgtgtgtaacacaaaggaatgcttgaggggatg

SEQ ID NO: 469484 - DNA, 635 bp, Homo sapiens
ccaaggagtgtctcttacaggctcataagtccatctatcatctgtgatcacgatgcaggatcagccatgtcttccctctgccttatctacattctccccsacactcaacaagagagtctcatttctgttgcttctgacagtacccatcacaaatacatcaacatatgccaacatccactccaaaagtgcctctcctggtggggcacggtggctcacaccagtaatctcagcactttgggaggccaaggtggttggatcatctgaggtcaggagttcaaggccagcctggccaacatggtgaaaccccatctctactaaaaatacaaaaattagctgggcatgctggctcacgcctgttatcccagctactcaggaggctgaggcagaagaatcactttaacccaggaggtggaggttgcagtgagccgagattgtgccactgcactctagcctgggcaacagagtgagactctatctcaaaaaaaaaaaaaaaaaaaaaaaaatgtgcctctcctgacacctccagtgcttacagattcattctgccttctatacccaagtgaaaaatcccctttccctgactctgcatcactctgtcgtatgggacagggcatccttcagcaactccataactt

SEQ ID NO: 469485 - DNA, 635 bp, Homo sapiens
ccaaggagtgtctcttacaggctcataagtccatctatcatctgtgatcacgatgcaggatcagccatgtcttccctctgccttatctacattctcccccacactcaacaagagagtctcatttctgttgcttctgacagtacccatcacaaatacatcaacatatgccaacatccactccaaaagtgcctctcctggtggggcacggtggctcacaccagtaatctcagcactttgggaggccaaggtggttggatcatctgaggtcaggagttcaaggccagcctggccaacatggtgaaaccccatctctactaaaaatacaaaaattagctgggcatgctggctcacgcctgttatcccagctactcaggaggctgaggcagaagaatcactttaacccaggaggtggaggttgcagtgagccgagattgtgccactgcactctagcctgggcaacagagtgagactctatctcaaaaaaaaaaaaaaaaaaaaaaaaatgtgcctctcctgacacctcyagtgcttacagattcattctgccttctatacccaagtgaaaaatcccctttccctgactctgcatcactctgtcgtatgggacagggcatccttcagcaactccataactt

SEQ ID NO: 469486 - DNA, 538 bp, Homo sapiens
cctcttcctctccttctcactcactcatccatccatctatacatgcaaacatttataggacayctattgtatgcccatgggtttagctgtgtccctgttttcaatgagctcacagcatagagggagagacaaatgattaaatggataattatagtgccacatgaatgtggataaatgtacattataagggatggattaatcatgaaacagccacacaatagtgtcctatacagccattaaaaagaataatatagtgtcatattcatatcacatttccattgatatggaaagatctccacagtatattaaatgaggaaagaggggagcagattgcaaaacagtatttacagtattttactctctttaaaattgtattttatatacacatgaatgctggaaagatgttcaccaaattatctactggttagctctgggttgtgggtttttgagggactttaatttactatactcttcttgtctttctgttttgtttatataatttaaatttttctaaatgaaatagctttctatgataaaa

SEQ ID NO: 469487 - DNA, 484 bp, Homo sapiens
tccccagccctcactcccagggctctggccacacaggcttctgtccacccacacctcctggctctggcctctcctggttggctcaggcctctgcatccttcaaagtgttccctccctccaggacacccacacagaggggcagatcccccagagcgccacactcctctcccacacaggctttctcctgccatgactctacactaagtttgtgcttacttggtttattgcttgcctcccccactagactgtcaatgtgaggagggcagasccaagactaggtctgctttggctcatttatcccccagtactcaagtggcatgcaacaaaattctgtggagagaagaaatgcatgagctaacctaggtcaacattacacaaactgcctcttaatgaaatgccaatgagagcttgtaagtaaaagtttgaaaatacagtgaactcttacctcacagtatgcattcgcgtaagaaaaaaaagaactcac

SEQ ID NO: 469488 - DNA, 606 bp, Homo sapiens
acatattcaaaatattttctagaccttttattagagtttgaacattttctccacagaggtcttgtgtactcttggttaacttttttttttttttgagacggagtctcgctctgtcaccccggctggagtgcaatggcgcgatcttggctcactgcaagctctgccccctgggttcccgccattctcctgcytcagcctcccgagtagctgggaatacagtcgcctgccactacgcccagctaattttttgtatatttagtagagacggggtttcaccgtgttagccaggatggtctcgatctcctgacctcgtgatccacccgcctcggcctcccaaagtgttgggattacaggcgtgagccaccgtgcccggccagttaacatatttatttcttagatgctgtatagattttcttgctattgtgagtgctatcttctctatgattcaaattcataattgtcattgctattaaatgttattatttagcttgtatcaggcaacactgttgagtatcctaatggtatatctcttggttctattgttttattttcaagtagatgattatgtaatctacaaacaataatagttctatttctacccttaca

SEQ ID NO: 469489 - DNA, 627 bp, Homo sapiens
ggaactctgggtacaatatttagtttttatttagcagaggtggataggtacacataagagatacataatatcctctctagggctctgtgtactttggcaggaacaggagcaatttcatcagtgtgtaaggactcctaggtggaaagtccgggtaaatggcaacatggttccagtttattccattgatgttttagagttgctgacagatgggcagcctcctactcatctgcccaatctgactccgcagcctggactgggcatctgctttgtgatgtagtgcttgaaaaatacaggtacgttgaaaggatttktaacttcagaaaatcatacacaaggcctgcatgtaaaaaggcatttcacacacacaggtgcactcacacacatacacaggagcgacttattagatatgagtgcataaacaccatagaaaatgtctgagtaaaggacaaaggaaaaatgaacagatgtgagaaggaagtgccagccggctgcctgagcagagcgaagctactgatgctgcatttgaaagaaacagacgacgttagcacaaccaagagatttaaacaataaacttttttttttttttttagagaactagtgatacagtattgtcatagcaagtagtga

SEQ ID NO: 469490 - DNA, 627 bp, Homo sapiens
ggaactctgggtacaatatttagtttttatttagcagaggtggataggtacacataagagatacataatatcctctctagggctctgtgtactttggcaggaacaggagcaatttcatcagtgtgtaaggactcctaggtggaaagtccgggtaaatggcaacatggttccagtttattccattgatgttttagagttgctgacagatgggcagcctcctactcatctgcccaatctgactccgcagcctggactgggcatctgctttgtgatgtagtgcttgaaaaatacaggtacgttgaaaggatttgtaacttcagaaaatcatacacaaggcctgcatgtaaaaaggcatttcacacacacaggtgcactcacacacatacacaggagcgacttattagatatgagtgcataaacaccatagaaaatgtctgagtaaaggacaaaggaaaaatgaacagatgtgagarggaagtgccagccggctgcctgagcagagcgaagctactgatgctgcatttgaaagaaacagacgacgttagcacaaccaagagatttaaacaataaacttttttttttttttttagagaactagtgatacagtattgtcatagcaagtagtga

SEQ ID NO: 469491 - DNA, 594 bp, Homo sapiens
cagcttcgccatggtcggggatagacaaagggatcgatgggcgcagacaccgacgggctaggaggctctgcctgcctgcagccgcagccctgctggggcagcgccgattggcccgccccgcccctccccgccgggtcsgcagctagctgggccgaccaggtgcacagaaggcgtggcttgcggtcagcccccaccgcaggagctcagcactttcagccaaaagtcccattttgctccttccaactgtaaagagagaagacagagaataggtgcctagtccagtcggggaggggaaatcaaacaagctgaagtaaattgccatgggaaaggacagtcaagctttggtgagcactcactttgtgccatcccggtccttgcgtctcagagagattcagtagcttgatcatggtgacagccaaaaaggtgcggaagggagggctgtagtaggaacccctaagatctaactgttctcaccaggctactactctgtgtcaccttccaacatctggatttcaagcatttttctctcaacaccactctgactttagagttcactcaagtacatcccccacacagctcattcatttcctcatg

SEQ ID NO: 469492 - DNA, 651 bp, Homo sapiens
ctacaccaaccacccaaaagcaattttgagcttttctggggatcacaagatactgcagactttggatactggaatgtggtggaattattaaatccttatatcaggctttaaaagaagggactaatagggacacaatctctgggaaaagaatcaggagcaagcctttaggtagttaaaaactgccctctcacaagccccagcccttgagctacccatactaaccaaaccatttcagtttttcatcactgaaaaggcaaggtatagcactaggagttctaactgaaacctttgggccagtcaaacatgctgtaggttayttttcaaagaacctagacccagcagcacaatggtggccacattgcctcaaggtagtgggtacagcagcccttattctcgaggaggacttcaatatcacaatgggacaatcaatctggctcctaatgtcccaccaaatagaccctttattgaatttaaaaggaccataatggctcactgacaacacattgataaagtaccaagtcttgttgttggaaaacccacaggtaacagttgagcagtgttccaccattaacccagccctcttactgccactaccaggagatgataactcaacatattcatgctgtgagattcttaacaaaatttatgcca

SEQ ID NO: 469493 - DNA, 668 bp, Homo sapiens
agcatttctacattaaaaaatctgttttaaaacttaatccagatacacaaaagagaaaacacatctgccgttctacccactttatgccagcccctttcctcttctctccaggggaagaggaaatgctaaccagattgataaggttcaaaatactcctttggccacacttaaaagtgcaagaattcactatgcacttaaagtgcaatatctgcacacagattctctcttggccttctttcttggggctgagcatgtaaatcaacctggaattgccaccaaggaaaggcagggccttccaggcctttggaagctggtcatygttcttactactgtaacttgtgctgcccagagagtgcttaacatgccaaaacagatattggggtagggggccctgcttaggtttacatgaatgcttttaaaataaacactgataaatggagtgtgtctggaggaaggtaaccctttgagaatcactgatctaggatatgtggatcagataaatcgccctggattaactgcccctccccttctctcctcttgaaagataaattgtaattcaaggaggcagccatggatgaggcaaaaattgattctgctggcaaatcagacttgagtcctatgtataaacattcagtccgtaaaagtgcattcttatcctcatccaaaaa

SEQ ID NO: 469494 - DNA, 514 bp, Homo sapiens
cctttggccacacttaaaagtgcaagaattcactatgcacttaaagtgcaatatctgcacacagattctctcttggccttctttcttggggctgagcatgtaaatcaacctggaattgccaccaaggaaaggcagggccttccaggcctttggaagctggtcatcgttcttactactgtaacttgtgctgcccagagagtgcttaacatgccaaaacagatattggggtagggggccctgcttaggtttacatgaatgcttttaaaataaacactgataaatggagtgtgtctggaggaaggtaaccctttgagaatcactgatctaggatatgtggatcagataaatcgccctggrttaactgcccctccccttctctcctcttgaaagataaattgtaattcaaggaggcagccatggatgaggcaaaaattgattctgctggcaaatcagacttgagtcctatgtataaacattcagtccgtaaaagtgcattcttatcctcatccaaaaa

SEQ ID NO: 469495 - DNA, 483 bp, Homo sapiens
gggtccatcctggctccaatatccgtccatctgccaactttrtaatcttggggacactcaagtaactttttggtgcctatttctttttttttctttgtgtgtgtgtgtgtgtgtgtgtgtgtttatttttagtggagacggggtttcgccatggtgatcaggttggtctcaaactcctgacttcaacttatccacctgccttgacttcccaaactgctgggattagaggtataagccaccactcctggcctagtgcctgtttcttaatttacaaatggagataacaatagtgcctaacttataggactgttgtgaggattaagggagttaaaacatataaaacccttagagcagttgttcgggaggccttgaactctgcagaaaacaaggcaaatggatagcattgtttatttactcttgggcccgctccttccttttccactccctctaatcatagtgaacacttactgacctcttataatg

SEQ ID NO: 469496 - DNA, 594 bp, Homo sapiens
tatgaatccagaaggtgtctctggagtccaagctctttgccatacagccatgctcttctgtgagatactaagtgacataacactttccaaccattcaatccaaagtacaaatttatctccactacactacagatgctacttcacatcagtaataaaaataaaaggaaaattgtcctagatgaatttccactggtgttaaaataatgcctgtaatttcaaagatgatatttgattaaatcaatcaacttattaaataacttatagccttcgttttttatcctatagtggacatttcctctttcttcctcctcttagtataccacaattctcacttcaatatcytcctccacccattcagtccatgagtattggtatatactgatgggtttaagccaaaccacccaccccatcacctggtcacaggaattaatacagagagggcacataatccaattcaggccaataaaacaagagatgtttgctggaggcttttgggaagaaagcttcactattctcctactgaagcctcattgaagagataatcttgatccttctgatcagtaggacatttgaatgtgaggcctagaattgcag

SEQ ID NO: 469497 - DNA, 594 bp, Homo sapiens
tatgaatccagaaggtgtctctggagtccaagctctttgccatacagccatgctcttctgtgagatactaagtgacataacactttccaaccattcaatccaaagtacaaatttatctccactacactacagatgctacttcacatcagtaataaaaataaaaggaaaattgtcctagatgaatttccactggtgttaaaataatgcctgtaatttcaaagatgatatttgattaaatcaatcaacttattaaataacttatagccttcgttttttatcctatagtggacatttcctctttcttcctcctcttagtataccacaattctcacttcaatatcctcctccacccattcagtccatgagtattggtatatactgatgggtttaagccaaaccacmcaccccatcacctggtcacaggaattaatacagagagggcacataatccaattcaggccaataaaacaagagatgtttgctggaggcttttgggaagaaagcttcactattctcctactgaagcctcattgaagagataatcttgatccttctgatcagtaggacatttgaatgtgaggcctagaattgcag

SEQ ID NO: 469498 - DNA, 594 bp, Homo sapiens
tatgaatccagaaggtgtctctggagtccaagctctttgccatacagccatgctcttctgtgagatactaagtgacataacactttccaaccattcaatccaaagtacaaatttatctccactacactacagatgctacttcacatcagtaataaaaataaaaggaaaattgtcctagatgaatttccactggtgttaaaataatgcctgtaatttcaaagatgatatttgattaaatcaatcaacttattaaataacttatagccttcgttttttatcctatagtggacatttcctctttcttcctcctcttagtataccacaattctcacttcaatatcctcctccacccattcagtccatgagtattggtatatactgatgggtttaagccaaaccacccaccccawcacctggtcacaggaattaatacagagagggcacataatccaattcaggccaataaaacaagagatgtttgctggaggcttttgggaagaaagcttcactattctcctactgaagcctcattgaagagataatcttgatccttctgatcagtaggacatttgaatgtgaggcctagaattgcag

SEQ ID NO: 469499 - DNA, 594 bp, Homo sapiens
tatgaatccagaaggtgtctctggagtccaagctctttgccatacagccatgctcttctgtgagatactaagtgacataacactttccaaccattcaatccaaagtacaaatttatctccactacactacagatgctacttcacatcagtaataaaaataaaaggaaaattgtcctagatgaatttccactggtgttaaaataatgcctgtaatttcaaagatgatatttgattaaatcaatcaacttattaaataacttatagccttcgttttttatcctatagtggacatttcctctttcttcctcctcttagtataccacaattctcacttcaatatcctcctccacccattcagtccatgagtattggtatatactgatgggtttaagccaaaccacccaccccatcacctggtcacaggaattaatacagagasggcacataatccaattcaggccaataaaacaagagatgtttgctggaggcttttgggaagaaagcttcactattctcctactgaagcctcattgaagagataatcttgatccttctgatcagtaggacatttgaatgtgaggcctagaattgcag

SEQ ID NO: 469500 - DNA, 495 bp, Homo sapiens
gctcaaaaatctgcttgatgcctctctcctaactctggtggtttgctagaaatctttcgtattctatggcttatagatgcccccaatctctgctttcttgttcacatgacattcttcctctgtgtgtatctgtctccaaatttcccctttttataaggacacaggccatactgtattaggggcccaccctactccagtatgatctcatcttagtttaaatcattacttctgcaatcactctattttcaaatcaagtcacattcgagggcactgggcactgagatttcagcatatgaatttggagagggcagacacawctcgacccataacatcatgtttagtagaagtttgaacacagttaatcccagaacctctatcctggactcagtgatgagtggggttgacctatagtctctggcttccttttgacttcatttaattctatatccagaaatgaatattttatagactgggataggtattcacctgagtaca

SEQ ID NO: 469501 - DNA, 624 bp, Homo sapiens
gtgaatatttatgtttcatggaaaaatatcaatgtttgattactgtgtgctgccccaggcctcactgcaaatgttgtttaatatatggtctatgttctctatgaacctcctaaaatctgaaaagtctacrttttgaaacatatttactcccaagagtttctttagggttagggatcatccacctatagttaccaaacttcacctcttaggtgttggtattgtatataaacactagtgtggaattaagttccatcatctttgattatattagtttcaaagaatattcaaaatagttcctacctaacaaagtatttatggatgaaataatttaatgtctgggatttgttcaaaataatatgggagagaggaagcagttgtcaagaattttgaagagtttcagattttaccctacttgccaggctcacaagttactctgccagttttatggatactggcaaaagacacaaggctcttgggttagagaaaaaggactttattatccacagaacagaaagcagcatgagttttatgttcacatcagatctctcttggttttcaagtctcatggaggcaatgcaaagtggctcagttggatattgtgcaagcagtaggtttgcatcacag

SEQ ID NO: 469502 - DNA, 617 bp, Homo sapiens
aaaccacttaccaccttttcccccaaaagagtaacaaattaaatctatagtctactgcacagttaatacataaacgataaaggtgtaatttgttttacctgcacacttgaaaataaaacactttttgggctatagaccaagaactttcagagaggttagcttataaaatgtgaggagacctggtatagaaacattcaccactatgccttaaggggtgaaaatttgtctttcacccctaatttcaaccattaacccagagctggaaaaatagaacatgtcattataccaaaaagcattttattatttttattttatatttaaggggtacatgtgcagattcgtaaaacaggtagactacatgatattgaggtttgaacacttaatwattccattgtctgagtagtttacatcatacctaagccaattttcaatgcttgtcacccttccttctcttattgttttcatctttgtttccatgtgcgcccaatttttagcgtccatgtatgagtgagaacatgtggcatttgtttttctgatgcatcagtttgcttagaataatggccttctgttgcattcatgttgcggcaaaagacattacctcattctcttccattgct

SEQ ID NO: 469503 - DNA, 269 bp, Homo sapiens
cattgtatatatgcaggcataagcaatgtgagggcagaaacatccatctctggtttttaacaccttcaaagtgattttttttttttcagaatgaatatcacttttctgcttaaactcagtagctttccattgcactcagaattaagtccaggttcctggagttttacttaaagtaccagaatatgaactgttgttayagatttgctatgacataacgtactgatgacacatggaaaaatcaatcatatcagtaagcacactgtttgatt

SEQ ID NO: 469504 - DNA, 563 bp, Homo sapiens
cttagaattaatgcatgtgtgcaattggcaataatagcatatgcttaatctcaagccacaaggattggtgctgacaacatagctgtgataccatggtatatttaatagcaatgttaactttatttataaaaaatattcttgacaatccatttcaaatataccaacattttttcctcagtatgtcacagaacttccccttatagatataaatgataccagagaaaagtcatttgacctttcctgaattgttrtattaattttagtaatgaatatacctaatgctaaatgatgagttaatgggtgcagcacaccagcatggcacatgtatacatatgtaactaacctgcacattgtgcatgtgtaccctaaaacttaaagtataataataataaaagaaaattaaaaaaaaattttagtaatgacttggggaaaaatatctgagccactgctaacttctttgagccttttccctgagagcctgagtatactgcaaactcctcagtcatgttgcatgttgcaggcagcctcaatgttggaatatgaaggcttatttaaatattgaa

SEQ ID NO: 469505 - DNA, 641 bp, Homo sapiens
aaaggatagaagtaactatattgcttgtgaagaaaagaaggcattagaataggggacattcaaaggagtaaatattttcttagcaaattacgtaagtgttttgtatatgtattaaggtttttcagtaaatctttcagggaaacatgaaagatgaggatagatagcaaatgccaagtaaccatggatcccgaaaaacagaaaattgatggaaagagctctccacagtaaagcatccaacaagtttaaagcaggaygagtatgctctattgatgatgagttgctaagggaaagactccatatcttaattcatgataagtgagatgataaacacacagacaatttgaaataggcatcatatggtgaaaagagcatttaaaaataattatacattcatacatatatgtacatataccaatacctaaattattattaaatacagatttttattaattgagcttatctctatattatgccaagaaagttttcagggcaatgtaatatattataatttatgattattagattaagatattggaagaagatattaacatgagttggactgtgagggttaattttagtaggattgaaattagcctgatatgttttactgaaataagaatgtactgagcactgaactatgg

SEQ ID NO: 469506 - DNA, 641 bp, Homo sapiens
aaaggatagaagtaactatattgcttgtgaagaaaagaaggcattagaataggggacattcaaaggagtaaatattttcttagcaaattacgtaagtgttttgtatatgtattaaggtttttcagtaaatctttcagggaaacatgaaagatgaggatagatagcaaatgccaagtaaccatggatcccgaaaaacagaaaattgatggaaagagctctccacagtaaagcatccaacaagtttaaagcaggatgagtatgctctattgatgatgagttgctaagggaaagactccatatcttaattcatgataagtgagatgataaacacacagacaatttgaaataggcatcatatggtgaaaagagcatttaaaaataattatacattcatacatatatgtacatataccaatacctaaattattattaaatacagatttttattaattgagcttatctctatattatgccaagaawgttttcagggcaatgtaatatattataatttatgattattagattaagatattggaagaagatattaacatgagttggactgtgagggttaattttagtaggattgaaattagcctgatatgttttactgaaataagaatgtactgagcactgaactatgg

SEQ ID NO: 469507 - DNA, 503 bp, Homo sapiens
aatcatgttaggaaacaataaggactttaaaagcccagtagtaaaaaataaacaaacaaaaaactatattaatatcccctagatatttggtgcaaagaagtaattggataaaattactgyttaaataatatttatttggttagattgttcaaaattttaaatttgcttttgtgtttgtttaattagttaatttgtcctaataggaaacatgaaatctatggatcagaaaacagaccatttacttacagagcatcttagcagggcttcagtcaatttccccaagttttgcacaatgaggacctgatgacatttgtgcatacggcatggtttgcatcacaaggaagaaaccccaaaattctgagacttggagcttctataataaggctgacatgtcatactttcttcccttcagagagcaagagagagaaagagagattggcttttactccataatgtaaacaagtaaatcctttccaggaaggaagagggcactgccctggaag

SEQ ID NO: 469508 - DNA, 591 bp, Homo sapiens
ctgtaaaaagggaagaaattcgtggagattacgttggcaaaattcacaacgtattttcacagaaatgctaggaattgtaaaaactcccacaatacaagtttacctaggttaacaaacctgcacttgtacttctgagcttaaaagttaaaaaaattatactatgcacactatgtgtatatatgttatatgtaatatatgtaatatatataacatgtattgtatacatgttatatataatacatattatgtatacgttatatatgtaaaatatatattatatattttatatatataatgcttattacatatatattttggtttttgttttgctttgttttggcaatgcatagatttgagaaacattaaatgttcacaattatccaccaaaagataattwtaagtaaaataaatttttagtaaatgtttattgagcagttgacagctacttttcacatacttttctctagagatcacaattttaatcagaaccagacaattaaagtcatagacatgataaagtagattattatttgatatcataagcatacacaatagccttaggtttttgaaattccgaattttcaacattgt

SEQ ID NO: 469509 - DNA, 597 bp, Homo sapiens
gcttaatgctggaaaatgccatttttataaaattgatcctatatgggcaaaatgactatgaagccaatgttattttattattatacaagctatgtaatgaaagtaaaatttatgtttagaggaattaacacaaaatagaactcrgttctattgtctctattcaaacatttttattgcattttactgttacaacagaaatatatctgaagtagactgacactcccttgttcccttaaacaaggtagatgatgcatttttatgcattagtacttccattataagtgtcatttattgactggggctgtgaaacaaaaatgcccttggtgacccctagggccttatagccatgataatgggctccactttaaggggaagcatcagagctctaatcctattttgtttttattatcaaataaaaacaagtccttgacattccattcatcagactgaaaattgtttggtaaaatgtggtggaagttttagatgagttagcagagaagactctctatataagaagcatttttatactgctttaaaaatgtctaagattgaatttaatgaaataactgaaagttataagagattattattttggca

SEQ ID NO: 469510 - DNA, 597 bp, Homo sapiens
gcttaatgctggaaaatgccatttttataaaattgatcctatatgggcaaaatgactatgaagccaatgttattttattattatacaagctatgtaatgaaagtaaaatttatgtttagaggaattaacacaaaatagaactcagttctattgtctctattcaaacatttttattgcattttactgttacaacagaaatatatctgaagtagactgacactcccttgttcccttaaacaaggtagatgatgcatttttatgcattagtacttccattataagtgtcatttattgactggggctgtgaaacaaaaatgcccttggtgacccctagggccttatagccatgataatgggctccactttaaggggaagcatcagakctctaatcctattttgtttttattatcaaataaaaacaagtccttgacattccattcatcagactgaaaattgtttggtaaaatgtggtggaagttttagatgagttagcagagaagactctctatataagaagcatttttatactgctttaaaaatgtctaagattgaatttaatgaaataactgaaagttataagagattattattttggca

SEQ ID NO: 469511 - DNA, 586 bp, Homo sapiens
aagctgaaaagatgcctaaatatgggccagctagattgtattcatgaaaaaataggagtaagatatttgatgtaaaattttagcaggggaagaaagaggtcattgcctttatagggctactgcacacatttgaaatataagagcatctgagcatgagccctggcatttggagagctttagatgtggaaaaccaggtcacagaagtgatcaaccaaaatgccattattcataaaatatatggaaaagagggagacgttatttcctggttgtctaaaggctgaacrtattaatatgaccagagaagggaatgggaattggaaaaagaattaaatcataaatcactttgaactcatatgggtagttgatgttaaaggatctgggaaacaagcataaaataatctgtagagagggcagtgaatgagaaggcatttatgaaggtggtgggaaaaaaggacaaccaggtggtaaaaaagaaatatgcacaagtggcagattgtggctatgagtgtttcgagagatggcaataccatttctgagtgctgtcccaaggacaaagatatataccatacttaaaggatagcagcag

SEQ ID NO: 469512 - DNA, 516 bp, Homo sapiens
caactattcaagccctctccatcccccatccccacaaatctatagtgataatgcttacaacaatgtttggtcctatcaattccaggtgaataaacttaggggagaatttctctgaattaccttttttttttttttttttttttttttttctgtttttgaggtggagtctcactctgtcacccaggccagagtgcagtgatgcaatctcagctcactccaatttctgcctcccgggttcaagcgattttcctgcctcagcctcccaagtagttgggattacaggctccaccaccatgcccgactaatttttgtatttttagtagagatggggtttcaccatgtttgccaggctggtctcgaactcctgacctcaggtgatccgccagcctcggcctcccaaagtgctataattacatgcgtgagccactgtgyctggccctctgaattactcttaatgtatactcttatttcctcttctcctgcacctctctctctcttttaaatgtctgtgcagct

SEQ ID NO: 469513 - DNA, 566 bp, Homo sapiens
aaaatcattgctacattttgagtgcctcttgagggtagacatttaaaaccaggctcactcattttattttggcaagtttgttcacagttcatagtgaaatgttaatcttaawtaatgttttaaagcgtagatttattgtgtcaagaaaattaccaaaagatgttgcaaaaatggtgaacataaaaagttatatttctgtcaaattcaaaagagactacttaattatttaaaaattactattagatatagaaatgctaaattataattgtgttgtagctgaggcatataatttaagaaatacatgtagaaatggaaatatttggacgtaagtgaagacattataaatatcatttgtttcctagatatggaacccatttctacaatttctttgccgcttccttgaattggaaaaatgtactttgaaagaaccgttaagtgaactattataatatttttgctgactacccagttgaagaaaagtttgttaattggatgggattttttttttttcacgttagaagacatgaagaaattttaaaagataaacatctatattgtgaaccatc

SEQ ID NO: 469514 - DNA, 621 bp, Homo sapiens
tatagttttctttttttattgcttaatgcttcacttttcttacttttctctggaaaagcattcagtatgtagtattagaatgcataaccttgtgagcatatttatagcatctcattttttaatactgtgatgaatgattaatcataaarggttcatcttttttatcctatgcaatatctaatgtatccatgatttaatactttgaaggtttttggagggatgtttatttgaaagtggaaatgtttatttttttaaatccttattctaagatttaaaaaatccttttgctcatgcatacgagccctctcttctgtttaagactcaagaggacttcgaaaagaaacgtaagtgttgaggagttttcctctactcatcttgggttcattgactaggattctgaaaagtagacagacaaaagtcaaattaacaagagaaaaacaacaacaaaaaaagctaataagaagcttattagcgggcattatgcaactgggggtactcagtggatgagtaacccaaagaaggggttaggacttggggaatatgaagcatcttaacaaaagaaaaatacatttgtagaggaattacaaaggaaagaaaaatgcttctggtttttagggacag

SEQ ID NO: 469515 - DNA, 621 bp, Homo sapiens
tatagttttctttttttattgcttaatgcttcacttttcttacttttctctggaaaagcattcagtatgtagtattagaatgcataaccttgtgagcatatttatagcatctcattttttaatactgtgatgaatgattaatcataaagggttcatcttttttatcctatgcaatatctaatgtatccatgatttaatactttgaaggtttttggagggatgtttatttgaaagtggaaatgtttatttttttaaatccttattctaagatttaaaaaatccttttgctcatgcatacgagccctctcttctgtttaagactcaagaggacttcraaaagaaacgtaagtgttgaggagttttcctctactcatcttgggttcattgactaggattctgaaaagtagacagacaaaagtcaaattaacaagagaaaaacaacaacaaaaaaagctaataagaagcttattagcgggcattatgcaactgggggtactcagtggatgagtaacccaaagaaggggttaggacttggggaatatgaagcatcttaacaaaagaaaaatacatttgtagaggaattacaaaggaaagaaaaatgcttctggtttttagggacag

SEQ ID NO: 469516 - DNA, 592 bp, Homo sapiens
tacatactggaatgggatcagatttgtcattagcaacactagatgctgaagacaactgagaaagtctttcagagtttagagggaaaataatttttaacttagaattttaagcctagcaaaactgcaatcaaatgtgaacaaagaacacaattatactcagacatctaagtatttggaatacttacacaccatacagtcctccccttctttctttaagttactgagtatgaactctggcaaacacaattataaatcaaaaagtaccacaatcagttttccacttggggatatagagagatgaaaaaagtgttcctactatctttttaatcatcaccaccatcatcttccaatggacaaacagtaagtttatgacttaggagtgctgagattacagagaaaccaactgcctgacaatttaaagagatactcctgacttcagggatggaaarttcatgagcattggtttactgggaaagatatagccagatataggaaagaagagtttaactagaaagagtggtacaatgctgggggctaatcaaggctgtactaatgagagaggacatttcatcctattgcatgtttttttttc

SEQ ID NO: 469517 - DNA, 592 bp, Homo sapiens
tacatactggaatgggatcagatttgtcattagcaacactagatgctgaagacaactgagaaagtctttcagagtttagagggaaaataatttttaacttagaattttaagcctagcaaaactgcaatcaaatgtgaacaaagaacacaattatactcagacatctaagtatttggaatacttacacaccatacagtcctccccttctttctttaagttactgagtatgaactctggcaaacacaattataaatcaaaaagtaccacaatcagttttccacttggggatatagagagatgaaaaaagtgttcctactatctttttaatcatcaccaccatcatcttccaatggacaaacagtaagtttatgacttaggagtgctgagattacagagaaaccaactgcctgacaatttaaagagatactcctgacttcagggatggaaaattcatgagcattggtttactgggaaagatatagccagatataggaaagaagagtttaactagaaagagtggtamaatgctgggggctaatcaaggctgtactaatgagagaggacatttcatcctattgcatgtttttttttc

SEQ ID NO: 469518 - DNA, 652 bp, Homo sapiens
gggccccagagctggagagggatgttttaagctggtgacaagtggggaactgcctgggatggcccccagaacactcaccgctgatatggagagcctggcacacctcagctagcccaggagcctcagcctgcagcccaccagtgaactctcactctatagaaacacaaagcaacccacacccaatacccgtcacccaggagacacacagccttcgtgcctgccccgttggcccccaacaccaccagcacagacacatgtacacacttacctccatagtgtgtggctgtgtcagcaaacacatgcactcacatgcacacacagagcaatatcagcatacacgtactcacacacacacacacacccctccatagtgtgtggatgtcagcacacacacacatatacacctccatagcgtgtggctatgttagcacatacacaccccgccatagtrtgtggatgtcagcatccatgtacttatacacacactcacacatacatctccatagtgtgtagctgtcaacacactcacacacacgtacacctccatagtgtgtggatgtcagcacacacacacacacacacacatacacctccatagtgtgtggctatgtcagcacacacacacacacacacatatacacctccatagcgt

SEQ ID NO: 469519 - DNA, 522 bp, Homo sapiens
agtggcccatgcagcactcaggtggctyccgtggaagctgctgaagaaggcatgccctgcacagacccatcagaccccacccgccgcagcttgccaaaaccagagagaaggcaacgagggcctggcagcaccttccagcatgggcgggaaggggaggcagcctgggaaaggcgtcagggcctccatatgctccgatggagtgagctgtgggggacggggattgcgctggatagtgggctggccaggaggctctggggacgccagtcccctccgtcacacagaggtgccaggtgatgcgaagaaagcgcagcgctgggaagaagaggcaggccagggaggaggggaaggtgcggggcagagcctgagacacctctgcccaccccacccgaactcccaaggctcctccagtggaaacagggcacaggtcgctgccgtgagcacccccagaactgcaggaagacgccagcagcaaagtctgcatttccaggagcactgagccctgagccattgtgagcacaagtt

SEQ ID NO: 469520 - DNA, 561 bp, Homo sapiens
tttttaaatgtgcttcttctcattgataaactgtatttttcaccaaaaatacttttttttttttgagatggagtttggctcttgttggccaggatggagtgcaatggcacgatctcagctcactgcaatctccgccccccaagttcaagtgattctcctgcctcagccttcagagtagctgggactacaggcatgcaccatcatgcttggctaactttgtatttttagtagagacggtgtttctccatgttggtsaggctcgtctcgaactcccaacctcaggtgatccacccacctcggcctcccagagtgctggaattacaggtgtgagccactgtgcctagccccaaaaatacttctatctgaattttgttatccttttcattatgtgtttgagaacagaaaccaattctcaggtcataacttaaggaagtgtgtatgtagaatgtattctatgaaaggtaccattacttagtggtaacagtgccatgatctcattcagaagcttgaagtatctccaagacaataacattacttgggttattgttaatcatgttcttt

SEQ ID NO: 469521 - DNA, 561 bp, Homo sapiens
tttttaaatgtgcttcttctcattgataaactgtatttttcaccaaaaatacttttttttttttgagatggagtttggctcttgttggccaggatggagtgcaatggcacgatctcagctcactgcaatctccgccccccaagttcaagtgattctcctgcctcagccttcagagtagctgggactacaggcatgcaccatcatgcttggctaactttgtatttttagtagagacggtgtttctccatgttggtcaggctcgtctcgaactcccaacctcaggtgatccacccacctcggcctcccaragtgctggaattacaggtgtgagccactgtgcctagccccaaaaatacttctatctgaattttgttatccttttcattatgtgtttgagaacagaaaccaattctcaggtcataacttaaggaagtgtgtatgtagaatgtattctatgaaaggtaccattacttagtggtaacagtgccatgatctcattcagaagcttgaagtatctccaagacaataacattacttgggttattgttaatcatgttcttt

SEQ ID NO: 469522 - DNA, 315 bp, Homo sapiens
atgtagatttggggaaaaaagggaaaggtagtcaaagaaatcaatgtgtaagaaccaagcaagtatcaaggaggttttacaattatttttggttttgtttatcaaaragttaaattattaatagtacatttgcagtcatattgcttactgcaaaacaccatttggaatttctacatatagcagggcagcctccatgctagtgaatgagatgtgtcttggcaagcaagctatttactacccctcataagcccacataggttgcaggttataattcagacaactgtatgagaaactaagtgttgtctgtaatgatat

SEQ ID NO: 469523 - DNA, 535 bp, Homo sapiens
atagattgctttattctgccacctctgtcagtgcctctggagaatataaaacgttatatcacaacataagcaacataacacacattcacccttctgaactcagtgctgcagttagaaaaaatggtgaagattgagcctttgcagctatggattagctcaggttctgggctgtattttctggcctaggtggtgatatgctcacaactcaagaagttctttaaagacagcctaccatgttaggctagatattgctggggaagtattacaaagactttagccctagataaaactggggaagtatttcaaatattcatatagggatattgagaccatttatgaaaagatgatccttcattctttytaagtcgaagttgttcagcacagtgttgtttataataggaaaaatgagactgcttgaaggtcaaaagtaggagattggcgggcagtttgactgtaagtgatggaatagaatgcgatatggagaaggtcagacacgtagaaactactcaaatggtttgtggcttgctgtggtttg

SEQ ID NO: 469524 - DNA, 597 bp, Homo sapiens
tttaagatgttgagataccaggggttggtcacagccatggccaggggcctgattgctcctactcttgccctgactaattcaggaacctctggatcttgtcatgatctgaaaatgaaagtttgtctcagaaagaaccttgctccagccaaatgtctggtgtctctaaggctgcaacaattgtattttgtttaggtcccctagataagatagcaaatcaggagaatggagcatgaggaagggagctgagctacttgtcaaaggcagaagagcatgtggtgaccggttggacagacggggtgggcactaagtataagatttcagtcttgcaatgtgctgggcagtgatgcctttacctgagacagcacaggaggggaagctggcatgtgcttcttggatgtcttacagacatctgaaactcatggtccctctcttccctgctctcaaataaggtcccctttcagggtccagtagmataagctgggaacttcaaggtcattcttgtcactttcctctcccttgcctgacatatccattccatcaccaagcttagtaggtcttattttctaaatctctcctcaattcccctccaccccatca

SEQ ID NO: 469525 - DNA, 597 bp, Homo sapiens
cccttcctatgtggtagtaacaaaaataagtaaaaacttgagaaagaatctyctcactccccacccccaaattcctgccagataattccataactagttcctgtccacgggcaactctattccacttcctgaagtatagttttcacagggaggcggcacagcctgttagaaaagtttgcctctactcctcaaaccctgctctatgtgaatgaattatcacatacatatgaatctaattttcatttcagatactgtccaacttcccaccttaccaacttaggaaaacttcatctttcttttcagttttatagatgatgtcattgttgattttaaattataaaatggaatgcttccaaaggaggttacagttcctgctgcaatatatcagtcttagaacatgaacaacttgtaattgttaagtgcatgttcaaagctaattgtgtggcatttggttgctgcttttcaggaaaacttttaaaagcagagtatattctgagcagtctaataagcaacaatggagcaacgggtgagtactttcatatcttcacaatgacttttacctcagccccgaacagagcactcatttaataacaactt

SEQ ID NO: 469526 - DNA, 597 bp, Homo sapiens
cccttcctatgtggtagtaacaaaaataagtaaaaacttgagaaagaatctcctcactccccacccccaaattcctgccagataattccataactagttcctgtccacgggcaactctattccacttcctgaagtatagttttcacagggaggcggcacagcctgttagaaaagtttgcctctactcctcaarccctgctctatgtgaatgaattatcacatacatatgaatctaattttcatttcagatactgtccaacttcccaccttaccaacttaggaaaacttcatctttcttttcagttttatagatgatgtcattgttgattttaaattataaaatggaatgcttccaaaggaggttacagttcctgctgcaatatatcagtcttagaacatgaacaacttgtaattgttaagtgcatgttcaaagctaattgtgtggcatttggttgctgcttttcaggaaaacttttaaaagcagagtatattctgagcagtctaataagcaacaatggagcaacgggtgagtactttcatatcttcacaatgacttttacctcagccccgaacagagcactcatttaataacaactt

SEQ ID NO: 469527 - DNA, 597 bp, Homo sapiens
cccttcctatgtggtagtaacaaaaataagtaaaaacttgagaaagaatctcctcactccccacccccaaattcctgccagataattccataactagttcctgtccacgggcaactctattccacttcctgaagtatagttttcacagggaggcggcacagcctgttagaaaagtttgcctctactcctcaaaccctgctctatgtgaatgaattatcacatacatatgaatctaattttcatttcagatactgtccaacttcccaccttaccaacttaggaaaacttcatytttcttttcagttttatagatgatgtcattgttgattttaaattataaaatggaatgcttccaaaggaggttacagttcctgctgcaatatatcagtcttagaacatgaacaacttgtaattgttaagtgcatgttcaaagctaattgtgtggcatttggttgctgcttttcaggaaaacttttaaaagcagagtatattctgagcagtctaataagcaacaatggagcaacgggtgagtactttcatatcttcacaatgacttttacctcagccccgaacagagcactcatttaataacaactt

SEQ ID NO: 469528 - DNA, 613 bp, Homo sapiens
tcaagaaagtatatatatatccaataaaaccctatgaggagggtagagcaaagtgtatcattccattttagagaaaaataaaatgcagtgcagagaaactaactaacctctgcagtttacacaaccagtaagagagagaactgggagctgagcccagatctctgaccagcccagagaagtgacaaggatgttctgctgctcttcacactgtgcttaaatggagtttttattatcgtctatattgccatttttattcaagaccccattattaaagataccattaaatcacaacagtaaccatgctcaatactaattagtgtagcaaaagaacacatacagcttgctgatggtaatctgaatctaagatgttgctttttctgtttgaccaaaacaggaggatcatgtcccttgttcactgaagttatccctgatgaccgtttaaaattgcaaacttccttcccatcctggrcctccctaaccccttctccatttattgtctctccagaacacttgtcataatctcaaatactatgcactttacttgttttgtatattgactggtccctcccccacaacagaaagtaagctccttgagggctcactgtctgctgtt

SEQ ID NO: 469529 - DNA, 533 bp, Homo sapiens
tgtttaagatgcatcctatttaggccaataacaaatttttgttgctagttagtgrctacgtagtagttgatgattgggaaacagacagctccaaattgttccagatgccaagagaaggccagactttgtcatcaataacttaaaaattagattgagatacagctccagacgcgttaagcgcattggtcctttggcatttgtcaactgctttacctccttgtgctaaaaatgccatgctcagaacatccaccaacaacagtgtagctcaaatgctaaaaagataactaaaaaatatactttaggaaagttaatgttttataaattgtaacaatcattccagttatcaagaaaatattgtttccaagaagcattttataagttggcacaacagacccatggaatggccaggagggagtagaaacctttctaagtgatttattgatttactataatgttttccactggaaagattaatgatatattccactttgctgaaaattacttctcttttgctcctgcaaaataatcctaga

SEQ ID NO: 469530 - DNA, 440 bp, Homo sapiens
gttttatgcatggggtgtgcagtctccacttaaattcctacctcarttaaggcctttggtttcattttctcccctctcaccttacaagacagtgaaaccagttttaagttcacagtttggcaaatacaatcaaggcaacggctagcttctatattgcaggtaactttttaggtttcagcctttacttctttttttgttttctgagtactgcttcctctcttgacattttattgacatattttagagatttaaaatgtttttgcagcattttttattgttttcagtgggagtgttagatagtcttcctcaatgctagaaatagaagtctacttttttatgtttttggtgacttagaagttgccttctcccttttaatgcagttttaaaatgctgacaaatgcctgttacccaataatatctttctgagccccacacttgcc

SEQ ID NO: 469531 - DNA, 440 bp, Homo sapiens
gttttatgcatggggtgtgcagtctccacttaaattcctacctcagttaaggcctttggtttcattttctcccctctcaccttacaagacagtgaaaccagttttaagttcacagtttggcaaatacaatcaaggcaacggctagcttctatattgcaggtaactttttaggtttcagcctttacttctttttttgttttctgagtactgcttcctctcttgacattttattgacatattttagagatttaaaatgtttttgcagcattttttattgttttcagtgggagtgttagatagtcttcctcaatgctagaaayagaagtctacttttttatgtttttggtgacttagaagttgccttctcccttttaatgcagttttaaaatgctgacaaatgcctgttacccaataatatctttctgagccccacacttgcc

SEQ ID NO: 469532 - DNA, 465 bp, Homo sapiens
actgaaggtgcgaccttttaggatctcagttttatgcatggggtgtgcagtctccacttaaattcctacctcagttaaggcctttggtttcattttctcccctctcaccttacaagacagtgaaaccagttttaagttcacagtttggcaaatacaatcaaggcaacggctagcttctatattgcaggtaactttttaggtttcagcctttacttctttttttgttttctgagtactgcttcctctcttgacattttattgacatattttagagatttaaaatgtttttgcagcattttttattgttttcagtgggagtgttagatagtcttcctcaatgctagaaatagaagtctacttttttatgtttttggtgacttagaagttgccttctcccttttaatgcagttttaaaatgctgacaaawgcctgttacccaataatatctttctgagccccacactt

SEQ ID NO: 469533 - DNA, 587 bp, Homo sapiens
gaggagagaagaaagcggggatggtgcacgcctgcgggtctggacgctgagcaaggcaggggtccrtatccgctcgtgggcttgactccaccaactagttgtgcagccacagggactgaactttggaggaatcgacctttttctttccttttaggattatttgaggtgtagagggtgggaagcgaagccgagacggccgaccccgccacgatgctgctgaagaagcacgcagggaaaggagggggccgggagcccagatccgaggacccgacccctgccgaacagcattgtgcccggaccatgcccccgtgtgccgtcctggcggccctcctgtcagtggtggccgtggtgtcttgcctgtacctgggtgtgaaaaccaacgacctccaggcgaggatcgccgctctcgaatccgccaaaggggccccttccattcatctgctgcctgataccctggatcacctcaagactatggtgcaagagaaagtggagcgacttctggctcaggtgtgagaggctggggtattttgcacgtgggtaacatcttgtacaagcgtgactctgtgtgcatgactagccgctaccct

SEQ ID NO: 469534 - DNA, 632 bp, Homo sapiens
ctggtaagtatcagagtaaggattggagccaggcagagtggttccagagcccacacatttgtccacagtactatgctgcttttttaaaaagtctttctattattattgttcgcatttggagaacattatcctatcaatgatctttttcaaaggggtgtttttatggatcattcatttattcacttaattagagaaatgatttygtgtgtgcctactttgtgctggcactgtgagggtttagcagtgaagaaatacatgacttctaccctcacacaatttcatttagcttacaattaggtaagataatataaattatatagcttaggattacaattggctttatatgattttaaaaatacaaattaagagtgatttaaacatgatagaaattgatttttcttttccatgaatagagtctggaggtaggttgcttagggctggtaagaaaactccaccatcatcagtgacccaggctgcttctatgttgctgctctgccatccgcatgctgcttgtggttcagagcatctggtctaagctccaagcatcctgtctgctttgcagccaacaaaaaggagggaaagggaagaagagcacttctcttaaggagacttgctgtatgttccactcacct

SEQ ID NO: 469535 - DNA, 632 bp, Homo sapiens
ctggtaagtatcagagtaaggattggagccaggcagagtggttccagagcccacacatttgtccacagtactatgctgcttttttaaaaagtctttctattattattgttcgcatttggagaacattatcctatcaatgatctttttcaaaggggtgtttttatggatcattcatttattcacttaattagagaaatgatttcgtgtgtgcctactttgtgctggcactgtgagggtttagcagtgaagaaatacatgacttctaccctcacacaatttcatttagcttacaattaggtragataatataaattatatagcttaggattacaattggctttatatgattttaaaaatacaaattaagagtgatttaaacatgatagaaattgatttttcttttccatgaatagagtctggaggtaggttgcttagggctggtaagaaaactccaccatcatcagtgacccaggctgcttctatgttgctgctctgccatccgcatgctgcttgtggttcagagcatctggtctaagctccaagcatcctgtctgctttgcagccaacaaaaaggagggaaagggaagaagagcacttctcttaaggagacttgctgtatgttccactcacct

SEQ ID NO: 469536 - DNA, 651 bp, Homo sapiens
ggtcattaaccaccctggtttgcccaggaccgaggagcttctcaggatatgggactcttagtgctaaaactaggaaactcctgagcaaaccaggacaaattggtgaccctatgcctatattctctatctctctctctcttttttttttacaccaagacagtctcactctgtcgcccaggctggaatgcagtggtgcaatstcagcccactgcaacctctacctcccagattcaactgattctcttgcctcagcctcccaagtagctgggattacaggcacgtaccaccatgcccagctaatttttgtatttttagtaaagacagggtttcaccgtgttggccaggctggtctccaactcctgacctcaagagatccgcccaactcctcctcccaaagtgctgagattacaggtgtgagccactgtgcctgacctcttttttttttacacaagttaattttcagtttcccctctagctttagaaaagatcagtgtttctcgttaagaaccacatgtattttggtttgcatttaggggctataggtatgaaaaacatatattttaaaataatagactcatgctcagtaaggtgagatgctcatagtataaaagcatatcaggaacagaatacatcctaggaaatagcagactc

SEQ ID NO: 469537 - DNA, 651 bp, Homo sapiens
ggtcattaaccaccctggtttgcccaggaccgaggagcttctcaggatatgggactcttagtgctaaaactaggaaactcctgagcaaaccaggacaaattggtgaccctatgcctatattctctatctctctctctcttttttttttacaccaagacagtctcactctgtcgcccaggctggaatgcagtggtgcaatgtcagcccactgcaacctctacctcccagattcaactgattctcttgcctcagcctcccaagtagctgggattacaggcacgtaccaccatgcccagctaatttttgtatttttagtaaagacagggtttcaccgtgttggccaggctggtctccaactcctgacctcaagrgatccgcccaactcctcctcccaaagtgctgagattacaggtgtgagccactgtgcctgacctcttttttttttacacaagttaattttcagtttcccctctagctttagaaaagatcagtgtttctcgttaagaaccacatgtattttggtttgcatttaggggctataggtatgaaaaacatatattttaaaataatagactcatgctcagtaaggtgagatgctcatagtataaaagcatatcaggaacagaatacatcctaggaaatagcagactc

SEQ ID NO: 469538 - DNA, 550 bp, Homo sapiens
tttcaggaaaattctgctcaaaagatctgacaaaaaggcttagaggttttyatagttgtgaacataaatcatgttttttactatgccaaaccctaattaaatcatttaaatcattagaggaaaaaaatccaggcattttaacatttctagtttcttggaaagtataattctagtcactaaagcactctaattttgtaagaaagatagttaggaaaaaaaaaaagtatgaaatgtgggtgtactctgggcctctagttttcagctagctttgtcttgtctttctaccctacaaaattttaaacacagtcatgctctcctccaaagtcaaaatgttgttaagcaagctggtaaataatcttactaggtttatattggaattacctttaacaaatgaagtatttcagcagagatctagaaaagaaaaagttgagaagaaaaaggaacaattactctcctcaaccagtccttattgagtgtgttctatgggcccagaactgtgtttcaaactctgaggtttggctttatattttttttttcaaagacctgacaa

SEQ ID NO: 469539 - DNA, 603 bp, Homo sapiens
tgtattgatatggaacttaagttttataagggagccataccaaataaacaagtaagcaaaaaataaaataatagcaagatcattgtcctagtttgttcaggctactataaccaagtaccataaactaggtggcttataagcaacaaaaatttatttcttacagttctggaggctgagatgtccaagatcgaggtgccaggagatttgctgtccaatgagggcccctttccttgttcatggatatgccctctcacagtgtcctcacatggtggaagagtctagggtcactctgggacctcttttataagagcagtaatcgattcatgaaggctctgcccctatgacataatctcctcccaaagacctcatctcctaataatgtcacctgagggttaagatttcaacgtgaattttgagggtctataaacattcagttcattacaagcatctacttcagatrtttcaacaggtaatctatggaaaacttctagtgcaggtcttagcagataataaacacttggaaaacattggcatctttttttctttttaaatttttcttcttaaaattacgtagtgtgtaaacctcttcaaggcatgcaaaac

SEQ ID NO: 469540 - DNA, 622 bp, Homo sapiens
tgaatttgggccaccattgagcaacatttgaaaccaggtcaactcacagatttttctcaattatttgaggaaataagttaactttttggccaaagctattttggattgctgccccttgcaatataaagagtcctgaagaatgcactaatttttacatgttattgtcaaccacttttcagcaaaacacccccaaatcaatccatgtgattctagctacaaaggttttgttcacacttcttttctcaatagaacaacctaggttgtgaggctcagctcaattctgttactaaaacaccttctgatcatgctttggtccaaatagaaccagctctcacaaacctaggctttatctctttatttaagaaacaaacccactccagtactactgattgagagcttataacatccagaagcttasagaaaagcctctatctatgaatattcgctggttatagtaataaagagacaaaattggtggtccgttagctccatgttcagggcatgcaggtaaaagaacagggtcatggaacaaggaagggatacaaaaaacagtttgaataaaaaataagacttcagaaagtctcttgttaacttttgttttaaggaaagagataaaaacaaa

SEQ ID NO: 469541 - DNA, 622 bp, Homo sapiens
tgaatttgggccaccattgagcaacatttgaaaccaggtcaactcacagatttttctcaattatttgaggaaataagttaactttttggccaaagctattttggattgctgccccttgcaatataaagagtcctgaagaatgcactaatttttacatgttattgtcaaccacttttcagcaaaacacccccaaatcaatccatgtgattctagctacaaaggttttgttcacacttcttttctcaatagaacaacctaggttgtgaggctcagctcaattctgttactaaaacaccttctgatcatgctttggtccaaatagaaccagctctcacaaacctaggctttatctctttatttaagaaacaaacccactccagtactactgattgagagcttataacatccagaagcttacagaaaagcctctatctatgaakattcgctggttatagtaataaagagacaaaattggtggtccgttagctccatgttcagggcatgcaggtaaaagaacagggtcatggaacaaggaagggatacaaaaaacagtttgaataaaaaataagacttcagaaagtctcttgttaacttttgttttaaggaaagagataaaaacaaa

SEQ ID NO: 469542 - DNA, 611 bp, Homo sapiens
tgatagtatattggtttaatttcttgctaagagaaacatcaggcaattaaatggaaatatatcagacacagawgaaaaaagtatgttatttaggagaatgacagaactcctttaaagaaaattctaaaatctgattccccatcctcccttttaacaagaaatataagaaattacagtgaaagtcaatggataatcatgattcaagatagtcaatttcctatgcataaaacttttcattaacacgtctatcactacacgagaacagcaaagaagaaagatgaacaagatcataaattataattttcttccagttctactttgaaagctttttttgaggctccaataaaagttctggttaattttagattactaatttgtaattcaaaacttataaacttcaaaagcatttatgaaaaatctaattaatatttctctttcatatattctttaaaacaaaagtaacatcttacttaaaataactgggacagaataactctactcagttagatctttgccctcactacctcacagaactgacacatatcacacaatatgactgtatattaggtaaaatacatgtatacatcaagaatgaatatattaaatttcag

SEQ ID NO: 469543 - DNA, 611 bp, Homo sapiens
tgatagtatattggtttaatttcttgctaagagaaacatcaggcaattaaatggaaatatatcagacacagaagaaaaaagtatgttatttaggagaatgacagaactcctttaaagaaaattctaaaatctgattccccatcctcccttttaacaagaaatataagaaattacastgaaagtcaatggataatcatgattcaagatagtcaatttcctatgcataaaacttttcattaacacgtctatcactacacgagaacagcaaagaagaaagatgaacaagatcataaattataattttcttccagttctactttgaaagctttttttgaggctccaataaaagttctggttaattttagattactaatttgtaattcaaaacttataaacttcaaaagcatttatgaaaaatctaattaatatttctctttcatatattctttaaaacaaaagtaacatcttacttaaaataactgggacagaataactctactcagttagatctttgccctcactacctcacagaactgacacatatcacacaatatgactgtatattaggtaaaatacatgtatacatcaagaatgaatatattaaatttcag

SEQ ID NO: 469544 - DNA, 611 bp, Homo sapiens
tgatagtatattggtttaatttcttgctaagagaaacatcaggcaattaaatggaaatatatcagacacagaagaaaaaagtatgttatttaggagaatgacagaactcctttaaagaaaattctaaaatctgattccccatcctcccttttaacaagaaatataagaaattacagtgaaagtcaatggataatcatgattcaagatagtcaatttcctatgcataaaacttttcattaacacgtctatcactacacgagaacagcaaagaagaaagatgaacaagatcataaattataattttcttccagttctackttgaaagctttttttgaggctccaataaaagttctggttaattttagattactaatttgtaattcaaaacttataaacttcaaaagcatttatgaaaaatctaattaatatttctctttcatatattctttaaaacaaaagtaacatcttacttaaaataactgggacagaataactctactcagttagatctttgccctcactacctcacagaactgacacatatcacacaatatgactgtatattaggtaaaatacatgtatacatcaagaatgaatatattaaatttcag

SEQ ID NO: 469545 - DNA, 611 bp, Homo sapiens
tgatagtatattggtttaatttcttgctaagagaaacatcaggcaattaaatggaaatatatcagacacagaagaaaaaagtatgttatttaggagaatgacagaactcctttaaagaaaattctaaaatctgattccccatcctcccttttaacaagaaatataagaaattacagtgaaagtcaatggataatcatgattcaagatagtcaatttcctatgcataaaacttttcattaacacgtctatcactacacgagaacagcaaagaagaaagatgaacaagatcataaattataattttcttccagttctactttgaaagctttttttgaggctccaataaaagttctggttaattttagattactaatttgtaattcaaaacttataaacttcaaaagcatttatgaaaaatctaattaatatttctctttcatatattcyttaaaacaaaagtaacatcttacttaaaataactgggacagaataactctactcagttagatctttgccctcactacctcacagaactgacacatatcacacaatatgactgtatattaggtaaaatacatgtatacatcaagaatgaatatattaaatttcag

SEQ ID NO: 469546 - DNA, 622 bp, Homo sapiens
atatagggatatccatatatatttgctacataaatattatttgatgattaaatttgttttgctttctttacatctgtagttttagaagacactattatcttggtctttaggaatataaataaataaaaaactaagaggcctcagtgtcctcagaattcctaggactaatgttaagggaaagagaatgtcagaattcaaaatgaggttctttagcacataatcgtttaggctaaaacttcacctaataactttatctctacacactttataattttactaagtatttacataatattgggtatatatcacatgaatataaaatgtttgatcaatgtacacagaacaaatttagagtgaagatcatcaaaccctactgaaagtcacattaatgctatatccatccttacaaggaaagaaatatagcatcctatttattgttaatgttgggaagttatttctatctggataaatcaagatttatatgtctcaagtgtgtgttagagatgaaataagagagactgtggtgagggaaagttcctgagtaaygtgctggaataagtccacacaactttattgctcatatttttgcctttacaggcataattgcagctgaacagtcatt

SEQ ID NO: 469547 - DNA, 589 bp, Homo sapiens
actcaggctgaagcacagtggcacgatcatagctaactgcagcctggaactcctgggctcaagcaatcctcctgcctcagcctcccactgtaatcccaaagtgctaggattacaggtgtgagccaccacacctggccttgcatttactttatacctggcgagtcagggaattgaagagaatsaacctcatattttgagtgtaagtcaattttaatttgtataattcttggtgaattatatacagtaattgtaattagaacacatgtaccttagaaactccttttacatttcataatttaacttaaattgcaacccaggggtataagcattgaatgtattgtttttatcctgttttacaagttagaaaaatatcactttctaaagtgagctgacttcttcaaagtagagatgaaacttgaatttgaacctgtgggctctaaattttgtgtgggcttcatgagatcatgttgccttctcacagaaataaatgttctttccttttatagtgacatgttagtggatggctggccactataagaaaaagctaactcaagaagctaagatggtctataaatatgataagaattga

SEQ ID NO: 469548 - DNA, 589 bp, Homo sapiens
actcaggctgaagcacagtggcacgatcatagctaactgcagcctggaactcctgggctcaagcaatcctcctgcctcagcctcccactgtaatcccaaagtgctaggattacaggtgtgagccaccacacctggccttgcatttactttatacctggcgagtcagggaattgaagagaatcaacctcatattttgagtgtaagtcaattttaatttgtataattcttggtgaattatatacagtaattgtaattagaacacatgtaccttagaaactccttttacatttcataatttaacttaaattgcaacccaggggtataagcattgaatgtattgtttttatcctgttttacaagttagaaaaatatcactttctaaagtgarctgacttcttcaaagtagagatgaaacttgaatttgaacctgtgggctctaaattttgtgtgggcttcatgagatcatgttgccttctcacagaaataaatgttctttccttttatagtgacatgttagtggatggctggccactataagaaaaagctaactcaagaagctaagatggtctataaatatgataagaattga

SEQ ID NO: 469549 - DNA, 452 bp, Homo sapiens
ctttttcttttgtggaaattgtatagcagctccttgtcctctcttttatagaattaattttgtaatatttgtttctgattgcctgtatccttctcacactgggattgaacctcaccaggaaactcctgggctttgcaccattctctttcaaagaatccatttgggttggaacaccagtagaatggtacattatagaaactagaatcacttcaccataaccttgcttgcatttttttcatatgtttttggatcttgatccatsaacaaaaatcattcaccacagccaattacaatgactttggggaagcgtttctttctttagtaattttggaaaccatagggaccatttaaggattctgtagatgaatattgtgaattaaaagaaagaagaaaaccagtgaggggagaaatcatattataatgaaaagtgttagctttttaaagatgagcag

SEQ ID NO: 469550 - DNA, 379 bp, Homo sapiens
ctgggatacactagcatggctctcttggttctttatggccagcctccattcttcttagatgtgtacaggccatatccattaaacaacattttgaatataatctgcggttttaagtgaatatttggaagaaaagttatttaaactgaatagataggaaaaaatatatgtatacacacatatggacattactatgtctaattttgaggaatgatagaaattttagcatataattaaccagtcatttatagattaaakaatctaaattgataagctatattttaatattactaaaatatgatacttttacaattaagatgttgctttttctagttccaaatggttgtcatggtaacaaaagtacattattggttttcttaca

SEQ ID NO: 469551 - DNA, 379 bp, Homo sapiens
ctgggatacactagcatggctctcttggttctttatggccagcctccattcttcttagatgtgtacaggccatatccattaaacaacattttgaatataatctgcggttttaagtgaatatttggaagaaaagttatttaaactgaatagataggaaaaaatatatgtatacacacatatggacattactatgtctaattttgaggaatgatagaaattttagcatataattaaccagtcatttatagattaaagaatctaaattgataagctatattttaatattactaaaatatgatacttttacaattaagatgttgctttttctagttccaaatrgttgtcatggtaacaaaagtacattattggttttcttaca

SEQ ID NO: 469552 - DNA, 593 bp, Homo sapiens
gttattacaactagccgtatctcttcctgtgtagatacagatcagaaaatttagggagggtaagttggaggcakaattaaatgtaaaacttggattcattctttcatgtacaccattctgattttccttcatttctagctgtcatggtgtgctgctttttttttccagccaattttcaatgtcagtttttgttaaaattgtttaaaattcttaaaactcccaggaaattataacttttaaatacattttaagctttatattgcttttggaagaggtgacacaatcctcagattgatgaatatttgatgtaattttttatttgagtaaaattttattgaagagtctattatgaaataattttcaagtgggcaacatatatgtatagtgtagctcataggtggagattaagcatattttctgctttttatctctttcaacaacaaatgctgtgaggtttacattattagcttataaccttatgtaagtggtgttaacgagacttaagattaacagcaacaacagcaaaaactcttggaaagagattaagaatttctgccaccactgatagttttttgattttgaaaaagtcactt

SEQ ID NO: 469553 - DNA, 544 bp, Homo sapiens
aatggttgttctgcttcctatgatgtcagcgagggctatagtcatgtgaggtcatacgtggcctacaacatccaagatggctgcctcctataactggcaacggatgtaagctgttggttgagaaatgctagtaagcaggtctcctaagttttcctccacatgacctctccatgtggctggtttctgagaaggagtacccaaagagtgaacatttcaagagaaggaagcagaagctaaaggtcccttaaggcctcctttctgtgcattcagttgctcaaaggccagcccagattcaaaggaggagaaataaacactcctgttgatctgatgtgcattaaagagaagaaattagtgagtcatttttaaagactgatcattaaatatagttaycctgttatattttttcataaatgatttccttctccattctacccctataaatttttctctatatgtgagaatttaaaatctgtggtttctttctatgtactaatctacacatagttgtgtttattatttgtctttgatgaatatattatatgat

SEQ ID NO: 469554 - DNA, 548 bp, Homo sapiens
gtggtcctagctactcaggaggctgaggtgagaggatcatttgagcccagggaggcagaggttgcagtgagccgagatcatgccacaaaactccaacctgagtgacagagtgagacccaagcttaaaaagaaaaaaaaagtcagatggttgtctaactccaggctttgtatattctggttcaggggttatggagaaacatggccaatgtgagaaacaacagcaactgtaagcccttggcaacacactaagaatatggttccccttaatacagagtccatggatatagaagctgcagccagtacactttatttctgttagtcatactctgtataattgatttgtaatctttttgggggcaggataactgtgcaggaattttaacaaactkgactgatctactgataaggagaaggtcagccttatccccacaagtaagcccacacacactggtactgccagttaactgaggagaaacttgtctctatgccaagtatcccctgctgagtaatcccttccactgccccagcatctgagatgaggatgtgga

SEQ ID NO: 469555 - DNA, 570 bp, Homo sapiens
gtcaaactctctttcctatctgatcacatgcatttctataagtttacagacagagaaaggaaggtgttttctttgttttaataaaaagaaaggaagagatacttttcaacacttcaaatcccatcagcctggtcaaagataatttgcatcgtttacttttattgccctcatcaatagatmcaattgtatttctgtttagcccctttattttttgaattcacttttacctttctgatcttatctttacttatttcattcaggattttaagaattactttacctctctatccttataaaacttctaaggacttctaactggcaattgtgtaatatcaaagccaattgtctctagttagacaattttaaatatgtacaatgatagctgttatccataacaaaattttaagattaataacattaaggtctgttaaaatgcaaatgtaacaataatttagttatatgctgtattttttctatgattctgttttttgggggatacatattctatatagcttaaattccttacttatgagcataaaccagagtaaagtaagggagtggatataaatc

SEQ ID NO: 469556 - DNA, 553 bp, Homo sapiens
ccttgggcctctggtgatttctatttttcaacaaccctcatgtcaaagtatttctgctgtctgaatagcaatctccatataaaggccagcttcactatataaatagcatgcaagaacagttcttatggtgttgtattttatactggcagtatggttaggctactttgccaactaccatggttttattttatcaacacagtctatacctctactcaaaatattcctttctattgtttctatgatttttcattccatgtaattcaccctacccacatctgcaattctataaataattacctagaggaacatggttcagatcaaccctcagatcacactaaagactatgaaagccgtgattaataggagttgaacccctggagaccttttcttagtgagaaattttcttgtgtctyctctagcttactcagccatattaaaaactctggtgacagaaaattattaattctgtggctttcacctacaactcctagcatctgaaaagacttgctcagtgctctaagcaggaccaggaaggatcctgactccataggga

SEQ ID NO: 469557 - DNA, 553 bp, Homo sapiens
ccttgggcctctggtgatttctatttttcaacaaccctcatgtcaaagtatttctgctgtctgaatagcaatctccatataaaggccagcttcactatataaatagcatgcaagaacagttcttatggtgttgtattttatactggcagtatggttaggctactttgccaactaccatggttttattttatcaacacagtctatacctctactcaaaatattcctttctattgtttctatgatttttcattccatgtaattcaccctacccacatctgcaattctataaataattacctagaggaacatggttcagatcaaccctcagatcacactaaagactatgaaagccgtgattaataggagttgaacccctggagaccttttcttagtgagaaattttcttgtgtctcctctagcttactcagccrtattaaaaactctggtgacagaaaattattaattctgtggctttcacctacaactcctagcatctgaaaagacttgctcagtgctctaagcaggaccaggaaggatcctgactccataggga

SEQ ID NO: 469558 - DNA, 634 bp, Homo sapiens
gccacagggaaaaataaaataaaattacattgagagacagaatgaataatggaaataattaaatagtatctgaagtagtctagctaacctggattggaattctgttctgccattcgtcaaccatgcaaacttggaaacttccttaacctaccttagattgtagtttatcttaagtaaactgaggagtaatactaacttcacaaaattgttgttataattagccacacaatgcagggcctgacctatagtgggtgttcagagaacaacagccattatcatatgtcttattgagtttgccctgatgtaactcctaaggttagggatggcatgatacataaaaagacagcttaaaacaagaaaccaaataaagtagtttcatcaatcttagtgcattgaagtaagaaagtaaaagaagtgagatagttgctactcctctgaaaagaaatgttataaggcctcttgccctgtaacaaacatgacaaactgaaacactgaccaagggatcaagcagacaatacaaatgataaagcagataagtatccaggttctaggcttgtttgccttcagatgtctatstcctccttgccttgctctgttctgtgtcacagaaggactcacccatgcaagatgcatt

SEQ ID NO: 469559 - DNA, 595 bp, Homo sapiens
aaccaaataaagtagtttcatcaatcttagtgcattgaagtaagaaagtaaaagaagtgagatagttgctactcctctgaaaagaaatgttataaggcctcttgccctgtaacaaacatgacaaactgaaacactgaccaagggatcaagcagacaatacaaatgataaagcagataagtatccaggttctaggcttgtttgccttcagatgtctatgtcctccttgccttgctctgttctgtgtcacagaaggactcacccatgcaagatgcattcctcargtttctgagtcagctgcctccagcagggtgaaaacaatggcaagcactggcaggagacttgagggtaggggactagtaggagaccaccaagttagctccattctccccaccccttcttgttcgctgtgtctgactgtttctctagcaatggcttcatctctgtgtgttccagtgtacccttcacgtaaccatgaccctgggctcctacaacactagctcctcctttttctctccagccaagtgttagtagtatcttcttgccatgtcaatctctggtttatgtcattgtcggtatcacctgtataactagttg

SEQ ID NO: 469560 - DNA, 490 bp, Homo sapiens
atgtcagattcttgaaaaattatcctaaaaattaggattattcccttgtaattctgtttttatgatctctgtgtgtctgcctcatctaggtactcaattcctataacttcaatggtttgaaagattcacacttggttccttactgctaaatccttttatatctccctcctagatattgttttttttttaatctccaaggcaatatcaactcttcctctctctcattacktccgtcttaatgaggaaatgtttctgtgctctcttttggtattagatttactaatatgcttaaagcagaaaaaatccaccagtactcacaaccagaggacaaaaatctctctcctcttcgagacaggagaatactcaacccaggcccactgcagcatcctttcccagcaaggttaggtatattttataatcacctgaattctatttcttggaatgtgttcaatcagaggggtgtgcaaatcttaacctatctttcttcctg

SEQ ID NO: 469561 - DNA, 631 bp, Homo sapiens
tcatcatagggttcagttctaaatcaaatgtccagcatgagaaattgtgcataccctttcttccctatgcctcatcactctgagcataaatcatttttattgaggtttcctcattggtatattaaataaatgctgcagattagacaactggggtttgcagctccaccacttcattagacacagtcagattcttaatctaattctagactcagcaggatttttaacacatgagaaatttttagaccatggatttaacmgtccgatatagttttatatgtgccatgaggtgaatatggattgaattttctctgaatgttgagactttggataattttattttcttttatagttttctttttttcatcatctacaacaaaatgctattctttcacacaaaaccaaataatgtcaaataattattaaagttctgagatgagtggtggtatggttgtacaatagtgtaaatgtacttattgccattgaactgtacacttacaatggttaaaatggcaaactttatgttatatatattttaccacaataaattttaaaaacaaaattaattaaaatgaacacttttaaaatataatgactctgagatacatgcaaaacaatgtggactccaaaatag

SEQ ID NO: 469562 - DNA, 622 bp, Homo sapiens
ttccccaggaatatgaataaggcataacctcccaaattatgtcagggggtgtaagactgagtattggctaacaaaattaatttaatggaggtggagggtatttaagctacttgcagacactggccttacaaacaaacagtgtgatcctgtcttctcttctaccataattttgaagactgcatgattctgctatgatggaaaaggcctggatttggggttatcagagtagagccaaaaagaactatctgctttgcatcagatgtggtagaaaaaaattggatacattgtattaagccacagagaatatgacacatttatcactgagcctatcactgtctgaatgamaaaattcctttggagcattgctgccatatatgaatgccaagccttttgtcaaagggcctgggtggatgatattacttgatctactacaagttagatgaggaagcctcaaaagaaccaaccagcacttgatttgaggaggtgattagtctggtatactaaataatctaaacatgcaagaccgtggctgcgatggcaagggagagtttgcctctggctggtattgaccttcactcacaacatttcttgggtcaacaaatgagggtgtcatgtccgtggc

SEQ ID NO: 469563 - DNA, 542 bp, Homo sapiens
gaatcatattttagttttctagaagacatctgtcttgtctgtggaaaggtgagagaagatcttgtacacaaagatttatgtgcgaggatgttcaatgacttattatctgtaataaagaaaaaaatgagaatacctaattctaactcgagacaagtagttacataaattacgcctactaatatatgacataaggatatgatcactacatattctccattaaaaatagttacaaaatatacaaggtataattttatatttgcatagaaatgtacatagagagacatatagagaaaacactgaaaggwtgtcctatatatgaaaaaatagtattccttctaggttttggaattacttcctacatgttttcaatactgtctataatgaacgcttctcactttataatcataagacaaatcgcaataaattttagtggcaggggttggggaataaacatatccattaggagtttaatggacttacagtattttaactttagtctttggtttgtaaactataggtcaaatgtaaatataagaaatgct

SEQ ID NO: 469564 - DNA, 533 bp, Homo sapiens
gagaggttgcatatggtacttgagaaaatatatttatatcaagcacgacttacaactttctacattgtatataaaggatatcttggcggggcacggtgggtcacgcctgtaatccyagcattttgggaatccgaggagggtggatcatctgaggtcagcggttagagaccagcctggccaacatagtgaaaccctgtttctactaaaaatacaaaaaaaaaaaaattagctgggcatggtggtgcattcctgtaatcccagctactactcgggaggttgaggcaggagaatcacttgaacccaggagatagaagttgcagtgagccgagactccagcctgggcgacagggtgagactcctcaaaaaaaaaggcgggcggatatcatttactttgaatactttctgaattcctaggaaaattgttatggatggtagtagcaataattcaagtgaagacacatgctacaacatggatgatacaacaaggataagcattaaagacagcatgctaagtgaaataagtcagtcacaaa

SEQ ID NO: 469565 - DNA, 298 bp, Homo sapiens
gccaggcttccagacagggacttcccagtcttcctaatcacttgaggcaataccttacaataagtatcttcatatgtattctacatagttctgtttttctctgcgtaagcctgtctaacacattcgtaacctcattgtggtttaattgcatttcsctgaatacctgtgacatttgctaaatatcagaagaatggataaattgtattcatacagtagaataaaatagtgtaattaagacaaagaaactacacctatgttatcaacatgagtgagtcttaaataataaaattgttattaa

SEQ ID NO: 469566 - DNA, 554 bp, Homo sapiens
tgctgggattacagatgccctccaccatgccaggttaatttttgtatttttagtagagacgggctttcagcctgttggccaggctggtctcaaacacctgacctcaagtaacccaccctcctctgcctcccaaagtgcagggattataggcgtgagccaccatgcccagcctctcttgtctctttgatatagccrttgtaacagctatgaggtcgtatctcactgtggttgagaaaatttattttaaagggctcatatgacttggtcagttccacccggttaatctctttatttaaaggtcaatagatttgggaccttgatttcatctccatacttcctttacagcaatagctacattagtgtgttttactgaataactgagagatgtgtgtatatcaaggctaggaacctggagggtccatcatggaattcttcttgccaaggatggttaagaaagcaaaaggctttctgaggcatttccgtttcaacgaaagcctgaatgatgagaaattaccagacatataaagatctggggggtggggctgagggaaaga

SEQ ID NO: 469567 - DNA, 612 bp, Homo sapiens
tgccttttgcctaaaatagacaatttcaggggtagaaaggactttcagaggtcatctggtccatggaatcccaagcactaagctgcatacccatgacagtctatggcattttcatcagtgtgctgacacacatgagaaaaattgttatcaactgacatatcttaagaaagccttttctgagtaaaagactgttctttccacactttctagattttgatgttaaaatatcatttcaataataacatgacagtgaagaaacatgtccttacatgacaaaaagttggcattacgttgatccccaaagtttctggagaaactttagagaaattttactggtctttcagattgaaattttggggaagcattgttttggttttctggtttccaaacctggcagtgcattaatattactaggggccttgtccaatctatgtattcctgggtctcaccccaagatattccaattcagcaagggtagagygggaccttggagttggtgcttttagaaaagtctctaggggatttttgtgtgcaaccaggttagggaaccactgctctgcttcaccccctaaagtgaataatcaagggcataagtaattggaatgattccat

SEQ ID NO: 469568 - DNA, 366 bp, Homo sapiens
cttgcataatatatttgcaccctgctgtgttggctttgtgctgataacatctcaacacagcctggatccactgtactctggttatgtcaacttctcaaaggcagtcagatgcaattgaagactgcttttcccactggatgtgggtgcctgacaatgtaactaactctgtttttcagggtctcctccctggtcctctcttgttcagctctgcagcatctgtgcgacttctcagygcattgactcctttagccacacacccctctaagtaggttacctgctggcactggctcagtgccaacaggctgtggtttctctaactgtaaaggccttgattcatcctggttgtgaggaactcttttaagtttg

SEQ ID NO: 469569 - DNA, 383 bp, Homo sapiens
ttttattacaaagataccgatctccttgctctctccccctccccctggggccataaaaagaaagctgggtgggggaaggagaggaaataaattcagagaatgccaaatactacattcagcaggaagctaatgctgggattccggcagtccagggaagggctggctcagggtgactctccccagttcagtcctccgtttgctggagacctgggtgagcctcagtccctttcaaactgtttcgctccgcgtgcagatttttggagcaattctttcctcctgacgcgataacagaccgcgaagcatccccrgaggagaccaggagtccgattgctcccggaaagtgctcggcatcctctgcgcggctggctaataccgaggtttag

SEQ ID NO: 469570 - DNA, 573 bp, Homo sapiens
cctgggcccacagcactgcatggtttcaactttcattgcagggaaggacacgtttctatgccttacagagacttgaakcctgaaagcctggccaagtttgggaagaagaggagccctctcagagctcaagagccttcctactctttggaacttttccacagtaggccaagcttgacaagagttcagctcaagttgaacatacatacacacactctcacacacaaattatgtgagccgtcagaatccaagtgaatccagctcaagctatctacaaggtttttacatgcaaggtcaagtatctcaatccagaggacttttgttttcttaatgaaaagcttagaaaacacatgaatcttagatttttaatgttttttaaatggagtttattcttagcacatggctttctatgtagccacatcacaatttgtacagttccacataagtctaaatgcactcccctctccccaaagaccgtgccccagaaggggacaacagtatctctgtaacagtgtcttaaataaatgcaagtaagaaaaactaacatgtcacacctaccatcaaggtctacacatc

SEQ ID NO: 469571 - DNA, 556 bp, Homo sapiens
cacaccctttgaattgcaatattcttagatttgttcataataaacagcctctggccttagaactggaggcggctctggcattgtagggagggctcccgctgcagagagcagctcactgggtgrgcgctcatttcttgccttgttgctttgctccgtcatagtttgggagccagccttcaacaaagactagtaactatgataggcaaaatttacgcaacaaacaggcagtgcctactttctctgggattcaccccactcaccacgcactgtatatttgggaaaagaaaaagatgtgggaaactaatggaaaaatagtagaaaaaattaaatataggagaaagagggaatttgaatcgatccttcaaaatgtaatggaattttttcatttaaaatgtgtttgatgacaaccccaatggagtgattgctccgtcaaaatttatcctcggttccagctttttaaaaaagtattagtatttaccaatacatttttgcatatttgcaaaatatcttctacaaaagatctaattttcatatgtaagaaattgctgcgaaattg

SEQ ID NO: 469572 - DNA, 556 bp, Homo sapiens
cacaccctttgaattgcaatattcttagatttgttcataataaacagcctctggccttagaactggaggcggctctggcattgtagggagggctcccgctgcagagagcagctcactgggtgggcgctcatttcttgccttgttgctttgctccgtcatagtttgggagccagccttcaacaaagactagtaactatgataggcaaaatttacgcaacaaacaggcagtgcctactttctctgggattcaccccactcaccacgcactgtatatttgggaaaagaaaaagatgtgggaaactaatggaaaaayagtagaaaaaattaaatataggagaaagagggaatttgaatcgatccttcaaaatgtaatggaattttttcatttaaaatgtgtttgatgacaaccccaatggagtgattgctccgtcaaaatttatcctcggttccagctttttaaaaaagtattagtatttaccaatacatttttgcatatttgcaaaatatcttctacaaaagatctaattttcatatgtaagaaattgctgcgaaattg

SEQ ID NO: 469573 - DNA, 556 bp, Homo sapiens
cacaccctttgaattgcaatattcttagatttgttcataataaacagcctctggccttagaactggaggcggctctggcattgtagggagggctcccgctgcagagagcagctcactgggtgggcgctcatttcttgccttgttgctttgctccgtcatagtttgggagccagccttcaacaaagactagtaactatgataggcaaaatttacgcaacaaacaggcagtgcctactttctctgggattcaccccactcaccacgcactgtatatttgggaaaagaaaaagatgtgggaaactaatggaaaaatagtagaaaaaattaaatataggagaaagagggaatttgaatcgatcctycaaaatgtaatggaattttttcatttaaaatgtgtttgatgacaaccccaatggagtgattgctccgtcaaaatttatcctcggttccagctttttaaaaaagtattagtatttaccaatacatttttgcatatttgcaaaatatcttctacaaaagatctaattttcatatgtaagaaattgctgcgaaattg

SEQ ID NO: 469574 - DNA, 456 bp, Homo sapiens
tagaataaacaccttgccgggtctgatcgctgatgggtcttttccagctaagaatttcatgttttctcttttagatcctgctttctcaggcagtatctgaggctagagttatatttgcaggacagtctataatttctgaattgctgaaaattagcgtattaacgatatcagaagctccggaaaggagggagaggagactgttgcctgctatttgrtaattgaaatttgatgggtacactaattacgccattattaacaaataaattacttattaattccacctaatgttgatctttgaagtaaatactgatgccttatttgtgctgtgtgctttctccctttcttttctgagtagtagacatatctagatcctctacttttcagcctaaattaaagcagtgtaaactagcatagtcaccattctaaaaatattttcatattggcatgcaaaagcaa

SEQ ID NO: 469575 - DNA, 463 bp, Homo sapiens
tctttgaagcggatccgtgaagtagaaatttggagacgtaagctgacgtggaaatctatccccatccttagcagggaggtgctggtcatgtgacccgatgttgaaattgacaagctgctagctagtccgggccttttccccccccctttccttttttttttttcctcctctcccctccctcccggcttcctttctttgtagccacctcaggggaagcaacagatcgtcactcggtgttctcaccgaaagcacgtaatcgccggtgtaactcatgttggctggggggcctcccggcgcgcgcggagaggctggggtgcgcccccatgcagcatgcttgtgctcaattgcagggtcctcgttctcgagtgtgcaragggcggtgagagctcaactctcgtccccacctcccacccgcagctccccgggtgggtgagggatgccctggactggggatagccaggtg

SEQ ID NO: 469576 - DNA, 324 bp, Homo sapiens
gtgcacacggcggccaaggccagctccacattcttccctccccctcccacttcaccgtagccccgaaccctgcgcgcagagaaagggtctcagctccacagacgactgggtccctcctcaccaaaaatggtgagacaagatttcatctgtcggccgaggagccacaagcaggtttgtctgagagggatggtgctgggggaaggctttggattgcatctcaaattaagctttgctccttaaatgtggcgctctcgccaagaaaaagcttggggmctgaattcttgagatttatggtgcaccttattgatcaaatttatctggact

SEQ ID NO: 469577 - DNA, 597 bp, Homo sapiens
ttgagagaaaaagaggttggaacagagcaaaacaaggttgaatctgagtcaactcaatacttgaaggatcatagtaatctttggatcttcctggcccaaaagaacaaatagccaagtactcgcaactcagattacttaaggtgagaaaacaaatcagaaactctaaggctacatttgtcactcaagtccagtgtctgtttttttaacataattttgacaagtctctcatctttcatatttgttttctcacctgtaagtggggagaattccttctactcttcttcttcctggtaatgacaggaatggaatttaaaaccataaacaaaaatcatcgtcaaatacttcacagtcttgattctgtccccacaagcaatgtgaacatcttagaaggatctcattagataatttcatcagaatgtgtgactgtgtgtctgtagtgtgtgtgkgggggggggggatgatagggagatattagtgatcagagagccattgggctgacaacctgttttaggggcttgagggagatgccaggtcttgagtaatttctgtcactgggcacaggcaaatgaattctatactggtagcccttggggacat

SEQ ID NO: 469578 - DNA, 615 bp, Homo sapiens
gccctctgcatgtacagctcccagtgcctctctctgtcatagcgctggtcctaccatactgtcatggtctggtaacttgtctttctctgccactagactgtatgctccttaagggcaaaagctatgccttgtctctgtctctgttgccacccctgcccaggcctggtcagtagtaggccctgaggaaacagttgctaaatgaacgaggactctgggacattgggaactgtaccrctggagaactttgagagtgcaactaggacttccctgcttcacacccaaaggacactgtgcttatttaattacttgcgtgtgggggagttcaaacagatgttataatagctcacttagcaaaggacagctatgagggttttcttttattaactaaatagacagcacccatgtggaatattaaaagccagatggcacaaatttcattttgtatatatctgaaagagaagcactaggtgccagcattgtcctgttcagccttaagtccagtctcaaaagattctctctacccacttctgggtggaggcaaatgcatggagtcactcaggttcttgtttacctaccctgggagactaagccagcttcactccacaccatttccca

SEQ ID NO: 469579 - DNA, 472 bp, Homo sapiens
ataatttgctatgctaacaacattagttactttggagcataagtcaaatggtttaaagtaatcctgtaacatacctaaagaataccttcytatattacccatacaaattatttctccatgtaaagttcttttcattttaatttctacattacccagctctgaagtcactactcaggtttatcatggtccacagacaagaaggggtgcaaataacaaatactggtcaagatatatatggagatatatatatgtgtgtgtgtgtatatatatatgtgtgtatatatatgtatatatatgtgtgtgtgtatatatatatatatatatatatggatggcacagcagaaggaaacacaattctggaagtgcaagccttcaagaagcagcattattatgataatcctctcctacagaaaggtatcatttttatcactgatgccacaggacaaattatatattatgccatcttcaagta

SEQ ID NO: 469580 - DNA, 472 bp, Homo sapiens
ataatttgctatgctaacaacattagttactttggagcataagtcaaatggtttaaagtaatcctgtaacatacctaaagaataccttcctatattacccatacaaattatttctccatgtaaagttcttttcattttaatttctacattacccagctctgaagtcactactcaggtttatcatggtccacagacaagaaggggtgcaaataacaaatactggtcaagatatatatggagatatatatatgtgtgtgtgtrtatatatatatgtgtgtatatatatgtatatatatgtgtgtgtgtatatatatatatatatatatatggatggcacagcagaaggaaacacaattctggaagtgcaagccttcaagaagcagcattattatgataatcctctcctacagaaaggtatcatttttatcactgatgccacaggacaaattatatattatgccatcttcaagta

SEQ ID NO: 469581 - DNA, 615 bp, Homo sapiens
tgcaaacttggcacactggcaggatcttatgctctctgaaggggaatgctggtgcacaaaaagaagccctgttgtcaactctgctgattgacctagccccatcgctagttccttggaacggaggggcttctataatggaaagactcctacgctttcaggttaaatagctaccaaagagataatctttgttttggtgatccctccatttatattattctaaaagaaattgcaactggaatgaagaaagctaactggtcatacaaactctcatgcatacctatggatatgagtggctgcaaaagaggatcagagatgagtcagggttttcttttaagggcaaataccagagcctttttatgtcagaaggagatctccttggacyttttcttccccaattatgagtgatgattataggcttcttcaagtgctagcttctgctggaaatatccatggcaaccatcagcagatctaatagtttctaaaaataaaatactagcaatataatgtctttgatgattccactctcccatgctcatttgagagcaatgtcaatggtaaatgacattgtattgtcagtggagggggattaaaaaatagagggaagaaaagttatgg

SEQ ID NO: 469582 - DNA, 615 bp, Homo sapiens
tgcaaacttggcacactggcaggatcttatgctctctgaaggggaatgctggtgcacaaaaagaagccctgttgtcaactctgctgattgacctagccccatcgctagttccttggaacggaggggcttctataatggaaagactcctacgctttcaggttaaatagctaccaaagagataatctttgttttggtgatccctccatttatattattctaaaagaaattgcaactggaatgaagaaagctaactggtcatacaaactctcatgcatacctatggatatgagtggctgcaaaagaggatcagagatgagtcagggttttcttttaagggcaaataccagagcctttttatgtcagaaggagatctccttggaccttttcttccccaattatgagtgatgattataggcttcttcaagtgctagcttctgctggaaatatccatggcaaccatcagcagatctaatagtttctaaaaataaaatactagcaatataatgtctttgatgattccactctcccatgctcatttkagagcaatgtcaatggtaaatgacattgtattgtcagtggagggggattaaaaaatagagggaagaaaagttatgg

SEQ ID NO: 469583 - DNA, 627 bp, Homo sapiens
ttacacttgatggatagtttgtgttagatttttagtttacaatcccttccatttaaaatttcaaaggcattaattattatccttttctttttaagcctctattattgctgttgagatatcgtttgaattcttatcttttcttctttgtagttaacgtacattaattaattatctggagaaacctttagcatcttctctacgttttctgttttctgaattattatgatgtctcacgctgcaagtttatttatttcttgtctttctaatgtggagatttgttttctttagtttaaagaaatgtgttgtattttgaataacgtttcttttcatctctcccttttctgtggaattactgctagttagaatttgagcctgataggttaatcacttaattgttttttaataattataagtttttttgttgttattgctaatttctcttcagtgaaaagccattgttactgacatgctagttcataaattttttttcttttytttttttttttttttttttttttttgagacacagtcttgctttgtcatccaggctagagtgcagtggcacgacctcggctcactgcaccctctgcctcctgggctcaagcgatgccccctatcttagcctcc

SEQ ID NO: 469584 - DNA, 546 bp, Homo sapiens
aaacaaaatcttgcactttgcattgatgtgtcctcctatctgcatagagcaaatacattcttaatcattttctcctcactctgtttatatattctttctaatttaaaattgcctctgaaagtctaatattattgcagttttcttctccatattattaactttttaaaatattttgcttatagtgattcatgcccaattcatatagataygtagattataaatttgattattgtcaaatgttaatagcaactcagtgaaaaacaacttgtccaaaatgttgctaccaaaagggcacttgactataaataactcacattatattacatattctgtcttgttcccatcctcaacccccgcccctctgctcaataactaatctaagatcaactgttgatcagggtcagttcgctaaaggggaaacatattgactcataagtttaaataaaaataaagtcgcctctgattggctccttcttggaaagcaagcaagttttgtgtgggactgatatgaaagaagaaagcagtattaggatgaataatttctgt

SEQ ID NO: 469585 - DNA, 621 bp, Homo sapiens
caaacaaaacactgattaaacatatatctcaagtacaacacaaagttgattccatatttctacgtggacaaaacaaaatcttgcactttgcattgatgtgtcctcctatctgcatagagcaaatacattcttaatcattttctcctcactctgtttatatattctttctaatttaaaattgcctctgaaagtctaatattattgcagttttcttctccatattattaactttttaaaatattttgcttatagtgattcatgcccaattcatatagatacgtagattataaatttgattattgtcaaatgttaatagcaactcagtgaaaaacaacttgtccaaaatgttgctaccaaaagggcacttgactataaataactcacattatattacatattctgtcttgttcccatcytcaacccccgcccctctgctcaataactaatctaagatcaactgttgatcagggtcagttcgctaaaggggaaacatattgactcataagtttaaataaaaataaagtcgcctctgattggctccttcttggaaagcaagcaagttttgtgtgggactgatatgaaagaagaaagcagtattaggatgaataatttctgttcatt

SEQ ID NO: 469586 - DNA, 454 bp, Homo sapiens
gcaaagcattgccccaaagtcaggcagtagtagtaaaaaggagtaggaacagggccaaataattcacaagtagaaattgcaaatctgtgtrtaattttaaattgcaaaaaaatggtcaatatttttctaatccaaagagaaaatcctcatgtctttttttcataaatggctattattaaaaagctgtggaaaagataagtgtaagatgaagcctcaagaatacatatgactggatttatgggcccactgtccagcaatacttatcaagtgcctactatgtgctagccactcttatcaagactgtgagagttttacttgtatttcttatatcctcataaaacccctaagttgtgactattattaacactatttcatagctaagaaaatggaggcataagtagaccatgatcatgcaactaactagaaaaaaaaactttgacttgaacccgggcag

SEQ ID NO: 469587 - DNA, 514 bp, Homo sapiens
tgtcagacctttagtctctcaaaacctcccatatcattcattaatctatatttaattattggcattttttgagtatctatagagtatactttgtgtactagaagaacttgattactaattgggagagaagaaatgaatgtgtgaggcagatttagatttaatgatgtgattataaagcaacctgatatggtttgactctatgtccccatccaaatctcatctcgaattgtaattcccacacaytgagggaaggatctggtaggaggtgactggatcatggtggcagttttccccatgctgttcttgcaatagtgagtgagttctcatgagatctgatggtttaaaagtgtgtggcagttcccccttcactctctctctcctgccaccatgtaagacgtgctttgctttcccttcaccttctgccatgattgtaagtttccggaggcttcccaagccatgcaaaactgtgagtcaattaaatctcattgctttataaattaccaattctcaggta

SEQ ID NO: 469588 - DNA, 185 bp, Homo sapiens
cattgaggcaaactgggacgaattgctaaactagccataagcatacataagcattatcttaygtcctctgtgtaaaggatgttgcttaaataacagcaaaaggtttttgaaaatggactatgttatagttatagtaaattatattccaaacataattgttatttttgcctttccaaacctagagt

SEQ ID NO: 469589 - DNA, 503 bp, Homo sapiens
taatccagctgtttcttctacctctgcagcctttactttatcttaggtgtgtgtcacctgccttgtttgcctgccctgccattagtttttctctcttctgtttatttcttcctctttatttacaagattataattctccaaactttgaccatcttaatgcggtatctagaaatatagatcagctttctatcattcataatataaaatccaaactcaagatggctggcaagctctttcaaacagagctcttgtctatccataccaatataatattttaaaaaataatagtaaaatggttgtggccarcttgctttacctgccttccatttctcacactgaagcagtctgagagccaaatttgcagagtcaagatgagaacagtagctttgaaagtgcaaattgaggctgagaaggaaagatacagctcttgtttgggacatcttgcttcttaccctctccgtggtccctcggtctatctaattccttacctctctaccaaccta

SEQ ID NO: 469590 - DNA, 644 bp, Homo sapiens
tcttctacctctgcagcctttactttatcttaggtgtgtgtcacctgccttgtttgcctgccctgccattagtttttctctcttctgtttatttcttcctctttatttacaagattataattctccaaactttgaccatcttaatgcggtatctagaaatatagatcagctttctatcattcataatataaaatccaaactcaagatggctggcaagctctttcaaacagagctcttgtctatccataccaatataatattttaaaaaataatagtaaaatggttgtggccaacttgctttacctgccttccatttctcacactgaagcagtctragagccaaatttgcagagtcaagatgagaacagtagctttgaaagtgcaaattgaggctgagaaggaaagatacagctcttgtttgggacatcttgcttcttaccctctccgtggtccctcggtctatctaattccttacctctctaccaacctactcctccatctactctcctcttgtattcagcctcaagggggtagtatagccactgatgctagaggagaggcttactggaagaaagaatcatcaagacctaaatttagggtagattattaaaaacaaaacaaatataaccaaaccaaacccaacc

SEQ ID NO: 469591 - DNA, 534 bp, Homo sapiens
ccagcactttggaagggcgaggtggcggatcatttgagatcaggaatttgagaccagtttggccaacatggcaaaaccaagtctctactaaaaatacaaaaattagctgggcctggtagtgcatgcctgtaatcccagctacttgggaggctaaggcaggaaaattgcttgaagttgggaggggaaggttgcagtgagccgagactgcaccactgcacttcagcctgggcaacasagcaagactccatctcaaaaaaaaaaaaaaaaaagaaaaaaaaaggtatctacaatctgaaaggactagaggtggataaggacaaaaagcctgggctgccacaaccttgccacatatgggtgttatattacaatgaaagtgggtctcagatgagagtgtgccacacatttgaacacttctcagcaagcgacacagtgatgtaacctgttctgctggctcctgacgtcccttttctctgtcattttgggtatgccacaagcaccttgaatgaaaagtacatgatgatggcaggaaaagtt

SEQ ID NO: 469592 - DNA, 636 bp, Homo sapiens
ggaactgtcccagacccagggaattaaacattgaataaagcacaatccatgcttcaaaggagtcttgcaatttagtgagaccccttcccctgcattactctaaaaccaytcagagtgggtatatagtgatctattgatataaaccaagttctacatggatactgggggattaaggaagtcttcaaaggttgaataggagagaggaggggaaggatataccaattgtacagttaacattcatcgagcatttaccagctgctagtttttctaaggactttgcatatattaaacttatttcatctttacaacagccctattattagtagcaatactattgccattttcctactgtatccattggggcacaatgaggttaagttgtcaaatacaagcagtaagtagtaaaagtggttttgtacctagttgagccatcattgttaccactgggctgtatgcaaagatacattttttatccagtcatccataagtacaagtgtatgtatgttaagtaaacaaaccatgtccttgcattgtgttagctctaatgatataaagaaaagttgaaaatggcttgatccttcaagtatcccaaaatctaatggagtagacatctcagcaaacaaaacatgacaaatt

SEQ ID NO: 469593 - DNA, 544 bp, Homo sapiens
gtcccatggacttctgacctacagaaactgtgagatcatatgtctgtgttattttaagttactgagtatatctggtgatttagtatggcagcaacaggtaactaatagagaaggtcattagttgaaatctatatgaaaaaaaagttaatggccctatccttttttctaactttcttcacacataatattcatcatcaggtttgcctacaattgaagtcaaaaaatagcaaagtcayttttctgaagaaatataatcatctgcactctgcagaggcaaggcagctttaagagctttgacttgcatgttggtggttcagagactctccagcatggtggccagttgcctgctctcatgccataaagcaaaatctgccaatctggcttccaaagaacacaaatggttatccctagactagtcaaatcaagtataaaatgtgaaagagtgaggcaaatacagaaagagagaaaaaaaataaccacagaggaaatagaaaacacaactaataggaaatttctaaaaattaaaagaaaatacaggaagggg

SEQ ID NO: 469594 - DNA, 486 bp, Homo sapiens
cccagcccagccctcactagggacccccgagtgcatctctctcctctccaggcctctgtttctccatctgtgcaaccacagtgttggacatggtagtcccaagtgtctgctcgtaactttgccctctctgtgcccccaggtcagggctgcgataagacccggtcacgggtgaccctgcaggagtggaatgaccctcttgaccatgaccttgaggcccagctcatctrccggcacctgctgggcgtggaggccatgctgtggtgagtcccacccaggagagcctgtgcagcctggggaacgtgccaggcttggggctgctccatggtagctggtcacctctcttgtaattggccacatctggggagggcaccaggagtacctctctgcagcacgaggccagctcaggttaggacagaggccccaagggtcagggccatgcctgcttcatgccatgtgctgactgagcccaccttgcaacctgcccag

SEQ ID NO: 469595 - DNA, 458 bp, Homo sapiens
gagtgcatctctctcctctccaggcctctgtttctccatctgtgcaaccacagtgttggacatggtagtcccaagtgtctgctcgtaactttgccctctctgtgcccccaggtcagggctgcgataagacccggtcacgggtgaccctgcaggagtggaatgaccctcttgaccatgaccttgaggcccagctcatctgccggcacctgctgggcgtggaggccatgctgtggtgagtcccacccaggagagcctgtgcagcctggggaacgtgccaggcttggggctgctccatggtagctggtcacctctcttgtaatkggccacatctggggagggcaccaggagtacctctctgcagcacgaggccagctcaggttaggacagaggccccaagggtcagggccatgcctgcttcatgccatgtgctgactgagcccaccttgcaacctgcccag

SEQ ID NO: 469596 - DNA, 486 bp, Homo sapiens
cccagcccagccctcactagggacccccgagtgcatctctctcctctccaggcctctgtttctccatctgtgcaaccacagtgttggacatggtagtcccaagtgtctgctcgtaactttgccctctctgtgcccccaggtcagggctgcgataagacccggtcacgggtgaccctgcaggagtggaatgaccctcttgaccatgaccttgaggcccagctcatctgccggcacctgctgggcgtggaggccatgctgtggtgagtcccacccaggagagcctgtgcagcctggggaacgtgccaggcttggggctgctccatggtagctggtcacctctcttgtaattggccacatctggggagggcaccaggagtacctctctgcagcacgaggccagctcaggttaggacagaggccccaagggtcrgggccatgcctgcttcatgccatgtgctgactgagcccaccttgcaacctgcccag

SEQ ID NO: 469597 - DNA, 482 bp, Homo sapiens
atctgtgcaaccacagtgttggacatggtagtcccaagtgtctgctcgtaactttgccctctctgtgcccccaggtcagggctgcgataagacccggtcacgggtgaccctgcaggagtggaatgaccctcttgaccatgaccttgaggcccagctcatctgccggcacctgctgggcgtggaggccatgctgtggtgagtcccacccaggagagcctgtgcagcctggggaacgtgccaggcttggggctgctccatggtagctggtcacctctcttgtaattggccacatctggggagggcaccaggagtacctctctgcagcacgaggccagctcaggttaggacagaggccccaagggtcagggccatgcctgcttcatgccatgtgctgactgagcccaccttgcaacctgcccagctgttcycctgggcccttggagtacaggcacagcctcagccaattccctgagttccctggc

SEQ ID NO: 469598 - DNA, 280 bp, Homo sapiens
gtggtcccccaccagctccccctcccatagggctgcccaccaagccctgcccccagcccaagaggagcccccactgcctgcggggcagtgatgtctggccaccggctcacaccaatgacttggtcctggggtggcagaagcagcaggtgacaggagcagggcccctgtccctctcttctggccctgtggtacccaggccacacgttgtgcccgctcttggggctgaccggctgyagggaccaccagccgctgctactgtgggccgccccggggcagggtg

SEQ ID NO: 469599 - DNA, 314 bp, Homo sapiens
aagtgctgggattacaggtgtgagccactgcgcccggccatgaagttttcttttctacgggatagamacccacaagctaataagtaacttcagtgtctgggctgtaaccaaacaataaatagcaaagtcaacacaggcacaacccccaagattaggatcagcaaacgttttctgtaaaggaccagacatgcagctctcagtcacaaccaccatgccatgtagcatgaaagcaaccacagccaatgtgtaacaaattagcatggtatgtgtggccaggggcagggctcacgcctataatcccagcactttgagag

SEQ ID NO: 469600 - DNA, 314 bp, Homo sapiens
aagtgctgggattacaggtgtgagccactgcgcccggccatgaagttttcttttctacgggatagacacccacaagctaataagtaacttcagtgtctgggctgtaaccaaacaataaatagcaaagtcaacacaggcacaayccccaagattaggatcagcaaacgttttctgtaaaggaccagacatgcagctctcagtcacaaccaccatgccatgtagcatgaaagcaaccacagccaatgtgtaacaaattagcatggtatgtgtggccaggggcagggctcacgcctataatcccagcactttgagag

SEQ ID NO: 469601 - DNA, 314 bp, Homo sapiens
aagtgctgggattacaggtgtgagccactgcgcccggccatgaagttttcttttctacgggatagacacccacaagctaataagtaacttcagtgtctgggctgtaaccaaacaataaatagcaaagtcaacacaggcacaacccccaagattaggatcagcaaacgttttctgtaaaggaccagacatgcagctctcagtcacaaccaccatgccatgtagcatgaaagcaaccacagccaatgtgtaacaaattagcatggtatgtgtggccaggggcagggctcaygcctataatcccagcactttgagag

SEQ ID NO: 469602 - DNA, 497 bp, Homo sapiens
tgtgggaggagtgtgtccctcagactggcctgtgtcctggctcctcttaccacctcttccagaggttgtcacctgcagctgccccaggataaaggcaaggccagagaggactcctgaactcctgtgtgcctggggtggcaggggcaaacatagccaactggtggcctgagcrgggccatggtgaggacacccttggtggcttgtcccacatcaagctgggaggtgacactgaggatgcattagtctgcagcgtatgataaaaacggcatttcaggccaggcgtggtggctcatgcctgtcaccccagcaccttgggaggccgaggtgggcagatcatatgaggtcaggactttgagaccagcctggccaacatggtgaaaactcatctgtactaaaaaaacaaaaattatgtgggttggtggtgtgcgcctgtaatcccagctacttgggaggctgaggcaggagaatcacttgaacctgggaggcggaggctacaa

SEQ ID NO: 469603 - DNA, 497 bp, Homo sapiens
tgtgggaggagtgtgtccctcagactggcctgtgtcctggctcctcttaccacctcttccagaggttgtcacctgcagctgccccaggataaaggcaaggccagagaggactcctgaactcctgtgtgcctggggtggcaggggcaaacatagccaactggtggcctgagcagggccatggtgaggacacccttggtggcttgtcccacatcaagctgggaggtgacactgaggatgcattagtctgcagcgtatgataaaaacsgcatttcaggccaggcgtggtggctcatgcctgtcaccccagcaccttgggaggccgaggtgggcagatcatatgaggtcaggactttgagaccagcctggccaacatggtgaaaactcatctgtactaaaaaaacaaaaattatgtgggttggtggtgtgcgcctgtaatcccagctacttgggaggctgaggcaggagaatcacttgaacctgggaggcggaggctacaa

SEQ ID NO: 469604 - DNA, 518 bp, Homo sapiens
gatgaacatagttatctacagaaagagtcaacaaaagtgtgtttctttagaatgaaaagggtctctgtacacttttaactctgacaaaatttttttttcagatctaatttaaatgccttacaatatttctttaaaagtgtcaaatcatttgaattttagaggggagggagaaagcaagaatggaagtattaactccctttataatgtgtgattcaagacattcctagaaaaatagtgccctcagggaaactgagaatttgggtttgcaacagctgtcaaaagatgacatttcaagctgggagggaaagtgaaggcgttgtgaaggcaaagtttccacacagaatgagtccaaattagaaaagagagtggtattcacctccagcatagtcccagactcgatggttggtaagctgcatggcatacgtgtgctgcgtttcctcaaagtgcttataagcatgtcgactgacrtaccgtccacatcctatgtggccgcatattaaacaaatccaaagattctg

SEQ ID NO: 469605 - DNA, 585 bp, Homo sapiens
ggacagtgcagttctggaggctatttaagtaaaactcctgaaccttgacaatactaatgtaaaacaacaatctgaacaacaaaagaaactgcaggcatataattgtactctataagtggacagaagcaaaaatgcatttagattttaaaaacaatgtttstcttgggatagcaactgttactgctgcttctttgtgttttttttttgtttttttttttttttttgagacagggtctccctgtgttgcccaggctggagtgcagtggagcgatctcggctgattcactgcaacctctgccttctgggctcaagtgatcctcccacctcagcctcccgagtacctgggacttgggtgtataccaccacgcccagctaattttttgtatttttagtagagaccgggtttcaccatgttgcccgggctggtctcaaacccctgggctcaggcgatccacccgcctcagcctcccaaagtgctgggattataggcaacagttaccgtttgaggttacctgtttaaaatgattagcagtataagataccaatactaacaaaattttattaaattttattcgcatactttca

SEQ ID NO: 469606 - DNA, 572 bp, Homo sapiens
gagacaagcaagggttgagtctagaagcctgggttccggtcccacatgctacctttctcactatgtccgagctcagggctgtggttcctcagttttagaggaggcatcttctggccaggcctggtgggaggctgaggtgtgtggaacacctgtggtcaggagttcgagaccagcctggccaacatggtgaaaccccatctctactaaaatacaaaaattaattgggcgtggtggtgtgcgcctgtaatccctgctacttgggaggctgaggcaggagaatcgcttgaaccagggaggcggaggttgcagtgagctgatatygcgccattgcactccagcctgggtgacagagtaagactctatttcaaaaaaatttttaaaataaaaaaaataaaaaataaaggaggcatcttccttgccctgccaacagcctgagggaccacagggccctgggaacgcccagcctgtctgtctcgcgggagctagacacacacacagagttggcatgctcagaaccaccagccacaaaaaaaggtccaacgctgaaaataacccacacatccattaccatt

SEQ ID NO: 469607 - DNA, 442 bp, Homo sapiens
aaaccctgtctcactaaaaaatacaaaaattagccaggtgggtggcgcatgcctgtaatcctagctacttggaaggctgaggcacgagaatcgcttgaacctgggaggtagagttttcagttagtcgagatcgcgccactatactccactctgggcgacagagcaagactctgtctaaaaaaaaattaaagaaataaaatgttaatttctcttgayaccccaagtatgcctcattgtgcctaagtaaatccagctccccaattaaaactagctcctgtcccaccatctcctagggccaactacatgtgcctggcacatgaaagacaagaattccaaatctgacatttccatgaggcgggtactgttaccacattcatggaagaagagactgaagttcagagtagccagggagtgaaagagacaggtggacctcttcttacta

SEQ ID NO: 469608 - DNA, 640 bp, Homo sapiens
cagcatcactagtgttgtgctttgaggccattcttaagcaaaataagggttactggagcacaagtacttcagtactgagacagtcaatctgataaccaagatggctcttaactagaagcagggagtgtagacagtgtggagattccgggcaaagagatgattcacatcccgggcaggaggaagcagaagagaaggagatttcataattctgcccagaatgatgcacaatttaaaacttgtgaattgtttatttctgaaattttatgtttaatattttcagaccacggttgactggttaactgaaactgcaggaagcaaaatcgtggataagaagggactaccgtgtgtgccattttcccacattttaaagactggcattaaatgattttataaaatatagctatgagttattaaaaaatcaaaaaagtaaaattcaagcaaaatcataactaaaacctaaaatgcctgtgatagttaattttaggtgtcaatttgactagattagggaatacctacagaactgataaagcattacttccatgtgtgtctgaaagtgtttccagatgaagtaggcctgtgagtcagtggamtgaaagagtggggaagatctgtcctccatgcaggcaggtaccatttaatc

SEQ ID NO: 469609 - DNA, 502 bp, Homo sapiens
tgggaaaaaagagtgattcaagcaaaagaataaccttcttttgtttagttcccaataaatttttgtatttttattttgtaacagaaaatgaaaggtgcataaggaattatcaaaaaattcaccaaactgtactcctattctggacccacycactagtaatattggagctactgacctttagaagtcactaacattcatatcaagtgtagacatctggccttctctttttgatttggcctagaatgctaataaggactctgtttaattttaaatgtcttgcacatttattataaggggatttagcaagtacaagacctttatcccccaagactccataagtgatcaggcatctccagggataatccaggctgaacctgtgaaatgtgctcaacctgtacatggagacaataaagagaaatatcatagccactctaatacattgagaataaaatggctgttatcataacaggtaaagctgtgttataatcagttcaggtacaca

SEQ ID NO: 469610 - DNA, 331 bp, Homo sapiens
tttatgtatattaaaaaatttaaaaaaaaactaaggaagacagaggaaaatgcttatgtagcttttatatagaaaaaaamcagaatgtctatccaagcagtttgaccctagagtctgtgatacggaaacggggcagaaaagtgctgggtggggaaggacgggatccctggtgaaggctccacccccgggcctgtgctcaggggcctaagtgaggacaagcatttctgtttttgcaccccaatgttacattttccaagaccactctggcccgcaatgccccgcttcctgtgaccataaaaacccctagaccctagaaggcacacacacacag

SEQ ID NO: 469611 - DNA, 633 bp, Homo sapiens
tgactctattacttatgccatcaagagatcaaacctgtgaataacctattaaagaaggaaaagaaagagaaaatggctagaatattgaaataaataatggctgtaaacttccctaatgtgaagaaagatgtcaacatacaggtacaggaagtgcagaggtctccaatcaaatgcaactcaaagagaagttgactaacacatgtaataatcaaactaccaaaaatcaaaggcaaaaaaaattctgagagcagcaaaaataacaaacacatcacaaaggggccacaatatgcaggtcartggatttctttgaaaaaaatcttgcagaccagaagattggaaatatatattcaaagtgaagaaaaaaaagcaaaaaaaaaacaaaaaaaaaaacaccttaaaccaactgttaactaagaatactttactgagcaatgctatctttcaaaaatgagggagaaaaaaaaaactttcctagccaaacagaagctaggaaattaaccattaccaggcctgcaatagagaaattgctaaaggaaccatttaaactaaatcaaaaagctgatgattaacagtataaaacattcaaaggtataagaaattaaaattgttagtagaaacattatataatatact

SEQ ID NO: 469612 - DNA, 483 bp, Homo sapiens
cagagcccatgggggtcatcactatgtgaccctgcctgctgggcagtgcctgcctgggtcttcatggggtgaaggtggcttcaggcctggcccatctgcaccctgggcctccatactgagcacatgcctgagtgggtagagtcagtgagcccagagccctgatgggcacacggcgcacacagcactgcccctgccctgttagaagcaggttagagtgatcatataatccctgtggtttattatgggcctatcatgtgctggacacagttctgagtgcttgtgtctgttaccttatgtaatcctcacggcaggtctgtaataaaaacttcattatcatcgccattgtcccatttccaagatraggaaactgaggccagggagctaagtaccctgccctgtctgccaggctgcaaaggtccccgttgagcctccctctgggctcaggctgcccctcccgtgctcttaagcagcatctccagccca

SEQ ID NO: 469613 - DNA, 483 bp, Homo sapiens
cagagcccatgggggtcatcactatgtgaccctgcctgctgggcagtgcctgcctgggtcttcatggggtgaaggtggcttcaggcctggcccatctgcaccctgggcctccatactgagcacatgcctgagtgggtagagtcagtgagcccagagccctgatgggcacacggcgcacacagcactgcccctgccctgttagaagcaggttagagtgatcatataatccctgtggtttattatgggcctatcatgtgctggacacagttctgagtgcttgtgtctgttaccttatgtaatcctcacggcaggtctgtaataaaaacttcattatcatcgccattgtcccatttccaagataaggaaactgaggccagggagctaagtaccctgccctgtctgccaggctgcaraggtccccgttgagcctccctctgggctcaggctgcccctcccgtgctcttaagcagcatctccagccca

SEQ ID NO: 469614 - DNA, 612 bp, Homo sapiens
ccattttagtcatagtgcaaaattaggcattgaaaattattatgggtactgtattagatattcaaagatttatttgtggctttgacttctttaccaacacctctggctttaatacagtatcttttatcagagcaagtaatagtttgaatccttttcttacaaatcctctttttactcaagtgactgcaaacttataaagatgcacacatctgtagcttgaacgtctatgctatttgctcaagtatttacttgaatttatcctcgatgatatgatttttttaagtgctttgattttaaattctatctagaatcccatcatgagggagaaatcttagcaagacttaagcaccttttcataatgactggttactgtaggataaacctataattagtatrttgctaatccacacgttagatatatcccatcaaatttcaaatatacacaggagaattatccacattgaaggttattagtgcattccagggacatttccatgttgattcacaactacccctttaccttacactttcctgtgttactagacgtctctttctgtaaaacttctctttgttgttactttttacttttgtatgtgttacctgattactttg

SEQ ID NO: 469615 - DNA, 624 bp, Homo sapiens
cattctgatgtatctttccagtccttgtatgtgtatacatatatacataactgagtatacctttttacatggttacacttatatagtatgtgccatgctttcttgcatatcatgagtacttgagtatcaaaatactcagggctttaggattcagacattggtaaatattcacgatacattttcttatcttttgtggggacaaaawtatcttaaaaaacaaaatggcaacaggtctctggaaatgcatattggcaggtttatagttaaatactgtgttcacttaatacccaatataaaatgagatacaaagcagtcaagtaagtataatgcttcttagatagttcagtatgagatctgcactattaaaatattaccagaaatgatgtttctacttaattatttaacaattcatatagtattcacaaagtataccaagaaaaaagcacacatatgtcagtggttataatcagattgtaaatatggacatatctatatatatctcttcccttacctttctttctgccccttagcaatccagtacgtactgatgtatactgctcataggtggtttaacattgccatttccaagatgcttcttttctaatgaaattaatttactatcta

SEQ ID NO: 469616 - DNA, 599 bp, Homo sapiens
ggctcactgtagcctcaaactcccaggcctaagtgatcctcccagttcagctcctgagtggctgggactacaggtgaatgccaccaaacctggagaaattttttttttttttttttttttttttggtagaaacaaggtcttactatatcacccaggttggtcttgaactcctgggctcaagtgatcctcctgcttcagcctcccaaagtgctcagattacaggtgtgagcctctgcacccggcctcttgttcattgtttgttcctagcctgtgttagcctttctcaccccttatatttaggctgaggagatctcttgctctcctttatgttctgagttcttaaggcawctatgtattggaagcctggcatctttgattgtagcctagcctctggtgacttttgtgaggaaccaaatggttttatctccctttttgaggatttggaataatcccttatgccttttgttgatgtaacagagaagcctgttttccaccagtggagcttgtaacagtccctcccctttctctgccccacttgaaaagcaacctctataaaacttcgacattttctttgcttaactcagtctatccattcccag

SEQ ID NO: 469617 - DNA, 343 bp, Homo sapiens
acatttgttgacatttctctatatcctagacactcttctaggttctttaccggcatgaatttatgtattcatcccaacaaccctaatcagtaaacacattcatttccattttacagatgaggcaactgagccacagaaagtcaagtcacttggccaagttctctcagctagcaagtgaaagaggcaggagccaaattcaggcagaccagatccgcagtcctgtccacttaacactcacaccaacgtgaagtacccagcacagcatgtggcatgcactctagcaggccaaggaccctcagccccttcccagagayggggagagtggctaggacacatggacccc

SEQ ID NO: 469618 - DNA, 632 bp, Homo sapiens
cagggtgccttcggtgtcagggactcagctccacccattttgttgctccatagcctcttccctaacctcacctcgtggcccactctggctggtgcagtgctaatcattacatctgcattgcagccagcagggaggaaaaagcagaagagaaggtcctctcctccctttaatgacacttcctggaagttgcagagaccatttctggtttcattccattctccggaatctggtcatatggccacacctagttgtgaggaaagctggaaaaggtagtctttattcagaatgaaaataccccttttcagccgagggggcctatacaggtaccttaacctgcctgagccttgatttcctcaccagtaagactgagtcatcataactgcctcatggkgttggggtaaatattggattcaatgatatcacacacatcaaagttctggcacatagtgggtgctcagttaatcttagtttctcttccctgcccctatgccctacctagagtgaagcccagtgaactggtaagtgcaggccatggccatatcctcaggcagtcagttatctagggcccatatattcacaagcaggtagcacaaaagcacacaaaggaacatgaaaatgacttccaactaccc

SEQ ID NO: 469619 - DNA, 613 bp, Homo sapiens
cagtgtcctggatatagatgagagcactagattgagagtctggagaactgggttcacccgctggagcttcctttccctggtttgtgactctctcaagacaccaagtttcttagcctcacatcctcattataataggtccacttcttactttgaaaggtttgggttggtgagaatgaaaatcctttgttggcagccttaaaaaggaacgagatcatgtcctttgcacatggatgaagctggaagccattatcctcagcaaactaatgcaggaacagaaaaccaaacaccacatgttctcacttaacaagtgggagctgaayaacgagaacacatggacacagggaggggaacaacacacactggagcaggtcggggggtgaggtagggggcggagagcagtaggaaaaatagcagtaggaaaaatagtaggaaaaataggaaaaattgcatgctgggcttaatatctaggtgatgggatgatctgtgcagcaaaccagcatggcacatgtttacctatgtaacaaacctgcccagcctacacatgtaccccagaacttaaaataaaaatgaaaaaaagaaaatccttcaaagaatataaaattgtctataagaa

SEQ ID NO: 469620 - DNA, 613 bp, Homo sapiens
cagtgtcctggatatagatgagagcactagattgagagtctggagaactgggttcacccgctggagcttcctttccctggtttgtgactctctcaagacaccaagtttcttagcctcacatcctcattataataggtccacttcttactttgaaaggtttgggttggtgagaatgaaaatcctttgttggcagccttaaaaaggaacgagatcatgtcctttgcacatggatgaagctggaagccattatcctcagcaaactaatgcaggaacagaaaaccaaacaccacatgttctcacttaacaagtgggagctgaacaacgagaacacatggacacagggaggggaacaacacacactggagcaggtcggggggtgaggtagggggcggagagcagtaggaaaaatagcagtaggaaaaatagtaggaaaaataggaaaaattgcatgctgggcttaatatctaggtgatgggatgatctgtgcagcaaaccagcatggcacatgtttacctatgtaacaaacctgcccagcckacacatgtaccccagaacttaaaataaaaatgaaaaaaagaaaatccttcaaagaatataaaattgtctataagaa

SEQ ID NO: 469621 - DNA, 279 bp, Homo sapiens
actgcaatcttggtgtgactttacttgatttcaaaattggattctggccccagataatarctttagatgccaataagagagcgactaggccttcctttaaaatgccacttcattcccttttgtcggctcccaggagctctctggaggaaacctgaagaggtgggaggaaattgtgcagggaaagggcccttttgctgagagtagtaaattattcaggtactctaatggcttggagaacgccaggcccgtctccctcttagagcacaccgtaggcagtgc

SEQ ID NO: 469622 - DNA, 611 bp, Homo sapiens
ctgagatcattcagtagcttctacagaatcaagggctaaattaatggtggttgttttaagtcactgagttttggggatgtactatgcagcaatagatcactggtatgccatggctctatacattttcagttttttaactgaattataaagggatggctgggtgcagtggctcacgcctgtaatcctagtgctttgggaggctgacgtgggaggattgcttgagcccagaagtttgcgacaccgtctctgccaaaataaaaagtawaaaaattaactaggcatggtggcacacacatgtagtcccagctactagggaggctgaagtgggaggatggcttgagcccaggagttcgggggtgcagtgaactacgattgcaccactgcaccactccagcctgagtgacagagtgagaccccattttttttaagcatttggctgcaagtaagagaaaaacctaacagtggttgaaacaaatagggtttactatttaagaaatctgcagttgctttttaagaagtctagacaggcagttgctggtattggttcagcttttcaatgggggatatcaaggacccaggctctttttatctcttctctagcctcttcagca

SEQ ID NO: 469623 - DNA, 611 bp, Homo sapiens
ctgagatcattcagtagcttctacagaatcaagggctaaattaatggtggttgttttaagtcactgagttttggggatgtactatgcagcaatagatcactggtatgccatggctctatacattttcagttttttaactgaattataaagggatggctgggtgcagtggctcacgcctgtaatcctagtgctttgggaggctgacgtgggaggattgcttgagcccagaagtttgcgacaccgtctctgccaaaataaaaagtaaaaaawttaactaggcatggtggcacacacatgtagtcccagctactagggaggctgaagtgggaggatggcttgagcccaggagttcgggggtgcagtgaactacgattgcaccactgcaccactccagcctgagtgacagagtgagaccccattttttttaagcatttggctgcaagtaagagaaaaacctaacagtggttgaaacaaatagggtttactatttaagaaatctgcagttgctttttaagaagtctagacaggcagttgctggtattggttcagcttttcaatgggggatatcaaggacccaggctctttttatctcttctctagcctcttcagca

SEQ ID NO: 469624 - DNA, 587 bp, Homo sapiens
gatgaattcttctgcaagaattcrgagacatgctagattctcatggggggttggcatagggaaaatcacaaatcacactaagacttggaagctgacatctgggatatgtgtatacataaatgtagaaagtactccaaaaggataaatgccagaggtagaactgacatcaaggaaggagaagatttgtgtttcctttacactcttctgccttatttagatttatcacaataagcatgaacgattttgtcattcttaaaggtaaaaaagacaactcaggctgggtgtggtagcacgcacctgtggtcccagctactcaggaggctgaagcaggaggatcacttgagcctagggggtcgaggctgcagtgagccatgctggtgccactgcagtccagcctgggcaacagagcaagaacctgtctcaaaagaagaaagaaaaaagacaactcaagtgccacttcctccaggaagtctccgaggcagaaataaaaactcctcctctgcattgcaattaaactttgttccttccgttatttcagcacttgccacttgaggagaattcactgttctgggagccatggaggacag

SEQ ID NO: 469625 - DNA, 597 bp, Homo sapiens
gaagctgtgccacagtggtgggcaggaagtaacaaaaataccaatcaataatgctcacaataatggtaaataactgttggttcgggggttcctaaacttgtttcacaatcagaatcacctgggtggtagaaggggacttctgtttttaaaattatttttaaggaatggggtctcactctatcacccaggctggagtgcagttgcacgatcctagtttgctgcagcctggaactcctgggctcaagccatcctcctgcctccacctcccaagttgctgggactacaggtgtatgccaccatgctcggctaattttttaatttttatctttatttttgtagagatggagtctcaatatgttgcccaggcttgcctcaaattcctggtctcaagtgatcctcccgtcttggcctcccaaagtgctgagattactggtgtgagccacctcaccctgccgaggcttcttaaaaaatatagattccccagaggcagggacccaccctgsgtttacgccatcaggagaaacctgacaatctgtgttttaaactagtgcctcaggtattaaaatttatgcaggaccaagcagaaggtgagcctgg

SEQ ID NO: 469626 - DNA, 582 bp, Homo sapiens
gaaagttggtttcagagtcagaaagatctggagtttaatctaatcattatttatttatttatttatttatttatttatttattattatttacttggccctgcctaagcaggacctcaaaaatttggttattaattaataattgttcctctccatggaaatctttagtaaaaggccaaatatttatttgttctgaagagaaaccagagcatccaatattattggctgtgtgaatctaaggcttctgccttactgagttgcaagcttcctgactcagctcacagattataagaagtaaatggattgacctctacggaaataatcaagcacagtgtgaggaactgtggttgctcagtctgtgacttatcctccccaactccctttcccacttcctctygccatgcctcttccctcctccctctccccatctccctcccccttccctctcttctacatttccccttttcttgctactttccatttcctgtccccacctcttctcctccctactcctcatctctcctctacactttctatatgagactaacacgaggacaagaggaattaaaaaccaagtcagaaat

SEQ ID NO: 469627 - DNA, 652 bp, Homo sapiens
gctggtgcctaataaatgtcagctctcaccttcccagcatcggccaacttgctcagaaaagtgctactgtgtctctgtattttggaaaatgaaaattaagttttcacatgtagatggaaaggatggagctgtaagaacaaatggaggagggcaggataggattgttactctggtaggagttaatgaaagagaacaagagaaaaaacaactagttgaaaatgaaaacaagaaaaccactaactggatgaaatacaaytgggcaaaggcttcatctggaatgaatttaggttggcatgacagtcagtcaccgtcagggattagtggatactgtgaagtcaggctttaccctcatggagtatctatatggagtttaggtcccaatggaaataccttcaagtgcaggtaaaatatttacagggagcttttacaacactctgtgttaggctaagtaccctcctctgggtttattagactacctttcaattagcatttaatattatatttaaagtaactatgtattgactagtagatcgtgagtttcttttgggaagaactgtgtttattcatcaacaatatgtctggtacacaagtagaagttcatcaattatcaacctaagccaaaacagaggctgggtcattgtggtagaccttg

SEQ ID NO: 469628 - DNA, 447 bp, Homo sapiens
gaaagttgacccaaatcatctcattaaaaaaaaaaaaaacacacatctgcaatagtgacctagttctcattttatcaaactcagcaggtttaaaatataatagggggaaaggggtttttcacaggtaaagcttttcctaatgcctttctaatcctatacttgctgtatgtacatcttttttytctctctctctcatccttatttttccacttttgccattttaactcatgcatttagaaaatctccacaatgaggctggttctgcaacgttggagaaactgcaaactgaattagatttctgttagagggaggaactgctgctgccagaatgaaaaagcgaggccagcaacactttgcttgaagcaaacactaagctgacactactaggagtatcagatctctcccgtgtcctctggcctcgcagtctcctttagcaccccctactgg

SEQ ID NO: 469629 - DNA, 480 bp, Homo sapiens
agtctaggaggtttgctttttccattctacgcaagaattcctaaaaagctatcatggatcatgagcaacataacgatccttagtatttttttatgtttccaatttaaagtgcaatatttaatgacactaatatctttcttggcccatgaccctcaggtgtgctgaggtaggaaacagtaggtgataatacagtaactgcatctactctcttacaaaaaaggcagaaataaaagaaacttatattctaaattttgaatatcaattattcttgtttttaagattaataaaattttaaacacaaattttcttatcaaaaacttcattggggaagaaaccaagttagcttgaatgtttaagcttccatggctcataaagstacagaacattcatcttttcctttttcacgataaacattatgtaagttttaccaaaccatgatgagtataagaacagggaatataatgctgaagtatccagagc

SEQ ID NO: 469630 - DNA, 508 bp, Homo sapiens
ctgactcctaagtcccgagacctagtaaataattcaatttttctgcccacrtatgcatattaggataatgagattaataacaatgatacaaatagagagattgattagtacaaatatagctacttaactatgacacataagcacaaaggagaatacaaactctgattcagacattcctcacatactttacgggcagaggagaaagaaaaatcttaaactattcaattatcactggtagttaatactgttcttctgcaattcctgaaggaaaatttgtgtttatatgataaaagggaataaaagaacagtttcatggctaggcacggtggctcacacctgtaatcccaacacttcaggaggccgaggtgggtggattgcttgagcccaggagttctagaccagcctgggcaacatggtgaaaccataaaaatttaaaaacataaaaaattaggtgcagcgcaccagcatggcacatgtatacgtgtgtaactaacctgcacaatgtgca

SEQ ID NO: 469631 - DNA, 545 bp, Homo sapiens
cttgcattgctataaagaaatatctgaggctggataatttctaagaaaagaggtttaattggcttacagttccgcaggctctacaggaagcatagcgccagcatctcacaatcatgacagaagatgaagagggagcaggagcaagagagaggtgaggaggtgccacacacttttaaacaaccagatctcacgaaaactcagtcactattgcaagaacagcaccaaggggayggtgttagagcattcatgagaaatccgtcctcatgatctaatcaccctcccaccagcggccacctccaacactggggattatattttgacatgagatttgggtggggacaagtatccaaactatatcagggacattaactgcacacagcagaacaacaaacgaaatcagtcacccctacctcccacactgtatctgcacctgctcttttaggtatgggcaatacgttccaactgacatttcactggtgcccgcaaagttccagacgctgttcaggatactgaggatttagaaatagtttaaatgcagttactac

SEQ ID NO: 469632 - DNA, 466 bp, Homo sapiens
cagggatggcaggttttccatagattagaggaaattcacactttgggcaggggtggggtagtgttctgatcttagacaaggagactgaaaatcaaggactggaaaaagtgagagggccagtgaatagtacagaaaacagtgaagtaaaaatgacatcagtcaacatttccttgtcctgaatattgggtagggtttcctttgggcgtgcaggtagctagtttatttttgtttgtttttgtatacaagattatttctctcctctcagaaggcatggctacamaatctttttgtattttattttattttactttattttattttattttattttatttttattgtgaagatgggtatggcaagtctccctatgtcatcgaggttgatcttaaactcctggcctcaagtgatcctactgccttggcctcacaaagctctgggattacaggcgtgaaccactatgccagca

SEQ ID NO: 469633 - DNA, 417 bp, Homo sapiens
attagtgggacttgtcacaccagtgggcttttcttggagccaccgtgtggtcactgcctttggatttctttgcatttgactgcagcttatatttagcccgttggaagctcagggtttctattcttccttccgggcttttcgtcttttgcctcctggctgctgaagtgaccatactgarcaaggtgaaaaggctgaacggtggcttcaggagcagaaagctgctaagctagagtttcctgtgcaagagtatggggtaacaaagcagagagttctggcactgaccccaaaagacaggggacgcctggcagttaggggctctttcccacctctggactaataaagattccttccacccatctggtatctccttcgcccacttctttgcctctaacaccaggtaccacagtttctttaatg

SEQ ID NO: 469634 - DNA, 586 bp, Homo sapiens
actgtgcctggcctgtatatatggtatatacacatttaagtgatggtctcagagctgacctcagcctccttcagatccaaggcaattgacaggcacttttaccggaagtagttggtctgagtgctttgatggaagccaccaggtgaactttcttcctctggtgccattcacccagttacaccacaactctccatacattagtgggacttgtcacaccagtgggcttttcttggagccaccgtgtggtcactgcctttggatttctttgcatttgactgcagcttatatttagcccgttggaagctcagggtttctattcttccttccgggcttttcgtcttttgcctcctggctgctgaagtgaccatactgaacaaggtgaaaaggctgaacggtggcttcaggagcagaaagctgctaagctagagtttcctgtgcaagagtatggggtaacaaagcagagagttctggcactgaccccaaaagacaggggaygcctggcagttaggggctctttcccacctctggactaataaagattccttccacccatctggtatctccttcgcccacttctttgcctcta

SEQ ID NO: 469635 - DNA, 417 bp, Homo sapiens
attagtgggacttgtcacaccagtgggcttttcttggagccaccgtgtggtcactgcctttggatttctttgcatttgactgcagcttatatttagcccgttggaagctcagggtttctattcttccttccgggcttttcgtcttttgcctcctggctgctgaagtgaccatactgaacaaggtgaaaaggctgaacggtggcttcaggagcagaaagctgctaagctagagtttcctgtgcaagagtatggggtaacaaagcagagagttctggcactgaccccaaaagacaggggacgcctggcagttaggggctctttcccacctctggactaataaagattccttccacccatctggtatctccttcgcccacttstttgcctctaacaccaggtaccacagtttctttaatg

SEQ ID NO: 469636 - DNA, 508 bp, Homo sapiens
tgctatgagataagggagtctcagagaggttaagtaacttgcccaaggtcatcacagcaagcaccagagccaggattctaatgcaggcttcctggcacctgtcagagtcacttcactctttacaaaaagctatgagccacacaatgtttccagcatgagagagccaccacataagcttctasctcaggttgtgacctcctggcgggctgccacatgactcatttgtcttggttttgcacacagttccaagcacaatgcctattgagtgagcagatgaattacaattcacgtactttcatgcaggggtgcctggtgcctggtgggatttggtggaaacagtgcaacgacatgctgtgaaagtgatgatttctccacaaagcagtaagaataatctttttacagagtaaatcagatcatgtcctgccatgggacggcagagagggcctctctgaagaggtgacattttgaactgagacctgagtgggaatacagaggaggagatgtattc

SEQ ID NO: 469637 - DNA, 508 bp, Homo sapiens
tgctatgagataagggagtctcagagaggttaagtaacttgcccaaggtcatcacagcaagcaccagagccaggattctaatgcaggcttcctggcacctgtcagagtcacttcactctttacaaaaagctatgagccacacaatgtttccagcatgagagagccaccacataagcttctacctcaggttgtgacctcctggcgggctgccacatgactcatttgtcttggttttgcacacagttccaagcacaatgcctattgagtgagcagatgaattacaattcacgtactttcatgcaggggtgcctggtgcctggtgggatttggtrgaaacagtgcaacgacatgctgtgaaagtgatgatttctccacaaagcagtaagaataatctttttacagagtaaatcagatcatgtcctgccatgggacggcagagagggcctctctgaagaggtgacattttgaactgagacctgagtgggaatacagaggaggagatgtattc

SEQ ID NO: 469638 - DNA, 589 bp, Homo sapiens
ggcactcagtatatccttttgtattttttttttcatttttcttgagatggagtctcactctgtcacccaggctggagtgcagtggcactatctcagctcactgcaacctccatctcccaggttcaagccattctcctgcctcagcctcccaggtagctgggactacaggcatgtgccaccacacctggctaatttttgtatttttagtagagatggggtttcaccatgctggccaggctggtctcaaagtcctgacctcaggtgattctcccaccttggcctcacaaartgctgagattacaggcatgaattaccgcacccggcctgtatatcctttttcgaatgaatgaatgaaaaaacagcagcttcttgcctagtgcccagaccctggggtctcacttccagccaaaacaagctactaggctcaccaccctctggtcatactatggcacctcccagcgatagtggctcaaggataataaatgtccttgtgattacagttcaacaggacacctcctgttgcaggtggggtcacatgttaccaagtagttttgggcatattctgggtgctctaaccagaggaagggca

SEQ ID NO: 469639 - DNA, 589 bp, Homo sapiens
ggcactcagtatatccttttgtattttttttttcatttttcttgagatggagtctcactctgtcacccaggctggagtgcagtggcactatctcagctcactgcaacctccatctcccaggttcaagccattctcctgcctcagcctcccaggtagctgggactacaggcatgtgccaccacacctggctaatttttgtatttttagtagagatggggtttcaccatgctggccaggctggtctcaaagtcctgacctcaggtgattctcccaccttggcctcacaaagtgctgagattacaggcatgaattacygcacccggcctgtatatcctttttcgaatgaatgaatgaaaaaacagcagcttcttgcctagtgcccagaccctggggtctcacttccagccaaaacaagctactaggctcaccaccctctggtcatactatggcacctcccagcgatagtggctcaaggataataaatgtccttgtgattacagttcaacaggacacctcctgttgcaggtggggtcacatgttaccaagtagttttgggcatattctgggtgctctaaccagaggaagggca

SEQ ID NO: 469640 - DNA, 483 bp, Homo sapiens
atgtacccagccactagatttcttatatacattttttattgaattctcaaagagccagacaacaataaagcctgttagaaagacactgccatccctgtgtataaaaagctgaagttcaataaaggtaaaggtcccaatgtcacacagcaagtggtggatctgggatttgaacccgcatctgccttgcttgtatttctagtggatacagaattcagcccacaaacccaggtgtgtgtgaatataactatttttctgcaagtgaacttcatttcttaatttccttgctaaayctgcctcttgcctagtttttccacctcatctcctagtaccactacttaccccagccatacacaggcaaaaagcatagacatcactggtgcctgtttcccccactccccagacccaacacaccaagtctcattggctctgccttcaaaaatatcatcgtagccaaaggcaacagcttctcccacttccccagct

SEQ ID NO: 469641 - DNA, 483 bp, Homo sapiens
atgtacccagccactagatttcttatatacattttttattgaattctcaaagagccagacaacaataaagcctgttagaaagacactgccatccctgtgtataaaaagctgaagttcaataaaggtaaaggtcccaatgtcacacagcaagtggtggatctgggatttgaacccgcatctgccttgcttgtatttctagtggatacagaattcagcccacaaacccaggtgtgtgtgaatataactatttttctgcaagtgaacttcatttcttaatttccttgctaaatctgcctcttgcytagtttttccacctcatctcctagtaccactacttaccccagccatacacaggcaaaaagcatagacatcactggtgcctgtttcccccactccccagacccaacacaccaagtctcattggctctgccttcaaaaatatcatcgtagccaaaggcaacagcttctcccacttccccagct

SEQ ID NO: 469642 - DNA, 553 bp, Homo sapiens
ctccagtctggaagacagagtgaaaytccatcccaaaaaacaaaaacaaatttcctcttcttctaaggacaccagtcagattggattagggccaccttaaggggctcaatcttaaatcacatctttaaaagctctatctccaaatacagtcacattctgagggatgggggtggagggttagggatttcgcatatgaattttggggggatacaattcagcttgtacagaagtgatgttgtgtccttctcagtatctcgaggcacaccccgctggcttgtcctgttattgctgatgtgactttgatcacttggataaggtggtgtctgccaggtttctccaccataaagtaatgatgtttctctttgtaattcatgagtatcttacagggagatactttgagactatgtaatcaatcctgctcctcttcaaatgttcactggctagtgtggttgccaagtgggtggtggttctctaactctacccttccttctgcatttatttgctatcataagagagaacttttcctaacgggggcttttaggggccagagaga

SEQ ID NO: 469643 - DNA, 600 bp, Homo sapiens
ctgcctgtgctgggagcccacccatccaggctgcaccccaagagtcacggagccagacacacgcatgcacacgcatccatgcagacacacttccccgagggtcttctaagaagaagggaagtggaagagccatgcctcatttctggtggcccagaagaaaaaattgataatgtagtagctgctcaatcagtacatattggaagagggagtgaatgacccattgcctgtcccggtcygtgtaatttggctctcttggattaaatcctgagttttatcttaaccttaggtgcaatggtggttgggaaggagggtgtggtcttgatgcacttttggagataagagcctaagtctcccctcagagaaatataaattgggaagggcctgagagatggccatcccacaagtccttctacagggaagggtgccaaggccttgtgggagccgccccgtcagatggcacagtggggccagctatcccatctccaggtaccagactgggcatgcctccgtgggagtcaggcatgggagctgggtctacaaggctgagcaggattttgacaaacagcaatcatgggaggcctctgggccagaaggaatagc

SEQ ID NO: 469644 - DNA, 597 bp, Homo sapiens
gataaaagccagtttcacctaatacacaactctgtctccagcaggatctattcctctaggcttagtgggtggtaactactggaaggtcggcagaggtgcaggaactaagaaataaaccaagactacaaaattaccactgtgcctacttcaatacacctttcttcccccactccaggtaacactcacatagaaggcacagcacaaaatgaatgcccactggttggttagtagaaagttgtaaagtaggcagagaatagcaaaggcaccatcatactgttaccaagcaaaggaggctcgctgcccgaggcactagaagtcaatactataacactgggtttttgataaaataaaaacttttattgcatgtcaaccaacaaagaaataggaagtccagctcaaatctgtctccctgtgctggctttaggacaattattttattagaaatggttttgagtgtggattctgggattagcaggtgcttggtggaaggaaagaggaagtctgraaagtccttgcgcatgtgctcttatttcttcatgctacctaagggttccacgtgcaaattcagtgaggagttagtatgaaacatggcagtag

SEQ ID NO: 469645 - DNA, 610 bp, Homo sapiens
acttgggaggctgaggtgggaggatcacttgagcctagaggcagaggttgtagtatgccaagatcacaccacagcactccagactgggcaacagagcgagactctttctcaaaaatcaaaacaaaataaaacaatacaaaaataggtgacacggcctagctcccctgttacccaggactggtctacagacagggtacttcaaaatcacctgaggagctttctagaaaaacagattcccaggctgcctctatatatggacattctgactccccaggtctragggggtgcaagggaatctgcattttttagtttttcagcttacattgagaactactgggctagcagcactgaaaatataagaaaaccaggactatggatctggcttacctgatgaccaagagcaagttagttgctacactttaattactttactcaagtggattttttgggacaattatgctagccactattttatataaacttgcttgatctccattaaaaatattaagtatataaacaggtggtaattttttctcatttcttctgttgaaaatttaactggcaggaacagctactcaaaatcatcaagattcctatcctctttttcatt

SEQ ID NO: 469646 - DNA, 632 bp, Homo sapiens
atgcaaataccagtcccatttccgttattttttaatttgagagcttaagtaagctaattaagttctcttcaactgtatctcttcatgcataaaatagagaaaataatactttcccttccttcctcacaagtttcatttaattgtcaaacatggacatggatttgaaggttattttctccgtatatgtaatatgcttattatatagaaagatacttacatatactgttagcagggaaagtaggtcacagascagtactaccatataatcttaatttttctagagagaaccacacaaaaatgttaataatggtcatctctctgtagtagaatcatgagtgaaatttatcttgctgcattttgtttatttgtaatttctgtttttgtacaattagcaattactactcgcataaaaataaaagggcaaattttagaacaattgtttattgaattataaaataacacatgttaattcataacattagaaaactacagaattgtataaaaaatcacagatattaaaatgcccttgctggactgttaatacaacccagaaaagagttgcagtaagccatctctaaggctgagttcttacatcccatggttcttgatactcggtgagttatcctaagcag

SEQ ID NO: 469647 - DNA, 481 bp, Homo sapiens
gagtgatcagctcaataccgaatcctccgtgtgccaagaggatccctttgaccctgaagccattgcaaattgttgctttttcttgtaagtagagtctgcccccacgtggtgaaagtgagaggctgcttttacacaccaggacgccttcctctcgcttctagggcagcaatttttgtagcgactggcgcccttttaccaccattctatctttgaactgctcttccttcttcccttccctctgtcctacttcccccttttcctcttctccttcctttcgtcttctttctgtttcatcccctctacttcttccttcccctttgctttcctgagccctccactgtattattcagtggcccagaccccgtgtctgggggaggatctggactctkatttgaggaattcaggaaagacaatttcaataaataattagagaataatcactttaagggataacaacatgacatcgtagatcctgaaccag

SEQ ID NO: 469648 - DNA, 498 bp, Homo sapiens
gactaactgcacgaagacctgtaaaatacttcactcagcgcatgtcccaaaggaaacacccagcccatggaagctgggtcactcttggcttcccctgctagcacccctgagcggctctgagtttgggaaaagggtcttacgtggcaaagggcatttatttccccgtgttgagggggttgaaagaagtgctcttacataggggtgaagagcacaagccttgctgttgtgagaccccggccaacttacttatcacctctccaggccacrcttccctcatctgtaaaaccggaattataatcatgacttttaattaatggagccacaatgaatctcacataagttcatggtcatagaagtgacttatctgtcctcactgtctccacttcctcaccctcaattctctcttgagatcactgcagactggcctttatcctcacgcctcactgtgtccagctcacgatcccctccatgctgctgaaaccaatggttacttttcaa

SEQ ID NO: 469649 - DNA, 479 bp, Homo sapiens
aagtttctgtgtgcagtgatctaaaaccccatgccccttgtgaagtgtgaattcactctctgccactaatggtacttcacatgaaaagcttcaaaagcgctgactgcaaacagccacacagaaaacaccacccatggacactgcaccacactgcccacacatacactgctaggcccccactccacacagtaaaggtcccctccatgagacaatggcattgggatgcaacagcctctcatatcatgtgggctgactctcagtccycaagagatcaactggttgtccttcttcccacaggttctcagagatatcagtccctgtctgaaaggaggagctacacccacgatgttaatttctctattcccactgtccagcatgcttggcacagatgaggcattcaattaatgtgtgttgggatgaactgaactccagacagatgcctggacctcctcgttccttcctcctgagggtggaggcag

SEQ ID NO: 469650 - DNA, 540 bp, Homo sapiens
gagcccaggagatggaggttgcagtragccgagattgtgccactgcactccagcctacgcgacagagcaagactttgtctcttaagaaaaaaaaaaggatatgtgtttgttattattaggggcttactccatatgaggaccagtattaagtgctttgcaagccctctgtcctttaatattcacaacaatcctacgatagaagcactatttgtaatctccactttgtagatgaggatgctaaaatttagagacaccactcgtctaagaaatagcagaaccaggatacaaacccaaatctatttggttctagagcctgagtttcaaccactatgctatggtgactggatgaaaaatgccatttcatggttgtaaagcacttttctgttttcgagctaccttcaaacagagtagactgatgcattataaaaggaagtgactaaacacaatttggtattccggactgaatcctggaatagcgaaaggacattagtgttgaaactggtgaaattctactttggttaatagtaacatcccaatgct

SEQ ID NO: 469651 - DNA, 642 bp, Homo sapiens
atttagcaagctgcaggaggataagtctatggctaatagggtaaatttttattgtctttttttttttttttttgagatggagtctcactctgttgcccaggctggagtgcagtggcatgatctcagctcactgcaacctccacttcccaggttcaagcgattttcctgcctcaacctccctagtagctgggattacagatgcttgccgccatgctcagctaatatttgtatttttagtagagacggggtttcaccatgttgaccaggctggtctcgaactcctgacctcaagtgatccgccagcctcggcctcccaaagtgctgggattacaggcgtgagccaccatgcttggctgagtaaattttttwaaaaaagaaaaaaaaaatttcaggctaaatttcatgaaaaaatttcctggctgtgaaatctattagcctctgaaaagtgtcttttatgacaatattagagaagggctatcccttaagatatttaaagcaagggagaaagtaaatgtaacggtttactataagaaacaattaggcaaaattgagaaggtaggctggatgacttaagatatttgttgtccttaatgatcatatttagtgatttgaatggttaaatcctaaatttttgaaattata

SEQ ID NO: 469652 - DNA, 523 bp, Homo sapiens
aaaacacccggaaaaagtgcgcctgagaaaatggtggaaagtaaggagccagacagccaggtgaatcgtggaatgtcagaccctagtcatcctgaagtcagggtcttctcattcatctttcattttgtttgaggaaacagtaacttaaggatgacattagtaattcgtcttattttcctgttatttacctgataaggatcagcaccctcttctctgaaaatagcagtttacctatgtgggtatggaatgtaggagacctctagctgaatggatctctggtgtgttctcttccatttcatatccctttttttgcttactttcaggtcccgtatccagtctattttagatttttaactcttcacagaacctaggtattatcacttactagttagtatatgaactcaaccagcaattcctaagatatcttttttttttttttttactgactgggggatmtaactgggttcctgttcactcttaacatggaagcaattaaaaggcaacacagcaaacttctaacaaa

SEQ ID NO: 469653 - DNA, 622 bp, Homo sapiens
atataataccagctgcatgaaaggattcctattgatgggtccagattcagggcaggagcaagtattattcaagcagagaatcagtacaggtacttgtgctcataaaatcactggaataactagggaaacaaaagttaagcctgccagtggaatagtgaattcaagagcacagtaccatagctgaaatgcaagggacagaagctgctgttgctgyatattgcaaccctgagtctggctgccacatctgtctttaagtgctcacacttctatgggctggcttgcaagcaataacagcagaaggaagatggcctctgcttcattttaccttccaaaacttgttcaatacacctattaaacaactgtacttttctctcttgttattttttcctctcagaagaggttttgctcttcctttcttttctatatatatatatatatatttcccaattcttggttttaattaggattatttctggcccatctccctgtcctaccacggaggcccaatgtttagtccaccactttctaccctccaaaatgtacaaaatatctaggctaaaaaaatttttaatcaaaacaatttataaaccaattaacggtttataaagttaatttagtacag

SEQ ID NO: 469654 - DNA, 622 bp, Homo sapiens
atataataccagctgcatgaaaggattcctattgatgggtccagattcagggcaggagcaagtattattcaagcagagaatcagtacaggtacttgtgctcataaaatcactggaataactagggaaacaaaagttaagcctgccagtggaatagtgaattcaagagcacagtaccatagctgaaatgcaagggacagaagctgctgttgctgtatattgcaaccctgagtctggctgccacatctgtctttaagtgctcacacttctatgggctggcttgcaagcaataacagcagaaggaagatggcctctgcttcattttaccttccaaaacttgttcaatacacctattaaacaactgtacttttctytcttgttattttttcctctcagaagaggttttgctcttcctttcttttctatatatatatatatatatttcccaattcttggttttaattaggattatttctggcccatctccctgtcctaccacggaggcccaatgtttagtccaccactttctaccctccaaaatgtacaaaatatctaggctaaaaaaatttttaatcaaaacaatttataaaccaattaacggtttataaagttaatttagtacag

SEQ ID NO: 469655 - DNA, 622 bp, Homo sapiens
atataataccagctgcatgaaaggattcctattgatgggtccagattcagggcaggagcaagtattattcaagcagagaatcagtacaggtacttgtgctcataaaatcactggaataactagggaaacaaaagttaagcctgccagtggaatagtgaattcaagagcacagtaccatagctgaaatgcaagggacagaagctgctgttgctgtatattgcaaccctgagtctggctgccacatctgtctttaagtgctcacacttctatgggctggcttgcaagcaataacagcagaaggaagatggcctctgcttcattttaccttccaaaacttgttcaatacacctattaaacaactgtacttttctctcttgttattttttcctctcagaagaggttttgctcttcctttcttttctatatatatatatatrtatttcccaattcttggttttaattaggattatttctggcccatctccctgtcctaccacggaggcccaatgtttagtccaccactttctaccctccaaaatgtacaaaatatctaggctaaaaaaatttttaatcaaaacaatttataaaccaattaacggtttataaagttaatttagtacag

SEQ ID NO: 469656 - DNA, 622 bp, Homo sapiens
atataataccagctgcatgaaaggattcctattgatgggtccagattcagggcaggagcaagtattattcaagcagagaatcagtacaggtacttgtgctcataaaatcactggaataactagggaaacaaaagttaagcctgccagtggaatagtgaattcaagagcacagtaccatagctgaaatgcaagggacagaagctgctgttgctgtatattgcaaccctgagtctggctgccacatctgtctttaagtgctcacacttctatgggctggcttgcaagcaataacagcagaaggaagatggcctctgcttcattttaccttccaaaacttgttcaatacacctattaaacaactgtacttttctctcttgttattttttcctctcagaagaggttttgctcttcctttcttttctatatatatatatatatatttcccaattcttggttttaaktaggattatttctggcccatctccctgtcctaccacggaggcccaatgtttagtccaccactttctaccctccaaaatgtacaaaatatctaggctaaaaaaatttttaatcaaaacaatttataaaccaattaacggtttataaagttaatttagtacag

SEQ ID NO: 469657 - DNA, 639 bp, Homo sapiens
tctctaacttttgaaaatctgtaacaactactgagatgtaatatggtgcttggagaaactgcaggcatttgagtcaaatagaggtgagttttaaactgtttgcaagctgcacaatctaagtttcttaatctcatgatgctagttctttgtctgcaaaatggagttaattataaatcctttggagggctgttacaaaaattaggtatgatcgacatcatagctgaacatagcataacaagcctgacacataatattggcttaaataaatagaagctattacttctataagttttgatagtatgacttatttaaaattaattatatacctttttcttgacaattatctcttatgcatatactgtacacatgccaccaggatataaaaccctttagactaagaatcatgtatatatctttgcatatgccacagtatcatgcaaatatcaagtgcttgaaaatgttgattgatgtcatatttacttatgagtacataatatttttagaaacaggcttgctgaatattaagttgacaaaagagtttacaattgtaaaacatcttcaagtcttggtataatttgactagaatttaaatcactccagctttcrtttatgaaggtagtcactgtaaggtctataaaa

SEQ ID NO: 469658 - DNA, 598 bp, Homo sapiens
tgtggttggagttctacgttaaaggatctgattataccatttccctaccagaatattttcaatttgaattgtgtgaaacagtctcttgaacctggcttaccaattctctcatgatctggttttatccacaaagattcatctcctccagcttttcaaacacgaactgttcagtaacatgcccaactatttgmagcttcccaaatatcccaagttcttctatacttctgtgctttgcataatcatgcttttaacctaaaatatactgaccttcttaatttttatttactccttgagttaacatgagtcatctcctttttaaaaacttcagtgatcctatgaggcagagagtatactctatccactgtgccccttggcacattgagcatgtctctagtccttgttgcactatattagaatcatttgattacatattttcccatctccaactaaatagtgcatacttaatgggcaggggctgctattattaatgcaggtgtaatgcctgcaacatagcaggcataaccatgtgcctgtgacataccaagcacaataaatgtgcatataatgccagtaacatagcatgtaatgcctagtatac

SEQ ID NO: 469659 - DNA, 516 bp, Homo sapiens
tgggcagagttggcactccactcagtgatgacctcgtccacagttacctgcatcagtggttcacagcccaggtggcacattagaaatcacctggagaacattaaaaaaacatagatgctgaggacccaccccaagaggttccaattcaatcagtctggcatgaggcccaggcagcagcattttgtaagaactccccaggtggttctaatgtgtacctaaggccaggaaccagtggcttagagagatcacaaagagatgaacgacttaattaaccagtggttccagaccattgcctgtgttggtcacaatgttatctccatggtttgtgaacttcttcagtcctttaagggtagggatcttggacctcaaattagagattttcatctccttaagtcaggccttccccactcatagttattctaaaggcaccatgtccggtagttaagagtgtgaacygagactcaggcccctggtctcaaattcctgttctcgaatctagttcctgtaagaccatgg

SEQ ID NO: 469660 - DNA, 574 bp, Homo sapiens
aacaacccctcagcggtcttttttacttttggaagccacataaagaaaggtgtataggctttggaaacagataaaattgcttttttaaaaaaatatgttttatttttttaaaatttttccacaagttattggggtacaggtggtatttggttacatgagtaagttctttagtgataatttgtgagattttggtgcacatatcacccgagcagtatacactgcaccatatttgtagtcttttatccctagctccccttccactcttccccctaagtccccaacatccgttgcatcctcatagcttagctcctacatatcagtgagaacataygatgtgtggttttccattcctgagttacttcgcctagaataatagtctccaatctcatccaacttactacaagtgctgttaattcattccttttcatggctgagtactattccatcacatatatatgccacaatttctttatccagtctttgtttgatgggcatttgggttggttctatgattttgcagttgtgaattgtgctgctataaacatgcatatgcaagtatgttcttcaaataatg

SEQ ID NO: 469661 - DNA, 519 bp, Homo sapiens
ttgcaaatggaaatccttggatgttgcctaaattattkttcttcctccactttcttaattgcagtaaaagatcctaataggcacccagtttttcaagctagagaccattcttccatttctctcacccctcacatttaattcactggcaaatattcttgaccgtatttatcaatatatatttcaaatctgtcccctgacagtcttactacaattactgcccagtgtaagtcatcctagtctcttttctcaactactgtaatagcctcttaactgcttttcttgccaccatccctgccccctctactctattcccaatgcttaaaaacgtgtaaattaattctactcctaggtatttagccaagaataacaaaaacatatgtctacagcaataattgtacaacattcatagcaggtttctttacattagccaaaaattgggaacaatccaaatgtccatcagcaagttaattgacaaacatattgtatatttatacaacggaatactaatcagtttttaaa

SEQ ID NO: 469662 - DNA, 519 bp, Homo sapiens
ttgcaaatggaaatccttggatgttgcctaaattatttttcttcctccactttcttaattgcagtaaaagatcctaataggcacccagtttttcaagctagagaccattcttccatttctctcacccctcacatttaattcactggcaaatattcttgaccgtatttatcaatatatatttcaaatctgtcccctgacagtcttactacaattactgcccagtgtaagtcatcctagtctcttttctcaactactgtaatagcctcttaactgcttttcttgccaccatccctgccccctctactctattcccaatgcttaaaaacgtgtaaattaattctactcctaggtatttagccaagaataacaaaaacatatgtctacagcaataattgtacaacattcatagcaggtttmtttacattagccaaaaattgggaacaatccaaatgtccatcagcaagttaattgacaaacatattgtatatttatacaacggaatactaatcagtttttaaa

SEQ ID NO: 469663 - DNA, 628 bp, Homo sapiens
ccatctaactgctggccactttatatcctcttcctctctcctcctgtcttcctgtcctttagtcccactggactctctgagaggtagctaagtatgccaagatttttccaaatgcagggcctttggatgagtcatttctttggatggacctctcttcttccattcttcacatgattgttttcttcttgtgctttaagtcttcaagaagccctcccaatagatacattttggttacttgctcatctatctcctcactagaagacagactatgaagrcatgcataatgtctctctcagttgccattttatgctaaattcctagaacagcaccttgttttctgttttctgagtctctatgcatcagtgagtgctatccttcacctatgtcatctccttcagccctgaggttaagcatgtccttttatgttgctctgactagcaccatggtcagcagtaaatttaaagatcatgagactgaggatgcagttggagcaaatatcgggtaggacatgataactattttggcatgttttgaagtccatctggcaaatgtgtatgtgtgaattggaactatgggagactattcagaaaggctggtactgggtaggatgctaccagtatgagtttag

SEQ ID NO: 469664 - DNA, 627 bp, Homo sapiens
ccatctaactgctggccactttatatcctcttcctctctcctcctgtcttcctgtcctttagtcccactggactctctgagaggtagctaagtatgccaagatttttccaaatgcagggcctttggatgagtcatttctttggatggacctctcttcttccattcttcacatgattgttttcttcttgtgctttaagtcttcaagaagccctcccaatagatacattttggttacttgctcatctatctcctcactagaagacagactatgaagacatgcataatgtctctctcagttgccattttatgctaaattcctagaacagcaccttgttttctgttttctgagtctctatgcatcagtgagtgctatccttcacctatgtcatctccttcagccctgaggttaagcatgtccttttatgttgctctgactagcaccatggtcagcagtaaatttaaagatcatgagactgaggatgcagttggagcaaatatcgggtaggacatgataactattttggcatgttttgaagwccatctggcaaatgtgtatgtgtgaattggaactatgggagactattcagaaaggctggtactgggtaggatgctaccagtatgagttta

SEQ ID NO: 469665 - DNA, 579 bp, Homo sapiens
ctggctggaacacagtggccaagagggtcagataatcttgctttatttcctaacccggaccggcctttgttccaggacagggatcctggtcatagatccaaaaacaataatcacaaatccatcccacatccaggaaagggaccagatgcatattctgctgatagtggccaagaacgtggctggtctgtgtgtctaacgggcagtgcatggtgactgcactgcatcaaccttaatgggatcttctggaagaaatgtcggtgtggggaattgtagaagattggtctttgtttccttctctgatcaatagtctcctccaaccccactcccagcacatacacatgaaagaaaataaagaaaaagaaaaaacatgctactaacaatagcacttctctttcatgaattmttattatgtgtgagatgccatcctgagcctcttacatacattaactcattgattccactggtagctctgtgaggtgtatactattagtatactcactttatagataagaaaactgaggcttagaaaaattaagtaaactttctaagattatacaatccattagtgacagtggaaga

SEQ ID NO: 469666 - DNA, 421 bp, Homo sapiens
atacaaatagcaaaaatttattatatacacacacataaatgcaaaaaggaaacaggaaaacacatgaaaacatcaacagttgtctctgagcagcrggatccgtaagttctacaaatactcgcaaagcacctactctgtgccaggtacttttctagggtctgggaatatgtcagtgaattaaacaaatgtcctgccctctagagagagaaataccacaaaaagagaagaaataaagatggaacataaactcagaaaatatcatgaaaaataaagtagggtaagagggtattgatggaggtgctactttagactacttggtataggaaagactctgataagatatttgagcaaagatctgaaggaagtaagagagcaagtctgtggttaactagggaaggagcagttgaggtggagagcaaat

SEQ ID NO: 469667 - DNA, 421 bp, Homo sapiens
atacaaatagcaaaaatttattatatacacacacataaatgcaaaaaggaaacaggaaaacacatgaaaacatcaacagttgtctctgagcagcaggatccgtaagttctacaaatactcgcaaagcacctactctgtgccaggtacttttctagggtctgggaatatgtcagtgaattaaacaaatgtcctgccctctagagagagaaataccacaaaaagagaagaaataaagatggaacataaactcagaaaatatcatgaaaaataaagtagggtaagagggtattgatggaggtgctactttagactacttggtataggaaagactctgataagatatttgagcaaagawctgaaggaagtaagagagcaagtctgtggttaactagggaaggagcagttgaggtggagagcaaat

SEQ ID NO: 469668 - DNA, 449 bp, Homo sapiens
tgcacacatcctgcccttgggtacactctgatccagtcagaccctctgttgttgtagagggggaaagaggaccctctgttgttgtagaggggaggtgacctggccaaggtcacacagctcgtcagtggcatggccagaccctaagcaccctcagttcctacccctgctcctccctgctttcttgcacgtggttttgtctccccatgctggagtcctgacacctggggctctgcytttttggggagcagggcttgggctacttccctcctgaggagtctccaggggaggccgagtgagtgcgcttacccgtttctgggatcttccccgcagtcccccacccctcggacacactgtcccggcggggagactctgtagtggaaggaggggctgacataggacctcctcattgagtttttttgttttcccacttagaaatcttgggttccaag

SEQ ID NO: 469669 - DNA, 449 bp, Homo sapiens
tgcacacatcctgcccttgggtacactctgatccagtcagaccctctgttgttgtagagggggaaagaggaccctctgttgttgtagaggggaggtgacctggccaaggtcacacagctcgtcagtggcatggccagaccctaagcaccctcagttcctacccctgctcctccctgctttcttgcacgtggttttgtctccccatgctggagtcctgacacctggggctctgcttttttggggagcagggcttgggctacttccctcctgaggagtctccaggggaggccgagtgagtgcgcttacccgtttctgggatcttccccgcagtcccccacccctcggacacactgtcccggsggggagactctgtagtggaaggaggggctgacataggacctcctcattgagtttttttgttttcccacttagaaatcttgggttccaag

SEQ ID NO: 469670 - DNA, 599 bp, Homo sapiens
ccggcggcggctcattcgggaaggaggagcagggagccgggcccagagctgtcacccagggttgggagggaacacagagcccgcctgcccgctgagctccccttcctgtcccaagtgctcagccataccccagctcccaggaaccagggagaggctggtggtcggatgcccctctagagcagagctgggcctgcagctctagggcctccctgcccctcctgccgccaggagtgcccaggccggatgaggcacttccctacagtgtgggtcccgtcggcagtggcctgagggaacctgtgctstgcgggctgcccgaccaccttcccttcggtctgctccccgcctctggcggccccctccctggcatgctgctggtgcccaaggctcaggggctcgtggagatgctgcagaccatctatgagacagaatcctgtttctcagcagatgggatgtcaggtcgggaaccatccttggaaatcctgccgcggacttctctgcacagcatccctgtgacaggtaagtgccttgatgtccctgcctgccctctgtcatctggcatccttgtccctgggctgagcatctggccctgagccttgcac

SEQ ID NO: 469671 - DNA, 518 bp, Homo sapiens
tgctgctccctcgccggccgacgcgcccgcgcacgctcacgcacggcacgcacggcacgcggggcggagcgggggcgcgggagcggcgaaagctgcgtactcggcgggcagcggcccgggcgacggtggccgctgagagacaaactaggcccggccgttgggcggggctccaagcgggggcggggcttccggcgggggcggggccaaagcaggcggcggaagagacgagaagcggggcgtgcgcggggcggggccgaggccctcctcccctcccgaagctgcccaggccttcgtgtccctcagtrcttccctacctcatcgccgtctcccctcacggtacttcagcccactgtccccaccgttcctggggctcgccaggcgccctctcccccgcccgctgcccggtgcagcgctctcccgacgcccgcgtggctttcttccaggtctttgctcaaatgtcagcttacaaggtcttctctgctgccctcctgctccgtggcactgattccctcccgatg

SEQ ID NO: 469672 - DNA, 566 bp, Homo sapiens
ttgtgggccatacattctctgtcacagctactcaaatctgttgttatagcatgaaagtagtcacagatgatgtgaaataataaacctggctgtgttctggtataactttatttaaacaaataggtagtggccattgtttgccaacccctgctrtacagtctatctgtatgggagagtcttggaggcttgactcttccagtatgatctagagaagtgttctcgaatagaaatgtaatggaagccacatacaaattttaaaattttctaatagctacctttaaaaaaaggtgaaattcattttaacaatatattttatttaactcaatatattccaaatattatatcaacatgttgtcaacattgtaaatttattaatgaaatattttactttctcttattcatagtaagtctttaaaacctgatgtgcatcttacccctacagcacatctcaagtcacaccagccacatttccaatgttaaatagccacatgtgaccaatggctaccatattagagagtacagctctaaacactttattgctcccccagatttgaatgcttctccta

SEQ ID NO: 469673 - DNA, 614 bp, Homo sapiens
gaccagtccttcaaataacagtcacctgtaaaacacatatttgtaatttacacccatatccacagagaaaagccagcccgataatcattttaattccaaccccagtaggcaatgtttctggtatcccagkcacacataatatttataagatttaaataagcatttaatatttgtaaatttgtaattgtataactttgtatatgtattgttattttccgtatggctattactggtctatgtgttgcttaatgatatcaaaggtaaattgtggctgacaggagctcatccaccgtaattcatctcttcttaggatacaacaaatatttgatcaaaacctactatcattcttgtcattatcatagtaaagtggtttattacacatgagttacactcaaagaaagcctaaatataaacagaattagtcttctaggtattcacaattttgaaaagtttgaaatccaaggccgacagagctggttttatgttttcattcctatttcttcccagatgagtggaggtgagagagacaactgagcagttgcagtactggaaataatgctcactatttcctctgatctacatcctcaatcaacttctctttaaaatattgattt

SEQ ID NO: 469674 - DNA, 666 bp, Homo sapiens
gctgggggcttcagagaaagctccctggacaacaggatagtattcagttagccagtttgatacaaaagagcaagagtttaaaacagattattttagaaaggaacttggaaatatatttggccttgaagcaaaaaagttattggggttgaaaatctgcattagttcagattgaatatgctgttccttctctttaagagtatttgaagtgatgcttcctaaatcagaaggccagaatataataaactgctgcttgaagcagattctcttagagttttctatgagcacagattccctaaaagcaaaactgcagacaattttatccagaagactggggaggagtgaacagtcatgttggcacatgtgcaattgggagatagttttgtgtcttgcttytctgtataattaggctttgtcttacctcacttttcgggtttgcacgccctctccacagttctcccgcatattcacaaaggtcaccttgcagatgctccagggctctgtgacccataggtactggttgcagtcactgtggcatgggacaacctcatacacctgaaacacacatggttctcagcaatctcagggaatctggtaagagtgaggaggaagacttccacaccataacagcaatcatttcactgtgaagctactttcactcccctcctt

SEQ ID NO: 469675 - DNA, 623 bp, Homo sapiens
gacctcaggattgggagaaagatcggggacaagagacgggcacaacagtcacctggtttctttttcttcctttattttttgagactgagtctcgctgtatcacctaggctagagtgcagtgacacgatcttggctcactgcaacctccacttcccaggttcaaatgattctcctgcctcagccttctgagtatctgggattacaggcgtgcactgccatacccgactaatttttggattttagtagagatggggttttgccatgttggccaggctggtcttgaactcctgacctcaagtgatctgcccaccttggcctcccaacgtgttgggattacaggtgtgagccaccgtgcccagccacatggtgtcttccrtgacagctccctctctgctgaaatagcatttcccacccccacccatggcatcactcttctgctgccattttcatcaaagactgatgtcacttggcatgtttttaggtttttttctggtggcttttatttttttaattttagagatgaggtctcactatgttgcccagcctagtctcaaattcctaagctcaagggatccacctgcctctatctcccaaagtgctggggttacaggcatgcaccacca

SEQ ID NO: 469676 - DNA, 314 bp, Homo sapiens
aggacaatggggcttccaatggcaactcgagacgttagtttactccagagtcatggagacagtgaatggagtgtgtgtgtgtgtgtgtgcgtgtgcgtgagtgagagagagagagaggaagaagggagggagggakggttacaggagtgtgggaaagtcaacaggaaaaggagggaaggttcgctgtgaactgacagtaactgtgacatcacaggcatgtgcggagtccccgcccccccaggcactgtgccaaggccagtaccttcatgtcatgagaccctctcagcaactctgtaaccttgtccccaccagaa

SEQ ID NO: 469677 - DNA, 565 bp, Homo sapiens
agcagtactcatgatgagaaggatcctttggctgccccttagcacctgcattaccatccatcaataamtctcttccattggaaagtctctctccccgtacctcatgttttgagtcatttcatctcctgggtatgtctctctctaccttatcctaccctccccagtgctagcggagtttcaaggttcagcgccttgatgggttaatcattggtcactaggtaaaatatctcagtggcaggcccaggaaaaggtgaagtgtcctaggacaggaaaaagatgaaggaaacggaaagggaaactgactcgaatcccaccttatcatgcagagtccaaccaatatattttaaatagctgtcggtgaggaaagacgtgctgtagctttgcatccaacacccaatttcctcaatgcagatagcacggatctcaggaaggacatccctagacacagacagataagtcgactcttagagccaccctctctccaaactcactttccatcctaccagttaactccctctcatggaagaatttattttcttgaaatgccatgtaccccatgcctttc

SEQ ID NO: 469678 - DNA, 565 bp, Homo sapiens
agcagtactcatgatgagaaggatcctttggctgccccttagcacctgcattaccatccatcaataaatstcttccattggaaagtctctctccccgtacctcatgttttgagtcatttcatctcctgggtatgtctctctctaccttatcctaccctccccagtgctagcggagtttcaaggttcagcgccttgatgggttaatcattggtcactaggtaaaatatctcagtggcaggcccaggaaaaggtgaagtgtcctaggacaggaaaaagatgaaggaaacggaaagggaaactgactcgaatcccaccttatcatgcagagtccaaccaatatattttaaatagctgtcggtgaggaaagacgtgctgtagctttgcatccaacacccaatttcctcaatgcagatagcacggatctcaggaaggacatccctagacacagacagataagtcgactcttagagccaccctctctccaaactcactttccatcctaccagttaactccctctcatggaagaatttattttcttgaaatgccatgtaccccatgcctttc

SEQ ID NO: 469679 - DNA, 565 bp, Homo sapiens
agcagtactcatgatgagaaggatcctttggctgccccttagcacctgcattaccatccatcaataaatctcttccattgkaaagtctctctccccgtacctcatgttttgagtcatttcatctcctgggtatgtctctctctaccttatcctaccctccccagtgctagcggagtttcaaggttcagcgccttgatgggttaatcattggtcactaggtaaaatatctcagtggcaggcccaggaaaaggtgaagtgtcctaggacaggaaaaagatgaaggaaacggaaagggaaactgactcgaatcccaccttatcatgcagagtccaaccaatatattttaaatagctgtcggtgaggaaagacgtgctgtagctttgcatccaacacccaatttcctcaatgcagatagcacggatctcaggaaggacatccctagacacagacagataagtcgactcttagagccaccctctctccaaactcactttccatcctaccagttaactccctctcatggaagaatttattttcttgaaatgccatgtaccccatgcctttc

SEQ ID NO: 469680 - DNA, 516 bp, Homo sapiens
ggaacacctggacctcttcatgtgatctttcttgcaagcttctttacagcgtgatggtctcagggcagcattctttccgagagggcaagtcccaatgcacaggacttagggagcagatttgccaataccccattggccaaagccgtgaaaatcacatagccagacctagagtcaatcagtgaaagaccagaaaagggcagtgctaaggaacccaaagaggagggaattctaccaggacggtgcccatccaacacttgtgttaccttgggagccagtacctccttaaattcagggcccaaagtgcctcaacttgcttcaccccaattccagcctgaatcctcaggacttggcaactcagaggtcaatttccttaacaccccaacatgaatttcggaagttagtttcacagaaatcttaagcaccaaatacaactgagcgaaagcaattctgcamgtcaaaaacaaggtggtctaaatttgcaaactttatggcagtctggcttgatgaaatataaag

SEQ ID NO: 469681 - DNA, 409 bp, Homo sapiens
tggaaagaaacagaattgggatttgaaccaggtcccgtctccgctgcgtgtagcaccctgctttgtaggcacttagtaaacgtctgtttgatggatttctgaccatcagagtgacccagatttcaacccaagtatttgccagagtctcataggagtgccctggggctggaagatatgtcgttgtagaaggcaggatcacacctgctagaagcagagcccagcgaccctgtcccgggtctgctgaaccaggcctctgcccaggacctttggaggagcatctgggtgtggctggactaggcgaggaatgtgcttayttattctcagcataaagccagaaggcaagaccctgggtaggtctgtccgatgagcttcccttgtcctctgtggtaaccctgaggctctgtgacct

SEQ ID NO: 469682 - DNA, 523 bp, Homo sapiens
tgctgagctgaaatactgcgcccgtttctttccattcaacttgtcttggtttgacctagaaccacactgcacaggagaagcaccattttttgttcagactctcatctgaagctgragcttctgctaagcacttgtttgcgtgggagtggaaggggacatgtgcacccacagttgtggcgaaaagatccttgggtgtgacaaaggaggaggcgggccaaggagacccatccactgtgtccctggaccctcccaaggaatcccaggaactgcgaagcataaaccacatcttcactgtcttagagacgctgctgtccttccttcattttactcatgctaaaggctctatttttcttttctctagaactttctttctttccttttttctgagacggagtttcactctgtcacccaggctggagtgcaatggcgcagtctcggctcacagcaaactctgcctcctgggttcaagcgattctcctgtctcagcctcccaagtagctgggattacaggcgtgcgtggtgg

SEQ ID NO: 469683 - DNA, 523 bp, Homo sapiens
tgctgagctgaaatactgcgcccgtttctttccattcaacttgtcttggtttgacctagaaccacactgcacaggagaagcaccattttttgttcagactctcatctgaagctggagcttctgctaagcacttgtttgcrtgggagtggaaggggacatgtgcacccacagttgtggcgaaaagatccttgggtgtgacaaaggaggaggcgggccaaggagacccatccactgtgtccctggaccctcccaaggaatcccaggaactgcgaagcataaaccacatcttcactgtcttagagacgctgctgtccttccttcattttactcatgctaaaggctctatttttcttttctctagaactttctttctttccttttttctgagacggagtttcactctgtcacccaggctggagtgcaatggcgcagtctcggctcacagcaaactctgcctcctgggttcaagcgattctcctgtctcagcctcccaagtagctgggattacaggcgtgcgtggtgg

SEQ ID NO: 469684 - DNA, 618 bp, Homo sapiens
gaattgttacaaaaacattgcagaacttgtcctaatttttttttttttttttttaaatgaaggagcctgtctcaatttagtatccttaaccaaacatgatttagtcccagggcaagaactggctataaagaaaatacagctattttagtaacagctctttagtcctggctgttcatggaaagctaactatgaaggcatttgaaacttctcattaagaaccatgatgttggccgggtgaggtggctcacgcctgtaatcccagtactttgggaggctgaggcgggcrgatcacgaggtcaaaagatcgagaccatcttggtcaacatggtgaaaccccgtctctactaaaaatacaaaaatcagctgggtgtggtggcgtgtgcctgaagtcccagctacttgggaggctgaggcaggagaatcgcttgaacccaggaggcggagattgcagtgagccgagatctcgccattgcaatccaggctggtgacagagcaaggctccatctcaaaaaaaaaaaaaaaaacaaacaaaccaaaaaaaaaaccacgaagtttgatttaaattggacttggtcactctggataatgtaaaacagaagtcacttactgagacgtagg

SEQ ID NO: 469685 - DNA, 422 bp, Homo sapiens
tgaactgataaacaaaatgtggtatacccatataatgaaatattatttaacaataaaacatgctatactatggatgcaccttgaaagtattatgctaaatgaaagaagccaatcagaaaaaaaaattgtatgattccactgacatgaaatgttcagaataaaacctatagagacagaaaatagatgagtggttgcctgggtttgagggagaggaggagaggtaagaatgatgaatcattgctaataggtaaggkgtaataaatctcacatttaagtcaagacctggactcttgatttcccattccaatcttagtatactctacttttccccttctcagttacagtgccaccattagatagttggtttgactagtagtcatctactatgagatgactactagatctaatgtagatcaatagtc

SEQ ID NO: 469686 - DNA, 446 bp, Homo sapiens
aggctacactgaattctcataatactttcttctgatactgaagatacatatatatcttcyccataattatctatgtatgtctcctattcatcaaaccagtttgtaagttttttgtgggaactggtcatatgttattatcttcatgtcccccacagcttactttcgacaggcataatacaaatagtttttctcttctaatatcttttagataaaatgttaacctcgctttctttcctcattaatagtagatataggctgtcacattcctcaatattaatgttaagctcccaaaggtatttgcagaaaataagtgatgtagcgtttattttcttggagataaagcaggatataaaatgttttaaagatagaacatttttataggaataggatttctgacccagaaagctggccaaattccaatccaggtaattcactcctgttcccct

SEQ ID NO: 469687 - DNA, 446 bp, Homo sapiens
aggctacactgaattctcataatactttcttctgatactgaagatacatatatatcttccccataattatctatgtatgtctcctattcatcaaaccagtttgtaagttttttgtgggaactggtcatatgttattatcttcatgtcccccacagcttactttcgacaggcataatacaaatagtttttctcttctaatatcttttagataaaatgttaacctcgctttctttcctcattaatagtagatataggctgtcacattcctcaatattaatgttaagctcccaaaggtatttgcagaaaataagtgatgtagmgtttattttcttggagataaagcaggatataaaatgttttaaagatagaacatttttataggaataggatttctgacccagaaagctggccaaattccaatccaggtaattcactcctgttcccct

SEQ ID NO: 469688 - DNA, 682 bp, Homo sapiens
ctgtaatgttacatttaaagaacattagtggagttggaggacctgcctggtctttaaaacaaatagactaaaggcttgggtatacagagtcatggaatttcaaatacaaacaaaaatttgcacaaaaaaagtatgctccacaaaagcttccatatgcaactctcaaaaatcagtaccttagaaaaaacmagcatactattttgcaattctttctacatttgcctttgaacgtattcattattttaaaaatttttctgcaaaaatgatttgtatcatcttctctgaaatgagtgttattaaaagacttcataggttaagacatatcctcttaatatactacttcacggatttattttcagtatttgcttgttgttaggagtaaattaagtacttaactcttacaagtcatttaacaaccacatttgattcttgttactctgtactgagccccttctatgctctcaattctgtggaatgttgtatcaaaaaatgaaagcatggtattttcttcttcaagagtttataattcaatatgagtacaagttaaacaaacgtattcattcaaaggcacaaatattctacaaccagttctgattagtgtgacaatataaaataaaattgttgaccattttgaaggaaaagttctgtaatttttcaggagaacaataataagaggtaaaat

SEQ ID NO: 469689 - DNA, 682 bp, Homo sapiens
ctgtaatgttacatttaaagaacattagtggagttggaggacctgcctggtctttaaaacaaatagactaaaggcttgggtatacagagtcatggaatttcaaatacaaacaaaaatttgcacaaaaaaagtatgctccacaaaagcttccatatgcaactctcaaaaatcagtaccttagaaaaaacaagcatactattttgcaattctttctacatttgcctttgaacgtattcattattttaaaaatttttctgcaaaaatgatttgtatcatcttctctgaaatgagtgttatyaaaagacttcataggttaagacatatcctcttaatatactacttcacggatttattttcagtatttgcttgttgttaggagtaaattaagtacttaactcttacaagtcatttaacaaccacatttgattcttgttactctgtactgagccccttctatgctctcaattctgtggaatgttgtatcaaaaaatgaaagcatggtattttcttcttcaagagtttataattcaatatgagtacaagttaaacaaacgtattcattcaaaggcacaaatattctacaaccagttctgattagtgtgacaatataaaataaaattgttgaccattttgaaggaaaagttctgtaatttttcaggagaacaataataagaggtaaaat

SEQ ID NO: 469690 - DNA, 576 bp, Homo sapiens
tggtggcgggcacctgtagtgccagctactcrggaggctgaggcaggagaatggcataaacccgggaggcggagcttgcagtgagccgagatcgcgccactgcactccagcctgggcgacagagcgagactccgtctcaaaaacaaaccaacaaacaaacatcaccatagtgatcttgtgaaactctctcactaccacgagaacagcatgggggaaaccacccctatgatccactcacttccctccctcaacacgtggggattccaggttgagatgagatttgggtggggacacagagccaaaccatatcagtccctaaagccaccctgtggccagagacctgcccatctctgccttgtttgtggtaggaggagaaaagtacacacacacacaccagagcctcacacgacacacacacagcagtcacacacaccgtacaagtcacacacaacacacaacaaacacacaacagagtcacacgcaacatagtcacacatatgaattttactaaaacttagtaagtttttatttattaaaactaaaaatatctcccaaagatgtgtaaactcgaggcag

SEQ ID NO: 469691 - DNA, 626 bp, Homo sapiens
gcttggcccaattcctcctgtattagtttgttttcacrctgctgataaagacataccccagactgggaagaaaataaaggcttaactggacttacagttgcacatggctggggaggcctcagaatcatggcgggaggcgaaagacacttcttacgtggcagcagcaaaagaaaacgaggaagcagcaaaagcaggaacccttgataaaccctccaggtatcgtgagacttactcactatcacgagaataacggggaagaccagcccccatgattcaattaccttcccctgggtccctcccacaatgcatgggaattctgggaaatataattcaagctgagatttggatggggatacagccaaaccatatcacctccttccctgcctctctaatgcctctctccctgcacaggtgtgtgtcccaatgcctctctcttcctgcacaggtgcgtgttctgatgcttatctccctgcacaggtgcgtgttctgatgcttctctccctgcacaggtctgcttcttctgcaatcaatatgcacaatgctttcaggtcccatcgctctggatgaatccatcaggagaatcctttccttgcacttttcctatgatattacccctggttttaagc

SEQ ID NO: 469692 - DNA, 626 bp, Homo sapiens
gcttggcccaattcctcctgtattagtttgttttcacgctgctgataaagacataccccagactgggaagaaaataaaggcttaactggacttacagttgcacatggctggggaggcctcagaatcatggygggaggcgaaagacacttcttacgtggcagcagcaaaagaaaacgaggaagcagcaaaagcaggaacccttgataaaccctccaggtatcgtgagacttactcactatcacgagaataacggggaagaccagcccccatgattcaattaccttcccctgggtccctcccacaatgcatgggaattctgggaaatataattcaagctgagatttggatggggatacagccaaaccatatcacctccttccctgcctctctaatgcctctctccctgcacaggtgtgtgtcccaatgcctctctcttcctgcacaggtgcgtgttctgatgcttatctccctgcacaggtgcgtgttctgatgcttctctccctgcacaggtctgcttcttctgcaatcaatatgcacaatgctttcaggtcccatcgctctggatgaatccatcaggagaatcctttccttgcacttttcctatgatattacccctggttttaagc

SEQ ID NO: 469693 - DNA, 575 bp, Homo sapiens
ctccaacacatcgccctcgccccataccgcccctcctcgaaagtggccccctttgccctcccacccttgcccatctgtctcccaggcctgtggcccacagcaggacacaggaaagcccaggaggggacagaggacagccaccccaggcagaccccactagggccagcacgctcatccgtctcagtgtgctcagagactcagcgagcccttggggaccgtggacaartccacatgagctgggctcctgggcctcccgggaaggcacagctgtgcagagcttccaggaacaagcatgcagcaacttcgtgccatgtggggcgggataaggaaggaggctcggctgaccccttcctagcaggtgcagagcctaacggggcctcatgtgcactgtgcccagggggctgggctgggggtaccccaggctccagggggacattcaagggcagctggggaacaatcatggggacgctggaaagagaagcatctgcgcccgtcttccctctgcccctccatatggagtctccctcagagtctgaatgctgggttttccaggagccagcagaaggccctgggga

SEQ ID NO: 469694 - DNA, 518 bp, Homo sapiens
taacgaaaagctgttgccaaattaaaggaggctattgcctcctctcccctcctggtccctagcactccaggactcacaaagatgctgctctgaaaaccccaaggcaagcgtggaagagtagaacagctccaggggcagtgggaagatgagggcacccccgcatgttgacagacaccaagggtgggggtggaggagatgaaggggatcagcacaggagtctgggggaaatcctctaaatcccaccctgcaccaacctcacccctgcagctccttgtgtagttacagctctcagctctcagctccttcccaaccacaccccagcccagacctcagggctcctccctctcccyaccccctccagagcagcacagtccacagagcccttgaaaaggaattccccctcatctaacagttaattatttcttagtggggagggacagccggtcctctctttccagtgaccccatgtctttgttcaaggcatccagttatactccctgagccagggatctctaggc

SEQ ID NO: 469695 - DNA, 615 bp, Homo sapiens
agcacaggcgggggtggatgatggtggcatagtggaggggctggcagacagccacgtatcggtcaaaggccatcactgtcaggaggatgcactcagtggtccccagggacaggaagatgaagagctggacagagcatcccaggaagctgatggtcttctttgggccccagaggttgaccagcatctgggggacacaacttgtggtaaagcagaggtccaagaaggagaggtcagagaggaaaaagtacattggagagtggagcctggggtacagtacagacagcaggatgatgagtgtgttgcccaccagggtcaagaggtaggaagtgaagacaaccacaaagagagtcctttccagtgctgggtgttcagagaagcccagaaggaggaagcccatgggggagctttggttaaccatggcctgttcttgtttgtacctggagggatgaggctgtcaccccagtgtgattcaacctgtcttatcaaaactcagcctgggtgtttgtgaggtcacagcaggtaggtgtttcttttctgtctctgctcacccagcctccctttcccaggcttatygtcatccagcagctccttctcgttccctgttccttctgatca

SEQ ID NO: 469696 - DNA, 577 bp, Homo sapiens
cttataccccatgcactcacsagcacagaggcgacttccctctctcagactttaggcgccactgcagggtccggaaaagaaagagaaacggcccagcgcggtcgcttacataacccagggcggggctccgctccgcccccgaaagtttttgcgacggagttttccctcttgttgcccaggctgaagtgcagtggcgcgatctcggctcaccgcaacctccgcctccaaggtttaagcgattctcctgcctcagcctcccgactagctgggattacaggcattcaccaccaagcccgtctaattttatatttttagtagagacgggatttccccatgttggtcaggttggtctcgagctcccgacctcaggtgatcgcccgcctcgacctcccaaagtgctgggattgcaggcgtgaaccaccgtgcccggccttgcccgcatgtgttttgaattttgctgcccggaattcactgcgaggactgggatcacccgtcaccccgccctggtctacggaaaatgaaatgtgtttactgatatagaaacggaataacggcgctgtgggctggggagggccga

SEQ ID NO: 469697 - DNA, 509 bp, Homo sapiens
gctggctggatatcactgctagcagaggttaatgaggctgcaggccaatggtgtgcagccgaggatttgctgagtgcattcctttccagctagaaagtggatatggagttattcacattcataccacatttatttacagtttccctgagagctattataactcttctgtcatctgtaacatagtcttaagagatgctggacattctacagaatattaaatctgttcatttcattggcaacatcatagattgggatggatgagaaagaaggtggaaagtatgctggaggtcttggtaaaacacatgcaccccagaaagaggaggataaatcttacaaaactttaggagtggcaactgcagtgaaattttatgggtccagtggctaggtgcatgcagagatatttcttccaagtaaaaacaaaagaaaacagaaaaaaaaccygttgcatctttcatcttcagtgagaaaaaaaaaaaaaagagagagaagcagactgcctggtgaatctc

SEQ ID NO: 469698 - DNA, 425 bp, Homo sapiens
tattcaaggatctcatgcccacccatgttcccgtgttcccaraggcgtgccctccctgtcttctactgccttccacttccactcctgggattctcctgtagagaactgggctcaaaacctgaaagataagtttctgattgataagatgctctggtgtaactatgcagacagtgcactcaccagcacatgtctgtactctccttgcagccctgtcctttctttttgccaagttcccagttgtgtcctgggcgatggtagtggggtctacctatcttagtttccagggagcccccctctctcctccgtgggaatcccagactctccctccacctctcaggacttcaactactggttcttggaaaaggaaatgtttatagggaaggccatgcctgggctgcccagagatgaactcaggtttaggatgg

SEQ ID NO: 469699 - DNA, 493 bp, Homo sapiens
gctcagcaacaaaaatgagtgaatggcatcatctcaaacatcgttatgctaaaggagagaccaaacgaaggactacataacatamgactgcacgtccattacattctagaaatttcagtattgcagtgacagaaaacagagtggtggttgagtgaagggaaggggtgagggtgggaggcaaggattaaatagaaaggggcagaaagaaagtttttagggaaaagaaacggttctctacagcgccacaactcaggagtgactgggtggtgggaactaaggggagaggagggtgtgagggaagaggacagagagaagggctggggaagcaggaggtgaggacaaggagcaggagaagggactctaaagcagtggaggagcctagcaggggattctttgcattctgggtttctctactgggcagtgtggtagttacatgactataaataattaccaatatttgccaaaaaagcgcagctaaaactggtgaatttta

SEQ ID NO: 469700 - DNA, 423 bp, Homo sapiens
tcagcaacaaaaatgagtgaatggcatcatctcaaacatcgttatgctaaaggagagaccaaacgaaggactacataacataagactgcacgtccattacattctagaaatttcagtattgcagtgacagaaaacagagtggtggttgagtgaagggaaggggtgagggtgggaggcaaggattaaatagaaaggggcagaaagaaagtttktagggaaaagaaacggttctctacagcgccacaactcaggagtgactgggtggtgggaactaaggggagaggagggtgtgagggaagaggacagagagaagggctggggaagcaggaggtgaggacaaggagcaggagaagggactctaaagcagtggaggagcctagcaggggattctttgcattctgggtttctctactgggcagtgtg

SEQ ID NO: 469701 - DNA, 423 bp, Homo sapiens
tcagcaacaaaaatgagtgaatggcatcatctcaaacatcgttatgctaaaggagagaccaaacgaaggactacataacataagactgcacgtccattacattctagaaatttcagtattgcagtgacagaaaacagagtggtggttgagtgaagggaaggggtgagggtgggaggcaaggattaaatagaaaggggcagaaagaaagtttttagggaaaagaaackgttctctacagcgccacaactcaggagtgactgggtggtgggaactaaggggagaggagggtgtgagggaagaggacagagagaagggctggggaagcaggaggtgaggacaaggagcaggagaagggactctaaagcagtggaggagcctagcaggggattctttgcattctgggtttctctactgggcagtgtg

SEQ ID NO: 469702 - DNA, 423 bp, Homo sapiens
tcagcaacaaaaatgagtgaatggcatcatctcaaacatcgttatgctaaaggagagaccaaacgaaggactacataacataagactgcacgtccattacattctagaaatttcagtattgcagtgacagaaaacagagtggtggttgagtgaagggaaggggtgagggtgggaggcaaggattaaatagaaaggggcagaaagaaagtttttagggaaaagaaacggttctctacagcgccacaaytcaggagtgactgggtggtgggaactaaggggagaggagggtgtgagggaagaggacagagagaagggctggggaagcaggaggtgaggacaaggagcaggagaagggactctaaagcagtggaggagcctagcaggggattctttgcattctgggtttctctactgggcagtgtg

SEQ ID NO: 469703 - DNA, 423 bp, Homo sapiens
tcagcaacaaaaatgagtgaatggcatcatctcaaacatcgttatgctaaaggagagaccaaacgaaggactacataacataagactgcacgtccattacattctagaaatttcagtattgcagtgacagaaaacagagtggtggttgagtgaagggaaggggtgagggtgggaggcaaggattaaatagaaaggggcagaaagaaagtttttagggaaaagaaacggttctctacagcgccacaactcaggagtgactgggtggtgggaactaaggggagaggagggtgtgagggaagaggacagagagaagggctggggaagcaggaggtgaggacaaggagcaggagaarggactctaaagcagtggaggagcctagcaggggattctttgcattctgggtttctctactgggcagtgtg

SEQ ID NO: 469704 - DNA, 630 bp, Homo sapiens
tttcctgagtttcctctgagggccccctcttctctctaggacaattaagggatgacgtctctgaggaaatggaggggaagacagtccctagaatactgatcaggggtcccctttgacccctgcagcagccttgggaaccrtgacttttcctctcaggccttgttctctgcctcacactcagtgtgtttggggctctgattccagcacttctgagtcactttacctccactcagatcaggagcagaagtccctgttccccgctcagagactcgaactttccaatgaataggagattatcccaggtgcctgcgtccaggctggtgtctgggttctgtgccccttccccaccccaggtgtcctgtccattctcaggctggtcacatgggtggtcctagggtgtcccatgagagatgcaaagcgcctgaattttctgactcttcccatcagaccccccaaagacacatgtgacccaccaccccatctctgaccatgaggtcaccctgaggtgctgggccctgggcttctaccctgcggagatcacactgacctggcagcgggatggcgaggaccaaactcaggacaccgagcttgtggagaccagaccagcaggagatagaaccttccagaagt

SEQ ID NO: 469705 - DNA, 630 bp, Homo sapiens
tttcctgagtttcctctgagggccccctcttctctctaggacaattaagggatgacgtctctgaggaaatggaggggaagacagtccctagaatactgatcaggggtcccctttgacccctgcagcagccttgggaaccgtgacttttcctctcaggccttgttctctgcctcacactcagtgtgtttggggctctgattccagcacttctgagtcactttacctccactcagatcaggagcagaagtcyctgttccccgctcagagactcgaactttccaatgaataggagattatcccaggtgcctgcgtccaggctggtgtctgggttctgtgccccttccccaccccaggtgtcctgtccattctcaggctggtcacatgggtggtcctagggtgtcccatgagagatgcaaagcgcctgaattttctgactcttcccatcagaccccccaaagacacatgtgacccaccaccccatctctgaccatgaggtcaccctgaggtgctgggccctgggcttctaccctgcggagatcacactgacctggcagcgggatggcgaggaccaaactcaggacaccgagcttgtggagaccagaccagcaggagatagaaccttccagaagt

SEQ ID NO: 469706 - DNA, 630 bp, Homo sapiens
tttcctgagtttcctctgagggccccctcttctctctaggacaattaagggatgacgtctctgaggaaatggaggggaagacagtccctagaatactgatcaggggtcccctttgacccctgcagcagccttgggaaccgtgacttttcctctcaggccttgttctctgcctcacactcagtgtgtttggggctctgattccagcacttctgagtcactttacctccactcagatcaggagcagaagtccctgttccccgctcagagactcgaactttccaatgaataggagattatcccaggtgcctgcgtccaggctggtgtctgggttctgtgccccttccccaccccaggtgtcctgtccattctcaggctggtcacatgggtggtcctagggtgtcccatgagagatgcaaagcgcctgaattttctgactcttcccatcagaccccccaaagacacatgtgacccaccaccccatctctgaccatgaggycaccctgaggtgctgggccctgggcttctaccctgcggagatcacactgacctggcagcgggatggcgaggaccaaactcaggacaccgagcttgtggagaccagaccagcaggagatagaaccttccagaagt

SEQ ID NO: 469707 - DNA, 378 bp, Homo sapiens
ttaacaatgatcccagtgcaatccataaacaggaatagtttcagcaacatatgwctgcacgctttcaggcaactggtaaaattgagctaagagacaatatcatctcttgcttatacctctttcaagtagttcatgtaacattggattttcctcattacataacccatttattcattcatttaccctcagctactatttctccttcccttcatttatactaaacatttataattttggaaggaacactaggttctgctgctgtgctggctgagactgcagggagcaatactgttctagcaagtgtctcccgtcatccattccagttcatagagggtagggttatgcaggtagagaactggttggctatctgaccccagg

SEQ ID NO: 469708 - DNA, 538 bp, Homo sapiens
tccagtttattcgttggtttctctattctccagctgataaacatgtgggttatttccggttagggtctgtaattaatgaaaccactataaataactgactacaagtctttgcatggccttaaattttcatttcctttggataaataaatatttgtggaattgttgggtgatatggtaaatggatrggtagctgtttaagaaattgccatattattttacaaactgactgcaacttttttttgcgttcctaccaacaatataagagatttttattttttccatattcataccagtatttagaattatcatatgtcttttgaactttacttattctaggtgatgtgtgatggtttctcattgtggttttaacttgcacttctttgatgactagtattgttgctatcttgtcatgtttgtctaagagacttattacatatcttttgtgaacaattttgcaaatttaattattacttccagagactttttcagaattccttattgttttctacatatgtaattaagctgagaaagaaagatt

SEQ ID NO: 469709 - DNA, 542 bp, Homo sapiens
cataaaagtaggagggaaaaaagggacaggcaaatagaagagataaaatagaactacacagctgagtgtggcagtatgtgcctgtattcccaggtacttgggagtctgaagtgagaggatcgcttgagcccaggagcccaggagtccggcctgggcaacataaggagacccttgtctcttaaaaaaaaaaaaagaaaagaaaagaaaagaaaagaaaagaaagaggggggcgggcgtggtggctcatgcctgtaatcccagcactttgggaggctgaggcgagcagatcacaaggtcaggagttcgagaccagcctggccaacatagtgaaaccccatttctactaaaaatacaaaaaataattagctgggcatggcggcgggcacctgtaatcccagctacttgggaggctgaggcaggagaatctcttgaacccaggaggcggaggttgcagtgagccaagattgtaccattgcactctagccagggcaacagtgcgagactccagctcaaaagaaaaagaaaarggtagaaatacacaa

SEQ ID NO: 469710 - DNA, 521 bp, Homo sapiens
tgactgctgggagggccccatcaccacaatcatcaaggtgataaatttgtccttcgttttcacatgtgcttcacaaaagagcaagtgttggcacacagggccccaggctaggtcggcctgtgtgtsgacggtgcttcccagtgatgaagcaagtcacaattctacctgtggcttgaaacccacagtggaacaagaaaacccagatcccacctctcaccccttccctacctgagcttttcttcctctacatcacagcagcaaccacagctccagtgaccacagctccaaggagaaacaggccagcaacgatgcccacgatggggatggtgggctgagaagacggctctgggaaaggagagggaggtgaggggttctgacccccaggcctcagccctgccctgccgaaggtctcctgctttccctgagaatagacaacttacacccctccttaccccatctcagggtgaggggctctggcagcccctcatgctgcacatggcacatgtatctctgctcctctc

SEQ ID NO: 469711 - DNA, 521 bp, Homo sapiens
tgactgctgggagggccccatcaccacaatcatcaaggtgataaatttgtccttcgttttcacatgtgcttcacaaaagagcaagtgttggcacacagggccccaggctaggtcggcctgtgtgtggacggtgcttcccagtgatgaagcaagtcacaattctacctgtggcttgaaacccacagtggaacaagaaaacccagatcccacctctcaccccttccctacctgagcttttcttcctcyacatcacagcagcaaccacagctccagtgaccacagctccaaggagaaacaggccagcaacgatgcccacgatggggatggtgggctgagaagacggctctgggaaaggagagggaggtgaggggttctgacccccaggcctcagccctgccctgccgaaggtctcctgctttccctgagaatagacaacttacacccctccttaccccatctcagggtgaggggctctggcagcccctcatgctgcacatggcacatgtatctctgctcctctc

SEQ ID NO: 469712 - DNA, 521 bp, Homo sapiens
tgactgctgggagggccccatcaccacaatcatcaaggtgataaatttgtccttcgttttcacatgtgcttcacaaaagagcaagtgttggcacacagggccccaggctaggtcggcctgtgtgtggacggtgcttcccagtgatgaagcaagtcacaattctacctgtggcttgaaacccacagtggaacaagaaaacccagatcccacctctcaccccttccctacctgagcttttcttcctctacatcrcagcagcaaccacagctccagtgaccacagctccaaggagaaacaggccagcaacgatgcccacgatggggatggtgggctgagaagacggctctgggaaaggagagggaggtgaggggttctgacccccaggcctcagccctgccctgccgaaggtctcctgctttccctgagaatagacaacttacacccctccttaccccatctcagggtgaggggctctggcagcccctcatgctgcacatggcacatgtatctctgctcctctc

SEQ ID NO: 469713 - DNA, 631 bp, Homo sapiens
acctagaagccccatcaattgacccagttcaatagtaaatttttattttttcaaataaaaatcaatcacatcctgacttttgtggtcctcacttctttgttctattttatattttcatcatcccaaatgatagtttagttttacctttaaaaataagttttttgttcttatttgttctataggttatccctttgaaattaatattgtctggtagagtttcctgttgtttgtattttgtggattgcaccccaaactatggtttaatatgcatctctattacctgcatttyctagaaatttgtagtttggtatagaggtttgcatctattcagatttttttccccgtgagttttggtggtactatatcatgtttttcaacaaggggaagagtttaatactggttatttccctttggtgatgaaaattgtcattgctgttcagtggctagatctgttcattcattacggatggcaaagagttgtagtctcagtcttccatttcttttcatgtattatttgaataatttgtaaaataagagacttacccccttctactatttacctattataggaaaatcacttttaattaattagatgtgaaaattctaagaaaaatattagtagactgtatta

SEQ ID NO: 469714 - DNA, 631 bp, Homo sapiens
acctagaagccccatcaattgacccagttcaatagtaaatttttattttttcaaataaaaatcaatcacatcctgacttttgtggtcctcacttctttgttctattttatattttcatcatcccaaatgatagtttagttttacctttaaaaataagttttttgttcttatttgttctataggttatccctttgaaattaatattgtctggtagagtttcctgttgtttgtattttgtggattgcaccccaaactatggtttaatatgcatctctattacctgcattttctagaaatttgtagtttggtatagaggtttgcatctattcagatttttttccccgtgagttttggtggtactatatcatgtttttcaacaaggggaagagtttaatactggttatttccctttggtgatgaaaattgtcattgctgttcagtggctagatctgttcattcattacggatggcaaagagytgtagtctcagtcttccatttcttttcatgtattatttgaataatttgtaaaataagagacttacccccttctactatttacctattataggaaaatcacttttaattaattagatgtgaaaattctaagaaaaatattagtagactgtatta

SEQ ID NO: 469715 - DNA, 664 bp, Homo sapiens
agtttggtgagatgaaacatgcagggctggcatggaattcttttgtctcctcttgtagaaacaacagggaccctcagagacagaaaaatacccagagctcctctttgagagctggtacaaactgtctctttggtgcagggtagtggtggctcataaaaacccactcaattttggttttaaaaaaatcttcttcagaacttcagagtaggtagtaattaacacaagaatatgtaatttctgatatgagtggaccacycagaatgtttctaattcatccactcctctggtccccagttccttgtcttcttgggaaaatttcctcttttacatccatctgtacctaacggttcatgctttgccctgactcccgctgtgtcttaccatgtttgtgttcttatgtttctcactctcagcctctcttccctttctctccttcctgtctctcacagcttcctctgtccccaatgctttctgcatcttttgtgccaggtgctcttttcctttctctccacctctgtctttccaggagtctttgcagagctctctctatgtaggcttcctcacgcctgacgatttcttgggcctctgtacctcagctctccatgcccaccacttatcctcagttggcctcgttcccctgatgccctaaatattcccagaccaa

SEQ ID NO: 469716 - DNA, 664 bp, Homo sapiens
agtttggtgagatgaaacatgcagggctggcatggaattcttttgtctcctcttgtagaaacaacagggaccctcagagacagaaaaatacccagagctcctctttgagagctggtacaaactgtctctttggtgcagggtagtggtggctcataaaaacccactcaattttggttttaaaaaaatcttcttcagaacttcagagtaggtagtaattaacacaagaatatgtaatttctgatatgagtggaccactcagaatgtttctaattcatccactcctctggtccccagttccttgtcttcttrggaaaatttcctcttttacatccatctgtacctaacggttcatgctttgccctgactcccgctgtgtcttaccatgtttgtgttcttatgtttctcactctcagcctctcttccctttctctccttcctgtctctcacagcttcctctgtccccaatgctttctgcatcttttgtgccaggtgctcttttcctttctctccacctctgtctttccaggagtctttgcagagctctctctatgtaggcttcctcacgcctgacgatttcttgggcctctgtacctcagctctccatgcccaccacttatcctcagttggcctcgttcccctgatgccctaaatattcccagaccaa

SEQ ID NO: 469717 - DNA, 578 bp, Homo sapiens
ttagtctgttttcacgctgctgataaagacatacccaagactgggaagaaaaagargtttaattggacttacagttccacatggctggggaggcctcagaatcacggagggagacaaaaggcacttcttacacagtggcggcaagagaaaatgagaaagaagcaaaagcggaaacccctgataaacccatcaaatctcatgagacttattcacagtcatgagaatagcaagagaaagatgattggcgaaaagagaaaaactccccacagcatgaggggaattgtgggagctacaattcaagtcgagatttctgtggggacagagccaagccatatcactgcacaaaattagtccacttgtggtgaggtcaggcctgaatgagaatacccacatcttttcctccttctctgacccttatccctgccttgcccactctttagaagatcattgttggttcccatcttcattcagagatgtctctcaccatttgtggggcctctctctttcccagtgtccttctaactaaaagaggagtgtgaaattgcaggtgggccgggaactgttcctctcttagaagg

SEQ ID NO: 469718 - DNA, 578 bp, Homo sapiens
ttagtctgttttcacgctgctgataaagacatacccaagactgggaagaaaaagaggtttaattggacttacagttccacatggctggggaggcctcagaatcacggagggagacaaaaggcacttcttacacagtggcggcaagagaaaatgagaaagaagcaaaagcggaaacccctgataaacccatcaaatctcatgagacttattcacagtcatgagaatagcaagagaaagatgattggcgaaaagagaaaaactccccacagcatgaggggaattgtgggagctacaattcaagtygagatttctgtggggacagagccaagccatatcactgcacaaaattagtccacttgtggtgaggtcaggcctgaatgagaatacccacatcttttcctccttctctgacccttatccctgccttgcccactctttagaagatcattgttggttcccatcttcattcagagatgtctctcaccatttgtggggcctctctctttcccagtgtccttctaactaaaagaggagtgtgaaattgcaggtgggccgggaactgttcctctcttagaagg

SEQ ID NO: 469719 - DNA, 546 bp, Homo sapiens
ttttctcagccttcctccttcttcagcacagattctactatttcctgaatgcccccttgctcaactgaatagctcctgggtcccctactctgtctccctgaccctgtttttttccctcctctctgtctccatctcccatcttcatttccatatctccctatgccctacctcactcctkccccatatccctagccctgactttctgactcccagctcactatcccttaaccgccaggtcttcttcttttttttttttttttgagatggagctttgctcttgttgctcaggctggagtgcagtggtgcaatctcagctcactgcaacctttgtctcccaggttcaagtgattctcctgcctcagcctcccaagtagctgagactacaggcgcttgccaccaagcctggctaattttcatatttttagtagagaccgggttttaccatgttggccaggctagtcttgaactcctgacctcaggtgatccacccacctcagcctcccaaagtgctgggattacaggtgtgagccaccgctctcagttcta

SEQ ID NO: 469720 - DNA, 557 bp, Homo sapiens
gttcctaccctgtcagcctcctgtttgcagggcctccttcttcactggtcttcggaaggcctgttgccctcaacagtcccagataagaaggcccagtcggaaggaggcagccctggagcagcctggggacaggacacagcctccaagttcaggcaattgcccactctccctcaagggtgccgtgacatagaccacacaaaccacaattctkcacgagtttcagaaatagctcatcagctttgacatggaccctgcggtttccttgtgtttgttaaacttgaaattatttttcatacacctagaggaagcaagtgattcaataaccaattctgttttcctcttgacagctttcagtgaatatttgcacgggccccaaattaaaagggcaaggtgtcattgtcatggccaaaagccagaccactataaacttacaatttgagtctcctctgatttgccatcagtagagagagtttggcaggagtttggactgttttctcctacactgtcacaccgggtggctcactgctgcccattattaccaccaataattacagcag

SEQ ID NO: 469721 - DNA, 434 bp, Homo sapiens
gggaaggagggttggatgtgtgagcacagagagaaggtgtgtaagggtcaccyaggccaggaggaggctgagggtgagccatgcagggagagggtgattgctggccctggtgggggctccccatgtggtttgggtcatgaagttagagaagacaccaacgatgagggacagtgagtagatggcagaatcactggattggtattcccagggtgggggtcgaaggattgttggaattgatgtgctaaagggtggacttcaagcctggaatgcaggcacatatgcaatgagtagtcactgatattacctcacagcatatgataaaatgatagagtctgtgtcctcagagcctgtggccaccttgcatgggatgagtggaaagatggccagagagtgggaagtgtgaaattgagagtatggaagggctggggttcttg

SEQ ID NO: 469722 - DNA, 385 bp, Homo sapiens
tccagccctccctctgcccagagcagcacagtccagagtccttgaacaggaattccccctcatctaacagttaatcatttattagtggggacagacayctggtcgtctctttccagtgaccccatatcctcattcaaggcatccagatatagcccctgagccagggatctgtatctgccctccagaggcctatgcccaagacaggttgctccctgggattctcagtacaggtggacttaagctaatgggctggaaaaagagaaaacaacgtcgaattcctcacttaccatgagatcttgcaacacaggttccaagggcctcaacccctctaccctggctgatgctccctcctctactccctctgaccagggccctgagcccccca

SEQ ID NO: 469723 - DNA, 385 bp, Homo sapiens
tccagccctccctctgcccagagcagcacagtccagagtccttgaacaggaattccccctcatctaacagttaatcatttattagtggggacagacacctggtcgtctctttccagtgaccccatatcctcattcaaggcatccagatatagcccctgagccagggatctgtatctgccctccagaggcctatgcccaagacaggttgctccctgggattctcastacaggtggacttaagctaatgggctggaaaaagagaaaacaacgtcgaattcctcacttaccatgagatcttgcaacacaggttccaagggcctcaacccctctaccctggctgatgctccctcctctactccctctgaccagggccctgagcccccca

SEQ ID NO: 469724 - DNA, 385 bp, Homo sapiens
tccagccctccctctgcccagagcagcacagtccagagtccttgaacaggaattccccctcatctaacagttaatcatttattagtggggacagacacctggtcgtctctttccagtgaccccatatcctcattcaaggcatccagatatagcccctgagccagggatctgtatctgccctccagaggcctatgcccaagacaggttgctccctgggattctcagtacaggtggacttaagctaatgggctggaaaaagagaaaacracgtcgaattcctcacttaccatgagatcttgcaacacaggttccaagggcctcaacccctctaccctggctgatgctccctcctctactccctctgaccagggccctgagcccccca

SEQ ID NO: 469725 - DNA, 385 bp, Homo sapiens
tccagccctccctctgcccagagcagcacagtccagagtccttgaacaggaattccccctcatctaacagttaatcatttattagtggggacagacacctggtcgtctctttccagtgaccccatatcctcattcaaggcatccagatatagcccctgagccagggatctgtatctgccctccagaggcctatgcccaagacaggttgctccctgggattctcagtacaggtggacttaagctaatgggctggaaaaagagaaaacaasgtcgaattcctcacttaccatgagatcttgcaacacaggttccaagggcctcaacccctctaccctggctgatgctccctcctctactccctctgaccagggccctgagcccccca

SEQ ID NO: 469726 - DNA, 641 bp, Homo sapiens
gtcatagaaactacccataaggtcattggtgagagtcgaggtcaaggcaaatttccagcagtgtgaggtgacatggggtctgagcaatgtctgtatgtaattaacatcagtactcagaacatacatactttaacccaggggtcagccagtggtttcagtaaaggcccagatggtttccctttgctgtgtgtgtgttcattcccctctccgaagctatgtgtaaccccatagggatcrcaggggttcccatcaaccacagccagttacatccacaaaagccttgatccttgttagcagatgggagcaggtggctcggaggattgaaatccctacttcataggactctggatacttacacagttgcttcctcctgtgcttctacatgaatctcagcactgtatttaggacaccgtctgcactcttattcttcatgcaattctgtttgctcctcagatggccgcttttcctttgaagctcaacagtggtcatcacgtacttgggctgagggttactggttaactctgtgggattctgggatcagttccttcccattcttagccatccctgtgctttacaaaacttagcttcacaattatactcatctctctctgtgtgcacctctaagaaattactgacaaaac

SEQ ID NO: 469727 - DNA, 641 bp, Homo sapiens
gtcatagaaactacccataaggtcattggtgagagtcgaggtcaaggcaaatttccagcagtgtgaggtgacatggggtctgagcaatgtctgtatgtaattaacatcagtactcagaacatacatactttaacccaggggtcagccagtggtttcagtaaaggcccagatggtttccctttgctgtgtgtgtgttcattcccctctccgaagctatgtgtaaccccatagggatcgcaggggttcccatcaaccacagccagttacatccacaaaagccttgatccttgttagcagatgggagmaggtggctcggaggattgaaatccctacttcataggactctggatacttacacagttgcttcctcctgtgcttctacatgaatctcagcactgtatttaggacaccgtctgcactcttattcttcatgcaattctgtttgctcctcagatggccgcttttcctttgaagctcaacagtggtcatcacgtacttgggctgagggttactggttaactctgtgggattctgggatcagttccttcccattcttagccatccctgtgctttacaaaacttagcttcacaattatactcatctctctctgtgtgcacctctaagaaattactgacaaaac

SEQ ID NO: 469728 - DNA, 641 bp, Homo sapiens
gtcatagaaactacccataaggtcattggtgagagtcgaggtcaaggcaaatttccagcagtgtgaggtgacatggggtctgagcaatgtctgtatgtaattaacatcagtactcagaacatacatactttaacccaggggtcagccagtggtttcagtaaaggcccagatggtttccctttgctgtgtgtgtgttcattcccctctccgaagctatgtgtaaccccatagggatcgcaggggttcccatcaaccacagccagttacatccacaaaagccttgatccttgttagcagatgggagcrggtggctcggaggattgaaatccctacttcataggactctggatacttacacagttgcttcctcctgtgcttctacatgaatctcagcactgtatttaggacaccgtctgcactcttattcttcatgcaattctgtttgctcctcagatggccgcttttcctttgaagctcaacagtggtcatcacgtacttgggctgagggttactggttaactctgtgggattctgggatcagttccttcccattcttagccatccctgtgctttacaaaacttagcttcacaattatactcatctctctctgtgtgcacctctaagaaattactgacaaaac

SEQ ID NO: 469729 - DNA, 641 bp, Homo sapiens
gtcatagaaactacccataaggtcattggtgagagtcgaggtcaaggcaaatttccagcagtgtgaggtgacatggggtctgagcaatgtctgtatgtaattaacatcagtactcagaacatacatactttaacccaggggtcagccagtggtttcagtaaaggcccagatggtttccctttgctgtgtgtgtgttcattcccctctccgaagctatgtgtaaccccatagggatcgcaggggttcccatcaaccacagccagttacatccacaaaagccttgatccttgttagcagatgggagcaggtggctyggaggattgaaatccctacttcataggactctggatacttacacagttgcttcctcctgtgcttctacatgaatctcagcactgtatttaggacaccgtctgcactcttattcttcatgcaattctgtttgctcctcagatggccgcttttcctttgaagctcaacagtggtcatcacgtacttgggctgagggttactggttaactctgtgggattctgggatcagttccttcccattcttagccatccctgtgctttacaaaacttagcttcacaattatactcatctctctctgtgtgcacctctaagaaattactgacaaaac

SEQ ID NO: 469730 - DNA, 575 bp, Homo sapiens
cagagagctctgtagactgccaggtaaacacraacataaactggcattccctcacccccaacctcctcttccaggggccctctgtcccgcctcacccgtgtaggcatacagtcggtaattggtttccacgacaatgaaacctggctgatgcacagtgcccccagctccagagacacctgatgagagattgatggccaggcgtgtggggtagtaacgccgagatttcctctgaaaagaatagaaaggcagatgccttgtctcagaagtcactgccttacatcttcctgcctgaaatatcagatccctcccaagatgcagaacctcaacccccaacttctctcccccgagagacccaagtattcagttctggcaactgcttcctactactgccccaagaccccactcctttttaaaggcaaaggcaacacaccaccctgtttcttccctggaagccacttatctaggcgctcataccttcctctggaaaacaagcccaaactcacgcagatgttgcaggaagttcaacagagaatcactcataccttccacagagtaatcctgaggaacagaggttt

SEQ ID NO: 469731 - DNA, 608 bp, Homo sapiens
ctctctcatttgttgaagttatcgatttctacagtaacttctcctctctctccttgacctctctacccacactttgccggcctgttcagkggtcctgtcctccatgcactacccaagcactgggactccattctgaatccatcctcctcttcctccgtactctcccaggcgatcccacccactatcagggttttaattcctgtttatatggcagtgactttgaaatgtactctccagctatcctctctgctaggcttccgattcccatatctaattggctgctggctatctccatgctaagggctgtcagaactgtgacattccacctctcttctcccactgtgttcccaccctaattcttccagtgcaagaaaccagggaccctttgaacctgctctgtcaagtttcttttctcggcagccacccccgctgggtccagtttgggcatgggtatggaagcactccgaacagtatcaaggactctgcatatggagatttgcatcactgacatataaatagctgatgctggtgctgaaaccaaagaatattcatcactgatcacacccactacttgcccaaccagatgtgaacctctgactcagtgggtc

SEQ ID NO: 469732 - DNA, 524 bp, Homo sapiens
ggggagaggtataagtcaaggataacccttgaacttctaccttctaggtcaattgtctggtggtggcattatgtaagaaacagtctgtgaggatttggggaagatggtgctcacgaaacatccagatctggcatcgtccartgagatcactacaaaccacacatggctatttattgtatacttgaaacgtggctagtatgactaaaaaagtgaattttttattttatttaattttcatctactttaatcttagtttttaactcaaatctgattcagttcctggagcattttaaagaatgattaggacttactgatgtcaatctactttgccagttgtaaatataaccaaatagaaatccagatcaaatatttctgatgaaaagttagcatccaatgtgaaatgtgctgtaagtgtaaagcagattttgaaggcttggtccaaaacacaaaaagaatagtgtgtctgcctccccttttatcacagcttactgtgcatttaacacagaagctcaagcccttgggaa

SEQ ID NO: 469733 - DNA, 547 bp, Homo sapiens
tgcccacggctaggataaaagcaggcagaggaacgtggaaggactacactggctgagtcttccagcctscatctttctcccctgctggatgcttcctgccttcgaacatcggactccaagttcttcagcttttggacttttggacctacactagcggtttgccaggggctctcgagcctttgaccgctgactgaaggctgcactgtgggctttcctacttttgaggttttgggactcagactggctttcttgcttctcagcttgcagacagcctatcgtgggacttcaccttgtgatagtgtgagtcaatactcttcaataaactccctttatatatacatctatcctattaatcctgtccctctagagaaccctaatacaccgtccctctgcacacgtgcacacttcaaagcctcaaacaataattggctcccctaggcgtcctcagttttgttcattccttccggggaaagccacttcacataaagtggaagtaagtaatttaaagctccatccttaataacaactgcaggagctcttgccgcac

SEQ ID NO: 469734 - DNA, 454 bp, Homo sapiens
aatgatgcaaagcttattcattatgctgaaacagaaggatgtttagtattagaaacacatgccttcatgtttaatatacagaattggtgtttgtcttttcctcctgatggacttggtgaatttcagtaagccctcatrtgctaagttaggatctgtcatgggcctttatattttttactttgtttctccttctccctcttctcagcttttcctcttggctttcttttgctgtctcttttttccttcttttcatattcattaaataactttgagttaggctttccgttaggtactggagatatagaggtgaataagacacagttcttgtcctttaaataaaattatcataaattcatttactaaagaaatttcagaaagtgttgcttctctaaaactttgtttttaataagtgttagatacaacacatatgcataacagattcaaagtgtttagt

SEQ ID NO: 469735 - DNA, 452 bp, Homo sapiens
aatgggttaaaaaaatagtgctaatgattgaagccaggggttcagcacataggaagctcattgttctattcttttttcttttgtgtgtgttgaaaattttccctaataaaaagttttaaaattaaacaaaaagagcagactaccaaggatcattagaaaagtgaggaaagcttctaatatgaagattaaaaatgagaaaaagttaaaaaacagctaactggcctcccactgcccaagacgctgaaaggaaagaaggccaaggggaagaaggtggccccggcccctgctgttgtgaagaagcaggaggccaagaaagtggtgaattccctgtttgagaaaaggcgtaagaattttggtattggacaggacatccagcccaaaagagaactcacctaytttgtgaaatggcccgctatgtcaggttgcagcagcagagagccatcctctataag

SEQ ID NO: 469736 - DNA, 611 bp, Homo sapiens
tgactgatgtctcgtgtctccctaaaatrtataaaaccaagccacaccctaaccaccatgggcacatgttctcagggtctcctgagggctgtgtcatgggccatggtcactgatatttggctcagaataagtctcttcaaatgctttacagagtttgactcttttctctgacaccctgttgcctaataatcagcataagcccttagtggagtatccacacggagccagcagtgtcatttctcctgaggcagtctgctgtcttccagctatgcttcctattgctcgcaagaggcctccctggtaaagcactctctgtcttcactgcaaagtgaccaggacagtcttaggtcctcagagcctgtcctccatctggccagccctcctcccaagaggagggatgccacctttgactctaaaggcagctccaaggaaaggctcgggcccaaatagaggacaagatgatgccccagtctaatctcacagctgtgtctaaggatccacaaaaagaatagtaaatgtaataatgaaggtagtggtcattataatggaaataggaacccacaaaaattgtaggaataacggattgtagggtgctattccaagcaatttac

SEQ ID NO: 469737 - DNA, 583 bp, Homo sapiens
ttctgcagcagaaacggctccgtagaaaggcccggcgggacgcgcggggtccgtaccactggtcacccagccgcaaggccggccgcagcgacagcagtagcagcgggggcggcggcagccccagcgaggcctccggcttgggcctcgacttcgaggactccgtgtggaagccagaagtcaaccctgacatcaagtcagagttcgtggtggcttaggatcttcggatcggccaccctcgcccctcgcaccccagcccagggcggcggggactccgagagccccggagagaacgtggcccagccctggagggcaggcggccactcccccagccagaagtctttttttcttttcttcttttttattatttttttctttttttaaaaagttctgaccgtggtttcctggactcttcatgggctttgcttcctacctccttcacccttcactcctgccctcctcttcctcctcctcctcctcctcygtctgtctcctttcacctctgcgccaggtcggtcctccctgccaaccttccccagctccaatatgtagcagtctctctggatggcggagagtgaaggagacg

SEQ ID NO: 469738 - DNA, 478 bp, Homo sapiens
acaaagtccctgccctcatggggtttctattctagttagggaaagcagttaataaataagcaaataatatcagctaataccaaatgttatggtgaaattagaaaatgacattaaaaggctggkcgtggtagctcacacctgtaatcccagagctttgggagcctgacgcaggaggatccttagagcccaggagttcgagattacagtgagctatgatcaagccactgcactccagcttggagagagaccctatctctctctccctcacacacacacacacacacacacacacaccaaaaaaaaaaaaaaaaaaaaaaagacattaaagctgatgtttggatgacaagaaggagctaagcataggaagttctagggagaccaatccaggcagaaggaacaaacaacaaatctaaagggcctaaggagggaaatgtgattaatatatgaaagatgatgttttaacccaccagcaggagca

SEQ ID NO: 469739 - DNA, 558 bp, Homo sapiens
tgatttttgggggcaggtcagggagaaagcattttttttttttttttgagtctcactctgttgcccaggctggagtgcagtggtacagtcttggcttactgcaacctccacctcccaggttcaagctattctcctgccttagcctccagagtagctgggattataggcgcccaccaccacaccaggctaatttttgtatttttagtagagacggggttttaccatgttcaccaggctggtcttgaactcttgaccttatgatccgcccgcctcagcttcccaaagtgctgggattacaggcgtgagccaccacacccagcaggagaaaccattttctaggctctttaggaaggaccatgcaatgagtaggtgatgtatttgagccctcacagtctttacayccctagaggagctggaggacttaagagtttgctgcagaagcgtggccaagcacaaaacacatgatcaggaaagcagagtgttttcccattaccaatggatgaactatgcaaaccctaaacgccttggcagacacctcccaccccttacccctcccat

SEQ ID NO: 469740 - DNA, 583 bp, Homo sapiens
ccagaacacaggcaaggcagtgagagagagaagccatggctggcactcttgctaggaagtgaatgaaagaaattcatttagttttaaagcattagattgagcacatatgcttcaaatgccataaatctttacaggtaaggattaaacactactccactctaggccagacgcagtggctcatgcctgtaatcccagcactttgggaggccgaggaaggcgaatcacttgagatcaggagtttgagaccaacctggccaacatgatgaaaccccatctctactaaaaatacaaaaattagccgggtgtggtgacacatatctgtaattgcagctactcaggaggctsaggaaggagaatcacctgaacctgggaggcggaggttttagtgagccgagattgagccaccgcactccagcctgggcaacagagtgagactgtctcaaaaaaaataacaaaattaaaaaaataaaaaataaacaccactccagtcttaaacagctacttaaatgtaggtgatggcacatacttcttggctggcattggctggaataaggattgcaaatcaaatcagtctccactgcaa

SEQ ID NO: 469741 - DNA, 395 bp, Homo sapiens
caacctccaacaaccctagcagaaatctccacccatcctgggcctaacacacctctctctttgctttcctaataatctccaactcctttgttgtaytggatgttttcgcctagcacaatttctattccgtatataaaacagtgtgtgtcgcactgatgaatatgttgttattgctgttggaaattggggctctgtgttcagcaaggctcagaattgtttctcccctaggaatttgagaccagcctaggcaaaatagcaagattccatctctgaaaaactgaaaaacaaattaactgggcatagtgctgcatttccataatactggctactccagaggctgaaatgggaagattgctggagtcctggaggtcaaggctgcagtgaaccatgactgt

SEQ ID NO: 469742 - DNA, 549 bp, Homo sapiens
ttatggtaataatagaattctatgtaataataaaaattatataacaagtaggtctgtatgaactgatgtgaaaaagcacagaatattgtacacagtatggttccattgtatatctatttttagtattttagttttcaaaatatatgcacttactacttttattaaaacttaaaaagacaagttatctgaaaaatgggatttttgggtttagagacagagtcttgctcgttgcccaggatggagtgcagggacacaatcacagctcattatagtcttgaactcctgggttcaagtgatcttcctgcttcagcctcccaagtagctgggactacaggtgcatgctaccatgcccagctaaattttagtgttttgtagagaccaggtctcactatgttgcccaggctggtcttggaactcctagcctcaagtgatcctcccgcctcagcctcctaaattgctaggattacaggcatgagccmccatgcttggctagaagtgggatttttaaagattttagaaagctgtggaagccaagaggaataagttaaa

SEQ ID NO: 469743 - DNA, 457 bp, Homo sapiens
caaatgccttccattcccttcttccacgacgcacgaaacagataaggcatgaaatcaaagctctctttccagaaccggctctccaagtgggtgatccattcctgcatgcaatcttgtccttttgcctgtttaactgtgaaactattcttgaaagtattccaaagtggctttagggaatattcatatcttgactgtttttcacttcaataaaaagttaaggcaaacttggcccattccggggagctggaatccagaggggagggagatgaggtcccagtgctccttctggctgggttctgccrgatttataggagggcctcacacccctcacccctgatttcaagcaggagggtagcaggcagagcttgggaagcctcacccggaccctgccacctgccaggaaggtcagggccctgctcccctgcctgtgcccactgctgggagcagcctggaccca

SEQ ID NO: 469744 - DNA, 643 bp, Homo sapiens
tgagctgtcttacaaagtacccactccctttcaagacgacaactgagttcatcagaaagatgaatcaaatgtgaaaactacaaatgtttcagccagaaaatcatgcaaagcagaatgattttgattctgaacaatttgcactctacagaaataccaaaagaaatcctgaaaccatattgcaagtgaaatgcttgtgaaccaaaaggatcagtaaatgttggccatttactgaggaagcagttggaggcttcatccctcgcgttctttaagaatacttcaaaaacaagctcagcactctgccgttgtcctccctaaaagcaaaaatctgcaacaagtggctcagcgttgyttttctttccagtcctgcgattccaaaaatcctggcatttacaggccattttatccttcttaaaaatgtaaaatttaaaagaatgtgatgaacgtttttaaattctagaaaaactatgtcactaaagtgaattcattttagttccttatttgccaattaaaatgtgttaattgacttaagtttttctaaaatggaataagtcgcaggagcccatttttccaattattctagccattcttttgtcttccaatacatacacatagtatctgaaaggatgttcaccaaatgtcacca

SEQ ID NO: 469745 - DNA, 539 bp, Homo sapiens
agctgcttaactatgttgtcacttcaccaatccacatctgctgaacaggactttgcacactatggaagcataattctttctgaaatattttcaaccacggatcaagtcagtaatcatggaggctatttgattacctgccttatgatattctttttttttttttttttttttttggagacagggtctcactctgtcacccaggctggagtgcagtggcgcaatctcggctcactgcagcctccacctcgcaggttcaagcgattctcctgcctcagcctcccaagtagctgggattaaaggtgtgtacmaccacacccagttaattttttgtatttttagtagagacagggtttctccatgctggtcaggttggtctcaaagatattctttattttataaaattattagagaaaaaagtatacaatgttttatcaccaacaagtaagtaatatttgagaaaccaaaccagtgacagtgggagcaaccacataatcggaatgtttaaaagatctatttaccactgccaatcaacatggcaa

SEQ ID NO: 469746 - DNA, 572 bp, Homo sapiens
gcagagaaattggatgatagctgaaggtagatatgggtttaagaaagatatattttaaggtaggaaaaattattctatttgaaagctggtgggaataatccagagagaatattgataacgcaagaaggcgggcaactgccgagatgactggagcacagacagctcacacaaaagaacagagggaagccagcacccagatgcagattcaagtatgtgcctgggagcaatgtagggagcagtgggcggtctctcccgattgctttcatttcatcaacaaaattaggaagcgaggccatggactccgaggaaggatggcaaggacagaggagagggaacaaaataacctcctgggagartaggagactggctgaccagggaaatgtgctttaaccgccaggcagcatgaacggccccctgaaaattagcagccacgataaagggagagtatccagcacagttaggagattctctttaaggttaaaattatgcgcttcagaaaagcaggtgttacatgcaaacagaactgggacttgaactcaatcctccatattctagcccagaaacttcatttg

SEQ ID NO: 469747 - DNA, 626 bp, Homo sapiens
ctgggattcagaaaccttgggacggagtctcaatccagcctgggcatgtatgacctcgagtaaataggatataacaatataagccctgcctaccacacggctgcaaggataaaatggaataataatggtgaaaggktctcataaactgtaaggtgctttgcagaagggcattcctattccctatatttaaacctagacacatgtcgtttccatcaataccttcttcctttctttctggttcagtgctgggcccaggtggaccttgatatatatcatccacactaaaatctgctccgagctacaaaattagggttgaggaatctcactggactcaagctaagattgaactgatgcagcagtgccattttcagtttatcctagaagtaggatgccttcctcctatggagagcaaaatatcccccatgccattcatggttttaaaaaatatatgattataagctgcacagtaaagaggggagttagccactcgaaggcttgcagttttgtttttttttttaagtgtcttcttcgtataagagaatgtaaaaccatttgctggttgtatgcatgtggtcaaaacttttaaaggcaataaggagactggatttttactaggaggctaaata

SEQ ID NO: 469748 - DNA, 345 bp, Homo sapiens
aaaacacagttaagtcctcacttaacatcactaatacggtaagtcctcacttaacatcattgatagggtcttggaaactgggacttaaagggaaaagacatataatgaaactaatttatttttgtcatcaaccttataacaaaatgtgctttcacttaagataacagtttccaacctatctaggacattgaggacttacagtgttaagaaagtagaatctgtactggtttcaaaggcgcttacttctcttcactacttacttttcaccaaagccctaaagtagcagttcttagtctttttggyggtttttagaacttgatgaaagctatgaacccacttactaga

SEQ ID NO: 469749 - DNA, 627 bp, Homo sapiens
tgtgtgcaggctgggctctggagactcgagtcacgcaggatgagactcccagcagactaaggcagtgacctcagcctggctctccgggactgcccctgctctccctacctcctctgcacaatcacccccmaccaagcctccggggagatacagctcagggctcacaggtcccatgggagagtggggctgggggtgtggccctagctgctgcgggctggctggaggtgatggggcaggttcattccctgtgctttgctgtgggagtgatgggatggatggaggcactgagcatcttcagtccctgctcccactccccagggcccttggctctgcccctgctgtgtactagacctttcagctagacttggggaacatagtcaggtgggccatggtagcagagatgggatgagagcagggctgcccctttccctgcacccagctctccctgaggtggcccaggccatgccctgctgtcccctgcaggaggacaggtcccctcctggccccacagcaggtcctgcctctgggctctaccagggcaggcagcggtgggggcagggccctaggcagcagaggaaatgggctgggtacaccttttgaactggaagttccagggagatggggcag

SEQ ID NO: 469750 - DNA, 476 bp, Homo sapiens
catactgtatcgccctggcctgggttccccggctctccttccctctctstctcctcttttttctctctccctccctctgtctctcctccacacacttctcttttgccaaaccatccaaatgcaggcagcagactccaaaaccattctgcctgcacctctgagcacacccttcccagtcatagccatgttaatgcgagtgtgcctgagaggatcgccgctggttccgtgatatcacccagcatcatccacaccacatcccagtgagcagtgaggacaaaaatggccaggttaggaccccatgttgcctttttttgccacccatatcccggagcccctctcctgttctttattttttatttttacttttatttttatttttttttcgagacagggacagggtcctgctctgttgcccaggctgtagtgcagcagaccttccaggctcaagcaatcatcctcccacctcagcctcctga

SEQ ID NO: 469751 - DNA, 558 bp, Homo sapiens
gcagtggggcgtgggtctgggaacggaactgtgggaggcaaggcagcgggattccccgcgggaaagccgcctattccctcccccgggcggctggagaccctgaaccgaaacaggaggcagacacccccagccgggaagcggccccagcccggatttccctcccgggtgaggccgcagtgactcaccccctccccgctytccccggtttccttgtttgcatttctcctcccggccacgtggcggccagtgcagccactcaccgccggatccctgacaccccggccgttgcggcctcctccacacacttcggggccgctcctgccccctggggatactctgggctcaggcggatgtccactctggtacccccgggtgcggactccaaagcctgccagtgccggcccccttcccctacgcattcctctaccgtaaggcagggcgcctccaccccgccccctccgccagtcctggggaggggaagggggcgggcagcgcagggggtgtgacagctcccgcccggaccggtgccagcgcagccttgcttcagcgcccggtgcc

SEQ ID NO: 469752 - DNA, 544 bp, Homo sapiens
gctcatgggagggatagtgagctgcaagcactgttttattggaggggttctcagagctccctacccctsagtgttgctccctgctacctgcttgagtgcatgactgcttgccttctactctttgagttctagttgtcagtagaaggcccctgttatgtagatacataagttgggaagattctaatggcccaattgtagattctaattaatatttctaatggtcacttttaaaagaatagaaaaagaagagcctcgaggcaatggcattaggggaatttaatggcatgatcaggtggcaaggtccagagatgattacttagggtgggagaatgttacaggggtcctgggacacagggcatccagggtgggaatcagagggagaggtaggtggccagtttcaccctctcagcgttgctggggctgagccctgcaggagcaacctgtgtgctggagggagagcctgcacatgcaggctggactctggtggcccacggagaaggtcagcaatctctgtttctcttctccggttcttgactttgcacca

SEQ ID NO: 469753 - DNA, 615 bp, Homo sapiens
attgctattttatttcaaacaaaataaaagattacagtcttccaattagaataggacttaaaacatagtaagaatttaaaagccatgtgctgattcatgggaaaacattaagacacagatgggttacacgatttactcaaggtcataccactgatgcaatgactttattatcagaactataaagaacaacacaaatatttacatgattaatattttgttgatagtaatggggctagaattagaatatggattttacgctgctccaatccctgtctgctaactctgttagactgtgtttcctacacactggaattgcaggatagttgctggatgttcaggctgtgtggtcgtgtaggcatgggtacaaatcccagctctgcacctgttagctacgtgaccttggaccagccccttaacatcccttagttttgtttttggatctaaaaaatggggtatgtaccttccgcactaagagggataagggttcagtgagatgatgtatgttsttggggaggaaaaatttttcctctactctcttcttttgctaggggcgtgcaaattaacctaacaaaagacagactaacaaaagagcagacacaaaatttttattaatat

SEQ ID NO: 469754 - DNA, 615 bp, Homo sapiens
attgctattttatttcaaacaaaataaaagattacagtcttccaattagaataggacttaaaacatagtaagaatttaaaagccatgtgctgattcatgggaaaacattaagacacagatgggttacacgatttactcaaggtcataccactgatgcaatgactttattatcagaactataaagaacaacacaaatatttacatgattaatattttgttgatagtaatggggctagaattagaatatggattttacgctgctccaatccctgtctgctaactctgttagactgtgtttcctacacactggaattgcaggatagttgctggatgttcaggctgtgtggtcgtgtaggcatgggtacaaatcccagctctgcacctgttagctacgtgaccttggaccagccccttaacatcccttagttttgtttttggatctaaaaaatggggtatgtaccttccgcactaagagggataagggttcagtgagatgatgtatgttcttggggaggaaaaatttttcctctactctcttcttttgctrggggcgtgcaaattaacctaacaaaagacagactaacaaaagagcagacacaaaatttttattaatat

SEQ ID NO: 469755 - DNA, 556 bp, Homo sapiens
taatgggatgataaagaatctctccataattcccgacatatggcaaagagtatgtccattttgaagtggaagatggtcatgtttatcaactgagccattttctttgtttgaatccttctaatcagaaaagttccctagaaacactaggarcattttcctgagcagatgagggaaatgaaaaaaagctgtatggcacagttagatctcaggcaggaggaatttagaactcacaatggcaattgaaagaggctgggtaaagaaggccatatatttctgtaaaagcagtcattccagggttagtatacatgaaaaacaagtgcgtgcttcgtggggaatgtatggagaaatttctacgtatcagtcgtttctgtgaacaagctctgatggacccagccagtgtcacatcctgccatcatgtagattcattttaaatgcacggacacttaatcgtttctagggaaagccagtgggaagctgcttgaaatttctttttctttataagatgttttgcacatgggggctttcagctcaaaggagatacttacaaaccatttat

SEQ ID NO: 469756 - DNA, 609 bp, Homo sapiens
tatcttacaaaaatctattatgtgtttatgaaagaaagccatcaaaatgttaacaatagtgggattgtcaaacttccagattttctgcactttacatatataacttttgtaattaaaaaatagttgatttccagcctggccaacatgctgaacccccgtctctactaaaaatacaaaaaatagcaggacgtggtggcacgagcctataatcccagctacttgggaggctgaggcaggagaatcrcttgaacccaggaggcagaggttgcagtgagccgagattgtgccactgcactccagcctgggtgacagagcaagacactgtttcaaaaataaataaataaataaataaataaggttgattttaaaaatctacttagaaagcagagatttaattaaatattatggcttttcaataatttttgttgtgtactatgctctccccaaaccagtagcctaataaaattgagtttgaaagtcctccataaattaacatgttctaataattctataagaaagaatggagatacaatatttgatctagaaagtggatatccaatgatcatctgagcaaggaacaccatcctccttaaagtaaacagcacacag

SEQ ID NO: 469757 - DNA, 627 bp, Homo sapiens
gccttgtagacatttaagcctccaaaaggccagacctggtcccacagattccaagccctgccagcaaagcagcccttctcatactcacatgacttttaagtcccagtctccacaggtgacaaaaattgacttgacgtttggatctaagaggccttccttcgccatccattcatcgaccctctgaaaagtacacaagaacaaatgagattttccttttttttccctgagcctgtgaagagccacaacagcaaaacacagataagctgcttgtaatcagaacaggagaaaattgtaatcttatccagccatggctccactgtgggctctcaggcttggctcagaaccacggaggcatttggaagacaaacccttaggaagatcctgcagcccgaaygtgtagccggagggagcccctacactcgcctattgcctggcagcctgctccagatcccagcaaatcagttcaaataccttgctctgacttggctgttcctctcattggtcccctggcccagcagacaggctgttgtcctggggcatcagaacagggtagtaggaggccccaaacaggagctccaacccacagcttcactcattcatttatttgttttactcttctaccaaatg

SEQ ID NO: 469758 - DNA, 526 bp, Homo sapiens
atctgcattccaacagctatctcagccctggggaggccatcaggataataagaggctaggggggatgtttcctgatttgcactaaattatgtggtgattttgttaccagtgacccagtgttccccaaggaaagttcctggccccacccccagacaactccacagcctgctacacaccatggcagcttaaaggtataaaccctggggaaggtggagaagcagtctgaatagagcaaataaaccgcttcgatcctgcctctgctatgccaaacacacaagccagggccaccatgcatcagtgctccattccccgagatgtatattttgcttctacattgctatgtctgctccaaatacagacaggcccttcggctttcacgtgaagttgcaatacarccaagactcggacacagcaaacgcttgttcccattccgggaatactagtgaggagccatagtgggagccaggcggaggcccatccttatgagggaccaccaggaaacagcagcctgtggaggaagatggct

SEQ ID NO: 469759 - DNA, 462 bp, Homo sapiens
gcgggtcaatgagatgcctgtgcccggcyggccaatggggcagcctgaggggtgggctgaggccgagcccatctccatctgagcctgtatgggggctgcccccgtgtctgtgcggacgcaccccgagtgtccaacagccgggaggaccatccccttgcacggaggggaaagggagcctctgagaggaggccggacctcgagacccaagggttcaaatccagacgcaagcccagaactgcaagattccgaagccccggaagggcccctgccctccaggcctggtgcccgggggagatttccctgcaacacgccctcccatgtcccctgtgctgggctcacaggggtgatgaaggaggcctgggaagctctctgtccctggacgaatccaaccaggtagggaagggctggagggtgacttcaccgcctccgccgccctgccttgaaattctttgctctggagat

SEQ ID NO: 469760 - DNA, 423 bp, Homo sapiens
tgatgagcacattgcagggcatggaagatttccggtttctgcaggaattgaatgccwagcacgccttccataacatccttcatattgctgacatggtgaatttcttgaaacacacagaacaaagtcttttctttcccctctagatggctcaaagattgttcagattttccaccggcaaagagggaagatcttattcagaagatttttctagttaacctgaaatatatatatatgtatgtattttgttgttgagacagagtttcactcttgttgcctgggctggagtgcaatggcgcagcctcgactcactgtaacccccgcctcccaggttcaagcaattctcctgtctcagcctccagagtagccaggattagaggcatgtgccaccacacccggctaattttgtatttttagtagagacag

SEQ ID NO: 469761 - DNA, 423 bp, Homo sapiens
tgatgagcacattgcagggcatggaagatttccggtttctgcaggaattgaatgccaagcacgccttccataacatccttcatattgctgacatggtgaatttcttgaaacacacagaacaaagtcttttctttcccctctagatggctcaaagattgttcagattttccacsggcaaagagggaagatcttattcagaagatttttctagttaacctgaaatatatatatatgtatgtattttgttgttgagacagagtttcactcttgttgcctgggctggagtgcaatggcgcagcctcgactcactgtaacccccgcctcccaggttcaagcaattctcctgtctcagcctccagagtagccaggattagaggcatgtgccaccacacccggctaattttgtatttttagtagagacag

SEQ ID NO: 469762 - DNA, 597 bp, Homo sapiens
gtgggtcagggttagtctaatgtagactcttaactgtgcatttcttcagcacttttattgagcacctactgcatgcctgacactaggctctggggatgcaggatgggcatgtcactgccctcatgaagtttatcatygaggaatgggggcccttaatcatagatgtcatgacactaagtgcagaattatgggtctccatgcattttcctgggaagggggtctaagattctggctgggctctccagggtctatgacccaaagactgagcagctctaggtgagcggccaatgctgaagactggtcagggctaagagtggctactgggaagctgtgagggagcagtcagggaaggcttcctggaggaggtgacaataaactgggacctgaacaggagttaatcaagaggaggggatagatggggtagggaggtaacagtgtgccaaggacactgtgtgtgcagtggtctggaggtgcgtgtgacagaggtgtgggtggggaggccctgccctcccaggctgtctacagccccctctcacccttaccccactccgggctctggcctccctggccatctctctgggctgcagtcaactccac

SEQ ID NO: 469763 - DNA, 597 bp, Homo sapiens
gtgggtcagggttagtctaatgtagactcttaactgtgcatttcttcagcacttttattgagcacctactgcatgcctgacactaggctctggggatgcaggatgggcatgtcactgccctcatgaagtttatcatcgaggaatgggggcccttaatcatagatgtcatgacactaagtgcagaattatgggtctccatgcattttcctgggaagggggtctaarattctggctgggctctccagggtctatgacccaaagactgagcagctctaggtgagcggccaatgctgaagactggtcagggctaagagtggctactgggaagctgtgagggagcagtcagggaaggcttcctggaggaggtgacaataaactgggacctgaacaggagttaatcaagaggaggggatagatggggtagggaggtaacagtgtgccaaggacactgtgtgtgcagtggtctggaggtgcgtgtgacagaggtgtgggtggggaggccctgccctcccaggctgtctacagccccctctcacccttaccccactccgggctctggcctccctggccatctctctgggctgcagtcaactccac

SEQ ID NO: 469764 - DNA, 530 bp, Homo sapiens
ggctgctttgccacagtcctgttatgtgaccgtgagcagggtcttgcctcctctggtcccagttgctgcatctttaaatatagctattacctctccggtggattgggggagggtgacgaggttccaatgcctrtggaggtgttttgaagagggcggaggaggaggattacttttactaagctgagagagggaagggtcctaggctaggatggaaaggggacactgggggaccctgggtgctcagactagcagcctgaggctttagaaccaggcttctgccctcatcttggtcattggctttactggaagatcctgggcattattggaacctttctcagcctcactttctcctcctgtaaaactaggcatttgaccaggctcaccttggaagtcctctcccacgctgacatgtatggctctgagaggccctcgggagcccctgtaggacaagggggtggtttggaagccagagagaccccgagaggaggctggggggttcgtagctgctgccctgactagtgtggggcagc

SEQ ID NO: 469765 - DNA, 511 bp, Homo sapiens
ggctctcctcttcaccatccccacccctgctcaggaaagatccctcctgaggggtcccagttgttcccttccctagctctgtgtttcctggggaaagttcctgcttccttatctggaagaycgggcagttgggctccttgaagagcaaggagcccgtcggttccatgatctctcttctacctgtggcctaaacactgccccctcctgaacaccttggagattgggagcagggacttggcgggggtctagaccccactctcccaccatggtggcttgagttgtggtgatgaaaatgcctgttgcctgcccaggcacttctgggacaataaacatgcttatctagacaagggcctcggccagaggaaacaaggctcagagacagaagcaaaaaggcaggaagatcttcctgacagtaaaggtaattaagatcagaaaccatttaccaaggaatgtatgggtctccttttcctggagattatagaaacctggaagctaatgggcccccagagag

SEQ ID NO: 469766 - DNA, 511 bp, Homo sapiens
ggctctcctcttcaccatccccacccctgctcaggaaagatccctcctgaggggtcccagttgttcccttccctagctctgtgtttcctggggaaagttcctgcttccttatctggaagaccgggsagttgggctccttgaagagcaaggagcccgtcggttccatgatctctcttctacctgtggcctaaacactgccccctcctgaacaccttggagattgggagcagggacttggcgggggtctagaccccactctcccaccatggtggcttgagttgtggtgatgaaaatgcctgttgcctgcccaggcacttctgggacaataaacatgcttatctagacaagggcctcggccagaggaaacaaggctcagagacagaagcaaaaaggcaggaagatcttcctgacagtaaaggtaattaagatcagaaaccatttaccaaggaatgtatgggtctccttttcctggagattatagaaacctggaagctaatgggcccccagagag

SEQ ID NO: 469767 - DNA, 547 bp, Homo sapiens
cctgggttatcaaaagattttaagttggggagggtaatgcagtctcgaaggctagcctaccaaagaaaagagaaagggaattagaaataggacatgcctatgacaaagaggaagatggacaaagtgatcatggaaggagaacagaaagaagagtaagaggagggttcagataaaaaaaatcttccttattcaacaggattaagaaaggagaccagagctgggcatggtagcttacacctgtaatcccagcactttgggaggcgaaggcaggtggattgcttgagtccagaagtttgagaccagcctgggcaacatgggaaaaccccgtctctacaaaaaaatacaaaaaattagctgggcatggtggygcttgcttgcagtcccaactactcgggaagttgaggtgagaggatcacctgagcacgggaagttgaggctgcaatgagcagtgacctaatcactgtactccagcctgagtcactgtctcacaaaaaaaaaaaaaaaaagagagaccaaagattgttccataaaatgaaatgctttctag

SEQ ID NO: 469768 - DNA, 624 bp, Homo sapiens
acctataggacagggagaagaaaagaaacaaacgtaagatggaacagtcaaggtttgagatccagctttaattttatttttataccttagtcaagttatccagccagccacaccatggatctcagattttactcttgctaagcattcacacttagcatcacaattatattttctggcaaaggcagttgcaargtctacaattgttagtaaggattcctgcccttattttaaacgagagaacctgggtacagaggtaccaatgactacaccaaagtgttagtacccagatgtgaactccagtgcttatcttcatagtttccttcaagttcttcccctctttagacttcaatatcgctttgaataagtgggcaaacttgaccccttagtggcccttctgtgtctggtagttaatgaacctacattctttagtcctgatcaaaacagcctgcaaaaggtgaatgaaaccttcatctagtcatcagatggcatctggttttcacactgataggaaaaggttacaaaactctgggctcttggaccaagaccctatcatttacaatctcaactcccaccacgactcaccttaccttaagtgaaaaggaattgaacattatctgctccctc

SEQ ID NO: 469769 - DNA, 590 bp, Homo sapiens
taatagctaggattactgggaaaagatgtttttttcagtttttaatcctgtgctccttctaactatgtctgtatctaagtgctaacttactagttttagcgattaacagcaagtcttcagagagtcatgacagtacatctgcctttaaaatagaaactctaatcttctcccttgacaaaaccgtgctgaaagttctacagaagaaaaaataaaggaaagggtgaaagcccaggttaccttcataccaccactgccattaactacttttcaatctttctccacgacagtatgagtcccaggcagccataggtccaaattccaggtttacggcaaagagtaacaagcatttggaaacacatccaaatcctcacgcctatgttctcagggaagaaaatcaagagctttcggccaacattaacattggattctcacactacaaccacagtgttttgctactctgatggggtgactgtattcagagccaagtacagcgacccaagatcggaaagccagagagccctccgaatgcktactgcccaaatgtggcctgtctccaagtgctccctttttacgcatttcctacgcaccgc

SEQ ID NO: 469770 - DNA, 639 bp, Homo sapiens
tccagttaggtaagccagtgcaatcagggagaacacagatgaacaagataaacaacaacaaaaagatcacttggaaaaaaaagggttactgtcaagtaattcaaactttgtaatatgaaagtgtcagtgtggtaaaactgctgataaaatagcctgcagccatttttccaaaacagaaagatggcactaatattgtttttcttttattttaaatttcattattataatactttaagttttagtgtacatgtgcacaacgtgcaggtttgttacatatgtatacatgtgccatgttggtgtgctgcacccattaaatcgtcatttagcattaagtatatctcctaatgctagtactcccccctccccccaccccataagcagaccaaccatgcttgtttactacaggatttctacagccatcatttagaaaggcatagaagcagtatttctgagctactgaacagtaatacaatgcacaaattttacagtggataagccagcctacaaaagggaagaaatgtatttcatgaaatctctctcctgtcgatgtataacatccacagaaacaaagatggatcaaggtagcccacatactaaccrtgactgaaaatgtactcttgccccttggaataagctttt

SEQ ID NO: 469771 - DNA, 339 bp, Homo sapiens
ttggcccggccgatgggaagccgagcggcgagtccgacccgcaagcacgagcagccctgccccgcgcgctccctgcgcgcagccgccctcgtgtcccttcggcctctcctgggtcccggctcgcagccccccccttccagtccctcgctcctcagaggcgcgctaaggcgccagaggcgggggtggccactgctggcggcccgccgccggttttaaacccggggttcaaacccagatttggggtcttccctcctccatttcctcctttcctccgcgccccagctctctccctttttcagcytgcaccttcactattcacagtgactttacttatttagc

SEQ ID NO: 469772 - DNA, 581 bp, Homo sapiens
actaaaatgagtgattaggctaggcacggtggctcatacctgtaatcytcgtactttgggaggccaaagcaggggggcttgcttgagctcaggagttccagaccagcctggggaacatagtgagaccctgtctctacaaaaaacatttttttttttaaattagctcctcacagtgacacgtgcacctataattccagctacaggggaaactgaagtgggagtatgacttgagctgaggagttagaggcttcagtgagccatggtggcaccactgcactctatcctgggtggcagagtgagagcctgttgcaaattaaaataagtgattaggacaaaaaagatatagggccaaataaatagaatgcttacccacctcaaataaaaagaaaataatatttgttaatatgaaggtgatactggataagtgaagtgcctaggacttttttcttaaataatctagtatattttatgtgaataagggactataaagtagggagatcagcaggactgtaaaagtgggtgtgggagaagaaagtttgctagtcaaacttggtttaaattgactgcctttgtaatagcat

SEQ ID NO: 469773 - DNA, 581 bp, Homo sapiens
actaaaatgagtgattaggctaggcacggtggctcatacctgtaatcctcgtactttgggaggccaaagcaggggggcttgcttgagctcaggagttccagaccagcctggggaacatagtgagaccctgtctctacaaaaaacatttttttttttaaattagctcctcacagtgacacgtgcacctataattccagctacaggggaaactgaagtgggagtatgacttgagctgaggagttagaggcttcagtgagccatggtggcaccactgcactctatcctgggtggcagagtgagagcctgttgcaaattaaaataagtkattaggacaaaaaagatatagggccaaataaatagaatgcttacccacctcaaataaaaagaaaataatatttgttaatatgaaggtgatactggataagtgaagtgcctaggacttttttcttaaataatctagtatattttatgtgaataagggactataaagtagggagatcagcaggactgtaaaagtgggtgtgggagaagaaagtttgctagtcaaacttggtttaaattgactgcctttgtaatagcat

SEQ ID NO: 469774 - DNA, 581 bp, Homo sapiens
actaaaatgagtgattaggctaggcacggtggctcatacctgtaatcctcgtactttgggaggccaaagcaggggggcttgcttgagctcaggagttccagaccagcctggggaacatagtgagaccctgtctctacaaaaaacatttttttttttaaattagctcctcacagtgacacgtgcacctataattccagctacaggggaaactgaagtgggagtatgacttgagctgaggagttagaggcttcagtgagccatggtggcaccactgcactctatcctgggtggcagagtgagagcctgttgcaaattaaaataagtgattaggacaaaaaagatatagggcmaaataaatagaatgcttacccacctcaaataaaaagaaaataatatttgttaatatgaaggtgatactggataagtgaagtgcctaggacttttttcttaaataatctagtatattttatgtgaataagggactataaagtagggagatcagcaggactgtaaaagtgggtgtgggagaagaaagtttgctagtcaaacttggtttaaattgactgcctttgtaatagcat

SEQ ID NO: 469775 - DNA, 581 bp, Homo sapiens
actaaaatgagtgattaggctaggcacggtggctcatacctgtaatcctcgtactttgggaggccaaagcaggggggcttgcttgagctcaggagttccagaccagcctggggaacatagtgagaccctgtctctacaaaaaacatttttttttttaaattagctcctcacagtgacacgtgcacctataattccagctacaggggaaactgaagtgggagtatgacttgagctgaggagttagaggcttcagtgagccatggtggcaccactgcactctatcctgggtggcagagtgagagcctgttgcaaattaaaataagtgattaggacaaaaaagatatagggccaaataaatagaatgcttacccacctcaaataaaaagaaaataatatttgttaatatgaaggtgatactggataagtgaagtgcctaggacttttttcttaaataatctagtatattttatgtgaataagggactataaagtagggagatcagcaggactgtaaaagtgggtgtgggagaagaaagtttgctagtcaaacttgrtttaaattgactgcctttgtaatagcat

SEQ ID NO: 469776 - DNA, 498 bp, Homo sapiens
tggttctgaaactgggctctttttttgccatatgcctcaagggtgtcacctttcaccccttttatagatgttttctccgtgttttttatatctctggacacaagtttcaattgctaaatcctccctttatgtggcaggagattaatgacctgttgctgaattcatctcccttgactaggattctactctctcatscgatctaaatgactgcttagattccctccaatggcaaatgatcacaagtgtatggttataattcatcaacccgccagactctgttacttacctgtgagctttcttttaaatatatcaaatcttggcatatctttatgcttatttcattttgcccatctggcgattatgcttaacctgccatccagacattttctagcttccagtacttgaatgttttctatttgcctgttctaccagctattattgcctcaagctttttttacctcctcctcatgccatgtcttgtctcagtctacaccaaat

SEQ ID NO: 469777 - DNA, 563 bp, Homo sapiens
aaatttattattataatatccttggtgctgagactagtaatctacctaaacagtattttatgtcagtcacttggcatggacaacttattaatgaccctgagagatagatactagcatctctatttcacagttgaagaaactgagttctggaggtattaaggaacatctccagattggcacatatcaccgtggtggaggtctctctatcctccaagtccttgctttacaaaagcatcctccatgctttacaaaataacacaacaatatacctccacttcataaataagattattgttttcataaatwgacttatcatttgtttccaattttatagtcaagatcactctaaacacaaacttctctcattgttgatgccctcctgtattttcattatgcatggtacttgtgactacacagaaaaacaagcattctttacataaatcaatgctagttccagaaaggctaattccatgtgagcatggatgtatccagtggggtggcaaagcggagcatttcttgtgagagatccctaaaaacctaggcaaagtaatgacagaggcaga

SEQ ID NO: 469778 - DNA, 588 bp, Homo sapiens
ccactacaaccaagaagttgccagaggtgaatgccttctctgcctctacaggttccaaaaccacgtcggctctgatcacatgaacacaatgagttgccgcaaggctagtgaccagatagtttcaatagcccaaaatggtcaaagtccgcactatcataagtactcacattagccatcaaagtaataatgctatcaaatgtgatgtagcctttagaatactctactgtacacccatgaaataatgagtgtgtaaagggttcaaatgtctaagagtccttagaatcagggttctctaagtattctgaaaaccattgtcttggggcaatagtcatttacagaatttgtaactctccctgaactatctaagctcagattatgaaatgttacataaaygggaatcataattgttagtgtctcgggaatcaggtttgaacattaatgcagcagtaacaaatgtaagactttattttcaggacaaaataaactatttacatgattatgtttctatctattcacatgatgggtagaacacatgacatcatcacttttagatgaaaaacattgaacattagaaatggtttggtttgc

SEQ ID NO: 469779 - DNA, 569 bp, Homo sapiens
acccgttgcacaaaattagctgggaagaagccaacccggtcgccgatcttgccctggggatgaggttggcaatgaacacccgcrccacaccccacccctgctgcccaccactgctttctccagacccggttcccactcagcaccaatgccatcatcctccagatctagggctctccggattccagcccccagccaggtggcttctgggccaggaatagcataaggtgagcagagggacaaagctgaggcaaggagagtcaaaactgagaggatgtcccaagggttggtcctagttttggctgggaccagtggttggaggagaggttgtctttggggcctggagagaaggtgggggcagtgcccattgggggtgggggctgctggggtgcctaccagtgtccctccactccccaccctgccaagtcaccttccaccagtcctcgttagagtcatccaccagcatgatccgatctccaggcctggggaggacagagctagggttgcatatggagcagggagtagtgcccctccccatcctagcagaccctgggcacctgggggacactgca

SEQ ID NO: 469780 - DNA, 377 bp, Homo sapiens
aaggcatccgataggccggttttgacaggatgctgggaggagctgatttccgggacagacatagggatctgcggcagggagaagagactccgtccacctcccaaacgctctggggcccacccagccctcccctgtgagctccagacccatctttctggatggcaccacctcctggaggactccaagacattggaagcccagtgggaccccacccaaattccaagtcctctccacaycacctccaagcacattttcttctttcctctgtctcggtgaatggcactccatgcaggccggaaacccgggacacacccttttcccttccctttctttcatttcttcccttccccatctaatgcatctccgaattctgttgc

SEQ ID NO: 469781 - DNA, 377 bp, Homo sapiens
aaggcatccgataggccggttttgacaggatgctgggaggagctgatttccgggacagacatagggatctgcggcagggagaagagactccgtccacctcccaaacgctctggggcccacccagccctcccctgtgagctccagacccatctttctggatggcaccacctcctggaggactccaagacattggaagcccagtgggaccccacccaaattccaagtcctctccacatcacctccaagcacattttcttctttcctctgtctcggtgaatggcactccatgcaggccggaaacccgggacayacccttttcccttccctttctttcatttcttcccttccccatctaatgcatctccgaattctgttgc

SEQ ID NO: 469782 - DNA, 618 bp, Homo sapiens
agtccagagaacagaccatccaagaataaggggagaaagttctttatgttaagaggagccctttgtcttcaccttactgcccctaggcagtgactaaaagccatgccccttgttgagagctactaagcgactgaggataatgacaggttactcaacacgggttggagatgaccttttccaaccatcattcccagtttacaaagtttgagaggaaggacccttgtgagatgggaaaragcctttggcattcttccagaactgttttccagtccctacctactctgcctggaagaataatggaattttgcaggcagatctaaatttgtgaagagagatggtcctgaaaatttgaaaccaaattctttttttttttttttttttttttttttttttttttaggagacagagtgtcgctctgtttcccaggctggagtgcagtggcatgatcatagctcacttcagcctcaaccccctgagctcaagcaatcctcccacctgagtagttaggactacaggcatatgccaccacacctatctaattttgtttttaatttttgtagacacgcatctcactatgttgcccaggctggttttgaactcctgacatcaagttatcct

SEQ ID NO: 469783 - DNA, 627 bp, Homo sapiens
tattctgaattccatgcctgtcatttctgccagctattggttggcagaaagcctggttatgaagtcctatgaagcctggttatgaagttgaaaaactggtgtggcagtttggaggacacacgacactctgaccacttgagtgactggagttcttgtgtgtactgccatcacttaggactatttagaaaacatctgctttaagaacctaaaacatcttttcctaggagtgaagaaccaaagacaaattgtaaaatagtccagttttgtcttgagagcattattccttgcaactgtgtgattttattgatctttgtttgtctctgtcttagtaagtttgggctgctacaaaaaatatcataaattgggcattttataaacatcagaaatttatttctcacagttctgaagatttggaagttcaagatcaaggcactcatcgatttagtgtctggtgaggkcctgctttctggttcataggtggtgctttctctctgtgtcctcatattttggaagggaagagcgatttctttggtgtctttttataatggcactaatgacctaattacctcctttgggggttggtatttcaacatgtgaattttgaaaacattcagaccatagcagtca

SEQ ID NO: 469784 - DNA, 662 bp, Homo sapiens
tttaacttttgtgtatattttgttgaacacataactttgtaaataacatatcaatatttttagaatcmatttttaaagctcttttaattgaaataattaccaaatttaaattaattcttattatccataacttttttctttcaccttattttgtgtttaattttactcactttttttctatttttattttctatgctttgttttagattgattcaatatataatctcattctattctattttattttggaaattatactatttctttctttttgtgattatcacaattttgttaccatcctgacttggtgtcaaaagtctggagttaataactttaccaataatacaaatgtgttgacacctctcaacaaatagttaacattgtacctattaaagattttacctcccaatgatggcagtggtggcctgtctggagaggctgctgtgaagatgtctgctgtagtggggtaggcgtggccaaaatggcgcactcctcagagccactgggggctgagaacaggcaggagccctgcccgctactgagtgggcagggtgggagttctgcactgctgtgcacaggctgcagccgcccagctgcgacttcaaacccggacatccctgttctcttggaggtccagtaagccaccctgcccccgcaggttt

SEQ ID NO: 469785 - DNA, 580 bp, Homo sapiens
ttggaaaactcatgaataatgcacccctgtttagcatataatcaagaaacaactatgagtatactcagtccagcagcccatgccactgctcwgcctatggaatagccattctttcattcctttactttcctaataaacttgctttcactttactctatggactagccctaaattgtttcttgcacgcagttcaagaaccttctcttggggtctgaactgggacccctttccggtaacattatcatcctgttgtgagccgggggctttggccctcaataaggcagcagagtttcctagagggcagaccgtcataagctattgtgctccatgacttgctttgcacgtttcagctcatcatcttcattaaataagtaaatcaccacacaagcctgtttaagaatgggaaaggggcacatttacttagatgagagttgggaagagagaggagagcactgggctttttgtgacatgattgtagctgcccataggctggagccagggtgaagtggaacagaaagggatcagaagggaggcacaaggaaagatgaaatctcgagctctaaatcgaatccttcttctg

SEQ ID NO: 469786 - DNA, 580 bp, Homo sapiens
ttggaaaactcatgaataatgcacccctgtttagcatataatcaagaaacaactatgagtatactcagtccagcagcccatgccactgctctgcctatggaatagccattctttcattcctttactttcctaataaacttgctttcactttactctatggactagccctaaattgtttcttgcacgcagttcaagaaccytctcttggggtctgaactgggacccctttccggtaacattatcatcctgttgtgagccgggggctttggccctcaataaggcagcagagtttcctagagggcagaccgtcataagctattgtgctccatgacttgctttgcacgtttcagctcatcatcttcattaaataagtaaatcaccacacaagcctgtttaagaatgggaaaggggcacatttacttagatgagagttgggaagagagaggagagcactgggctttttgtgacatgattgtagctgcccataggctggagccagggtgaagtggaacagaaagggatcagaagggaggcacaaggaaagatgaaatctcgagctctaaatcgaatccttcttctg

SEQ ID NO: 469787 - DNA, 603 bp, Homo sapiens
ccaggctattgagaatatacttcctttcaagtacagatggagcttccttaaaagttgaccctattttagaacacctcccaaaaaccttgagtagctctaaaaagtaaaataacactaacagcatttatgaccataatacagtaaaataaaaattgtatactaacaatttttaaaggccctccaacaatttgaaaacaagctcaaagcagtaaaactttctctaaacagtaggccagggcagttgtagagatcaccttactttcctttctgtcagggatcatttcattaagcaatggttggctgttaaacaatcttggctcaatggggaaatataaaattaaattttagaacttctagaaaatagcaaaaatgaaaacacaatacatcaaaatctaaaattcatagcagtaaatacttattacagtaaaaatgaaaataaatcgcccaggcaaaaagctagaaaaaaaagcaacaaagtaaactgayagaaaaaagaaaaagaaaatcaatgacaataaaagcagattaaaatgtagggaaaaaacccacagcagagttaataagaaaatataaatcttgttcttaggaaacaacagcaacaaa

SEQ ID NO: 469788 - DNA, 630 bp, Homo sapiens
tggctgacattcacatcaaaaaattcaattccagaacaccaagtatttagaggtcacttcctccaagttcctcacyttgcaaaggaagagactgaagctcacagagaaatgatggcttgccacctgctatgtagccgttgacagcatagccaagactggaacccacagcacttgtattttcagactagcattcctactttggtgccaaatggcatgaatcaaatagttgagcttgcttattaatagcaactattaccactattacattagttagcttttactgagggcttcctaggtggtgggcatgtgctaagtgtatttgtttatcatcttcagctctcccaaccatatgatgcagttcctgcatgtttgctgatgttgttgattgggaaagtcgagctaaattctgtgtccccagtcacacagcttggggtaatgtgtgacagcccaggattcccacctggatctttctgacaagaaagtcatgtttagaccaccctgtaaggtacctttggccaagacccatgatgtgtgctgaatctgaaaccaaataatatctaagaggccagaataaaggtcaaatgatgtttaggccaagagagctgccgtgagcatggaaaggttgtgggg

SEQ ID NO: 469789 - DNA, 656 bp, Homo sapiens
tccagctgcagattaggaaatgggcgtagtgcaggaaaatagaaaaatcagtccccgccttccttagtaatgacgctgtcagatgggaggaaggagccttgacttcctgagcccatcagaggctctgggacaggactggggtggggatgctcgacttggagcccttcttgtacatcctctttgaacccttctcagcctcctggaaccctggcagttggtccctggcactttggtccttctgctgagttctgacagcccaaggccatcttctgtctgacccttccctgttctggtgccgcacatccgccttcccctccactcacatcrtgccaggccccatggtctggaaccgtctgccctctgctccatcagaatctgcctcaggtcatgttgcagcctgctcagttcccttcataaaacacatatagtgctagcactgtgttcctaggcctaaaggccccacgtgagtgagacctggccccagagtgccaagtcacagaagcccgtggattctagtgtgcagtggccacagcaacctgaggtgccacagcaacctgaggtgccaccttccacagggcagcggcatgaggatgcctggtctcccatgggacgtggctgggctttggaggatgaataggagttctagtgcaaagcat

SEQ ID NO: 469790 - DNA, 615 bp, Homo sapiens
tttctgtgcttcaatcatcatcatcatggtaacagcaatagaaccatttcctattattagagagttgaggtcacataactgaggtcacataacatgagactggtcagtggctgagcccagatctggattccaggagtccagcttcagagttcatgtacctgcccttgtaggttgggtccttgaatgtatgtgtggtatctgggcatccaaggctagaagccattcaaaatgtactcccaggcctccctgacctttcccatctctgttatatcaagagggaggtttcctttccattcaccaactatcgagcacttactgtctattgaaggaactatctttggtgctggaaattaaatgttgaacaagaaatgagaatcctgcttttaagtatttcatgtcatagtgtgcaggatacacagggcaaacagccacaaagaagcaagaggattcatagtgatagactgtctgctggaggggacacagggcsatcgctggaaagcaggggaaggtgggggactgagcagggctgtggcagggccactgtccttagacatcagggaggggtccttcaagagaacaacatcccattgcaggcctctctgcagtgaagaagcc

SEQ ID NO: 469791 - DNA, 486 bp, Homo sapiens
attcatggggccttgggagagtactcaggatgcctccatctcaggagtgggccacacttagccctatctgagcccagctccagatccgcccggcagatcacaaaagcaagacacaaaagggtcaaactgtttccaagtaactttaactgcatccaaaagcraagttgaagaacatttatgggaatacaaacatacccagcgcctggcaaggtaaaattcagaatgtcagtcaactaatgaaaaattacagatgggggaagaggcagaaaaacatcatctatgaggggactagtcaatccagaactaacagagatgctacaatgagcagacaagggtgcttaaatgggcgttataactgtattgcttatggtcaaaaagttatgttgagacatggaccatataaaaaaagatccaaatcaaacctttagaaatgaaaattctaacgcctaagatgtaaagtacactgcatgtgactcacagcagact

SEQ ID NO: 469792 - DNA, 546 bp, Homo sapiens
ttattttagacctttgtaaggggagaaaaagttgaaagtagtgagacatagtaaaagttgaacttttgatttataaatttgagaagtttttaaagaatgactgttacatataatgctctagttatttaaaatattatctaaaactttaaaaacacagactttcctcctcaaatccctaaactctcctcccttactccctagccacattaaaaattccccatttctactttttattaaaacaaatttttaaaatcttgccttccccaccttcttactttaatcagatcaaataaacatttctctatctccaaacacctgtgtatcactatttaacatcaactacacaccaagtacacaaacytaaatttagacttcaacacaagcctagggcctgtgtcatcaggaaacagttctgcaggtgcaattctgatatatatggccaatgaggagccaccgactgggtctcattctcttctccgtacagaggaaataccaagactcaaagctcaaagtgacattgaacaaggagggttggaaggaggaaac

SEQ ID NO: 469793 - DNA, 546 bp, Homo sapiens
ttattttagacctttgtaaggggagaaaaagttgaaagtagtgagacatagtaaaagttgaacttttgatttataaatttgagaagtttttaaagaatgactgttacatataatgctctagttatttaaaatattatctaaaactttaaaaacacagactttcctcctcaaatccctaaactctcctcccttactccctagccacattaaaaattccccatttctactttttattaaaacaaatttttaaaatcttgccttccccaccttcttactttaatcagatcaaataaacatttctctatctccaaacacctgtgtatcactatttaacatcaactacacaccaagtacacaaacctaaatttagacttcaacacaagcytagggcctgtgtcatcaggaaacagttctgcaggtgcaattctgatatatatggccaatgaggagccaccgactgggtctcattctcttctccgtacagaggaaataccaagactcaaagctcaaagtgacattgaacaaggagggttggaaggaggaaac

SEQ ID NO: 469794 - DNA, 668 bp, Homo sapiens
cctgcgttataagcttttcactaggaggcaagtgctatgaaaactgcctagtagtcattaaccgctcaacaaatattagcagattgtctctgtttatgctcatttcctgtgttataaaatcttccacaaccttatttggattacgtcgtctacgcatttcagagaaacattaatgtctcctaccatggttttggattcatccaattcctcttatcatggttttggacttaaatgatttttttttttttgagacggagtctcgctctgtcacccaggctggagtgcagtggcgcaatctcggatcactgcaacctctgcctcctggattcaagtgattctccagcctcatcctcccgagtagctgggattataggcacccgccaccacacccagctaattttcgaattttttttagcagagatggggtttcaccatgttggccaggctggtcttgaactcctgatctcaggtgatctgctcaccttggcctcccaaagtgctgggattacaggcatgagccaccgcacccagctctggacttaaatgatttctaaaggttgtttatttacatggctcaaagctatgtagtgcaggcaccaagattcacwatctatatgttcgtgatgactttcccttttatcaggaacttcttttgctccttttagtgc

SEQ ID NO: 469795 - DNA, 402 bp, Homo sapiens
gttcagggttcacatcctggctctgcacatgtggccttggcggcggggcsggggggggggtctctccagacataatcttgggcctcacctatgtccctggaaagtgggagcacctggtggggttctggggagggggaattacgagagctccaggaaggagcctgctcagcaaggacagggcccatgagcggtgcaagagatgtttcagcaacgccgtctgggcgtgtcctgggacccgagaggtggagaccgccctcagcctgtctcagaatctgagcctttgccttttctcccggcagcagggagcggactctcctctcccgggccgccgtgggggtcgcgctcaccctccagcagctccacgtggccccagtccttcctgcggtcttggtcttgctcctg

SEQ ID NO: 469796 - DNA, 570 bp, Homo sapiens
atattagttagaattcatctgtaatagaattacctttgtaatttgaccttctccaacaatgctcagtactcagtaatgaaactacaraagattaccctagatttgaaaattgaaatggcacacacacggcaggcagaaggtcagaatgagtaattagtaaatctacagatatataaaataaataatgaaactgcctgctattaaatgtaaaaggaataagcctgcagtgagtgttggggctggaatggaggggataaaacttataagaatagaaaaagtcaagagaaacatatgggtaaaataaaaatcgaggtctttggagttgaagacgcccaagcgcaacaagggtatggttcaaagactcctcagtttgaatgttaagaaccagagcaggaagggtaatcaaagaatattgtgatcacagcagatttagatcaatgagcaaaagagaaccccatgtagtagagagataaagacaaatcaatgtaaagaaggcagcataactgaatatcgtgtgtgtcaaaagtagaaaagttactgataaatgatgccagggcaatggtctcaatg

SEQ ID NO: 469797 - DNA, 584 bp, Homo sapiens
gtcatgataatgaggtaaaatataatttttaaaagttgttagactgaaaagaaaaaagagcagggataaaacctcgataaaaagtgagtataggaagagagagagtgactcaattaacaaagatcattatgggggttatagatctgtgaagtaagagttgagtaaaggccatatcataaaaaaggaaggaggtggcattttaggaatttcaattggttaagaatgtcaaatgccagagatttaaaataagatgaaaactagataattagaagatcattaatgacttacttagggcattctgttgactgaagagaactgagtagagtaaagggggggtaagatcagagccagtcccagttaatttgtcgtctgagaaggttggtggtaaagggaagtagagattgatacaaagcaaaagggggacatatgaggacaaggaagttgttctttactacaattgtttttatttttctttccataaggtcaggaaattgggcacgcttgttgactygaaagaaaagaaccaaggaaagatgaaagtggggaagtataccagagataatagagaaagggattaatataac

SEQ ID NO: 469798 - DNA, 629 bp, Homo sapiens
tctttgcattaattttgtaatatcagaatgttatataggcttctccataatggtgtccactaataatttaaagtttttcaataggtgkatggtacattttaaaaaattaacaaccaaagtcttcatgaggaacaagaaatgattttctatttgtttctatttggctctcactatagcaacttatataatgctttgcatgcatgaaatgtttaatttttaaatttattttctagagatggggatctggctctgttgcccaagctggaccccagctcctagcctcaagggattctcctgcctcagcatcctgagtagtggaaaaattttagtaaacaatggatcttattatcaccaataattttataattaacattagcatgtacatgggatctttaatacatctggagttcattttgattgctcctctaaaaactaaaagaccaagaaaaaaattccctcaaagtatttgtttcttcctcttcctaagacctgatgcttctgttaaaaggcgcagttctcacacccacctgctcctccatgcctgtttctagtgcagtcaaggaaagtttaccacagtggtactttttaaaggtatatttttatctttgcagctctatctggtgttttct

SEQ ID NO: 469799 - DNA, 629 bp, Homo sapiens
tctttgcattaattttgtaatatcagaatgttatataggcttctccataatggtgtccactaataatttaaagtttttcaataggtggayggtacattttaaaaaattaacaaccaaagtcttcatgaggaacaagaaatgattttctatttgtttctatttggctctcactatagcaacttatataatgctttgcatgcatgaaatgtttaatttttaaatttattttctagagatggggatctggctctgttgcccaagctggaccccagctcctagcctcaagggattctcctgcctcagcatcctgagtagtggaaaaattttagtaaacaatggatcttattatcaccaataattttataattaacattagcatgtacatgggatctttaatacatctggagttcattttgattgctcctctaaaaactaaaagaccaagaaaaaaattccctcaaagtatttgtttcttcctcttcctaagacctgatgcttctgttaaaaggcgcagttctcacacccacctgctcctccatgcctgtttctagtgcagtcaaggaaagtttaccacagtggtactttttaaaggtatatttttatctttgcagctctatctggtgttttct

SEQ ID NO: 469800 - DNA, 629 bp, Homo sapiens
tctttgcattaattttgtaatatcagaatgttatataggcttctccataatggtgtccactaataatttaaagtttttcaataggtggatggtacattttaaaaaattaacaaccaaagtcttcatgaggaacaagaaatgattttctatttgtttctatttggctctcactatagcaacttatataatgctttgcatgcatgaaatgtttaatttytaaatttattttctagagatggggatctggctctgttgcccaagctggaccccagctcctagcctcaagggattctcctgcctcagcatcctgagtagtggaaaaattttagtaaacaatggatcttattatcaccaataattttataattaacattagcatgtacatgggatctttaatacatctggagttcattttgattgctcctctaaaaactaaaagaccaagaaaaaaattccctcaaagtatttgtttcttcctcttcctaagacctgatgcttctgttaaaaggcgcagttctcacacccacctgctcctccatgcctgtttctagtgcagtcaaggaaagtttaccacagtggtactttttaaaggtatatttttatctttgcagctctatctggtgttttct

SEQ ID NO: 469801 - DNA, 629 bp, Homo sapiens
tctttgcattaattttgtaatatcagaatgttatataggcttctccataatggtgtccactaataatttaaagtttttcaataggtggatggtacattttaaaaaattaacaaccaaagtcttcatgaggaacaagaaatgattttctatttgtttctatttggctctcactatagcaacttatataatgctttgcatgcatgaaatgtttaatttttaaatttattttctagagatggggatctggctctgttgcccaagctggaccccagctcctagcctcaagggattctcctgcctcagcatcctgagtagtggaaaaattttagtaaacaatggatcttattatcaccaataattttataattaacattagcatgtacatgggatctttaatacatctggagttcattttgattgctcctctaaaaactaaaagaccaagaaaaaaattccctcaaagtatttgtttcttcytcttcctaagacctgatgcttctgttaaaaggcgcagttctcacacccacctgctcctccatgcctgtttctagtgcagtcaaggaaagtttaccacagtggtactttttaaaggtatatttttatctttgcagctctatctggtgttttct

SEQ ID NO: 469802 - DNA, 471 bp, Homo sapiens
cagcctcccaaagtgctgggatcacaggcgtgagccactgtgcccggccaggaaatgattcttttggtccctcatactgcttgtgaagttgtagaagtactaaattcccatttcatccagaaaatrtatttctttgaaaatgtccgttgattttttttttatttagtaaaaatacattccttttgtaaatagataaaactcaagacccctttgatcatccctcaagcccagtattctcccagagataacaattgttcttgggctcaccttttatttatttattttaatttagtgattccagtttttaatgtttaagattgctggttgattcttatgagtgtaatatcctctcacaccacttggaggctgttgattgtgcctgtttttaagtcttgtgtctttactaactctgtgttctgcagcatcacttctttaggtgtagaatttgttgcccttttctcagggtttggg

SEQ ID NO: 469803 - DNA, 569 bp, Homo sapiens
tcttggggatattccatctaaataaccactgaacctgcaaactgcaaactgcctaccgttgactatctgagcaggaggstttacggatgtttatctgagaacaaagtttcattattaaaaaatcagaatcctatgactacattgtcctaaaccgtctttttatagtaatgcctcaaatttgtgaatatgtttccctttttatttggcaactattcgcagacttcagtaaaaaatgcccacatattatcaggacatacaggagtcttcagaatccaatccctgccttcggtatccctgtaaatgtggcccttctcacaccctgtgctccagctgtgctctcttgcttccagctctaactttgccccattatttcttggctgggaatgccctttttcgaccctgtgccaccctaatattttctgcacgtggcttacagctacttattctttaagattagaagcccaaagagttactaccactactatgtgttcccattggttatctcaatcataaagacaatagcaattaaggattgcctgctctgtatcaacctcctttttttggtgccc

SEQ ID NO: 469804 - DNA, 569 bp, Homo sapiens
tcttggggatattccatctaaataaccactgaacctgcaaactgcaaactgcctaccgttgactatctgagcaggagggtttacggatgtttatctgaraacaaagtttcattattaaaaaatcagaatcctatgactacattgtcctaaaccgtctttttatagtaatgcctcaaatttgtgaatatgtttccctttttatttggcaactattcgcagacttcagtaaaaaatgcccacatattatcaggacatacaggagtcttcagaatccaatccctgccttcggtatccctgtaaatgtggcccttctcacaccctgtgctccagctgtgctctcttgcttccagctctaactttgccccattatttcttggctgggaatgccctttttcgaccctgtgccaccctaatattttctgcacgtggcttacagctacttattctttaagattagaagcccaaagagttactaccactactatgtgttcccattggttatctcaatcataaagacaatagcaattaaggattgcctgctctgtatcaacctcctttttttggtgccc

SEQ ID NO: 469805 - DNA, 569 bp, Homo sapiens
tcttggggatattccatctaaataaccactgaacctgcaaactgcaaactgcctaccgttgactatctgagcaggagggtttacggatgtttatctgagaacaaagtttcattattaaaaaatcagaatcctatgactacattgtcctaaaccgtctttttatagtaatgcctcaaatttgtgaatatgtttccctttttatttggcaactattcgcagacttcagtaaaaaatgcccacatattatcaggacatacaggagtcttcagaatccaatccctgccttcggtatccctgtaaatgtggcccttctcacaccctgtgctccagctgtgctctcttgcttccagctctaactttgccccattatttcttggctgggaatgccctttttcgaccctgtgccmccctaatattttctgcacgtggcttacagctacttattctttaagattagaagcccaaagagttactaccactactatgtgttcccattggttatctcaatcataaagacaatagcaattaaggattgcctgctctgtatcaacctcctttttttggtgccc

SEQ ID NO: 469806 - DNA, 464 bp, Homo sapiens
ggcatatgtacatatatacctcaatacacaatggttctaattaaaataaaacaaaatactaatctgcaaataactttctttttctatgtttgaaacaaaatactgtatttgctcttagcaactctctgctcagttaggtcaattagtggtttaatatttaaaggaaatactcagctttataatattgatgattttcataattaaagaaattataaatatcaactgcttagactccagtgagcttattaacatgcagtagagaatacaaatgttcataactgataccatttttcttaatccatggcaactaagcactgtcagcccttaatacaattacatcaagctctcatacaagttagcttmtggccaaatggtctgacacaggcagtcaatatctgggcttaattatgttgataaacaacaaaagtcacttttttgtgtgtaggctaaatgctcacagtggg

SEQ ID NO: 469807 - DNA, 585 bp, Homo sapiens
tgtacttttgatttcaccgtaaagattgtagcaaaaggtcagaactcttttgatgccagctaattaaaatatcaataattatgcaacttataaatttgctcttagtgtgtaaagctgaaacctctttttcatatattttgtgrctaggtactttagggtaattattttgatgtgttaagtgtcaaggagattgacatgttaaagaatactcaggcaatcattcctggagttgggttttcttccttcacaaaattgagtacatgaaagtatggtcctcccattcatgacaaagggaaactgagttcgggagagaaagtcacaaatatggaggaaagtatgttccatcagatcattactgaaacgagatggggatattctttactagtggtttttgggcctattattatatgcctgtgagtattccagcgtaattaattgtgttagcttccttaaaaatttgtccctttagatcacactgcaatctatggactctgtcttagagtcactgagtgttcttattaaaatgcatattccctggcctcatggtcagatgttctgtttcagtaggtctggagtagagcttgt

SEQ ID NO: 469808 - DNA, 589 bp, Homo sapiens
acctgtctcagtaggagtcttgcagctaatcaaaatccaagataaaagataatatcagccgagcgtggtggctcacacctgtratcccaacactttgggaggccgaagtgggtggatcacttgagatcaggagttcaagaccagcctggccaaaatggtgaaatcctgtctgtagtaaaaatacaaaaattagccaggtgtggtggcaggtgcttggaatcccagctactcaggaggctgaggcagtagaattgccggaacctgggaggcagaggtttctgtgagccaagattgcaccacagtactccagcctgggcaacagagtgagactctgtctcaaaaaaaagaaaaaaaaaagaagataatattcacctccaagttgacatctgccctatccatcgaatctagggaacttcttggcaattgtaataggtagcataataggtagaatgtcactccaaagatgttctcatctaaatccctgaaacctgtatgtatgtctgttactttacatggcaaagggactttgcagatatgatgagattaagtatcttgagataacggcttgactattctgggtaatccaagt

SEQ ID NO: 469809 - DNA, 589 bp, Homo sapiens
acctgtctcagtaggagtcttgcagctaatcaaaatccaagataaaagataatatcagccgagcgtggtggctcacacctgtaatcccaacactttgggaggccgaagtgggtggatcacttgagatcaggagttcragaccagcctggccaaaatggtgaaatcctgtctgtagtaaaaatacaaaaattagccaggtgtggtggcaggtgcttggaatcccagctactcaggaggctgaggcagtagaattgccggaacctgggaggcagaggtttctgtgagccaagattgcaccacagtactccagcctgggcaacagagtgagactctgtctcaaaaaaaagaaaaaaaaaagaagataatattcacctccaagttgacatctgccctatccatcgaatctagggaacttcttggcaattgtaataggtagcataataggtagaatgtcactccaaagatgttctcatctaaatccctgaaacctgtatgtatgtctgttactttacatggcaaagggactttgcagatatgatgagattaagtatcttgagataacggcttgactattctgggtaatccaagt

SEQ ID NO: 469810 - DNA, 597 bp, Homo sapiens
tggggccatcctccacaggagcttcagacttgtccccttgtcataattttctctaacaattctcctggttttccttttgtcttttttttttttttactttttgctgatctttcttctctgcctatgaacatggtcaagtcttctgggctttgttgaaccttttgagagtaggttaaatagttgcttctttctgtaatgcttctttcttawgcttctacaacataatttgtatgttggacatacattctccttacagacagactcacacacctcaaaacactcctcttgaattaccaatctcaggtgtttttccagacacccataccacaagtctatgtgcaatatggcacaactccctttttccgtcccaaccccactaattttaccttctatgtattcctctagtcctagcccatccccagcctgtctcgtctggacatcctggtagttcagttggaacccatcctccatactgcaagcagtgttttagtccattttgtgttgctgtaagggaattcctgagactagaagaacaggacggaaatgtatttctcacagttctagacgctaggaagtccaagatcaaagtgctggcag

SEQ ID NO: 469811 - DNA, 508 bp, Homo sapiens
tggcctcactctgtccaccatgtgtgcctggtagtttagtgtggtggagaataaagtatatgggagaggtgtgggagatgacttaggagaggggtaggtgtctcagtgtaaaccagacttttatttgagaactgccttacctagtgctttttgcatgccaggtacttttccaagagccttacaaatagtaactcaattaattttcttaattctaagaagtaggtgctttctgtttttgacttcaacttacaggtgagaaaactgagttaggggaggttaagtaatttctcacgcttgtgcaacargtaagtgctacagtcttgatttgaaccttgccaatgtgtcttcagagtctctgctcttaacctctgcgctgctctcccaggtcttaccaagagttccatttgcgaaggtgtatgtgtgagagttcacatgccatcgggtatggatgtgtatatttcctgatcatcccagtccagtagttcttatcttagaacacctttgtcac

SEQ ID NO: 469812 - DNA, 624 bp, Homo sapiens
gtacttgtcaaatgtgagaccacctgacactgttcgggtactttttctgcagaagctgtatcacttattacaaatcaataaattagggcccccaaacagagcaccagaaaagccatttgtactttgggaagatcatggcrgacaggaggcaggactagaatgcagttcccactcagacagacagagcagcttgtggaggctcgccttatgaacttttgttccagaataactgcaggaataaatcagggaagccaagagaacccacagaccctctgaaagaaacagattgctcctgcaggacccggaagaccctccaaatactaacaggtgctggtatccattgctgagagacccacagagagttcacatcacaggactccgtgcagacgacccccagtaccagctcagagcctggtagacttgctgggcggctagatccagaacagagataacactacagcttggctctcaggaagccacatccctaggacaagtgcagggagtactgcatcaaggaaacaccctgtgggacaacagaatctgaacaacagccttcagccttagaccttcccgctgacagagcctacacaaatgaaaaggaaccagaaaaccaactctcagtaa

SEQ ID NO: 469813 - DNA, 624 bp, Homo sapiens
gtacttgtcaaatgtgagaccacctgacactgttcgggtactttttctgcagaagctgtatcacttattacaaatcaataaattagggcccccaaacagagcaccagaaaagccatttgtactttgggaagatcatggcagacaggaggcaggactagaatgcagttcccactcagacagacagagcagcttgtggaggctcgccttatgaacttttgttccagaataactgcaggaataaatcagggaagccaagagaacccacagaccctctgaaagaaacagattgctcctgcaggacccggaagaccctccaaatactaacaggtgctggtatccattgctgagagacccacagagagttcacatcacaggactccgtgcagacgacccccagtaccagctcagagcctggtagacytgctgggcggctagatccagaacagagataacactacagcttggctctcaggaagccacatccctaggacaagtgcagggagtactgcatcaaggaaacaccctgtgggacaacagaatctgaacaacagccttcagccttagaccttcccgctgacagagcctacacaaatgaaaaggaaccagaaaaccaactctcagtaa

SEQ ID NO: 469814 - DNA, 415 bp, Homo sapiens
ataatatttgtgcctttatgttaagcattccttgagcccatcttgagggaaagctcataaaattttcaattctctcaaaaatgctattggtggtccagtcaaaacaggatcatctggataaagaaaaattgccaatcgacatttgaggcagaggtacctttttgtccccaaagccttggaatgccccgatgagcaaaggttttaggtttacctcagtcctgaatctttggatctaccagcaaattagggacccctgtcaaaacatgccttaaagagagagatggcagttgggaaagagagcaartcaggaaattcaacatcctcattttatatatgaaaaatggaagcccaaaatagcaatgtaatttacccaaactcatccagctcttggtaaaagacccaggactaaaaccca

SEQ ID NO: 469815 - DNA, 584 bp, Homo sapiens
gctgctgcccaagccctcctgcagcagcccatgcaccttgcctcacaattggccttgtgttctcccaggctcctgggaggaagacccatcctgctcagcccaggcctcccaccaagtgtgttacttggggccctccaccaaaacaggatggcggttgagtgttgagattacctgaccactattacctcttccttgtctcccaacagcttaattcagccaaaggtgtcaggacctcatccctgagagatttgggttgttgttttgttttcttttgtttcccagaacaggaaaaacatgaatattttcttttttttttcctgtgcttctttgaaaagacatgaggggtgagccccgtgtgaaaagatatttttgcatctagtttggggggaaaaaagcctttccccaaatgtctgagaaccttttcattataaaatcctgtgatgaaacactaacgaggaagaaggatgccatcagcagcagggccagagtacaacagcaccgtctactggacaaaggctgagttyattgatggtgttccatgcaatggccatgaagaaaatatggctaacactctggggctaggg

SEQ ID NO: 469816 - DNA, 460 bp, Homo sapiens
acgtggctgtctaaacatttttcttcaaggagtctttctagtcaataactattctttcagagcattcagtttgggcctttaccaacaaagaccaagcattttaaagtcaataaacaaggatttataataggcagtgccattctgatttctagtagaacccaaaaccctctctgtatttccatgccagataacacattttactaatatagattgtaccaacctttctgatggccaatattaaaaattwaaatgtgtgtataatttgactaaggtgttcactttaaggaatatcatcaatagaaattattggatgcatacactaaaatatttgcacatagatgttcatcacattgttgtttataaaagtgaatcttggctgggtgctgtggctcacgcctgtaaccccagcactctgggagcccaaggcgggcagatcacaaggtcaagagattgagaccat

SEQ ID NO: 469817 - DNA, 568 bp, Homo sapiens
ccggactgcctctgggctccacccaccaaagtcttgtcagtcagccctgccccttcagcaagcagcccagtccctgccctctccaatcaccccatggtgactttgggtgggtgactcttggggattcccactccattactgggccctcacctcctaccgccccaaactcaacctccctgggctctttgggctcacatctccaaggaccttggtcccccagccccaggccccgccctcgccagtcatccctgggtgactttgggctggtgactcctgaggctccctgctgcagactctgccctcccctcctgctgcctcaaggtcgacctccctgggctctttgcgctggcgtctccaaggagctgggtcccaaccctgtgtttccctcccccatcatggagcagcaactcagacatcgtgctgatgtccctccccaygaccagaagggtggaatgtagtgatgtcacaatccacctgggaactgtcattactgcaagaccagcctttgatcttatgacccagtcccctaagcgttgtcaccccatttctgattcctctggtcacagca

SEQ ID NO: 469818 - DNA, 568 bp, Homo sapiens
ccggactgcctctgggctccacccaccaaagtcttgtcagtcagccctgccccttcagcaagcagcccagtccctgccctctccaatcaccccatggtgactttgggtgggtgactcttggggattcccactccattactgggccctcacctcctaccgccccaaactcaacctccctgggctctttgggctcacatctccaaggaccttggtcccccagccccaggccccgccctcgccagtcatccctgggtgactttgggctggtgactcctgaggctccctgctgcagactctgccctcccctcctgctgcctcaaggtcgacctccctgggctctttgcgctggcgtctccaaggagctgggtcccaaccctgtgtttccctcccccatcatggagcagcaactcagacatcgtgctgatgtccctccccatgaccagragggtggaatgtagtgatgtcacaatccacctgggaactgtcattactgcaagaccagcctttgatcttatgacccagtcccctaagcgttgtcaccccatttctgattcctctggtcacagca

SEQ ID NO: 469819 - DNA, 580 bp, Homo sapiens
gtcacccggccaaggcgggccttggagccaaaagggagatgcacaccttggtgggctggccaacgggtctggatgagtggaccccctgccccgccagccttcctgggtaatcagggaactcagagaaggatgttcctgccccatcctgacccagaccacttgtggaccctgacagccagtgcagccctgggtgccacccacacactgagcttgggttgcacggcaacatgcatgacacacctgtccccatcaagcagggtcagggggcagcctgcagactgggtggacgctgacagcagctagcagcccccttgcagacsctccatcttccctttggggtccctgtccaggtatagccccctaaagacctctgttgaccaactcactgacagggcagatgtgacaccacctgctctcaattcatcctcactcttcatcttcagtcctctctcactaggcggcagagggagggactggacctatacaggtcccaggtaggtcctttgtctctgtctgggttttcctatctgaggaatggagccggctaaggaaaggcccaaccagaatgtgccagtgtcgt

SEQ ID NO: 469820 - DNA, 595 bp, Homo sapiens
ccagcgcagagaaaaaaattttcagaaatactctgggttgctggagggaaactcacataagaaaaatggagaaaaaaataggggactgatgccttggagaaaagcaacaattagaagcaaaagattagatgccaccttgcaacgtggatggatcttaaaaacatactgctgagtggaraagaagtgagaacctatgagatctataaaaatactgttttgaagggacatatacaagcaatagaaatacgcataaacagagtagaatagggttgtctatgaatggaggggaatggggtatgaggaaaaaagaggataaataatgaaaaatggaggaagaggcgggcaaggatcaatgatggctgtgtaccaggaagggaaaaataactcaactctcatcatctcgcaccctaacaaagattcttctaatctacaaagcccaagagtcctccgtgaataacagacaggctacaaatgaggccagttcccctctcattataattaaaaccacagtccccctccgggtcaccaacacgagtgtgcaccatttatttctccctcgggagctttcctcgaagcacttatccatcgttcagat

SEQ ID NO: 469821 - DNA, 543 bp, Homo sapiens
tctgatgattgtcattgcaaaaggacccagttgggcactacaatcagcctgtcctcatttggccccaggaaccaccacttgcctagctgtgggaccctgggtaagtcactcagagtgctctgaaatttggctttgctacaagtaggactgctccctgcctcacagaactgttgtgagggctaaatgaaataatgtatgcagagcttagcaggcctggcatgtagtaaatactccggaaacattttttttaagttccagggtggttgtctayctggatgtcacctctgacctctgaaaaccacagggattgaggataggaaagcagtgctcctttctgcatccacccggtccccacctcaccttcctgagcaccaggaaaggagcctgaggaatcaataaggccagaggaggaaccctgcagagcgtggtcagctgggaaggacttgggcagtaggagcagagggggcaaaggagggcctgggttgggggtacgtggcagcatgcctgtcctcagcagacacctcccactgcccatgcttcttg

SEQ ID NO: 469822 - DNA, 369 bp, Homo sapiens
ggagaagggttcttgaaagtcatgaacatctgtcccaattcaacaaataactcacatcaagtttgaattctgtgcaagacaytacaagaaatgcacccatgaccaaggcagtagctggactcagggatatccactcttgaatgctcttggaaggaagagagttgagacaagtagactaggtgggcgaaggtcaatgtataaagaccacacagttcagggaagaattcctcttggctatgggaatccgggaaagcctcccggagaaagtggtatgccactttctttttcttccagtccttccttccttccttccttccttccctccctccctccctcccactagatagggagtgggtcttgaggattgga

SEQ ID NO: 469823 - DNA, 489 bp, Homo sapiens
tgctgtacctttcttaacatttgtcttctctagatactttccagttaaattaacaatagaacatataaattttgctgagcgtcatagcagaaaattggcttggaatggttttagkttaataaaaaatgggagtacctgagatgtagcagaaataaatttcaccatttgagagcaaatcatttcaacacacatgtaagaatatcattttaatttcctttaaaacattttatctttcaggtgcttcaagaagatctagaacaagaacaagtcagggtcaattctctcactcacatggtggtggtagttgatgaatctagtggagatcacgcaactgctgctttggaagaacaacttaaggtcagattattttgcttagtaaactaaatatgtcctttaaaagaactataacttgaaaagtattttaaaaatttagaatgcaatttatatattaaaatacttagaatacaatatgtgtacaatatacacaca

SEQ ID NO: 469824 - DNA, 489 bp, Homo sapiens
tgctgtacctttcttaacatttgtcttctctagatactttccagttaaattaacaatagaacatataaattttgctgagcgtcatagcagaaaattggcttggaatggttttaggttaataaaaaatrggagtacctgagatgtagcagaaataaatttcaccatttgagagcaaatcatttcaacacacatgtaagaatatcattttaatttcctttaaaacattttatctttcaggtgcttcaagaagatctagaacaagaacaagtcagggtcaattctctcactcacatggtggtggtagttgatgaatctagtggagatcacgcaactgctgctttggaagaacaacttaaggtcagattattttgcttagtaaactaaatatgtcctttaaaagaactataacttgaaaagtattttaaaaatttagaatgcaatttatatattaaaatacttagaatacaatatgtgtacaatatacacaca

SEQ ID NO: 469825 - DNA, 421 bp, Homo sapiens
ttaattcatgggctaaatgactcatctcattccctaaactttcttttatataaatataatcctcctagtttttgctgtctgacattttcatacttaactaaaatcagagcaaagaatatacacataaaagaagcacaaaacccaaatataagatcatttaactatttggattttttggacagtattttccactaaagatgatgtagtctttcctgagttgcctcattataaaccaacattccattcaaattgccttggaatttattagcatattgaaytatagcacatgacctgaaaacatccaaattatatcttagtagaaggcatgtggtacagtcacaaaagagaatgagatggggagtctagaagacttagcttctaggtgtagaacctaagtctccctcataccttgctcccagat

SEQ ID NO: 469826 - DNA, 334 bp, Homo sapiens
gcccacacatttcataaatgatttgttctgtagattttcaatttagtagtacatagctacaagaatatatttccccctaagattacattttccaaaaacactgaatcctatttgctcagctttctcatgatgtgattattgtcagaattcccatctggactgcgggtccctgttttagactaagtgtacatatttctaaaatgttgtgcaatgtcctaaatctcaatgaatgctaatgctactatttgttgtcatctcgtccatgaagcccttctcatctgttagtttgaatgggcaactccctttcctttcrtggtcagtattactcatacct

SEQ ID NO: 469827 - DNA, 492 bp, Homo sapiens
atttgaacttcattttttacatgaaattattaacctaactccagcttgggggataatgattaatatgactatatgtgaaataaaaggatcactttctaggcagggcgtggtggctcatgcctgtaatcccagcactttgggaggccgaggagagtgaatcacttgaggtcagcagttcaaaaccatcctggccaacatggtggaaccccatctctactaaaaataaaaaaattagccgggtgtggtggtgggtgcctgtaatcccagctactcgggaggctgaggcaggagaatcacttgaccctggggggtggatgttgcagtgacccaagatcgcgccactgcgctccagcctgggtgaaagagcgagactctctctcaaaaaaaaaaaaaaaaaaaatcwctctctaagtatggatagaaagcactagggaagaaataataagccaagtctccacatgtttgttcaatttcaggcaacagtgggtctaa

SEQ ID NO: 469828 - DNA, 492 bp, Homo sapiens
atttgaacttcattttttacatgaaattattaacctaactccagcttgggggataatgattaatatgactatatgtgaaataaaaggatcactttctaggcagggcgtggtggctcatgcctgtaatcccagcactttgggaggccgaggagagtgaatcacttgaggtcagcagttcaaaaccatcctggccaacatggtggaaccccatctctactaaaaataaaaaaattagccgggtgtggtggtgggtgcctgtaatcccagctactcgggaggctgaggcaggagaatcacttgaccctggggggtggatgttgcagtgacccaagatcgcgccactgcgctccagcctgggtgaaagagcgagactctctctcaaaaaaaaaaaaaaaaaaaatcactctctaagtatggatagaaagcacyagggaagaaataataagccaagtctccacatgtttgttcaatttcaggcaacagtgggtctaa

SEQ ID NO: 469829 - DNA, 446 bp, Homo sapiens
tttacaggagttaatagaagataaactctgcattagatgaagataattgtaaaaaggttctaggaacagtgtatgactgatcaaaatggattttaaaaactttaaaagaaatatcactatattgacaggcaagttaatatatattcatgtatgtcagcgagaaagtaggacaagagaaaaaggaacttggtcagtcacgggaggtggtctggtggaggagatttggcacaaagagtgagcaataaataggaggggaagactttttaaaaatayattattcaacttacaggatgctttatttttgtcaaattgagggcaggccataacccttcccacctactacagcccagatgagaacatgtaaagaactgaaaaagagaacaagcagcagacaagaaatatagagaggaaagagcccttcctggggtaacaaacaatagatgtac

SEQ ID NO: 469830 - DNA, 470 bp, Homo sapiens
aagaaggtgatttacaggagttaatagaagataaactctgcattagatgaagataattgtaaaaaggttctaggaacagtgtatgactgatcaaaatggattttaaaaactttaaaagaaatatcactatattgacaggcaagttaatatatattcatgtatgtcagcgagaaagtaggacaagagaaaaaggaacttggtcagtcacgggaggtggtctggtggaggagatttggcacaaagagtgagcaataaataggaggggaagactttttaaaaatacattattcaacttacaggatgctttatttttgtcaaattgagggcaggccataacccttcccacctactacagcccagatgagaacatgtaaagaactgaaraagagaacaagcagcagacaagaaatatagagaggaaagagcccttcctggggtaacaaacaatagatgtaccgtcaaggacacaa

SEQ ID NO: 469831 - DNA, 644 bp, Homo sapiens
tgtttctgagcttcctgctaagattgcatctgagactgcaattttatctgtttataggtttggttttcttgcaggcttttactgagagaaatatttgaaaacaagaaatatcgtccaaactgttcatttcacaggtaagaaaatgaattcagaaagcttgcatgcctttcaaagagtaattaaatattgtttttcaggtttcagcccacagcaaacccactagaaaaacaattcctcagcatgccaaatgttaaatgttgtccttaattaacttattctgaaatgttttctgggcagtactttctcaaactttggttataaaataatcatctstccacctgtactgggatgattgtatcataagacagagatgccactttcgcctatctggctccaattatgcaaaacagcatttcctttaattctgtttatctttgtgggaagaacagaggtcaaccaaatgcaagatcttccttttatttcccattttcttatttcctttacttgggaaaaatctgtaaggaaacatggccctgtgtagtgtctttggctattttgacttccagtaggaaaaagtgttatcagttaccatgacaaccacattttcccagagctccctgctgcaactcatttgcactaaacaa

SEQ ID NO: 469832 - DNA, 539 bp, Homo sapiens
gtgctcaactttgatttaaatatatttaggcccctgggtttgcctttgtgctaacttgttaaaaacatattttttaaaaagtaaaacatatactttgcaaaaaaaaaaaagagggagagagtgaagataaaayataaaatgccctgtgattcttccagcaagattgctttggctgttttcttagaaatgtttgatgcccaggctgggcgcggtggctcacgcctgtaatcccagcactttgggaggccgaggtgggcggatcacgaggtcaggagatagagaccatcctggctaacacagtgaaaccccatctctactaaaaatacaaagaattagccagatgtggtagcaggcgcctgtagtcccagctacccgggaggctgaggcagaagaatggcgtgaaccaaggaggcagagcttgcagtgagccaagattgcgccactgcactccagcctgggcgacagagcgagactctgtctcaaaaaaaaaaaaaaaaaaaaaaagaaatgtatgatgcccaaagaaatgcttgcagatc

SEQ ID NO: 469833 - DNA, 539 bp, Homo sapiens
gtgctcaactttgatttaaatatatttaggcccctgggtttgcctttgtgctaacttgttaaaaacatattttttaaaaagtaaaacatatactttgcaaaaaaaaaaaagagggagagagtgaagataaaatataaaatgccctgtgattcttccagcaagattgctttggctgttttcttagaaatgtttgatgcccaggctgggcgcggtggctcacgcctgtaatcccagcactttgggaggccgaggtgggcggatcacgaggtcaggagatagagaccatcctggctaacacagtgaaaccccatctctactaaaaatacaaagaattagccagatgtggtagcaggcgcctgtagtcccagctacccgggaggctgaggcagaagaatggcgtgaaccaaggaggcagagcttgcagtgagccragattgcgccactgcactccagcctgggcgacagagcgagactctgtctcaaaaaaaaaaaaaaaaaaaaaaagaaatgtatgatgcccaaagaaatgcttgcagatc

SEQ ID NO: 469834 - DNA, 386 bp, Homo sapiens
attctgttttgacatttataaaagtmttaggtatctcgtttttgtacataaatccttttatactatttgcaatttcaaaatactataaatgaaattatgactgccttgacagggaggttaaattctttccacagacttttaaaaaattgcacatgctacccccacccctactcttcccaattcctaggtatcctactttcccaggttcaaaaccactgtcctaagaggaaatgtgctgctctaatcagatcagcttgagaaaactcactcagagagtaggagagctaacaatcagggaacctgtgtgactagaggaagacagggatgcctggagaaaacaacctgacctgcccgcacagagggacccttgttccagaaaccaggag

SEQ ID NO: 469835 - DNA, 638 bp, Homo sapiens
tgtaaggtttagtgtgccaaggaagatggggatgtgagctgcccaaatcaggggaagttcatcgcacagggaagaaaagtgaggctctgctgggaagggagtagggggtagcccaccagacaggaaggatggggaaagccctactgttggaaaaagagcagttcagaggagagcccgcaggagatgggataggaaatagcctgtccctgatgtgtcccctagaaagaccagaagcttaccccagggtggactatgacagcagacacgagcaggatacccagtgaccaaggagactaatggcatccccacagaggaagagaaacccggcgaccacacagaaacccacacagaccaacttccttcccctaaagctcctgccctcatccagacaccattttgactgagagatgccagggtagagaagcccataaggctgatgtagatcatttactcaatggagatgttcaaaccaaagaargctaggatctttaaatggcaaatttacatttccctggccatggcccaccactggcaggaagaagggaggcttggtcccagaacagttgcaggaaccaggcttttgctggtcttcctggcatgactgagttctcttgcataagttgttgatcctatatacc

SEQ ID NO: 469836 - DNA, 588 bp, Homo sapiens
tggattcagtgatagatggtggaggtcccaccagaagggcactctgaatggataaaatctgtgtttgttagaaaagttgccaactacatgccaggtgagagaaagaaatcacctggctgttcctaaagggggcctcccttagaggggctgggggaaagagtgcccatggtgggagaggtgtgggtgatcagggaggcaagaaggagtcttgtactgggactgtactctgacctgggcctctgactcctgctttggccctgtcagtagcttgatatgtaacctgggggatctcctcactagtgggagagcatgcaggatccagctttctgggactcgagcaccctgtgaatgaatgtgattctggaaactcacttctcaaacaatggctgagagagcatttacacaaagaccaggactagcctccaggagacgaggaccagcctscagcagtgtggtctgagccctgggtacaggacggcttccccagcatcatgagtgctcccctctgtatagctgagaatttcactccacccctgagcttcagccacagaagaaagctaacacaccttgcccgcagtgtttctgaac

SEQ ID NO: 469837 - DNA, 601 bp, Homo sapiens
gtttttctagatcagccttcctcaagtactcgctcagacgcagcgagccaggctcggtcgagacatgagtgtggcgactcaaaattccccagagggggaacacggtaaacctattcccccagtttgctgaaaaagagccacgcttccagcttctagagactcttttaagctcaattttaaaaatatatattttttcttttttggtccaaagtgacggtggttaaatgaacaacagtttctgtcttatttactaacccttgtatagtcctatgtacgttcaattaacgttgagaatgtgggttctgattaagatgaaacatgttaaaaacgatgaacattaatttgctcatcgcgttaaacctgttgaatgaatatgcaagatacagaaactattattacaggatcaagattttatgcagtggactgagatctgaaagttccgtgaatgaatgctcctgtatctttctaaataaaatggcattttatttckaaatgaaatataagtctgaatctttctaaataaaaaggcatgttgggaaattaaagcattaagttccatgttattttaatgctaaaaggacaagtgattctgttaaactga
